United States Patent Application Publication US 2012/0159672 A1 - sequence listing, part 10

SEQ ID NO: 21537 - DNA, 1239 bp, Zea mays subsp. mays
  misc_feature (1)..(1239): Ceres Seq. ID no. 13587439
gcactgcttggaatccaacgagccaatcattcaaatcctccccggaaccgcgttgagcagggcacggtcgattggatctagggtgagggtccgtcgccgaagaaactcgcaggcggtcacgaggaggcggcgggggagggcgggggagatggcctcggaggagatgacggcgacggaggtggccgctgctggacttgaagccgcacccggagggcggcttctacaccgagaccttccgcgacggctccatcacgctcaccacgtcccagctcccgccccactttgctctgggtggtgatccttcgccgagccaccagttgatctctcacgatttgggggttccctcattcttctccaacctccaggcattggtggacgggatggctagtcagttgaagttgcagggtgcttctgttccagagggagcttcgtctctggcgcgttggaatccggtgctgcttcagcagcgtgtttctgacttagaggcggcgaatgctgatatggcccgacagtattctgttcttgaagaaaaacattctcaaagccaggctgaactggtccggcggtgctctgatcttgaggaaaagtattcccaaagccagactgggctggcccaggtttctgctgctctgaatgatgctaacatgctaaattctactctccgcgctcagctcgattatgaaaaggaagaaaaatgtgcccttgttacttctcgtgacaatcttgataggctatatcgtgactccagcaactcgttgaccatcctggagaggagtcatcgcttcaccatggaggagttagacaatcatcgttataagctgcaggaatccatggacgacgtgattcgcctcaggcagttgaaatcggctaaagatgatgtcatcaaggaactacgtgcttccaagaagtccatcgcccaggagctggagaccgctcagttggctgtcaaggttgctgaagaaacttccgctactctgagggcccagcgcaacagagctatggataaagccattcgcgcagggcggatcttgatgaggagacctggtgtggttgtccccgacgacataagggctgatgtgaacgctactcctgattcctcaagttgctcttcttcgtcggttgctcctgagaagaatgttgcaaaatagaaaaacattgcgtgctttgagcgcgcggttaacgtgctcggatattttgttagaggacgcccgcttaatattgaatgctactattattccc

SEQ ID NO: 21538 - protein, 255 aa, Zea mays subsp. mays
  peptide (1)..(255): Ceres Seq. ID no. 13587440
  misc_feature (1)..(255): NCBI GI NO: 33113962 NR Description: putative gypsy-type retrotransposon [Zea mays]
MASQLKLQGASVPEGASSLARWNPVLLQQRVSDLEAANADMARQYSVLEEKHSQSQAELVRRCSDLEEKYSQSQTGLAQVSAALNDANMLNSTLRAQLDYEKEEKCALVTSRDNLDRLYRDSSNSLTILERSHRFTMEELDNHRYKLQESMDDVIRLRQLKSAKDDVIKELRASKKSIAQELETAQLAVKVAEETSATLRAQRNRAMDKAIRAGRILMRRPGVVVPDDIRADVNATPDSSSCSSSSVAPEKNVAK

SEQ ID NO: 21539 - protein, 215 aa, Zea mays subsp. mays
  peptide (1)..(215): Ceres Seq. ID no. 13587441
  misc_feature (1)..(215): NCBI GI NO: 33113962 NR Description: putative gypsy-type retrotransposon [Zea mays]
MARQYSVLEEKHSQSQAELVRRCSDLEEKYSQSQTGLAQVSAALNDANMLNSTLRAQLDYEKEEKCALVTSRDNLDRLYRDSSNSLTILERSHRFTMEELDNHRYKLQESMDDVIRLRQLKSAKDDVIKELRASKKSIAQELETAQLAVKVAEETSATLRAQRNRAMDKAIRAGRILMRRPGVVVPDDIRADVNATPDSSSCSSSSVAPEKNVAK

SEQ ID NO: 21540 - protein, 167 aa, Zea mays subsp. mays
  peptide (1)..(167): Ceres Seq. ID no. 13587442
  misc_feature (1)..(167): NCBI GI NO: 33113962 NR Description: putative gypsy-type retrotransposon [Zea mays]
MLNSTLRAQLDYEKEEKCALVTSRDNLDRLYRDSSNSLTILERSHRFTMEELDNHRYKLQESMDDVIRLRQLKSAKDDVIKELRASKKSIAQELETAQLAVKVAEETSATLRAQRNRAMDKAIRAGRILMRRPGVVVPDDIRADVNATPDSSSCSSSSVAPEKNVAK

SEQ ID NO: 21541 - DNA, 681 bp, Zea mays subsp. mays
  misc_feature (1)..(681): Ceres Seq. ID no. 15180320
gacgcacaccaagtctactctcacctcctccgtctctcagatccacgctgcctagttgttcggacttcagaccccgccgtgcgctgcccatggccgcgggtcgcggcgacgccgcgagcatggtggcagtgggtctggtgtggggcgccaccaacgcgctgatgcggcggggcgcgctcgtctgggaccgccgcgcccgtgcctgcccctccggtaacgtcctccggcggtgggcggagctgctcctgacgtggcagtactcggcgccgttcgccgccaacctgagcgcgtccgcggccttcttcgcgctcctcggcgccgcgcccatctccgtggccgtccccgtcaccaacgccgtcactttcgccgccacggccgccgccgccgcggccctcggcgagcgcgtccggccagcgcccgcggtccttggtaccacgctcatcgtcctcggcgtctgggtctgcatctcgtagacttaggctgaagatctgcttggtttggttctggcattacagtcgcatgggaaataaaaaggaagttttgagggcaattctcaggattccatttcacccctctgtgctgtgttgccaattgccatatgagtgaattatgcccagtttgttgatggcagcggcgtttcattagctagatggtcagaatataatgcagtttcgttctggt

SEQ ID NO: 21542 - protein, 156 aa, Zea mays subsp. mays
  peptide (1)..(156): Ceres Seq. ID no. 15180321
  misc_feature (36)..(155): NCBI GI NO: 15239774 NR Description: expressed protein [Arabidopsis thaliana]
  misc_feature (39)..(156): NCBI GI NO: 28829061 NR Description: similar to putative protein; protein id:At5g19570
  misc_feature (37)..(150): NCBI GI NO: 24652124 NR Description: CG12929-PA [Drosophila melanogaster]
  misc_feature (30)..(156): NCBI GI NO: 21361814 NR Description: hypothetical protein RP4-622L5 [Homo sapiens]
  misc_feature (30)..(156): NCBI GI NO: 13436137 NR Description: Similar to RIKEN cDNA 4933407D05 gene
  misc_feature (30)..(156): NCBI GI NO: 12855603 NR Description: unnamed protein product [Mus musculus]
  misc_feature (30)..(156): NCBI GI NO: 22267454 NR Description: RIKEN cDNA 2510006D16 [Mus musculus]
  misc_feature (24)..(134): NCBI GI NO: 31239883 NR Description: ENSANGP00000014009 [Anopheles gambiae]
RTPSLLSPPPSLRSTLPSCSDFRPRRALPMAAGRGDAASMVAVGLVWGATNALMRRGALVWDRRARACPSGNVLRRWAELLLTWQYSAPFAANLSASAAFFALLGAAPISVAVPVTNAVTFAATAAAAAALGERVRPAPAVLGTTLIVLGVWVCIS

SEQ ID NO: 21543 - protein, 127 aa, Zea mays subsp. mays
  peptide (1)..(127): Ceres Seq. ID no. 15180322
  misc_feature (7)..(126): NCBI GI NO: 15239774 NR Description: expressed protein [Arabidopsis thaliana]
  misc_feature (10)..(127): NCBI GI NO: 28829061 NR Description: similar to putative protein; protein id:At5g19570
  misc_feature (8)..(121): NCBI GI NO: 24652124 NR Description: CG12929-PA [Drosophila melanogaster]
  misc_feature (1)..(127): NCBI GI NO: 21361814 NR Description: hypothetical protein RP4-622L5 [Homo sapiens]
  misc_feature (1)..(127): NCBI GI NO: 13436137 NR Description: Similar to RIKEN cDNA 4933407D05 gene
  misc_feature (1)..(127): NCBI GI NO: 12855603 NR Description: unnamed protein product [Mus musculus]
  misc_feature (1)..(127): NCBI GI NO: 22267454 NR Description: RIKEN cDNA 2510006D16 [Mus musculus]
  misc_feature (1)..(105): NCBI GI NO: 31239883 NR Description: ENSANGP00000014009 [Anopheles gambiae]
MAAGRGDAASMVAVGLVWGATNALMRRGALVWDRRARACPSGNVLRRWAELLLTWQYSAPFAANLSASAAFFALLGAAPISVAVPVTNAVTFAATAAAAAALGERVRPAPAVLGTTLIVLGVWVCIS

SEQ ID NO: 21544 - protein, 117 aa, Zea mays subsp. mays
  peptide (1)..(117): Ceres Seq. ID no. 15180323
  misc_feature (1)..(116): NCBI GI NO: 15239774 NR Description: expressed protein [Arabidopsis thaliana]
  misc_feature (1)..(117): NCBI GI NO: 28829061 NR Description: similar to putative protein; protein id:At5g19570
  misc_feature (1)..(111): NCBI GI NO: 24652124 NR Description: CG12929-PA [Drosophila melanogaster]
  misc_feature (1)..(117): NCBI GI NO: 21361814 NR Description: hypothetical protein RP4-622L5 [Homo sapiens]
  misc_feature (1)..(117): NCBI GI NO: 13436137 NR Description: Similar to RIKEN cDNA 4933407D05 gene
  misc_feature (1)..(117): NCBI GI NO: 12855603 NR Description: unnamed protein product [Mus musculus]
  misc_feature (1)..(117): NCBI GI NO: 22267454 NR Description: RIKEN cDNA 2510006D16 [Mus musculus]
  misc_feature (1)..(95): NCBI GI NO: 31239883 NR Description: ENSANGP00000014009 [Anopheles gambiae]
MVAVGLVWGATNALMRRGALVWDRRARACPSGNVLRRWAELLLTWQYSAPFAANLSASAAFFALLGAAPISVAVPVTNAVTFAATAAAAAALGERVRPAPAVLGTTLIVLGVWVCIS

SEQ ID NO: 21545 - DNA, 977 bp, Zea mays subsp. mays
  misc_feature (1)..(977): Ceres Seq. ID no. 14302179
tctggccttaaaaacctctgctcccccgtctcggcgcgattgccatcgccatcgccatcgccatcgcgcaccgcctccccgtgtcccctccttctcgcccggcaccgtcgagctcggctgtggaaacagaacaaacccatcaaccatggcgaactcggcgtcggggatggccgtgagcgacgagtgcaagctcaagttccaggagctcaagtcgaagcgaagcttccggttcatcacgttcaagatcaacgagcagacgcagcaggtggtggtggacaggctggggcagccgggcgacacctacgacgacttcaccggctccatgcccgagagcgagtgccgctacgccgtcttcgacttcgacttcaccaccgacgagaactgccagaagagcaagatcttgttcatctcctggtccccggacacctcgagggtcaggagcaagatgctgtacgcgagctccaaggaccggttcaagagggagctggagggcatccagctggagctgcaggccaccgaccccagcgagatgagcatggacattgtcagggcgcgagctctctgaagaggaagacgcgcatccgctcgcgcgatcgccatgcatgccccggaacgacagaagctgtttgtcttgcatcgaccggcggcctctgcatgtacccgtgtgccgttttttgcaccgccggtgccagtgttctcttactccatgtaaactactctagacagtgctcggtgagtacagctgctcggtgagtacggtgtcacagtcactccgtgtaggcagtgccatttcgaagacaatattgcaaaatttaactaacttggttttacaatgcgtttggttggaagtattcctccgggtcactaataattcatgctttgtatatacatgacgtggtcgtggtctatggaatatagcttaaaccattactagtataatacgttgtaacaacacatcaatcatatttgatttatag

SEQ ID NO: 21546 - protein, 250 aa, Zea mays subsp. mays
  peptide (1)..(250): Ceres Seq. ID no. 14302180
SGLKNLCSPVSARLPSPSPSPSRTASPCPLLLARHRRARLWKQNKPINHGELGVGDGRERRVQAQVPGAQVEAKLPVHHVQDQRADAAGGGGQAGAAGRHLRRLHRLHARERVPLRRLRLRLHHRRELPEEQDLVHLLVPGHLEGQEQDAVRELQGPVQEGAGGHPAGAAGHRPQRDEHGHCQGASSLKRKTRIRSRDRHACPGTTEAVCLASTGGLCMYPCAVFCTAGASVLLLHVNYSRQCSVSTAAR

SEQ ID NO: 21547 - protein, 187 aa, Zea mays subsp. mays
  peptide (1)..(187): Ceres Seq. ID no. 14302181
  misc_feature (60)..(186): Pfam Name: Pfam Description:  Cofilin/tropomyosin-type actin-binding protein
  misc_feature (49)..(187): NCBI GI NO: 38345587 NR Description: OSJNBb0012E24.5
  misc_feature (49)..(186): NCBI GI NO: 231509 NR Description: Actin-depolymerizing factor (ADF)
  misc_feature (49)..(185): NCBI GI NO: 15223471 NR Description: actin depolymerizing factor -related
  misc_feature (49)..(185): NCBI GI NO: 18411410 NR Description: actin-depolymerizing factor -related
  misc_feature (49)..(187): NCBI GI NO: 22857914 NR Description: pollen specific actin-depolymerizing factor 2
  misc_feature (49)..(186): NCBI GI NO: 22831338 NR Description: putative actin-depolymerizing factor 2
  misc_feature (56)..(185): NCBI GI NO: 7441448 NR Description: actin-depolymerizing factor F6N23
  misc_feature (49)..(187): NCBI GI NO: 18423381 NR Description: actin depolymerizing factor-related
  misc_feature (49)..(185): NCBI GI NO: 1168345 NR Description: Actin-depolymerizing factor 1
  misc_feature (56)..(187): NCBI GI NO: 15235159 NR Description: actin depolymerizing factor-related protein
LALKTSAPPSRRDCHRHRHRHRAPPPRVPSFSPGTVELGCGNRTNPSTMANSASGMAVSDECKLKFQELKSKRSFRFITFKINEQTQQVVVDRLGQPGDTYDDFTGSMPESECRYAVFDFDFTTDENCQKSKILFISWSPDTSRVRSKMLYASSKDRFKRELEGIQLELQATDPSEMSMDIVRARAL

SEQ ID NO: 21548 - protein, 139 aa, Zea mays subsp. mays
  peptide (1)..(139): Ceres Seq. ID no. 14302182
  misc_feature (12)..(138): Pfam Name: Pfam Description:  Cofilin/tropomyosin-type actin-binding protein
  misc_feature (1)..(139): NCBI GI NO: 38345587 NR Description: OSJNBb0012E24.5
  misc_feature (1)..(138): NCBI GI NO: 231509 NR Description: Actin-depolymerizing factor (ADF)
  misc_feature (1)..(137): NCBI GI NO: 15223471 NR Description: actin depolymerizing factor -related
  misc_feature (1)..(137): NCBI GI NO: 18411410 NR Description: actin-depolymerizing factor -related
  misc_feature (1)..(139): NCBI GI NO: 22857914 NR Description: pollen specific actin-depolymerizing factor 2
  misc_feature (1)..(138): NCBI GI NO: 22831338 NR Description: putative actin-depolymerizing factor 2
  misc_feature (8)..(137): NCBI GI NO: 7441448 NR Description: actin-depolymerizing factor F6N23
  misc_feature (1)..(139): NCBI GI NO: 18423381 NR Description: actin depolymerizing factor-related
  misc_feature (1)..(137): NCBI GI NO: 1168345 NR Description: Actin-depolymerizing factor 1
  misc_feature (8)..(139): NCBI GI NO: 15235159 NR Description: actin depolymerizing factor-related protein
MANSASGMAVSDECKLKFQELKSKRSFRFITFKINEQTQQVVVDRLGQPGDTYDDFTGSMPESECRYAVFDFDFTTDENCQKSKILFISWSPDTSRVRSKMLYASSKDRFKRELEGIQLELQATDPSEMSMDIVRARAL

SEQ ID NO: 21549 - DNA, 916 bp, Zea mays subsp. mays
  misc_feature (1)..(916): Ceres Seq. ID no. 15179538
ctccgcgtcgtccaggtcctcctcagatccgccaaacccgccgagacagagagatcgccatggccgcggcatcgcctccgctcctccccaccacggtcgtcccggcggccgcagcacccccgacacccgcgcccacggccatatcctccgcggacgccaccgacaccaacccagcggcgatccgggccttcctctcccgcctcctcgacaccacccggcgcgcgctgtcgggcgcccgcccctggtccgagctcgcggaccgctcggctctctcccgcccggagtccctcgccgaggccacgtcccgcttgcgcaagaacctggcctacttccgcgtcaactacgccgccgtggccgcgctgtgcctcgccgcggcgctcctggcgcaccccttctccctggccgcgctgctggcgctgctcgccgcctggtgcctcctctacgtgctccgccccgccgacgcgccccccgtctccgcgttcggccgcaccttctccgaccgcgaggtgctcggaggcctcgccgccgcctccgcgttcgtcgtcttcctcacgtcggtgggctcgctcatcttctccgcgctcgcgctggggaccgccatcgtctgcgcgcacggcgcgtgccgcgtgcccgaggacctcttcctcgacgatgttgaccaggctgccggcggcaccggcaacccgctgctgtcgctcatcgcctccgccaccggaggccgcgtctgatcatgagtctgtaatagatgctatgcttgaggtcactgccattttcttgatcgattattttcgcggaactatttatgcagctcaaaaattatactactatatatagctacggaaagcaacaaatcaaaccatatactggagtttgtttatgtatcatcgagcagaaatatattcttgttattcgtagc

SEQ ID NO: 21550 - protein, 277 aa, Zea mays subsp. mays
  peptide (1)..(277): Ceres Seq. ID no. 15179539
  misc_feature (30)..(241): Pfam Name: Pfam Description:  Formin Homology 2 Domain
  misc_feature (20)..(238): NCBI GI NO: 39596044 NR Description: Hypothetical protein CBG15933
  misc_feature (20)..(237): NCBI GI NO: 39596044 NR Description: Hypothetical protein CBG15933
  misc_feature (2)..(238): NCBI GI NO: 39596044 NR Description: Hypothetical protein CBG15933
  misc_feature (4)..(239): NCBI GI NO: 81286 NR Description: extensin - Volvox carteri (fragment)
  misc_feature (3)..(204): NCBI GI NO: 81286 NR Description: extensin - Volvox carteri (fragment)
  misc_feature (10)..(238): NCBI GI NO: 23017082 NR Description: hypothetical protein [Thermobifida fusca]
  misc_feature (1)..(242): NCBI GI NO: 14253159 NR Description: VMP3 protein [Volvox carteri f. nagariensis]
  misc_feature (42)..(244): NCBI GI NO: 2429362 NR Description: proline rich protein [Santalum album]
  misc_feature (11)..(242): NCBI GI NO: 23017082 NR Description: hypothetical protein [Thermobifida fusca]
  misc_feature (9)..(239): NCBI GI NO: 30684163 NR Description: proline-rich protein -related
LRVVQVLLRSAKPAETERSPWPRHRLRSSPPRSSRRPQHPRHPRPRPYPPRTPPTPTQRRSGPSSPASSTPPGARCRAPAPGPSSRTARLSPARSPSPRPRPACARTWPTSASTTPPWPRCASPRRSWRTPSPWPRCWRCSPPGASSTCSAPPTRPPSPRSAAPSPTARCSEASPPPPRSSSSSRRWARSSSPRSRWGPPSSARTARAACPRTSSSTMLTRLPAAPATRCCRSSPPPPEAASDHESVIDAMLEVTAIFLIDYFRGTIYAAQKLYYYI

SEQ ID NO: 21551 - protein, 241 aa, Zea mays subsp. mays
  peptide (1)..(241): Ceres Seq. ID no. 15179540
  misc_feature (20)..(224): NCBI GI NO: 15224494 NR Description: expressed protein [Arabidopsis thaliana]
  misc_feature (37)..(236): NCBI GI NO: 15239101 NR Description: expressed protein [Arabidopsis thaliana]
  misc_feature (37)..(236): NCBI GI NO: 18072825 NR Description: prenylated Rab receptor 2 [Arabidopsis thaliana]
  misc_feature (20)..(224): NCBI GI NO: 15241022 NR Description: expressed protein [Arabidopsis thaliana]
  misc_feature (22)..(241): NCBI GI NO: 15226664 NR Description: expressed protein [Arabidopsis thaliana]
  misc_feature (37)..(241): NCBI GI NO: 15228824 NR Description: expressed protein [Arabidopsis thaliana]
  misc_feature (37)..(241): NCBI GI NO: 15450978 NR Description: putative protein [Arabidopsis thaliana]
  misc_feature (26)..(226): NCBI GI NO: 15240698 NR Description: expressed protein [Arabidopsis thaliana]
  misc_feature (25)..(238): NCBI GI NO: 40539036 NR Description: putative prenylated rab acceptor protein
  misc_feature (19)..(225): NCBI GI NO: 34897194 NR Description: putative prenylated Rab receptor
PRRPGPPQIRQTRRDREIAMAAASPPLLPTTVVPAAAAPPTPAPTAISSADATDTNPAAIRAFLSRLLDTTRRALSGARPWSELADRSALSRPESLAEATSRLRKNLAYFRVNYAAVAALCLAAALLAHPFSLAALLALLAAWCLLYVLRPADAPPVSAFGRTFSDREVLGGLAAASAFVVFLTSVGSLIFSALALGTAIVCAHGACRVPEDLFLDDVDQAAGGTGNPLLSLIASATGGRV

SEQ ID NO: 21552 - protein, 222 aa, Zea mays subsp. mays
  peptide (1)..(222): Ceres Seq. ID no. 15179541
  misc_feature (1)..(205): NCBI GI NO: 15224494 NR Description: expressed protein [Arabidopsis thaliana]
  misc_feature (18)..(217): NCBI GI NO: 15239101 NR Description: expressed protein [Arabidopsis thaliana]
  misc_feature (18)..(217): NCBI GI NO: 18072825 NR Description: prenylated Rab receptor 2 [Arabidopsis thaliana]
  misc_feature (1)..(205): NCBI GI NO: 15241022 NR Description: expressed protein [Arabidopsis thaliana]
  misc_feature (3)..(222): NCBI GI NO: 15226664 NR Description: expressed protein [Arabidopsis thaliana]
  misc_feature (18)..(222): NCBI GI NO: 15228824 NR Description: expressed protein [Arabidopsis thaliana]
  misc_feature (18)..(222): NCBI GI NO: 15450978 NR Description: putative protein [Arabidopsis thaliana]
  misc_feature (7)..(207): NCBI GI NO: 15240698 NR Description: expressed protein [Arabidopsis thaliana]
  misc_feature (6)..(219): NCBI GI NO: 40539036 NR Description: putative prenylated rab acceptor protein
  misc_feature (1)..(206): NCBI GI NO: 34897194 NR Description: putative prenylated Rab receptor
MAAASPPLLPTTVVPAAAAPPTPAPTAISSADATDTNPAAIRAFLSRLLDTTRRALSGARPWSELADRSALSRPESLAEATSRLRKNLAYFRVNYAAVAALCLAAALLAHPFSLAALLALLAAWCLLYVLRPADAPPVSAFGRTFSDREVLGGLAAASAFVVFLTSVGSLIFSALALGTAIVCAHGACRVPEDLFLDDVDQAAGGTGNPLLSLIASATGGRV

SEQ ID NO: 21553 - DNA, 865 bp, Zea mays subsp. mays
  misc_feature (1)..(865): Ceres Seq. ID no. 13586237
gaatcgtcttattatattatacaaaacaaatagaaaaaattaaaaacgagaacataatagactaacttatttcttaaacgagaaaatatataatgactactccgtatagcattaattaatatactcctcgcaaaacgatatagaagttgtagtacggactttggctggccacccacctcccgtcccgtcttgaaccatccacacgaacacaacacgcctctcctctactagacttgttttttccgtccatccatccatacgttatacatttcgtttgttccacctgcgcaactgcgacggggataattacgtcttccagatgacgacggcggcatggccgcggccacgcctcctcctcctcctcccccagcctggattcctccgctcggtctgccacggtctctgcgcccgctgtctcttctgcttcctgctgctcctcgccttcgcctgcagctccagctccggacgggtggtggtcaccagcttgcctggcttcgacggcgacctccccttccacctcgaaacagggtgcgcgtgcccgcgtggcgtgtctactagtagtatcctccttcttcttcattcattcatcctggtggtgtactactagactactactagtagctcacgcgcgcggcacatgtagatgtagcctctaaccaccgttgctgccctgaaactgaaaactaaggtacgtggaggtggaggaggacgccggcgtggagctcttctactacttcgtccaggccgagtccggcgccgccgccgccgccgatgacacccctttcctcttctggctcaccggcggcgaccgctgctccgtcttcagcggcctcgcctacgagatcggtacgccaagtatttggat

SEQ ID NO: 21554 - protein, 95 aa, Zea mays subsp. mays
  peptide (1)..(95): Ceres Seq. ID no. 13586238
  misc_feature (32)..(70): NCBI GI NO: 28273381 NR Description: putative glucose acyltransferase
  misc_feature (2)..(70): NCBI GI NO: 37530314 NR Description: putative serine carboxypeptidase
  misc_feature (33)..(70): NCBI GI NO: 28273383 NR Description: putative serine carboxypeptidase
  misc_feature (35)..(70): NCBI GI NO: 38344210 NR Description: OSJNBb0051N19.2
MTTAAWPRPRLLLLLPQPGFLRSVCHGLCARCLFCFLLLLAFACSSSSGRVVVTSLPGFDGDLPFHLETGCACPRGVSTSSILLLLHSFILVVYY

SEQ ID NO: 21555 - protein, 74 aa, Zea mays subsp. mays
  peptide (1)..(74): Ceres Seq. ID no. 13586239
MAAATPPPPPPPAWIPPLGLPRSLRPLSLLLPAAPRLRLQLQLRTGGGHQLAWLRRRPPLPPRNRVRVPAWRVY

SEQ ID NO: 21556 - DNA, 940 bp, Zea mays subsp. mays
  misc_feature (1)..(940): Ceres Seq. ID no. 13600483
aataaatagtctcgctccgctggccggcaactggcaccagcaccgaggcaggagcggcgatccattccacacaaccaccactgctcttgccccagcccgcctcaggagttgccagatctgccccggtcacaggaactccgactccgagccctctccaatggcggttaaggtctacgtcgtgtactattccatgtatggacatgttggcaaactagctgaagagatccagaaaggtgcctcgtctgttgaaggtgttgaagctaaaacatggctggtccctgaaaccctccctgaggaagtgcttggaaagatgggcgcaccccctaagcctgacgtgccagtcatcacgccgcaagaactcgcagaggccgacggaatcctcttcgggttcccaacgaggttcggaatgatggcagcgcagatgaaggcgttcttcgatgccactggtgggctctggagggagcagagccttgccggcaagcctgccggcgtcttcttctgcactggatcccagggtggtggccatgagacgacagcgttgacagcgatcacccagttgacgcaccacggcatggtgttcgtgcctgtgggctacaccttcggcgccaagctgttcggcatggaccaggttcagggcggcagcccctacggcgccggcacgttcgccgccgacggctcgaggtggccgagcgaggtggagctggagcacgccttccaccaggggaagtacttcgcaggcatcgccaagaagctcaagggttcagcctgatctacacatatacccttgtcggatatcataaaaaacacttattacagattcgtctaacccatcaatagatcggtctgttctctcgtggtgtctggatgttgtgtggctcagtggaactttcatgctacggtgactttgttgtaatctggagttggaatatcgttgtttcgc

SEQ ID NO: 21557 - protein, 255 aa, Zea mays subsp. mays
  peptide (1)..(255): Ceres Seq. ID no. 15218945
  misc_feature (53)..(255): NCBI GI NO: 34910128 NR Description: putative 1,4-benzoquinone reductase
  misc_feature (53)..(254): NCBI GI NO: 5031275 NR Description: unknown [Prunus armeniaca]
  misc_feature (56)..(254): NCBI GI NO: 21068664 NR Description: putative quinone oxidoreductase [Cicer arietinum]
  misc_feature (53)..(255): NCBI GI NO: 38636776 NR Description: putative quinone-oxidoreductase QR2
  misc_feature (53)..(254): NCBI GI NO: 15239652 NR Description: quinone reductase, putative [Arabidopsis thaliana]
  misc_feature (53)..(255): NCBI GI NO: 30687535 NR Description: quinone reductase family [Arabidopsis thaliana]
  misc_feature (53)..(252): NCBI GI NO: 12484052 NR Description: quinone-oxidoreductase QR2
  misc_feature (53)..(255): NCBI GI NO: 7445353 NR Description: hypothetical protein M4I22
  misc_feature (53)..(252): NCBI GI NO: 2564066 NR Description: LEDI-3 protein [Lithospermum erythrorhizon]
  misc_feature (90)..(255): NCBI GI NO: 37724581 NR Description: putative quinone reductase [Vitis vinifera]
INSLAPLAGNWHQHRGRSGDPFHTTTTALAPARLRSCQICPGHRNSDSEPSPMAVKVYVVYYSMYGHVGKLAEEIQKGASSVEGVEAKTWLVPETLPEEVLGKMGAPPKPDVPVITPQELAEADGILFGFPTRFGMMAAQMKAFFDATGGLWREQSLAGKPAGVFFCTGSQGGGHETTALTAITQLTHHGMVFVPVGYTFGAKLFGMDQVQGGSPYGAGTFAADGSRWPSEVELEHAFHQGKYFAGIAKKLKGSA

SEQ ID NO: 21558 - protein, 203 aa, Zea mays subsp. mays
  peptide (1)..(203): Ceres Seq. ID no. 15218946
  misc_feature (1)..(203): NCBI GI NO: 34910128 NR Description: putative 1,4-benzoquinone reductase
  misc_feature (1)..(202): NCBI GI NO: 5031275 NR Description: unknown [Prunus armeniaca]
  misc_feature (4)..(202): NCBI GI NO: 21068664 NR Description: putative quinone oxidoreductase [Cicer arietinum]
  misc_feature (1)..(203): NCBI GI NO: 38636776 NR Description: putative quinone-oxidoreductase QR2
  misc_feature (1)..(202): NCBI GI NO: 15239652 NR Description: quinone reductase, putative [Arabidopsis thaliana]
  misc_feature (1)..(203): NCBI GI NO: 30687535 NR Description: quinone reductase family [Arabidopsis thaliana]
  misc_feature (1)..(200): NCBI GI NO: 12484052 NR Description: quinone-oxidoreductase QR2
  misc_feature (1)..(203): NCBI GI NO: 7445353 NR Description: hypothetical protein M4I22
  misc_feature (1)..(200): NCBI GI NO: 2564066 NR Description: LEDI-3 protein [Lithospermum erythrorhizon]
  misc_feature (38)..(203): NCBI GI NO: 37724581 NR Description: putative quinone reductase [Vitis vinifera]
MAVKVYVVYYSMYGHVGKLAEEIQKGASSVEGVEAKTWLVPETLPEEVLGKMGAPPKPDVPVITPQELAEADGILFGFPTRFGMMAAQMKAFFDATGGLWREQSLAGKPAGVFFCTGSQGGGHETTALTAITQLTHHGMVFVPVGYTFGAKLFGMDQVQGGSPYGAGTFAADGSRWPSEVELEHAFHQGKYFAGIAKKLKGSA

SEQ ID NO: 21559 - protein, 192 aa, Zea mays subsp. mays
  peptide (1)..(192): Ceres Seq. ID no. 15218947
  misc_feature (1)..(192): NCBI GI NO: 34910128 NR Description: putative 1,4-benzoquinone reductase
  misc_feature (1)..(191): NCBI GI NO: 5031275 NR Description: unknown [Prunus armeniaca]
  misc_feature (1)..(191): NCBI GI NO: 21068664 NR Description: putative quinone oxidoreductase [Cicer arietinum]
  misc_feature (1)..(192): NCBI GI NO: 38636776 NR Description: putative quinone-oxidoreductase QR2
  misc_feature (1)..(191): NCBI GI NO: 15239652 NR Description: quinone reductase, putative [Arabidopsis thaliana]
  misc_feature (1)..(192): NCBI GI NO: 30687535 NR Description: quinone reductase family [Arabidopsis thaliana]
  misc_feature (1)..(189): NCBI GI NO: 12484052 NR Description: quinone-oxidoreductase QR2
  misc_feature (1)..(192): NCBI GI NO: 7445353 NR Description: hypothetical protein M4I22
  misc_feature (1)..(189): NCBI GI NO: 2564066 NR Description: LEDI-3 protein [Lithospermum erythrorhizon]
  misc_feature (27)..(192): NCBI GI NO: 37724581 NR Description: putative quinone reductase [Vitis vinifera]
MYGHVGKLAEEIQKGASSVEGVEAKTWLVPETLPEEVLGKMGAPPKPDVPVITPQELAEADGILFGFPTRFGMMAAQMKAFFDATGGLWREQSLAGKPAGVFFCTGSQGGGHETTALTAITQLTHHGMVFVPVGYTFGAKLFGMDQVQGGSPYGAGTFAADGSRWPSEVELEHAFHQGKYFAGIAKKLKGSA

SEQ ID NO: 21560 - DNA, 838 bp, Zea mays subsp. mays
  misc_feature (1)..(838): Ceres Seq. ID no. 14312533
  misc_feature (809)..(809): n is a, c, t, g, unknown, or other
cttccactgcaggttcctaacccccacccacctcgcccaaattgcaaccttccccgagtgctccaggtcccgtggccggcccccagatcctctccaatcccaatccaagtatcgaacggatcccatcggtggcgctcgagcgagcgagtgcggccggaaccgagcgaagatgggcatctcgagcatgccggcgcccgaggacagcctgctggggttcgtgctgtacaacacggcggcgtcggtggcgatcctggcggggctggtgcgcgccgcgctgctgttcctgggcctggcggcggcggaggacgaggagccgcggcagcaggcggaggccgtgacggtcacggccgtggggcccagcctcgcggaccggttccggagcaggttccggccgtcgcgctacgggcggcgccggggcggggactgccgcgtgtgcctggtgcggttcgagacggagtcggtggtgcagcggctcccctgcggccacctcttccaccgcgcctgcctcgagacctggatcgactacgaccacgccacctgcccgctgtgccgccaccgcctcctgccccccgccgctgccgccgacgaggtgccccggattgcctgattagcgccctaggaattgagagtaggcgtagcactctgcacctcgcagcagcagtgtctctgtacaggtttttttttcttttcctttttgttcgggggagagagaggacagaacggagattgaaggaagaaaatggtggcaacaaagctgttccccctttcgtttctccgaagctctctgttgtctttattcattccaaaangtataatctactcgtatgaaccaagtacc

SEQ ID NO: 21561 - protein, 275 aa, Zea mays subsp. mays
  peptide (1)..(275): Ceres Seq. ID no. 14312534
  misc_feature (5)..(165): NCBI GI NO: 12240028 NR Description: translation initiation factor IF2
  misc_feature (7)..(167): NCBI GI NO: 17564308 NR Description: COLlagen structural gene (col-142)
  misc_feature (270)..(270): Xaa is any aa, unknown or other
LPLQVPNPHPPRPNCNLPRVLQVPWPAPRSSPIPIQVSNGSHRWRSSERVRPEPSEDGHLEHAGARGQPAGVRAVQHGGVGGDPGGAGARRAAVPGPGGGGGRGAAAAGGGRDGHGRGAQPRGPVPEQVPAVALRAAPGRGLPRVPGAVRDGVGGAAAPLRPPLPPRLPRDLDRLRPRHLPAVPPPPPAPRRCRRRGAPDCLISALGIESRRSTLHLAAAVSLYRFFFLFLFVRGRERTERRLKEENGGNKAVPPFVSPKLSVVFIHSKXYNLLV

SEQ ID NO: 21562 - protein, 201 aa, Zea mays subsp. mays
  peptide (1)..(201): Ceres Seq. ID no. 14312535
  misc_feature (142)..(183): Pfam Name: RING finger Pfam Description: Zinc finger, C3HC4 type
  misc_feature (57)..(196): NCBI GI NO: 20340241 NR Description: putative RING zinc finger protein-like protein
  misc_feature (57)..(134): NCBI GI NO: 15228108 NR Description: zinc finger
  misc_feature (133)..(188): NCBI GI NO: 15228108 NR Description: zinc finger
  misc_feature (57)..(184): NCBI GI NO: 25403249 NR Description: protein F21J9.24 [imported] - Arabidopsis thaliana
  misc_feature (109)..(189): NCBI GI NO: 18379162 NR Description: C3HC4-type zinc finger protein family (RHA2b)
  misc_feature (109)..(189): NCBI GI NO: 25410884 NR Description: probable RING-H2 finger protein RHA2b
  misc_feature (66)..(189): NCBI GI NO: 15229284 NR Description: zinc finger
  misc_feature (128)..(199): NCBI GI NO: 34903102 NR Description: unnamed protein product
  misc_feature (142)..(197): NCBI GI NO: 15233696 NR Description: zinc finger
  misc_feature (141)..(189): NCBI GI NO: 15233117 NR Description: BRH1 RING finger protein [Arabidopsis thaliana]
FHCRFLTPTHLAQIATFPECSRSRGRPPDPLQSQSKYRTDPIGGARASECGRNRAKMGISSMPAPEDSLLGFVLYNTAASVAILAGLVRAALLFLGLAAAEDEEPRQQAEAVTVTAVGPSLADRFRSRFRPSRYGRRRGGDCRVCLVRFETESVVQRLPCGHLFHRACLETWIDYDHATCPLCRHRLLPPAAAADEVPRIA

SEQ ID NO: 21563 - protein, 145 aa, Zea mays subsp. mays
  peptide (1)..(145): Ceres Seq. ID no. 14312536
  misc_feature (86)..(127): Pfam Name: RING finger Pfam Description: Zinc finger, C3HC4 type
  misc_feature (1)..(140): NCBI GI NO: 20340241 NR Description: putative RING zinc finger protein-like protein
  misc_feature (1)..(78): NCBI GI NO: 15228108 NR Description: zinc finger
  misc_feature (77)..(132): NCBI GI NO: 15228108 NR Description: zinc finger
  misc_feature (1)..(128): NCBI GI NO: 25403249 NR Description: protein F21J9.24 [imported] - Arabidopsis thaliana
  misc_feature (53)..(133): NCBI GI NO: 18379162 NR Description: C3HC4-type zinc finger protein family (RHA2b)
  misc_feature (53)..(133): NCBI GI NO: 25410884 NR Description: probable RING-H2 finger protein RHA2b
  misc_feature (10)..(133): NCBI GI NO: 15229284 NR Description: zinc finger
  misc_feature (72)..(143): NCBI GI NO: 34903102 NR Description: unnamed protein product
  misc_feature (86)..(141): NCBI GI NO: 15233696 NR Description: zinc finger
  misc_feature (85)..(133): NCBI GI NO: 15233117 NR Description: BRH1 RING finger protein [Arabidopsis thaliana]
MGISSMPAPEDSLLGFVLYNTAASVAILAGLVRAALLFLGLAAAEDEEPRQQAEAVTVTAVGPSLADRFRSRFRPSRYGRRRGGDCRVCLVRFETESVVQRLPCGHLFHRACLETWIDYDHATCPLCRHRLLPPAAAADEVPRIA

SEQ ID NO: 21564 - DNA, 1180 bp, Zea mays subsp. mays
  misc_feature (1)..(1180): Ceres Seq. ID no. 15180160
attcttctcttctcctggacaactcaagctcaaaacccaaaatcgaccttgtcgacccggatccgagctaggcacccgcacgaccacccgcctcctgccggtcaccgggacctagcatcgccgggcggcggcgggggaggggaaggtaggcgatgaggaaacgtgagcgggagaatccgtgcgggatctgcgggcactaccacaagtacgaggagggggaggtatgcggggtgtgcggccaccgctggaaaccgtcggacggggagggcgccccgtcgaggcacgagtccgccttccccacagaggtgctcaaggacttcctcttcctcgggagctacgacaacgcctcacgctccgaggtcctcaggacgctcagtatctcccacatccttaatactgtgccttattgccacaatctgtacaagaattcattcacatatcacagtcttcaacgggacaggcctttggattttgatgaggcaaaccagtatctagagaaatgtgaaagagataaatcgcgtgttcttgttcattgcatgactggaaaaaacaggtctgctgctattgttgtagccttcttgatgaagtctagagggtggagacttgcacagtcttttcaatgggtgaaagaccgaagaccacaggttcaactgacagatgcttctcataaggagcttttggagtatgagctgaagcttttcggacccagtactcaaaccttggttcccactgaatcatttgcttctcttggatttggttatacaaaaccagcaggtgacatgcaaacgcctgtgttcaaccaaacgaccatgccatccatattcgagcgattcaacccaaatgatcgccccgccaatttcacttttggagttgagaggaaagcagaagctaaccctcgagataacaatagtgatggcagggtaaacccaacttcaatggagaacctgatggacagctcttaagatgatttcacgatgtcgctgttcaatctccttgttccagaagtacacccgctgtaatctgcatgtcgcgggagtaaacctactgctcggtgcctcggtgcaccgaatacttatccggtgtctaggtttcagggaggttttgccttgtcgcttgagaaatggttctctggaaaccgatctttgctttagaatgactctatgaaatagatgtttgtggc

SEQ ID NO: 21565 - protein, 269 aa, Zea mays subsp. mays
  peptide (1)..(269): Ceres Seq. ID no. 15180161
  misc_feature (48)..(181): Pfam Name: Pfam Description:  Dual specificity phosphatase, catalytic domain
  misc_feature (1)..(255): NCBI GI NO: 28393745 NR Description: putative protein phosphatase
  misc_feature (1)..(253): NCBI GI NO: 15228155 NR Description: protein phosphatase -related
  misc_feature (42)..(231): NCBI GI NO: 24666604 NR Description: Mitogen-activated protein kinase phosphatase 3CG14080-PA
  misc_feature (40)..(200): NCBI GI NO: 30851156 NR Description: Unknown (protein for MGC:55423) [Danio rerio]
  misc_feature (42)..(231): NCBI GI NO: 28317042 NR Description: RE08706p [Drosophila melanogaster]
  misc_feature (39)..(204): NCBI GI NO: 1050849 NR Description: MAP kinase phosphatase [Xenopus laevis]
  misc_feature (52)..(163): NCBI GI NO: 9294518 NR Description: dual-specificity protein phosphatase-like protein
  misc_feature (52)..(163): NCBI GI NO: 15229482 NR Description: dual-specificity protein phosphatase
  misc_feature (33)..(179): NCBI GI NO: 18254478 NR Description: dual specificity phosphatase 19
  misc_feature (14)..(182): NCBI GI NO: 28828846 NR Description: similar to dual-specificity protein phosphatase
MRKRERENPCGICGHYHKYEEGEVCGVCGHRWKPSDGEGAPSRHESAFPTEVLKDFLFLGSYDNASRSEVLRTLSISHILNTVPYCHNLYKNSFTYHSLQRDRPLDFDEANQYLEKCERDKSRVLVHCMTGKNRSAAIVVAFLMKSRGWRLAQSFQWVKDRRPQVQLTDASHKELLEYELKLFGPSTQTLVPTESFASLGFGYTKPAGDMQTPVFNQTTMPSIFERFNPNDRPANFTFGVERKAEANPRDNNSDGRVNPTSMENLMDSS

SEQ ID NO: 21566 - protein, 141 aa, Zea mays subsp. mays
  peptide (1)..(141): Ceres Seq. ID no. 15180162
  misc_feature (1)..(53): Pfam Name: Pfam Description:  Dual specificity phosphatase, catalytic domain
  misc_feature (1)..(127): NCBI GI NO: 28393745 NR Description: putative protein phosphatase
  misc_feature (1)..(125): NCBI GI NO: 15228155 NR Description: protein phosphatase -related
  misc_feature (1)..(103): NCBI GI NO: 24666604 NR Description: Mitogen-activated protein kinase phosphatase 3CG14080-PA
  misc_feature (1)..(72): NCBI GI NO: 30851156 NR Description: Unknown (protein for MGC:55423) [Danio rerio]
  misc_feature (1)..(103): NCBI GI NO: 28317042 NR Description: RE08706p [Drosophila melanogaster]
  misc_feature (1)..(76): NCBI GI NO: 1050849 NR Description: MAP kinase phosphatase [Xenopus laevis]
  misc_feature (1)..(35): NCBI GI NO: 9294518 NR Description: dual-specificity protein phosphatase-like protein
  misc_feature (1)..(35): NCBI GI NO: 15229482 NR Description: dual-specificity protein phosphatase
  misc_feature (1)..(51): NCBI GI NO: 18254478 NR Description: dual specificity phosphatase 19
  misc_feature (1)..(54): NCBI GI NO: 28828846 NR Description: similar to dual-specificity protein phosphatase
MTGKNRSAAIVVAFLMKSRGWRLAQSFQWVKDRRPQVQLTDASHKELLEYELKLFGPSTQTLVPTESFASLGFGYTKPAGDMQTPVFNQTTMPSIFERFNPNDRPANFTFGVERKAEANPRDNNSDGRVNPTSMENLMDSS

SEQ ID NO: 21567 - DNA, 1022 bp, Zea mays subsp. mays
  misc_feature (1)..(1022): Ceres Seq. ID no. 15180273
gccagttgccaccagccactaggacgtcgctgcttccacgcctcctttactcctgctccaacggtgtattccaagcacagcgagaaagcggagacctttgcgcgagtgcgctctcgttctacctccagcagcagcagcagcggcgccgcagcggcatgccgaggagacggcacggagggttccggctcggctggaagctgctcggcgtctggcgctgggcggcgctctgccggcgccgccgccgcggccgcgggtacctccgcctgcacccgcgccaacaaggaggaggcagcgacagatccccgcccctccaggcgggtgtagcagcggtgtgcgccacgaagcagaagaagcagcagcagcagcagcgggatgactctgccgactcgcctcggatgctcacgtgggggcggtcgctggcgcggcggatgagcctcctgcgccggcgtgcgggagggaagggccggctgctggaggacgaggacgccgcggaggccaccacgcccaaggggcaggtggccgtgtacgtgggcggcgccgagcccggggcagagtcgatgcggtacgtggtccccgtggtgtacttcaaccacccgctgttcggggagctgctgcgcgaggccgaggaggagttcggcttccagcaccccggcgggatcaccatcccgtgcgcggcctcgcgcttcgagcgcgccgccgccgtcgtcgccgcgggcggcggcgccgggaagaaggtgcccgctggctggtggtagtgctagcagcatgtggcccacacggtggccgctgtacataccacacgtgcatgctcctgaccctcttcccctcagcggctcagcctcaggcaggaggtgaggaggatcccgattcccatggggaacgatccttcttctttttctttctcattagtttgactctttttttttttgcctctgttggacaccaaaataaacggacggtccggtccatgggcccggacggtccgcgtgtcccgagattagattaactcggatgtttatccg

SEQ ID NO: 21568 - protein, 250 aa, Zea mays subsp. mays
  peptide (1)..(250): Ceres Seq. ID no. 15180274
  misc_feature (131)..(236): Pfam Name: Pfam Description:  Auxin responsive protein
  misc_feature (123)..(238): NCBI GI NO: 38567865 NR Description: OSJNBa0091D06.3
  misc_feature (52)..(97): NCBI GI NO: 38567865 NR Description: OSJNBa0091D06.3
  misc_feature (131)..(240): NCBI GI NO: 15232400 NR Description: auxin-induced
  misc_feature (131)..(241): NCBI GI NO: 15225432 NR Description: auxin-induced
  misc_feature (138)..(237): NCBI GI NO: 15235723 NR Description: auxin-induced
  misc_feature (137)..(237): NCBI GI NO: 15234550 NR Description: auxin-induced
  misc_feature (168)..(235): NCBI GI NO: 18411465 NR Description: auxin-induced
  misc_feature (143)..(228): NCBI GI NO: 15234827 NR Description: small auxin up RNA (SAUR-AC1)
  misc_feature (115)..(250): NCBI GI NO: 6906857 NR Description: unknown [Zea mays]
  misc_feature (168)..(229): NCBI GI NO: 30687983 NR Description: auxin-induced
QLPPATRTSLLPRLLYSCSNGVFQAQRESGDLCASALSFYLQQQQQRRRSGMPRRRHGGFRLGWKLLGVWRWAALCRRRRRGRGYLRLHPRQQGGGSDRSPPLQAGVAAVCATKQKKQQQQQRDDSADSPRMLTWGRSLARRMSLLRRRAGGKGRLLEDEDAAEATTPKGQVAVYVGGAEPGAESMRYVVPVVYFNHPLFGELLREAEEEFGFQHPGGITIPCAASRFERAAAVVAAGGGAGKKVPAGWW

SEQ ID NO: 21569 - protein, 199 aa, Zea mays subsp. mays
  peptide (1)..(199): Ceres Seq. ID no. 15180275
  misc_feature (80)..(185): Pfam Name: Pfam Description:  Auxin responsive protein
  misc_feature (72)..(187): NCBI GI NO: 38567865 NR Description: OSJNBa0091D06.3
  misc_feature (1)..(46): NCBI GI NO: 38567865 NR Description: OSJNBa0091D06.3
  misc_feature (80)..(189): NCBI GI NO: 15232400 NR Description: auxin-induced
  misc_feature (80)..(190): NCBI GI NO: 15225432 NR Description: auxin-induced
  misc_feature (87)..(186): NCBI GI NO: 15235723 NR Description: auxin-induced
  misc_feature (86)..(186): NCBI GI NO: 15234550 NR Description: auxin-induced
  misc_feature (117)..(184): NCBI GI NO: 18411465 NR Description: auxin-induced
  misc_feature (92)..(177): NCBI GI NO: 15234827 NR Description: small auxin up RNA (SAUR-AC1)
  misc_feature (64)..(199): NCBI GI NO: 6906857 NR Description: unknown [Zea mays]
  misc_feature (117)..(178): NCBI GI NO: 30687983 NR Description: auxin-induced
MPRRRHGGFRLGWKLLGVWRWAALCRRRRRGRGYLRLHPRQQGGGSDRSPPLQAGVAAVCATKQKKQQQQQRDDSADSPRMLTWGRSLARRMSLLRRRAGGKGRLLEDEDAAEATTPKGQVAVYVGGAEPGAESMRYVVPVVYFNHPLFGELLREAEEEFGFQHPGGITIPCAASRFERAAAVVAAGGGAGKKVPAGWW

SEQ ID NO: 21570 - DNA, 1978 bp, Zea mays subsp. mays
  misc_feature (1)..(1978): Ceres Seq. ID no. 15180149
ctcttcccccgcgcggcggccgcgggagtgttcgtgttcctcacttctcccgcttgcgtccccgacactccctcagatccgcggccgtttcccgatccgaggggcattccagccctaaatagcggccggtgagcaggtctccttccgccggcgcggaccacctggagggagtttatcctggagccgtcttcctcctcgcctccttttgcggcgcggcgcggaggccggagtcgcttggaggcccagctgtgtttgggttgatttcttcgtttgtcgcagggcctgtcttctgcctctgcttttgcttcgaagcaatggcgaatgcaagcaagcacttgcaaccttcaagtcaagcaggcaatgacaagaagtatcagggcacgctggttgcttcaccagcaaaggccatttcacctaagtgtgtgaaccgcattgtgccatcgaagcaactgatcttgggtgggggttcaataggccatgtggcatcatttctgatcaaggtcgttgctcttgaggcagtgagaagagtttctaaaacaagatgccctttcatatggaattctgttcaagcattgcagatccttgtgtatcctccatttagctggatccaaagatgggcaccgctcggatttctcgtgcagggaattcagaaactatccatgccactgttgtttctgtcagtcacaacaacagtaagtgagctgtcttccaagcatgatgatgaaccagataacaatacagaacattctgagacaccttccgaaacaaatgaattggcgtcaacttctggcacaagcgatgctgctgatggcacaaaggaaatcgtgcaagagaactggcttgtgttacttttcagggagcttgagaagcaaggcatcactttgcctgagaggtttactgaagatgagttacgcagattttatgttgctgcaaatggcgactttcaaagtttactctcttcggttaagaagacaattcattggagggaaacatttcacatacttacattgcaagaacttgatagatggtctcacttagtcttttggcatgggtttgacacgatgcttcggccttgtttagtagttcgtcttggacttgcatgctctagcatacctcctcatgatagaccccgtttcgggcaagcagtagtttctcaaattgaccatggcgttgtaaatttgatcaatgaagaagattcaaggattaccgttttactggattgccatgggatttcgccattcagatttccaatgcaaatgatgaggtcgttcatcactgtggttcaagaaaactacccgaatcgtcttggggtattgtttgtcatccgtcttcctccagttgtcagagttattgcacagacatttcttcaagtcttgaaaccagctacaaagcagaagttgcgttttgagggagattcgtacaagaaggcattggcggagttcctgcaggctgtgccagcgtttctgggcggtaaatgcagctgcccgcgatgtgagagtcctcgtgatgattcagtgatacaggcaggggaagggagcaagaagcagccccgcttggtcagcgttgatgacgggttacctgtcacagacttggacttcgacttggatgaagagatcccatcaccttatagctgcgagaacgccatcagggctgcgataatcggcctgctgatggtgtgcatcttcgtcgcgtttctggctgggatgatcgaccctgcatccgttccagccagtgcctgagagcttgtggaatagagcatgcacgtacatgtgttgctaattaggatgcagggtgctgtatttcttggcaggcttcttgtatgttgtcgtcagaccgccatagagcgctttctcccagtgtgagcgagcgcatgaataatatatatcctctgtgtcaaatgttggttagcagttcaattcgggcctactagatttcactattttcttttttatcttgatcgggcctactgaatttttgc

SEQ ID NO: 21571 - protein, 474 aa, Zea mays subsp. mays
  peptide (1)..(474): Ceres Seq. ID no. 15180150
  misc_feature (241)..(395): Pfam Name: Pfam Description:  CRAL/TRIO domain
  misc_feature (1)..(474): NCBI GI NO: 29124131 NR Description: unknown protein
  misc_feature (14)..(471): NCBI GI NO: 15231434 NR Description: SEC14 cytosolic factor, putative
MANASKHLQPSSQAGNDKKYQGTLVASPAKAISPKCVNRIVPSKQLILGGGSIGHVASFLIKVVALEAVRRVSKTRCPFIWNSVQALQILVYPPFSWIQRWAPLGFLVQGIQKLSMPLLFLSVTTTVSELSSKHDDEPDNNTEHSETPSETNELASTSGTSDAADGTKEIVQENWLVLLFRELEKQGITLPERFTEDELRRFYVAANGDFQSLLSSVKKTIHWRETFHILTLQELDRWSHLVFWHGFDTMLRPCLVVRLGLACSSIPPHDRPRFGQAVVSQIDHGVVNLINEEDSRITVLLDCHGISPFRFPMQMMRSFITVVQENYPNRLGVLFVIRLPPVVRVIAQTFLQVLKPATKQKLRFEGDSYKKALAEFLQAVPAFLGGKCSCPRCESPRDDSVIQAGEGSKKQPRLVSVDDGLPVTDLDFDLDEEIPSPYSCENAIRAAIIGLLMVCIFVAFLAGMIDPASVPASA

SEQ ID NO: 21572 - protein, 359 aa, Zea mays subsp. mays
  peptide (1)..(359): Ceres Seq. ID no. 15180151
  misc_feature (126)..(280): Pfam Name: Pfam Description:  CRAL/TRIO domain
  misc_feature (1)..(359): NCBI GI NO: 29124131 NR Description: unknown protein
  misc_feature (1)..(356): NCBI GI NO: 15231434 NR Description: SEC14 cytosolic factor, putative
MPLLFLSVTTTVSELSSKHDDEPDNNTEHSETPSETNELASTSGTSDAADGTKEIVQENWLVLLFRELEKQGITLPERFTEDELRRFYVAANGDFQSLLSSVKKTIHWRETFHILTLQELDRWSHLVFWHGFDTMLRPCLVVRLGLACSSIPPHDRPRFGQAVVSQIDHGVVNLINEEDSRITVLLDCHGISPFRFPMQMMRSFITVVQENYPNRLGVLFVIRLPPVVRVIAQTFLQVLKPATKQKLRFEGDSYKKALAEFLQAVPAFLGGKCSCPRCESPRDDSVIQAGEGSKKQPRLVSVDDGLPVTDLDFDLDEEIPSPYSCENAIRAAIIGLLMVCIFVAFLAGMIDPASVPASA

SEQ ID NO: 21573 - DNA, 1094 bp, Zea mays subsp. mays
  misc_feature (1)..(1094): Ceres Seq. ID no. 15180374
aaggccagtctgagtgtgcgttcgattcgcttgtgctgcagctagggtttagaggttttctgggcgcggagcgggaggcggcggcggctatggctgcggcggaggaggagatcgcggtgaaggagccgctggatctgatacgcctcagcctcgacgagcgcatctacgtcaagctccgatccgaccgcgagctgcgcggcaagctccatgcgtatgatcaacatttaaacatgatacttggagatgttgatcatacgcagtgagctagcctcccgagccctatctatccttttctcggcacctcgcgggtctcccgtccgccccgtcccgcattcgtatcctctcctcactctcgccgccgccgcttcccctgcgccccgagccaagatgaatgttgaaaagctcaagaagatggcaggtgctgtgcgcactggggggaagggtagcatgcgcaggaagaagaaggcagtccacaagactacgaccacagatgataaaaggcttcagagcaccctgaaaagaataggagtgaacaccattcctggtattgaagaggtcaacatctttaaggatgatgttgttattcagtttgtgaatcctaaagtgcaagcttcaattggtgctaatacatgggtggtcagtggaactccacagacaaagaagctgcaagatctgcttccgtccattatcaaccagctcggccctgacaacctagacaacctgcggaggcttgcggagcaattccagaagcaggcccctggtgcttcaggtgcagaggctggcgccagcgctggtgctgctcaggacgatgacgatgacgttcctgagctcgtccctggagagacatttgaggaggctgcggaagagaaaaaggagtcgtcatgattttgccacatgcccgcccttttgaagggcttataagtaaatccttgcgtagaagggacatgttgaactctgacctaccttatttgtgcctgcttacggttatgtcatgaacgagaatttggtagtccagcgctggtccccctttttcacccatatccccgtgcttgtgtggtaaaagtcttgttaatgttaaaggccacacttaaacc

SEQ ID NO: 21574 - protein, 213 aa, Zea mays subsp. mays
  peptide (1)..(213): Ceres Seq. ID no. 15180375
  misc_feature (82)..(140): Pfam Name: Pfam Description:  NAC domain
  misc_feature (49)..(212): NCBI GI NO: 37535464 NR Description: putative transcription factor
  misc_feature (49)..(210): NCBI GI NO: 24431603 NR Description: Putative transcription factor
  misc_feature (49)..(210): NCBI GI NO: 29367567 NR Description: putative transcription factor BTF3
  misc_feature (49)..(213): NCBI GI NO: 33945882 NR Description: transcription factor homolog BTF3-like protein
  misc_feature (49)..(209): NCBI GI NO: 15219413 NR Description: transcription factor BTF3
  misc_feature (49)..(209): NCBI GI NO: 15220876 NR Description: transcription factor -related
  misc_feature (49)..(209): NCBI GI NO: 16323127 NR Description: At1g17880/F2H15_10 [Arabidopsis thaliana]
  misc_feature (49)..(209): NCBI GI NO: 21537065 NR Description: putative transcription factor BTF3
  misc_feature (22)..(209): NCBI GI NO: 2851417 NR Description: TRANSCRIPTION FACTOR BTF3
  misc_feature (49)..(209): NCBI GI NO: 34867805 NR Description: similar to Transcription factor BTF3
MLIIRSELASRALSILFSAPRGSPVRPVPHSYPLLTLAAAASPAPRAKMNVEKLKKMAGAVRTGGKGSMRRKKKAVHKTTTTDDKRLQSTLKRIGVNTIPGIEEVNIFKDDVVIQFVNPKVQASIGANTWVVSGTPQTKKLQDLLPSIINQLGPDNLDNLRRLAEQFQKQAPGASGAEAGASAGAAQDDDDDVPELVPGETFEEAAEEKKESS

SEQ ID NO: 21575 - protein, 165 aa, Zea mays subsp. mays
  peptide (1)..(165): Ceres Seq. ID no. 15180376
  misc_feature (34)..(92): Pfam Name: Pfam Description:  NAC domain
  misc_feature (1)..(164): NCBI GI NO: 37535464 NR Description: putative transcription factor
  misc_feature (1)..(162): NCBI GI NO: 24431603 NR Description: Putative transcription factor
  misc_feature (1)..(162): NCBI GI NO: 29367567 NR Description: putative transcription factor BTF3
  misc_feature (1)..(165): NCBI GI NO: 33945882 NR Description: transcription factor homolog BTF3-like protein
  misc_feature (1)..(161): NCBI GI NO: 15219413 NR Description: transcription factor BTF3
  misc_feature (1)..(161): NCBI GI NO: 15220876 NR Description: transcription factor -related
  misc_feature (1)..(161): NCBI GI NO: 16323127 NR Description: At1g17880/F2H15_10 [Arabidopsis thaliana]
  misc_feature (1)..(161): NCBI GI NO: 21537065 NR Description: putative transcription factor BTF3
  misc_feature (1)..(161): NCBI GI NO: 2851417 NR Description: TRANSCRIPTION FACTOR BTF3
  misc_feature (1)..(161): NCBI GI NO: 34867805 NR Description: similar to Transcription factor BTF3
MNVEKLKKMAGAVRTGGKGSMRRKKKAVHKTTTTDDKRLQSTLKRIGVNTIPGIEEVNIFKDDVVIQFVNPKVQASIGANTWVVSGTPQTKKLQDLLPSIINQLGPDNLDNLRRLAEQFQKQAPGASGAEAGASAGAAQDDDDDVPELVPGETFEEAAEEKKESS

SEQ ID NO: 21576 - protein, 157 aa, Zea mays subsp. mays
  peptide (1)..(157): Ceres Seq. ID no. 15180377
  misc_feature (26)..(84): Pfam Name: Pfam Description:  NAC domain
  misc_feature (1)..(156): NCBI GI NO: 37535464 NR Description: putative transcription factor
  misc_feature (1)..(154): NCBI GI NO: 24431603 NR Description: Putative transcription factor
  misc_feature (1)..(154): NCBI GI NO: 29367567 NR Description: putative transcription factor BTF3
  misc_feature (1)..(157): NCBI GI NO: 33945882 NR Description: transcription factor homolog BTF3-like protein
  misc_feature (1)..(153): NCBI GI NO: 15219413 NR Description: transcription factor BTF3
  misc_feature (1)..(153): NCBI GI NO: 15220876 NR Description: transcription factor -related
  misc_feature (1)..(153): NCBI GI NO: 16323127 NR Description: At1g17880/F2H15_10 [Arabidopsis thaliana]
  misc_feature (1)..(153): NCBI GI NO: 21537065 NR Description: putative transcription factor BTF3
  misc_feature (1)..(153): NCBI GI NO: 2851417 NR Description: TRANSCRIPTION FACTOR BTF3
  misc_feature (1)..(153): NCBI GI NO: 34867805 NR Description: similar to Transcription factor BTF3
MAGAVRTGGKGSMRRKKKAVHKTTTTDDKRLQSTLKRIGVNTIPGIEEVNIFKDDVVIQFVNPKVQASIGANTWVVSGTPQTKKLQDLLPSIINQLGPDNLDNLRRLAEQFQKQAPGASGAEAGASAGAAQDDDDDVPELVPGETFEEAAEEKKESS

SEQ ID NO: 21577 - DNA, 1330 bp, Zea mays subsp. mays
  misc_feature (1)..(1330): Ceres Seq. ID no. 12384296
caaattgtatgaaaggtgtgtgattgcatgtgctagttattcagaattctggatccgctatgtgcaatgtatggaggatagggagtctagacctagcaaacaatgccctggctcgtgctactcatgtgtttgtcaagaagcagccggagatccatctgtttagtgctcgctttaaggagcttaatggggatatttctggagcacgtgcagagtatcagcatctttactcagatttatgtcctggctttctagaggccatcgtgaagcattctaatatggaacaccgactgggagataaagaattatcttgttcagtttatgaaaaggccatcgctgctgagaagggaaaggaacagagccagctcttgccgacgttgcttattcagtactcccgtttcttatttttggccatccgagatttggagaaggcaagagaaatattaactgtgctgcatgagcagttaaatgtaacaaaaacagtgcttgaggctgtcattcatctagagtcaatttttccatgcgaaaagcgtattgattttttagactcacttgtggagaagtttgttacacctgaatcatctcagggagaggtggcaagtctagttgacaaagaggaaatatcttccatatttttagagtttttggatctctttggggatgcaaagtcaatcaagaaggctttaactcggcatacaactcttttttcatgtaagagaagcattctggccatcaaagaaacggaaagcagatgacgctgttgtctcagacagggacaaatttgctaaaactgtggttactcagtcagccacgggaactgatccaaatgcttccaatcctcctgtttggcctgcaacttctgaagcatctgggcaacaatggggagcttcttatgcacagcaggctgcatatcctgcatatggaacttacgactacagccatcaaatgccccagcctgctcctcaagcagctgcctatggtgcttatcctccaacatactctgcacaggcttatacacaacaaagctacccacagcctgcagcaattccagcagcaccagtaccagcacctacagcgccgtcagcttatcctcaacaacctgcggcagctcaaccttattatggcacaacctactactgataagtagagtagtcgtggatggtgatccgatgagcctgttaatctaccttttcgcatgtgtgtggttcctctgtactgccattgtttagctcgcctttagacgaatgctagcgacgagatgatcacttgagaacaaatatgagatttgtacaatcagcatttttgtcgctaggagttgccattgttttcatgc

SEQ ID NO: 21578 - protein, 230 aa, Zea mays subsp. mays
  peptide (1)..(230): Ceres Seq. ID no. 12384297
  misc_feature (3)..(226): NCBI GI NO: 18379230 NR Description: expressed protein; protein id: At1g04080
  misc_feature (3)..(226): NCBI GI NO: 7485869 NR Description: hypothetical protein F20D22
  misc_feature (8)..(215): NCBI GI NO: 10177721 NR Description: gene_id:MPL12
  misc_feature (8)..(215): NCBI GI NO: 30694946 NR Description: expressed protein [Arabidopsis thaliana]
  misc_feature (8)..(215): NCBI GI NO: 40253455 NR Description: unknown protein
  misc_feature (8)..(215): NCBI GI NO: 34904902 NR Description: similar to pre-mRNA processing protein
MCNVWRIGSLDLANNALARATHVFVKKQPEIHLFSARFKELNGDISGARAEYQHLYSDLCPGFLEAIVKHSNMEHRLGDKELSCSVYEKAIAAEKGKEQSQLLPTLLIQYSRFLFLAIRDLEKAREILTVLHEQLNVTKTVLEAVIHLESIFPCEKRIDFLDSLVEKFVTPESSQGEVASLVDKEEISSIFLEFLDLFGDAKSIKKALTRHTTLFSCKRSILAIKETESR

SEQ ID NO: 21579 - protein, 158 aa, Zea mays subsp. mays
  peptide (1)..(158): Ceres Seq. ID no. 12384298
  misc_feature (1)..(154): NCBI GI NO: 18379230 NR Description: expressed protein; protein id: At1g04080
  misc_feature (1)..(154): NCBI GI NO: 7485869 NR Description: hypothetical protein F20D22
  misc_feature (1)..(143): NCBI GI NO: 10177721 NR Description: gene_id:MPL12
  misc_feature (1)..(143): NCBI GI NO: 30694946 NR Description: expressed protein [Arabidopsis thaliana]
  misc_feature (1)..(143): NCBI GI NO: 40253455 NR Description: unknown protein
  misc_feature (1)..(143): NCBI GI NO: 34904902 NR Description: similar to pre-mRNA processing protein
MEHRLGDKELSCSVYEKAIAAEKGKEQSQLLPTLLIQYSRFLFLAIRDLEKAREILTVLHEQLNVTKTVLEAVIHLESIFPCEKRIDFLDSLVEKFVTPESSQGEVASLVDKEEISSIFLEFLDLFGDAKSIKKALTRHTTLFSCKRSILAIKETESR

SEQ ID NO: 21580 - protein, 131 aa, Zea mays subsp. mays
  peptide (1)..(131): Ceres Seq. ID no. 12384299
MTLLSQTGTNLLKLWLLSQPRELIQMLPILLFGLQLLKHLGNNGELLMHSRLHILHMELTTTAIKCPSLLLKQLPMVLILQHTLHRLIHNKATHSLQQFQQHQYQHLQRRQLILNNLRQLNLIMAQPTTDK

SEQ ID NO: 21581 - DNA, 1038 bp, Zea mays subsp. mays
  misc_feature (1)..(1038): Ceres Seq. ID no. 15180523
atctcccgctccctcgcaccactcgcgctcgacacgcaggcgacggtggcggcgatcaggcccggtatctcagcacggccgacagtcctaggctcgacggcggcgtcagcggctccccttcccgcctctagccagtggcctcgtgccctcggctccggtcctctgcacaccggccggagagcctgcatttctttatacgatgagctggagatttcctctattcggttcccagcatcagcaatcagatccaaatttccaggacattcctatgcagtcttggtaccctacctcggttgtaggtttgtcttcatctccagccacacctacctcttctagctccagtccacatcaaagagcttcaaataatctgcagtcttcatcccgtgggcaaccatctcctgctgaggctgcagagataattgctcatttgaaggacaagagtattgaggagttacagaggctattgaaagagaaagaggcatataatgcattctttaacacattcgatcaagtgaaaacccagaacaatgtgcgtggcgagcttagaaaggagacattgcaacttgcaagggaaaatttagaaaaggagcagcggattttggagcttgggaatcagtgcacaataattagaaccacacaactggctgctgctcacaccggcttactgatttggagaggcaaaaggatgatattatgaggtcctattcccctgctgcactactcgacaaactccaaacgtcgatggcaaagctggacgaggagtctgaggagctgcagcagaagttcctggcgaaggacatcgacttcccacacttcgtacagaagtacaagaagctccgcacggcttatcacaagcaggcgttgctccatctcgccggccagactgacataactccactgacatccggcctgcatcatgtcaactttgctgtattcctctgcttggccctgttttattgctgcagcttcttatagggcttgccaaacactttgcacgatttgttggatgataataaagctttcgtatgcttcatggtc

SEQ ID NO: 21582 - protein, 165 aa, Zea mays subsp. mays
  peptide (1)..(165): Ceres Seq. ID no. 15180524
  misc_feature (5)..(165): NCBI GI NO: 15231750 NR Description: expressed protein [Arabidopsis thaliana]
  misc_feature (5)..(139): NCBI GI NO: 30686868 NR Description: expressed protein [Arabidopsis thaliana]
  misc_feature (5)..(139): NCBI GI NO: 30686871 NR Description: expressed protein [Arabidopsis thaliana]
  misc_feature (5)..(139): NCBI GI NO: 25408498 NR Description: hypothetical protein At2g36680
MSWRFPLFGSQHQQSDPNFQDIPMQSWYPTSVVGLSSSPATPTSSSSSPHQRASNNLQSSSRGQPSPAEAAEIIAHLKDKSIEELQRLLKEKEAYNAFFNTFDQVKTQNNVRGELRKETLQLARENLEKEQRILELGNQCTIIRTTQLAAAHTGLLIWRGKRMIL

SEQ ID NO: 21583 - protein, 142 aa, Zea mays subsp. mays
  peptide (1)..(142): Ceres Seq. ID no. 15180525
  misc_feature (1)..(142): NCBI GI NO: 15231750 NR Description: expressed protein [Arabidopsis thaliana]
  misc_feature (1)..(116): NCBI GI NO: 30686868 NR Description: expressed protein [Arabidopsis thaliana]
  misc_feature (1)..(116): NCBI GI NO: 30686871 NR Description: expressed protein [Arabidopsis thaliana]
  misc_feature (1)..(116): NCBI GI NO: 25408498 NR Description: hypothetical protein At2g36680
MQSWYPTSVVGLSSSPATPTSSSSSPHQRASNNLQSSSRGQPSPAEAAEIIAHLKDKSIEELQRLLKEKEAYNAFFNTFDQVKTQNNVRGELRKETLQLARENLEKEQRILELGNQCTIIRTTQLAAAHTGLLIWRGKRMIL

SEQ ID NO: 21584 - protein, 111 aa, Zea mays subsp. mays
  peptide (1)..(111): Ceres Seq. ID no. 15180526
ISRSLAPLALDTQATVAAIRPGISARPTVLGSTAASAAPLPASSQWPRALGSGPLHTGRRACISLYDELEISSIRFPASAIRSKFPGHSYAVLVPYLGCRFVFISSHTYLF

SEQ ID NO: 21585 - DNA, 1576 bp, Zea mays subsp. mays
  misc_feature (1)..(1576): Ceres Seq. ID no. 15180133
cgtcatgctctagccaggcatcccatagaagggaaccgtcggtagttagggaaggcaagaagaagattttggagagatggtctatggtatcgtcaacagtcagtagcgaggaggaaatggaaggtcgcagaagtacaggcacgcttggtgacatactcacaataccgaaagtcaaggaccaggaaggaattggggcggaaacactagggagcccagcacctgagctggaacctgaggagcctttctcatgcttgccaagatctcggtctcttccactttctctgtcccgtggagtcgctgagtctaatggaggagtagcctctggtagtactcaggaagctgaaagggagaggatcaggaagtcatcatcgtttaaggaaaaggtttcaagcctgttctctaaaaacaagaaaccagttagggagaaggcagatccatccgcgagcaatagacttaaggtctatggaggggctgaaactactgctgatgtgaagaagggcttgaaccgtcttgcgttagacaatcttcagaaacaaagtactagtcgtgtaaacacagacgagaagaagaacgctgcgcaaggactcgtcactagttcttgtggtactaatgatacagctaataccacccctgccaaggacaacattgcctccattccaagtcttggcgccccaggagtcctgggtgaccctcaggagcagcctagtcctgtatctgtgctagatggaccgtttattatacgtgataacagcaggaggctactgtactcatctccatccccacaggctttgtcgaggtctcccttgatcggatcgtttccacggtccctgtcagtgtcgcgggaggaccccccgctggaagccacgtcgtcactgaattccctgagactctggaggcttttctccaaggccgacgaggatctagactcgctgacgttcatccagaagctggtccgctcctgtggcatggaccgagcaagctgcgtgttggctggccctctggacccggacctgctcgagaaggtttcagagcaggaagacgactgaaccaggttcgggagaaggcggcttcttttcgacgccgtaaacgaagcgctcgccgagctcgcctggacggcggaactggccgcgtacccctggggcggcggcagatcacgcctggactgcaactgcaagaacggttccggtggtgactcggcggccgaggagatctggcgcgttatcaggaactggtcgacacttgacaagtaccctccctgcgtagctatcgaaggaaatgtcttgctggagatgatactcaggcgggaggcggacagcggcgagacggctcggttggaggtgtttggtctcggcgcctcggtctgcgtcgtggtgttggaggagctggttgaagagacggttgtggatctcctgactgactgctagtgagtgatacttgctgctgctgttaacactgctccgttaatccacccctcaagctggaatgggtctcttttgccttgttcacatctttgttttgaccggcatttgctctagccgttgactggtaatggatcatgccatttgtttcgctgttc

SEQ ID NO: 21586 - protein, 347 aa, Zea mays subsp. mays
  peptide (1)..(347): Ceres Seq. ID no. 15180134
  misc_feature (84)..(347): NCBI GI NO: 32489512 NR Description: OSJNBa0043L24.3
  misc_feature (1)..(63): NCBI GI NO: 32489512 NR Description: OSJNBa0043L24.3
  misc_feature (1)..(347): NCBI GI NO: 18417262 NR Description: expressed protein [Arabidopsis thaliana]
SCSSQASHRREPSVVREGKKKILERWSMVSSTVSSEEEMEGRRSTGTLGDILTIPKVKDQEGIGAETLGSPAPELEPEEPFSCLPRSRSLPLSLSRGVAESNGGVASGSTQEAERERIRKSSSFKEKVSSLFSKNKKPVREKADPSASNRLKVYGGAETTADVKKGLNRLALDNLQKQSTSRVNTDEKKNAAQGLVTSSCGTNDTANTTPAKDNIASIPSLGAPGVLGDPQEQPSPVSVLDGPFIIRDNSRRLLYSSPSPQALSRSPLIGSFPRSLSVSREDPPLEATSSLNSLRLWRLFSKADEDLDSLTFIQKLVRSCGMDRASCVLAGPLDPDLLEKVSEQEDD

SEQ ID NO: 21587 - protein, 320 aa, Zea mays subsp. mays
  peptide (1)..(320): Ceres Seq. ID no. 15180135
  misc_feature (57)..(320): NCBI GI NO: 32489512 NR Description: OSJNBa0043L24.3
  misc_feature (1)..(36): NCBI GI NO: 32489512 NR Description: OSJNBa0043L24.3
  misc_feature (1)..(320): NCBI GI NO: 18417262 NR Description: expressed protein [Arabidopsis thaliana]
MVSSTVSSEEEMEGRRSTGTLGDILTIPKVKDQEGIGAETLGSPAPELEPEEPFSCLPRSRSLPLSLSRGVAESNGGVASGSTQEAERERIRKSSSFKEKVSSLFSKNKKPVREKADPSASNRLKVYGGAETTADVKKGLNRLALDNLQKQSTSRVNTDEKKNAAQGLVTSSCGTNDTANTTPAKDNIASIPSLGAPGVLGDPQEQPSPVSVLDGPFIIRDNSRRLLYSSPSPQALSRSPLIGSFPRSLSVSREDPPLEATSSLNSLRLWRLFSKADEDLDSLTFIQKLVRSCGMDRASCVLAGPLDPDLLEKVSEQEDD

SEQ ID NO: 21588 - protein, 309 aa, Zea mays subsp. mays
  peptide (1)..(309): Ceres Seq. ID no. 15180136
  misc_feature (46)..(309): NCBI GI NO: 32489512 NR Description: OSJNBa0043L24.3
  misc_feature (1)..(25): NCBI GI NO: 32489512 NR Description: OSJNBa0043L24.3
  misc_feature (1)..(309): NCBI GI NO: 18417262 NR Description: expressed protein [Arabidopsis thaliana]
MEGRRSTGTLGDILTIPKVKDQEGIGAETLGSPAPELEPEEPFSCLPRSRSLPLSLSRGVAESNGGVASGSTQEAERERIRKSSSFKEKVSSLFSKNKKPVREKADPSASNRLKVYGGAETTADVKKGLNRLALDNLQKQSTSRVNTDEKKNAAQGLVTSSCGTNDTANTTPAKDNIASIPSLGAPGVLGDPQEQPSPVSVLDGPFIIRDNSRRLLYSSPSPQALSRSPLIGSFPRSLSVSREDPPLEATSSLNSLRLWRLFSKADEDLDSLTFIQKLVRSCGMDRASCVLAGPLDPDLLEKVSEQEDD

SEQ ID NO: 21589 - DNA, 915 bp, Zea mays subsp. mays
  misc_feature (1)..(915): Ceres Seq. ID no. 15180533
aaaaacggaggcaaggcgcaggcgcgtgcaaaactccgaactcctccatcgcgtgcgcgcttctctctctcttgagcgtctccttgccatggccgcctcgcgagaccacctcggtggcgacccgccggagtcgacgcagctgcgcctcggagacgacatcgcgtggtcggagatcaacggcgtgtacgaccgcgacgactcgctcaaggagaacaccaaccccaagtgcgtcctcaagagccagcaccccggcgccgccgggtcctcgcagaggttctcgggcaacctgaagcccacggcggcgcccatcatcgggctttccgggaagctcggcgcgtgcgcgcgggggcaccgccaccgcccgcccgccatgtttcctgggaaggccaggcccggcggcgggcgcgcgtccaaggcggccgtcccggaccccgggtcgcccaaggtgtcctgcatcgggaaggtcctctcggaccacgagcgagcgcgcgcgcgcctcggcgtcggccgcggctccggggcgcctgggtgctgcggcttcttcatgcagcgcagccggagccggtccaggcacagcgccgtcgagtgcgtcgaccagtccccgccgccgcccgaggaggctgcagcggcgaggtccgcggaggaggcgacggcgccaccgccggggctgggaggtgtgcggcggtttgcgtcggggaggcgagcggcggagtgggcggccaaggtggaggacgacgggcgcgtggcgagatctgggccgttgtagcaccatgcaggcagaggcagcggtggttgaggtgtggctttcggtttggttgcgcccgtgctttagttgtagttgagcactcgagctgtgtacatacgtgcttctgttcaaatccgtagaaatttaatgcttgggttcacaaattttgc

SEQ ID NO: 21590 - protein, 254 aa, Zea mays subsp. mays
  peptide (1)..(254): Ceres Seq. ID no. 15180534
  misc_feature (41)..(238): NCBI GI NO: 34908494 NR Description: P0489B03.23
  misc_feature (41)..(249): NCBI GI NO: 38346320 NR Description: OJ000126_13.2
  misc_feature (41)..(163): NCBI GI NO: 18404079 NR Description: expressed protein [Arabidopsis thaliana]
  misc_feature (41)..(163): NCBI GI NO: 21537164 NR Description: unknown [Arabidopsis thaliana]
KTEARRRRVQNSELLHRVRASLSLERLLAMAASRDHLGGDPPESTQLRLGDDIAWSEINGVYDRDDSLKENTNPKCVLKSQHPGAAGSSQRFSGNLKPTAAPIIGLSGKLGACARGHRHRPPAMFPGKARPGGGRASKAAVPDPGSPKVSCIGKVLSDHERARARLGVGRGSGAPGCCGFFMQRSRSRSRHSAVECVDQSPPPPEEAAAARSAEEATAPPPGLGGVRRFASGRRAAEWAAKVEDDGRVARSGPL

SEQ ID NO: 21591 - protein, 225 aa, Zea mays subsp. mays
  peptide (1)..(225): Ceres Seq. ID no. 15180535
  misc_feature (12)..(209): NCBI GI NO: 34908494 NR Description: P0489B03.23
  misc_feature (12)..(220): NCBI GI NO: 38346320 NR Description: OJ000126_13.2
  misc_feature (12)..(134): NCBI GI NO: 18404079 NR Description: expressed protein [Arabidopsis thaliana]
  misc_feature (12)..(134): NCBI GI NO: 21537164 NR Description: unknown [Arabidopsis thaliana]
MAASRDHLGGDPPESTQLRLGDDIAWSEINGVYDRDDSLKENTNPKCVLKSQHPGAAGSSQRFSGNLKPTAAPIIGLSGKLGACARGHRHRPPAMFPGKARPGGGRASKAAVPDPGSPKVSCIGKVLSDHERARARLGVGRGSGAPGCCGFFMQRSRSRSRHSAVECVDQSPPPPEEAAAARSAEEATAPPPGLGGVRRFASGRRAAEWAAKVEDDGRVARSGPL

SEQ ID NO: 21592 - protein, 131 aa, Zea mays subsp. mays
  peptide (1)..(131): Ceres Seq. ID no. 15180536
  misc_feature (1)..(115): NCBI GI NO: 34908494 NR Description: P0489B03.23
  misc_feature (1)..(126): NCBI GI NO: 38346320 NR Description: OJ000126_13.2
  misc_feature (1)..(40): NCBI GI NO: 18404079 NR Description: expressed protein [Arabidopsis thaliana]
  misc_feature (1)..(40): NCBI GI NO: 21537164 NR Description: unknown [Arabidopsis thaliana]
MFPGKARPGGGRASKAAVPDPGSPKVSCIGKVLSDHERARARLGVGRGSGAPGCCGFFMQRSRSRSRHSAVECVDQSPPPPEEAAAARSAEEATAPPPGLGGVRRFASGRRAAEWAAKVEDDGRVARSGPL

SEQ ID NO: 21593 - DNA, 1115 bp, Zea mays subsp. mays
  misc_feature (1)..(1115): Ceres Seq. ID no. 14305286
aactcctcgctatcctcttccaatccgaaccacccggactcccggagcaagcggccgccggctaagcagacacgaacgcaggtccggcggcaatgcaacgcgccgcgctcgtcgggtcccctctcgtacccgcgggtccccttgctcagcttgccgtgcggcgccgctgccgcttccatggtggtgttcgcgtgaggtcctcaaccgggaaggacgggaccgggaccgggggcggaagcgagggcggcgagggcgccggtgccgcagcgtcttggctgagctcggcggtcggggagaaagtggacgagcttctgcgccgcgaagagaaccgggccctgctcgagggcgtcgaggacgccgagcgccgcgttgagcgcgcgcgcgccgcgctcgccgacatcgagcgccaggaggccgccgcacgcctcgcccgcgaggaggtccgccgcctcgagaagcggcgcgatgagattgcagagtcccagcgggaattgcttcaagcaagagaaatgattgatgaagctcagcgatccctgtcttctagtcttgaggaaggaagctttggagatatgtcaagtggtgatgttgatgaagataacgagagaatagaatccgtaaaagctgctgcagtttcctctgtcgtcggtgttctggctagtttgcccatatctttctatgaagttgaagatcttccacaactattccttcggtcatcaattgttttcataagttgtgctttgtttggagtcacattccggtatgctgttagaagagatctggataatatccaactaaaaactggggctcctgctgcatttgcttttgttagaggccttgctctgctggaatctggtagaaccctcgagctgagtaatgataccttagtatcagttactcttgatgctgcagtcagtgtggttgagaacattttcatatttctgcctgctgctgttgcactggactactgttttaagatgagatttttgagtccctttcctagaagaaaacaatagcttctgtgaagaatatgtatgatcaatagcaatcttgatagctcaaatggtcatatgtaacacaagtgatatcttagattcattaaaaaaacatttcccccc

SEQ ID NO: 21594 - protein, 306 aa, Zea mays subsp. mays
  peptide (1)..(306): Ceres Seq. ID no. 14305287
  misc_feature (33)..(302): NCBI GI NO: 30686406 NR Description: expressed protein [Arabidopsis thaliana]
  misc_feature (33)..(302): NCBI GI NO: 28393641 NR Description: unknown protein [Arabidopsis thaliana]
  misc_feature (33)..(302): NCBI GI NO: 7487177 NR Description: hypothetical protein T19F6
MQRAALVGSPLVPAGPLAQLAVRRRCRFHGGVRVRSSTGKDGTGTGGGSEGGEGAGAAASWLSSAVGEKVDELLRREENRALLEGVEDAERRVERARAALADIERQEAAARLAREEVRRLEKRRDEIAESQRELLQAREMIDEAQRSLSSSLEEGSFGDMSSGDVDEDNERIESVKAAAVSSVVGVLASLPISFYEVEDLPQLFLRSSIVFISCALFGVTFRYAVRRDLDNIQLKTGAPAAFAFVRGLALLESGRTLELSNDTLVSVTLDAAVSVVENIFIFLPAAVALDYCFKMRFLSPFPRRKQ

SEQ ID NO: 21595 - protein, 167 aa, Zea mays subsp. mays
  peptide (1)..(167): Ceres Seq. ID no. 14305288
  misc_feature (1)..(163): NCBI GI NO: 30686406 NR Description: expressed protein [Arabidopsis thaliana]
  misc_feature (1)..(163): NCBI GI NO: 28393641 NR Description: unknown protein [Arabidopsis thaliana]
  misc_feature (1)..(163): NCBI GI NO: 7487177 NR Description: hypothetical protein T19F6
MIDEAQRSLSSSLEEGSFGDMSSGDVDEDNERIESVKAAAVSSVVGVLASLPISFYEVEDLPQLFLRSSIVFISCALFGVTFRYAVRRDLDNIQLKTGAPAAFAFVRGLALLESGRTLELSNDTLVSVTLDAAVSVVENIFIFLPAAVALDYCFKMRFLSPFPRRKQ

SEQ ID NO: 21596 - DNA, 1100 bp, Zea mays subsp. mays
  misc_feature (1)..(1100): Ceres Seq. ID no. 13622448
tatgggttggcaactgccgggctcatctctagagggcagtgcaaaagtttcaggttggaaaccaccagtcttatcacttgaagggattgctaatggttcaggttcacaagcatcgtgtccttctacgcaaaggggcacaaaatcttcaggttggcagcgatcaagttcatccccggatgggagcagaaaagcctcaggttggcaacagtcaagtacatcaccagaggggagtggaaaagcgcatggctggcaacgatcaggatcttttacccaggggggtacaaaggctgcaggtcggcaaccctctcgttcctgtacagatcggattgcaaaagttgatggctggcaacgaacaagttcatctccggagggaagcagaaaagcttcaggctggcattcgtcgggtcgtgacagctcaaagatcgcatccagtgccagcgaaaaccgtaaattgtcttctagtcaccaagcgacgacaccaacagggaggcactcgttggcaaagagacagggaagcagcgacaagggtgctgctggttgggacgaggctctggggaactcttcggaagcatcgaagagacaacagggaaacagcgacaagaatgcaggctcgggagtggctctcggaagcaacaggagctggcatccatcgtctggtaaccctagtcggggcggccaggggaatcaccaacatgacagggactctcacagcggtgattcgcggcggggtagctcgaactacccccggaggtccgacaatcgtcatgaccatggcagtggtggttcgtcacgaccctcgtcaagagggcagtcccagagggggctatgtaaacactacgagagtggccactgcgggaagggttcgaaatgccagtacctgcaccggtgatcgccgtggccgtgtggaagcgggacccctgtttgcctggccgtcctcacatttttgtatagcaggatgtggtttcgtcgtagtcagtatagtagaacgcttattaaccgtgtcggcaccactaagttggtagtagtacatatctttcagggcaggagcatgactaaagtaggatttgtaagttttattagagccactgatggccttgggc

SEQ ID NO: 21597 - protein, 309 aa, Zea mays subsp. mays
  peptide (1)..(309): Ceres Seq. ID no. 13622449
  misc_feature (157)..(264): NCBI GI NO: 4768970 NR Description: unknown [Oryza sativa]
MVQVHKHRVLLRKGAQNLQVGSDQVHPRMGAEKPQVGNSQVHHQRGVEKRMAGNDQDLLPRGVQRLQVGNPLVPVQIGLQKLMAGNEQVHLRREAEKLQAGIRRVVTAQRSHPVPAKTVNCLLVTKRRHQQGGTRWQRDREAATRVLLVGTRLWGTLRKHRRDNRETATRMQAREWLSEATGAGIHRLVTLVGAARGITNMTGTLTAVIRGGVARTTPGGPTIVMTMAVVVRHDPRQEGSPRGGYVNTTRVATAGRVRNASTCTGDRRGRVEAGPLFAWPSSHFCIAGCGFVVVSIVERLLTVSAPLSW

SEQ ID NO: 21598 - protein, 295 aa, Zea mays subsp. mays
  peptide (1)..(295): Ceres Seq. ID no. 13622450
  misc_feature (4)..(273): Pfam Name: Pfam Description:  High molecular weight glutenin subunit
  misc_feature (7)..(264): NCBI GI NO: 28828352 NR Description: similar to Dictyostelium discoideum (Slime mold)
  misc_feature (32)..(294): NCBI GI NO: 1710805 NR Description: Protein rtoA (Ratio-A)
  misc_feature (30)..(264): NCBI GI NO: 1710805 NR Description: Protein rtoA (Ratio-A)
  misc_feature (23)..(294): NCBI GI NO: 28828352 NR Description: similar to Dictyostelium discoideum (Slime mold)
  misc_feature (8)..(274): NCBI GI NO: 28828184 NR Description: similar to Leishmania major. Ppg3
  misc_feature (8)..(271): NCBI GI NO: 28828184 NR Description: similar to Leishmania major. Ppg3
  misc_feature (31)..(288): NCBI GI NO: 37546838 NR Description: similar to hornerin [Homo sapiens]
  misc_feature (5)..(271): NCBI GI NO: 28828184 NR Description: similar to Leishmania major. Ppg3
  misc_feature (31)..(289): NCBI GI NO: 37546838 NR Description: similar to hornerin [Homo sapiens]
  misc_feature (8)..(271): NCBI GI NO: 28828184 NR Description: similar to Leishmania major. Ppg3
MGWQLPGSSLEGSAKVSGWKPPVLSLEGIANGSGSQASCPSTQRGTKSSGWQRSSSSPDGSRKASGWQQSSTSPEGSGKAHGWQRSGSFTQGGTKAAGRQPSRSCTDRIAKVDGWQRTSSSPEGSRKASGWHSSGRDSSKIASSASENRKLSSSHQATTPTGRHSLAKRQGSSDKGAAGWDEALGNSSEASKRQQGNSDKNAGSGVALGSNRSWHPSSGNPSRGGQGNHQHDRDSHSGDSRRGSSNYPRRSDNRHDHGSGGSSRPSSRGQSQRGLCKHYESGHCGKGSKCQYLHR

SEQ ID NO: 21599 - protein, 281 aa, Zea mays subsp. mays
  peptide (1)..(281): Ceres Seq. ID no. 13622451
  misc_feature (129)..(236): NCBI GI NO: 4768970 NR Description: unknown [Oryza sativa]
MGAEKPQVGNSQVHHQRGVEKRMAGNDQDLLPRGVQRLQVGNPLVPVQIGLQKLMAGNEQVHLRREAEKLQAGIRRVVTAQRSHPVPAKTVNCLLVTKRRHQQGGTRWQRDREAATRVLLVGTRLWGTLRKHRRDNRETATRMQAREWLSEATGAGIHRLVTLVGAARGITNMTGTLTAVIRGGVARTTPGGPTIVMTMAVVVRHDPRQEGSPRGGYVNTTRVATAGRVRNASTCTGDRRGRVEAGPLFAWPSSHFCIAGCGFVVVSIVERLLTVSAPLSW

SEQ ID NO: 21600 - DNA, 671 bp, Zea mays subsp. mays
  misc_feature (1)..(671): Ceres Seq. ID no. 14305267
acgttgcttgctcccaagatcaagcgcctcccgcctccagcactctaactcaggggacacgatcgccatggccgccacatcgaccgccgccgccgtgctgtccccgccgtccgtggccgggctccgcctggcgccgtctcccggccgggcgcgcgtgtcgttccgcgcggcgccggcgccggcgcggcggtccgtggcggcgcgcgcggagctgagctcggcgctggtgatcagcctgagcacgggcgtgtcgctcttcctgggccgcttcgtcttcttcaacttccagcgggagaacgtggcgaagcaggtgcccgcgcagaacggcaagacgcacttcgacgccggcgacgagcgcgccaaggagttcgcggccctgctcaagtccaacgaccccgtgggcttcaacctcgtcgacgtcctcgcctggggctcgctcggccacatcgtcgcctactacatcctcgccacctccagcaacggatacgaccccaacttcttctgagcggtcgtcgaggatgtattctacagacagccgtgtgcgtgcgtgtgtgcttgtcatgtatccgatcaaagtttggttaatttggacaagtagtgcaactgcagaataattggtatttgtatagtgcaccatgccaacatgaatttgatctgtctctgtcttcact

SEQ ID NO: 21601 - protein, 167 aa, Zea mays subsp. mays
  peptide (1)..(167): Ceres Seq. ID no. 14305268
  misc_feature (70)..(164): Pfam Name: Pfam Description:  Photosystem I psaG / psaK
  misc_feature (25)..(167): NCBI GI NO: 131192 NR Description: Photosystem I reaction center subunit V
  misc_feature (37)..(167): NCBI GI NO: 131194 NR Description: Photosystem I reaction center subunit V
  misc_feature (27)..(167): NCBI GI NO: 15222757 NR Description: photosystem I subunit V precursor -related
  misc_feature (72)..(163): NCBI GI NO: 17369611 NR Description: Photosystem I reaction center subunit V
  misc_feature (43)..(159): NCBI GI NO: 131191 NR Description: Photosystem I reaction center subunit V
  misc_feature (70)..(107): NCBI GI NO: 131193 NR Description: Photosystem I reaction center subunit V
  misc_feature (56)..(155): NCBI GI NO: 12831160 NR Description: PsaG-like protein [Dunaliella salina]
RCLLPRSSASRLQHSNSGDTIAMAATSTAAAVLSPPSVAGLRLAPSPGRARVSFRAAPAPARRSVAARAELSSALVISLSTGVSLFLGRFVFFNFQRENVAKQVPAQNGKTHFDAGDERAKEFAALLKSNDPVGFNLVDVLAWGSLGHIVAYYILATSSNGYDPNFF

SEQ ID NO: 21602 - protein, 145 aa, Zea mays subsp. mays
  peptide (1)..(145): Ceres Seq. ID no. 14305269
  misc_feature (48)..(142): Pfam Name: Pfam Description:  Photosystem I psaG / psaK
  misc_feature (3)..(145): NCBI GI NO: 131192 NR Description: Photosystem I reaction center subunit V
  misc_feature (15)..(145): NCBI GI NO: 131194 NR Description: Photosystem I reaction center subunit V
  misc_feature (5)..(145): NCBI GI NO: 15222757 NR Description: photosystem I subunit V precursor -related
  misc_feature (50)..(141): NCBI GI NO: 17369611 NR Description: Photosystem I reaction center subunit V
  misc_feature (21)..(137): NCBI GI NO: 131191 NR Description: Photosystem I reaction center subunit V
  misc_feature (48)..(85): NCBI GI NO: 131193 NR Description: Photosystem I reaction center subunit V
  misc_feature (34)..(133): NCBI GI NO: 12831160 NR Description: PsaG-like protein [Dunaliella salina]
MAATSTAAAVLSPPSVAGLRLAPSPGRARVSFRAAPAPARRSVAARAELSSALVISLSTGVSLFLGRFVFFNFQRENVAKQVPAQNGKTHFDAGDERAKEFAALLKSNDPVGFNLVDVLAWGSLGHIVAYYILATSSNGYDPNFF

SEQ ID NO: 21603 - DNA, 977 bp, Zea mays subsp. mays
  misc_feature (1)..(977): Ceres Seq. ID no. 14305255
caaacactttgccgcaccgcgaccactccgcttggcgcccggcgccagccagccagccatgttcacggacggcatgtcgaggctggcggtggcggtgagcgtcacggtggccctcagcctggccatcttcctcaccatcctggcgctcctcctcgcggacctaatctgcgcgcacctccggcgccggcggctccgcgccgaggcgccccggtcgaagctgggcctcggcctgtcgctggcggcttcgtcaccggcgcgcgccgacggcgcgtcgtcgtcggccacgacggcgctcgccggtacgccgccctcctactacgcgcacggcgtcctgcacgcgccctgcaccaaggacctcctcctcgccatccccaggctggagggcgccgtgtggcggtggtcgccgccgacgccgtcgtcgggctcgtcggggggcggctcctcggcgggcggcgacgggttcatgtgcatctccaacccggtgtacgaccgggccgcggccgcccccggcggggacacgccgctcgggatcacggaggaggcggacgcgtacgggtacggcgaggaggacgcccgcgggttctcgccgccgctgtcggcgatgaggaagctaccgccgctgggtgtcctggccgcgtaccccccaccgccgcggccgagcttcaccgatgccatgccgacaatggcagcaccggtgaccgacaccaaccgggcctcctcctcttcgtccgcctactttttctcttcgtggtcgtccaagtaagagatcacctgtgacgtacgcggattgtagtgagatggaggtggtcagcagcttcgatttcattcattattttggccgttttttcctcgttctgtcatatcattgtcatctacggagtacggagtagtaccatcgcctcggtcctgctagctcctcctgcacactccatgtcctacgactacgataaccgaagcttttgcttggtgttttatcc

SEQ ID NO: 21604 - protein, 258 aa, Zea mays subsp. mays
  peptide (1)..(258): Ceres Seq. ID no. 14305256
QTLCRTATTPLGARRQPASHVHGRHVEAGGGGERHGGPQPGHLPHHPGAPPRGPNLRAPPAPAAPRRGAPVEAGPRPVAGGFVTGARRRRVVVGHDGARRYAALLLRARRPARALHQGPPPRHPQAGGRRVAVVAADAVVGLVGGRLLGGRRRVHVHLQPGVRPGRGRPRRGHAARDHGGGGRVRVRRGGRPRVLAAAVGDEEATAAGCPGRVPPTAAAELHRCHADNGSTGDRHQPGLLLFVRLLFLFVVVQVRDHL

SEQ ID NO: 21605 - protein, 253 aa, Zea mays subsp. mays
  peptide (1)..(253): Ceres Seq. ID no. 14305257
  misc_feature (24)..(253): NCBI GI NO: 38345494 NR Description: OSJNBa0010D21.7
  misc_feature (25)..(215): NCBI GI NO: 38345494 NR Description: OSJNBa0010D21.7
KHFAAPRPLRLAPGASQPAMFTDGMSRLAVAVSVTVALSLAIFLTILALLLADLICAHLRRRRLRAEAPRSKLGLGLSLAASSPARADGASSSATTALAGTPPSYYAHGVLHAPCTKDLLLAIPRLEGAVWRWSPPTPSSGSSGGGSSAGGDGFMCISNPVYDRAAAAPGGDTPLGITEEADAYGYGEEDARGFSPPLSAMRKLPPLGVLAAYPPPPRPSFTDAMPTMAAPVTDTNRASSSSSAYFFSSWSSK

SEQ ID NO: 21606 - protein, 234 aa, Zea mays subsp. mays
  peptide (1)..(234): Ceres Seq. ID no. 14305258
  misc_feature (5)..(234): NCBI GI NO: 38345494 NR Description: OSJNBa0010D21.7
  misc_feature (6)..(196): NCBI GI NO: 38345494 NR Description: OSJNBa0010D21.7
MFTDGMSRLAVAVSVTVALSLAIFLTILALLLADLICAHLRRRRLRAEAPRSKLGLGLSLAASSPARADGASSSATTALAGTPPSYYAHGVLHAPCTKDLLLAIPRLEGAVWRWSPPTPSSGSSGGGSSAGGDGFMCISNPVYDRAAAAPGGDTPLGITEEADAYGYGEEDARGFSPPLSAMRKLPPLGVLAAYPPPPRPSFTDAMPTMAAPVTDTNRASSSSSAYFFSSWSSK

SEQ ID NO: 21607 - DNA, 936 bp, Zea mays subsp. mays
  misc_feature (1)..(936): Ceres Seq. ID no. 14305244
cacctgtgaaagcgagcacacgcaacgcagctacgcaagcaagcctgttctctgtcgattgaggccgctacacggcggcaatggagggaagaagggcggccgtgtcgttggtggcagcagtgtcgctgctgctggcgtgctcgcgatccccattcccggtcgtcgccgctgatgagggcgagccggcggtgggggccccggacacgaaccagctgtgcgtgagcaagtgcgggacgtgcccgacgatctgcacggcgtcgccgccgacgatcctgccgatgacagcgccgccgccgccggcccttgcgctgctgccgctgtcgcccccgccgccctacctccagctggtgctgccgccgccgccgcctggggacgtgtacgacctgctgcctccggtgacgcctctcacgagcccgccggagtccccctgcacgaccccgccttcgtcctcatcgtcgtcgacggagcctccgccgtcgccgccctcctcctccccgccgccgccgaagagcggcggcgacggtggcagtggctcgtcctcgcacttctcgtccccgccgtcgtcgtcaaacccgtactactacctgtacctctccggcggcgccagggcccgcggcggcgcgtccagcagcgcttgcgcggcgctcgtcctcgccgcgttcctgcccgccgtcgccctcttcaagtgacgcgcgctctgttggttactagttactactgccatccatcagtcggctactgtccagaccggccggcgttaagactaggacatgcattacgtactctcttcgttttggcatccgattcgatgatgatctgtcgacctttccgatgccagatgattgatcgatgcagacagtacgtagttgtgtttacattttgttcattgtaccttaatgattttgtaaagtggattctgatgatggtttattgtgt

SEQ ID NO: 21608 - protein, 202 aa, Zea mays subsp. mays
  peptide (1)..(202): Ceres Seq. ID no. 14305245
  misc_feature (54)..(172): Pfam Name: Pfam Description:  Extensin-like region
  misc_feature (8)..(165): NCBI GI NO: 81286 NR Description: extensin - Volvox carteri (fragment)
  misc_feature (45)..(193): NCBI GI NO: 15239833 NR Description: proline-rich protein family [Arabidopsis thaliana]
  misc_feature (54)..(172): NCBI GI NO: 28912428 NR Description: serine-proline rich repeat protein
  misc_feature (11)..(164): NCBI GI NO: 13265426 NR Description: At2g14890 [Arabidopsis thaliana]
  misc_feature (54)..(172): NCBI GI NO: 28912428 NR Description: serine-proline rich repeat protein
  misc_feature (4)..(164): NCBI GI NO: 15226024 NR Description: arabinogalactan-protein (AGP9)
  misc_feature (42)..(172): NCBI GI NO: 30696750 NR Description: hypothetical protein [Arabidopsis thaliana]
  misc_feature (4)..(141): NCBI GI NO: 34894166 NR Description: P0439B06.4
  misc_feature (6)..(141): NCBI GI NO: 7441828 NR Description: extensin-like cell wall protein
  misc_feature (6)..(141): NCBI GI NO: 7441829 NR Description: proline-rich cell wall protein - upland cotton
MEGRRAAVSLVAAVSLLLACSRSPFPVVAADEGEPAVGAPDTNQLCVSKCGTCPTICTASPPTILPMTAPPPPALALLPLSPPPPYLQLVLPPPPPGDVYDLLPPVTPLTSPPESPCTTPPSSSSSSTEPPPSPPSSSPPPPKSGGDGGSGSSSHFSSPPSSSNPYYYLYLSGGARARGGASSSACAALVLAAFLPAVALFK

SEQ ID NO: 21609 - protein, 136 aa, Zea mays subsp. mays
  peptide (1)..(136): Ceres Seq. ID no. 14305246
  misc_feature (1)..(106): Pfam Name: Pfam Description:  Extensin-like region
  misc_feature (1)..(99): NCBI GI NO: 81286 NR Description: extensin - Volvox carteri (fragment)
  misc_feature (1)..(127): NCBI GI NO: 15239833 NR Description: proline-rich protein family [Arabidopsis thaliana]
  misc_feature (1)..(106): NCBI GI NO: 28912428 NR Description: serine-proline rich repeat protein
  misc_feature (1)..(98): NCBI GI NO: 13265426 NR Description: At2g14890 [Arabidopsis thaliana]
  misc_feature (1)..(106): NCBI GI NO: 28912428 NR Description: serine-proline rich repeat protein
  misc_feature (1)..(98): NCBI GI NO: 15226024 NR Description: arabinogalactan-protein (AGP9)
  misc_feature (1)..(106): NCBI GI NO: 30696750 NR Description: hypothetical protein [Arabidopsis thaliana]
  misc_feature (1)..(75): NCBI GI NO: 34894166 NR Description: P0439B06.4
  misc_feature (1)..(75): NCBI GI NO: 7441828 NR Description: extensin-like cell wall protein
  misc_feature (1)..(75): NCBI GI NO: 7441829 NR Description: proline-rich cell wall protein - upland cotton
MTAPPPPALALLPLSPPPPYLQLVLPPPPPGDVYDLLPPVTPLTSPPESPCTTPPSSSSSSTEPPPSPPSSSPPPPKSGGDGGSGSSSHFSSPPSSSNPYYYLYLSGGARARGGASSSACAALVLAAFLPAVALFK

SEQ ID NO: 21610 - DNA, 1395 bp, Zea mays subsp. mays
  misc_feature (1)..(1395): Ceres Seq. ID no. 15180501
aaagcgcgccaaacaattccattccatggatgcggagatggaggacgcaggaagacagaccgagatcgagtggggcggcggcggcggcggcgccgaagcggtcctgggtcttgccggcggcgcctcctctgtgtcgctgtgctaccaccaggcgttcggtccccacgacgacctcgtgctcctcgaggccgctgacgacctcctccctgacctcctgcaaggccgggtgactgtaagagggcgtcctgatgaagatgctgtcctctgcacaccttgtgcaacttactccatgaagtttgttggcacatcaaattctatgtttttgataccacctggggaaccatctgctaaatgcttaagaccagacaacaccagtggcaatgctaatgcgttggctgctaccattaaactggcaccggggagcattgaattggtccgagtcgctccacgactagataaacttaagagccttctccgggagcggccctacatacttgatgaggatattggggatgatgacctccaacataagaataagaaggggctgtacacatggcaagacctctgcaaacttatccaggccagtgatggcgagctgttagatgcgctgaatgccctctcggctgttgacattgatggattctggaggacagttgatgccagttctgtgaacacgattcttgacatgatcctgcacaactctgtgttgcgtgattggccattaaaggcaatgccagaaagtgatgtgctctctgtcatgggatctgatggttttacgcataatatcgtaacccactgcctcaacagatttggcacaaaggtagagcaggaagccagaagcttttggagccttgatgagaagcgtgtatgcttacaatttgctcggagagcacttggcgctggaaagatgaagctcagcaactttatggagaaatggaagagaagcattccttcaggaatgtgttgtccggatcttcagatgcttgaaggggaagtgttgtgtgaaaagcttggggctgagacctgggtgcatgctttcagtgttactgatctgccactggcgcctgctgagaggttcgcagcacttttccgtgagcgggcaaaatgggaatggaaagacctgcagccctacatcagggacttgcatgttccaggtgcatcgtcggaaggattgcttatcaagtataccagaagaagccaaccaaatgctgaagctgaacctatttttactgcaagataataatcaaagtacggccatgtcttggcgacgtggtgcattgcatttgcatgctagatattgtcaatggaacccaggttttgaaaaaaaacatttgtgccttttgctgtaacttttgtttttggtgaagaaagctgaaatgcaagtattgaaatccc

SEQ ID NO: 21611 - protein, 412 aa, Zea mays subsp. mays
  peptide (1)..(412): Ceres Seq. ID no. 15180502
  misc_feature (29)..(379): NCBI GI NO: 15224911 NR Description: zinc finger
  misc_feature (245)..(379): NCBI GI NO: 8099129 NR Description: similar to a putative RING zinc finger protein ofArabidopsis thaliana
  misc_feature (57)..(402): NCBI GI NO: 13129096 NR Description: hypothetical protein MGC5528 [Homo sapiens]
  misc_feature (57)..(402): NCBI GI NO: 16306709 NR Description: hypothetical protein MGC5528 [Homo sapiens]
  misc_feature (57)..(402): NCBI GI NO: 34866494 NR Description: similar to hypothetical protein MGC5528
  misc_feature (55)..(397): NCBI GI NO: 31204943 NR Description: ENSANGP00000000566 [Anopheles gambiae]
  misc_feature (13)..(89): NCBI GI NO: 8099129 NR Description: similar to a putative RING zinc finger protein ofArabidopsis thaliana
  misc_feature (203)..(402): NCBI GI NO: 34147053 NR Description: RIKEN cDNA 2600005O03 [Mus musculus]
  misc_feature (78)..(378): NCBI GI NO: 24656130 NR Description: CG11788-PA [Drosophila melanogaster]
  misc_feature (54)..(382): NCBI GI NO: 31746522 NR Description: Hypothetical protein K09H9.2
KRAKQFHSMDAEMEDAGRQTEIEWGGGGGGAEAVLGLAGGASSVSLCYHQAFGPHDDLVLLEAADDLLPDLLQGRVTVRGRPDEDAVLCTPCATYSMKFVGTSNSMFLIPPGEPSAKCLRPDNTSGNANALAATIKLAPGSIELVRVAPRLDKLKSLLRERPYILDEDIGDDDLQHKNKKGLYTWQDLCKLIQASDGELLDALNALSAVDIDGFWRTVDASSVNTILDMILHNSVLRDWPLKAMPESDVLSVMGSDGFTHNIVTHCLNRFGTKVEQEARSFWSLDEKRVCLQFARRALGAGKMKLSNFMEKWKRSIPSGMCCPDLQMLEGEVLCEKLGAETWVHAFSVTDLPLAPAERFAALFRERAKWEWKDLQPYIRDLHVPGASSEGLLIKYTRRSQPNAEAEPIFTAR

SEQ ID NO: 21612 - protein, 404 aa, Zea mays subsp. mays
  peptide (1)..(404): Ceres Seq. ID no. 15180503
  misc_feature (21)..(371): NCBI GI NO: 15224911 NR Description: zinc finger
  misc_feature (237)..(371): NCBI GI NO: 8099129 NR Description: similar to a putative RING zinc finger protein ofArabidopsis thaliana
  misc_feature (49)..(394): NCBI GI NO: 13129096 NR Description: hypothetical protein MGC5528 [Homo sapiens]
  misc_feature (49)..(394): NCBI GI NO: 16306709 NR Description: hypothetical protein MGC5528 [Homo sapiens]
  misc_feature (49)..(394): NCBI GI NO: 34866494 NR Description: similar to hypothetical protein MGC5528
  misc_feature (47)..(389): NCBI GI NO: 31204943 NR Description: ENSANGP00000000566 [Anopheles gambiae]
  misc_feature (5)..(81): NCBI GI NO: 8099129 NR Description: similar to a putative RING zinc finger protein ofArabidopsis thaliana
  misc_feature (195)..(394): NCBI GI NO: 34147053 NR Description: RIKEN cDNA 2600005O03 [Mus musculus]
  misc_feature (70)..(370): NCBI GI NO: 24656130 NR Description: CG11788-PA [Drosophila melanogaster]
  misc_feature (46)..(374): NCBI GI NO: 31746522 NR Description: Hypothetical protein K09H9.2
MDAEMEDAGRQTEIEWGGGGGGAEAVLGLAGGASSVSLCYHQAFGPHDDLVLLEAADDLLPDLLQGRVTVRGRPDEDAVLCTPCATYSMKFVGTSNSMFLIPPGEPSAKCLRPDNTSGNANALAATIKLAPGSIELVRVAPRLDKLKSLLRERPYILDEDIGDDDLQHKNKKGLYTWQDLCKLIQASDGELLDALNALSAVDIDGFWRTVDASSVNTILDMILHNSVLRDWPLKAMPESDVLSVMGSDGFTHNIVTHCLNRFGTKVEQEARSFWSLDEKRVCLQFARRALGAGKMKLSNFMEKWKRSIPSGMCCPDLQMLEGEVLCEKLGAETWVHAFSVTDLPLAPAERFAALFRERAKWEWKDLQPYIRDLHVPGASSEGLLIKYTRRSQPNAEAEPIFTAR

SEQ ID NO: 21613 - protein, 400 aa, Zea mays subsp. mays
  peptide (1)..(400): Ceres Seq. ID no. 15180504
  misc_feature (17)..(367): NCBI GI NO: 15224911 NR Description: zinc finger
  misc_feature (233)..(367): NCBI GI NO: 8099129 NR Description: similar to a putative RING zinc finger protein ofArabidopsis thaliana
  misc_feature (45)..(390): NCBI GI NO: 13129096 NR Description: hypothetical protein MGC5528 [Homo sapiens]
  misc_feature (45)..(390): NCBI GI NO: 16306709 NR Description: hypothetical protein MGC5528 [Homo sapiens]
  misc_feature (45)..(390): NCBI GI NO: 34866494 NR Description: similar to hypothetical protein MGC5528
  misc_feature (43)..(385): NCBI GI NO: 31204943 NR Description: ENSANGP00000000566 [Anopheles gambiae]
  misc_feature (1)..(77): NCBI GI NO: 8099129 NR Description: similar to a putative RING zinc finger protein ofArabidopsis thaliana
  misc_feature (191)..(390): NCBI GI NO: 34147053 NR Description: RIKEN cDNA 2600005O03 [Mus musculus]
  misc_feature (66)..(366): NCBI GI NO: 24656130 NR Description: CG11788-PA [Drosophila melanogaster]
  misc_feature (42)..(370): NCBI GI NO: 31746522 NR Description: Hypothetical protein K09H9.2
MEDAGRQTEIEWGGGGGGAEAVLGLAGGASSVSLCYHQAFGPHDDLVLLEAADDLLPDLLQGRVTVRGRPDEDAVLCTPCATYSMKFVGTSNSMFLIPPGEPSAKCLRPDNTSGNANALAATIKLAPGSIELVRVAPRLDKLKSLLRERPYILDEDIGDDDLQHKNKKGLYTWQDLCKLIQASDGELLDALNALSAVDIDGFWRTVDASSVNTILDMILHNSVLRDWPLKAMPESDVLSVMGSDGFTHNIVTHCLNRFGTKVEQEARSFWSLDEKRVCLQFARRALGAGKMKLSNFMEKWKRSIPSGMCCPDLQMLEGEVLCEKLGAETWVHAFSVTDLPLAPAERFAALFRERAKWEWKDLQPYIRDLHVPGASSEGLLIKYTRRSQPNAEAEPIFTAR

SEQ ID NO: 21614 - DNA, 1501 bp, Zea mays subsp. mays
  misc_feature (1)..(1501): Ceres Seq. ID no. 15177738
ataagttcctgtgagctgtctcccgctcactcggtccctgtccatccgtagcgttccattccattccatcccatccccggaaagtgcaaggacgggagggagagcggccggcgcgtcacaaataccaccagcccaggggccatggccgccgcgatgaccagcttcgtcgccaagaacccgctgctcgcggccgcggcgcggcgcagggcgcctcccctcgcggggcgcgccctgccgttctctccgctcaggctgaggaccgtcacgtgcttcgtgccgcaggacacggcggccccggccgctcccgtgccggcgctggacgaggaggccagggccgcggcggcgcggcgcgtcgcggagaaggaggcgcggaagcggtccgagcggcggacgtacctggtggccgccgtgatgtctagcctcggagtcacgtccatggccgtcgccgccgtgtactatcgcttcagctggcaaatggagggcggcgaggtgccggtgatcgagacgctgggcacgttcgcgctctccgtcggggcggcggtcgggatggagttctgggcgcggtgggcgcaccgggcgctgtggcacgcctccctgtggcacatgcacgagtcgcaccaccggccgcgcgagggccccttcgagctcaacgacgtgttcgccatcgtcaacgccgcgccggccatctccctcctcgcctacggcttcttccaccgcggcatcgtgcccggcctctgcttcggcgcgggcctggggattacgctgttcggcatggcctacatgttcgtccacgacggcctggtccaccgccgctttccggtcggccccatcgccgacgtgccctacttcctccgagtggctgcctcgcacaagatacaccacatggacaagttcggcggcgtcccgtatgggctcttcctgggaccaaaggagctggaggaggttggtggcctggacgagcttgttagcagtccggtgagtgaagctactgatactgaagacgcaggagaagaaaagacgcgtccagttgtatgcgttgtccgaacaagcgtgttcatgggccagagtgtgccaaatgagttctagctttaggcgagtgggccaaatgagtgtgggctgcgtcccagggtagtataagtactatgagtctgtaataatcaggacaagaagaatttagcatccagtagctaacagagctggaaaaggagctcgcgcgaaccagaagggccatctgatggattcgtacatggagctggaggaggttgtgagtccggcgcggcgagctcctccgcgcgctccgtggtttttgttttttgttttggtcgcttttttgttgatttcattgtcttgtttggtactggagggttggcgaatcgattttggatgcactggcgtagatgttggctgtccacttgccctgcatttcgaatggtctgggaaggcacggttcgtacatggaaaatgtccggtgccgtggaattactattgttttgtttgctgc

SEQ ID NO: 21615 - protein, 314 aa, Zea mays subsp. mays
  peptide (1)..(314): Ceres Seq. ID no. 15177739
  misc_feature (124)..(274): Pfam Name: Pfam Description:  Carotene hydroxylase
  misc_feature (38)..(274): NCBI GI NO: 32488500 NR Description: OSJNBa0011J08.7
  misc_feature (1)..(58): NCBI GI NO: 32488500 NR Description: OSJNBa0011J08.7
  misc_feature (1)..(293): NCBI GI NO: 33145986 NR Description: beta-carotene hydroxylase [Crocus sativus]
  misc_feature (37)..(274): NCBI GI NO: 11245486 NR Description: beta-carotene hydroxylase [Citrus unshiu]
  misc_feature (60)..(274): NCBI GI NO: 9988836 NR Description: beta-carotene hydroxylase [Citrus unshiu]
  misc_feature (62)..(274): NCBI GI NO: 5870600 NR Description: beta-carotene hydroxylase
  misc_feature (2)..(274): NCBI GI NO: 2956717 NR Description: beta-carotene hydroxylase 2 [Capsicum annuum]
  misc_feature (1)..(274): NCBI GI NO: 5870598 NR Description: beta-carotene hydroxylase
  misc_feature (61)..(274): NCBI GI NO: 9968545 NR Description: beta-carotene hydroxylase
  misc_feature (7)..(288): NCBI GI NO: 21734857 NR Description: beta-carotene hydroxylase [Vitis vinifera]
MAAAMTSFVAKNPLLAAAARRRAPPLAGRALPFSPLRLRTVTCFVPQDTAAPAAPVPALDEEARAAAARRVAEKEARKRSERRTYLVAAVMSSLGVTSMAVAAVYYRFSWQMEGGEVPVIETLGTFALSVGAAVGMEFWARWAHRALWHASLWHMHESHHRPREGPFELNDVFAIVNAAPAISLLAYGFFHRGIVPGLCFGAGLGITLFGMAYMFVHDGLVHRRFPVGPIADVPYFLRVAASHKIHHMDKFGGVPYGLFLGPKELEEVGGLDELVSSPVSEATDTEDAGEEKTRPVVCVVRTSVFMGQSVPNEF

SEQ ID NO: 21616 - protein, 310 aa, Zea mays subsp. mays
  peptide (1)..(310): Ceres Seq. ID no. 15177740
  misc_feature (120)..(270): Pfam Name: Pfam Description:  Carotene hydroxylase
  misc_feature (34)..(270): NCBI GI NO: 32488500 NR Description: OSJNBa0011J08.7
  misc_feature (1)..(54): NCBI GI NO: 32488500 NR Description: OSJNBa0011J08.7
  misc_feature (1)..(289): NCBI GI NO: 33145986 NR Description: beta-carotene hydroxylase [Crocus sativus]
  misc_feature (33)..(270): NCBI GI NO: 11245486 NR Description: beta-carotene hydroxylase [Citrus unshiu]
  misc_feature (56)..(270): NCBI GI NO: 9988836 NR Description: beta-carotene hydroxylase [Citrus unshiu]
  misc_feature (58)..(270): NCBI GI NO: 5870600 NR Description: beta-carotene hydroxylase
  misc_feature (1)..(270): NCBI GI NO: 2956717 NR Description: beta-carotene hydroxylase 2 [Capsicum annuum]
  misc_feature (1)..(270): NCBI GI NO: 5870598 NR Description: beta-carotene hydroxylase
  misc_feature (57)..(270): NCBI GI NO: 9968545 NR Description: beta-carotene hydroxylase
  misc_feature (3)..(284): NCBI GI NO: 21734857 NR Description: beta-carotene hydroxylase [Vitis vinifera]
MTSFVAKNPLLAAAARRRAPPLAGRALPFSPLRLRTVTCFVPQDTAAPAAPVPALDEEARAAAARRVAEKEARKRSERRTYLVAAVMSSLGVTSMAVAAVYYRFSWQMEGGEVPVIETLGTFALSVGAAVGMEFWARWAHRALWHASLWHMHESHHRPREGPFELNDVFAIVNAAPAISLLAYGFFHRGIVPGLCFGAGLGITLFGMAYMFVHDGLVHRRFPVGPIADVPYFLRVAASHKIHHMDKFGGVPYGLFLGPKELEEVGGLDELVSSPVSEATDTEDAGEEKTRPVVCVVRTSVFMGQSVPNEF

SEQ ID NO: 21617 - protein, 224 aa, Zea mays subsp. mays
  peptide (1)..(224): Ceres Seq. ID no. 15177741
  misc_feature (34)..(184): Pfam Name: Pfam Description:  Carotene hydroxylase
  misc_feature (1)..(184): NCBI GI NO: 32488500 NR Description: OSJNBa0011J08.7
  misc_feature (1)..(203): NCBI GI NO: 33145986 NR Description: beta-carotene hydroxylase [Crocus sativus]
  misc_feature (1)..(184): NCBI GI NO: 11245486 NR Description: beta-carotene hydroxylase [Citrus unshiu]
  misc_feature (1)..(184): NCBI GI NO: 9988836 NR Description: beta-carotene hydroxylase [Citrus unshiu]
  misc_feature (1)..(184): NCBI GI NO: 5870600 NR Description: beta-carotene hydroxylase
  misc_feature (1)..(184): NCBI GI NO: 2956717 NR Description: beta-carotene hydroxylase 2 [Capsicum annuum]
  misc_feature (1)..(184): NCBI GI NO: 5870598 NR Description: beta-carotene hydroxylase
  misc_feature (1)..(184): NCBI GI NO: 9968545 NR Description: beta-carotene hydroxylase
  misc_feature (1)..(198): NCBI GI NO: 21734857 NR Description: beta-carotene hydroxylase [Vitis vinifera]
  misc_feature (1)..(184): NCBI GI NO: 9971820 NR Description: beta hydroxylase [Tagetes erecta]
MSSLGVTSMAVAAVYYRFSWQMEGGEVPVIETLGTFALSVGAAVGMEFWARWAHRALWHASLWHMHESHHRPREGPFELNDVFAIVNAAPAISLLAYGFFHRGIVPGLCFGAGLGITLFGMAYMFVHDGLVHRRFPVGPIADVPYFLRVAASHKIHHMDKFGGVPYGLFLGPKELEEVGGLDELVSSPVSEATDTEDAGEEKTRPVVCVVRTSVFMGQSVPNEF

SEQ ID NO: 21618 - DNA, 434 bp, Zea mays subsp. mays
  misc_feature (1)..(434): Ceres Seq. ID no. 13598894
acgacgcttgcattgacaagctagagattccacgctagcgacasstgccatggtcagtgcatgcatgcacgcatgcatgtgggcacattaagacacctcaccaaatactacaactgcaaactgtccgtgtgcgtgcgtcttgtcttgaaccgccggggccgggggtccggcatgctgcatacagtatactactatgcgctgaccaacgccgtgccactagtcagtgatcccgctgtggaaggaggtggagtactacgaggagttccagcggcggctgcgcgcgcgcgtgggccggtcccgcgccgccgccatcgtccgcggcgcctccacgtggtgagcatcggcaccaacgacttcctggagaactacttcctgctggccacggggcggttcgcgcagttcacggtgcccgagttcgaggacttcctggtggc

SEQ ID NO: 21619 - protein, 124 aa, Zea mays subsp. mays
  peptide (1)..(124): Ceres Seq. ID no. 13598895
  misc_feature (89)..(123): NCBI GI NO: 15224201 NR Description: GDSL-motif lipase/hydrolase protein
  misc_feature (89)..(123): NCBI GI NO: 21593518 NR Description: putative GDSL-motif lipase/hydrolase
  misc_feature (89)..(123): NCBI GI NO: 18416824 NR Description: GDSL-motif lipase/hydrolase protein
  misc_feature (89)..(123): NCBI GI NO: 7485330 NR Description: hypothetical protein F10M23
  misc_feature (89)..(123): NCBI GI NO: 15228157 NR Description: GDSL-motif lipase/hydrolase protein
MHARMHVGTLRHLTKYYNCKLSVCVRLVLNRRGRGSGMLHTVYYYALTNAVPLVSDPAVEGGGVLRGVPAAAARARGPVPRRRHRPRRLHVVSIGTNDFLENYFLLATGRFAQFTVPEFEDFLV

SEQ ID NO: 21620 - protein, 120 aa, Zea mays subsp. mays
  peptide (1)..(120): Ceres Seq. ID no. 13598896
  misc_feature (85)..(119): NCBI GI NO: 15224201 NR Description: GDSL-motif lipase/hydrolase protein
  misc_feature (85)..(119): NCBI GI NO: 21593518 NR Description: putative GDSL-motif lipase/hydrolase
  misc_feature (85)..(119): NCBI GI NO: 18416824 NR Description: GDSL-motif lipase/hydrolase protein
  misc_feature (85)..(119): NCBI GI NO: 7485330 NR Description: hypothetical protein F10M23
  misc_feature (85)..(119): NCBI GI NO: 15228157 NR Description: GDSL-motif lipase/hydrolase protein
MHVGTLRHLTKYYNCKLSVCVRLVLNRRGRGSGMLHTVYYYALTNAVPLVSDPAVEGGGVLRGVPAAAARARGPVPRRRHRPRRLHVVSIGTNDFLENYFLLATGRFAQFTVPEFEDFLV

SEQ ID NO: 21621 - protein, 87 aa, Zea mays subsp. mays
  peptide (1)..(87): Ceres Seq. ID no. 13598897
  misc_feature (52)..(86): NCBI GI NO: 15224201 NR Description: GDSL-motif lipase/hydrolase protein
  misc_feature (52)..(86): NCBI GI NO: 21593518 NR Description: putative GDSL-motif lipase/hydrolase
  misc_feature (52)..(86): NCBI GI NO: 18416824 NR Description: GDSL-motif lipase/hydrolase protein
  misc_feature (52)..(86): NCBI GI NO: 7485330 NR Description: hypothetical protein F10M23
  misc_feature (52)..(86): NCBI GI NO: 15228157 NR Description: GDSL-motif lipase/hydrolase protein
MLHTVYYYALTNAVPLVSDPAVEGGGVLRGVPAAAARARGPVPRRRHRPRRLHVVSIGTNDFLENYFLLATGRFAQFTVPEFEDFLV

SEQ ID NO: 21622 - DNA, 1339 bp, Zea mays subsp. mays
  misc_feature (1)..(1339): Ceres Seq. ID no. 15180690
atacgctgctcaaagtttaaatcggtcaagtggaaaccacacaccaggccgcccctctgttcctcgccgagatggccccgccgcggtggcgcggctccctgaccgcgggctaccagttcttcctcgcgctcggggtgctgatcgccaacctcgtgaactacgcgacggcgcacgcctcctgggggtggcgcgtctcgctgggcctggcgggcgcgccggccgtcgccatcttcgtcggcgcgctcttcctcaccgacacccccagcagcctcgtgatgcgggggcgcgccgacggggcccgggcggcgctgctccgggtgcgcgggcccgacgccgacgtggaggccgagctcagggacatcgccaaggccgtggaggccgcgcgccgcggcgaggacggcgcgttccgccggatggccacgcggcgcgagtaccgcccgcacctggtgctcgccgtggccgtgcccatgttcttccagctcacgggcgtcatcgtgctcgccttcttcgcgccgctcgtgttccggaccgtcggcttcgggagcagcgccgcgctcatgggcgccgtcgtactcggcgccgtcaacctgggctccctcgtgctctccaccttcgtcatcgaccggtacggacggaaggtgctcttcatggccggcggcgtacagatggtcgtctgccaggtcgcgattgcttggatcatgggggcgaagatcggcaagggcggcgaggcggcaatggcgcacccgtacgccgtggcggtgctggtgttcacctgcctgcacaccgccgggttcgggtggtcgtggggcccgctggggtgggtgatcccgagcgagatattcccggtggacatccggtcggcagggcaggccatgaacgtctccatcggcctctgtctcaccttcgtgcagacgcagtcgttcctcgccatgctctgccgcttcaagtacgccaccttcgcctactacgccgcctgggtcgccgtcatgaccgtcttcatcgcgctcttcctgccggagaccaagggcatcccgctcgagtccatgggcaccatctgggtgaaacactggtattggaagaggttcgtccacgacagaaagcagagcaacgtggcactgacctaaggacgaacctgtgtgaaatgtggacctgtaagatttttgtgactgacatgccaacgtgtatttatatactcgtcgttgagatttgtgaatttgtggttatgaaagcactcattttctaatatttactatgtactcttttaaagagcgaaggtttgtttctctccgcttctcactccagacaccagtggatcgttatcctatagactttatttcgg

SEQ ID NO: 21623 - protein, 413 aa, Zea mays subsp. mays
  peptide (1)..(413): Ceres Seq. ID no. 15180691
YAAQSLNRSSGNHTPGRPSVPRRDGPAAVARLPDRGLPVLPRARGADRQPRELRDGARLLGVARLAGPGGRAGRRHLRRRALPHRHPQQPRDAGARRRGPGGAAPGARARRRRGGRAQGHRQGRGGRAPRRGRRVPPDGHAARVPPAPGARRGRAHVLPAHGRHRARLLRAARVPDRRLREQRRAHGRRRTRRRQPGLPRALHLRHRPVRTEGALHGRRRTDGRLPGRDCLDHGGEDRQGRRGGNGAPVRRGGAGVHLPAHRRVRVVVGPAGVGDPERDIPGGHPVGRAGHERLHRPLSHLRADAVVPRHALPLQVRHLRLLRRLGRRHDRLHRALPAGDQGHPARVHGHHLGETLVLEEVRPRQKAEQRGTDLRTNLCEMWTCKIFVTDMPTCIYILVVEICEFVVMKALIF

SEQ ID NO: 21624 - protein, 350 aa, Zea mays subsp. mays
  peptide (1)..(350): Ceres Seq. ID no. 15180692
  misc_feature (1)..(329): Pfam Name: and other Pfam Description: Sugar
  misc_feature (1)..(346): NCBI GI NO: 32489184 NR Description: OSJNBa0027G07.4
  misc_feature (1)..(346): NCBI GI NO: 11991110 NR Description: monosaccharide transporter 1 [Oryza sativa]
  misc_feature (1)..(339): NCBI GI NO: 21740734 NR Description: OSJNBa0086B14.27
  misc_feature (1)..(339): NCBI GI NO: 32489200 NR Description: OSJNBa0027G07.27
  misc_feature (1)..(348): NCBI GI NO: 32489187 NR Description: OSJNBa0027G07.8
  misc_feature (1)..(343): NCBI GI NO: 21741620 NR Description: OSJNBa0027G07.5
  misc_feature (1)..(341): NCBI GI NO: 32489186 NR Description: OSJNBa0027G07.7
  misc_feature (1)..(338): NCBI GI NO: 15218693 NR Description: monosaccharide transporter, putative
  misc_feature (1)..(339): NCBI GI NO: 30349813 NR Description: putative monosaccharide-H+ symporter
  misc_feature (1)..(341): NCBI GI NO: 34394019 NR Description: putative monosaccharide transporter 3
MAPPRWRGSLTAGYQFFLALGVLIANLVNYATAHASWGWRVSLGLAGAPAVAIFVGALFLTDTPSSLVMRGRADGARAALLRVRGPDADVEAELRDIAKAVEAARRGEDGAFRRMATRREYRPHLVLAVAVPMFFQLTGVIVLAFFAPLVFRTVGFGSSAALMGAVVLGAVNLGSLVLSTFVIDRYGRKVLFMAGGVQMVVCQVAIAWIMGAKIGKGGEAAMAHPYAVAVLVFTCLHTAGFGWSWGPLGWVIPSEIFPVDIRSAGQAMNVSIGLCLTFVQTQSFLAMLCRFKYATFAYYAAWVAVMTVFIALFLPETKGIPLESMGTIWVKHWYWKRFVHDRKQSNVALT

SEQ ID NO: 21625 - protein, 282 aa, Zea mays subsp. mays
  peptide (1)..(282): Ceres Seq. ID no. 15180693
  misc_feature (1)..(261): Pfam Name: and other Pfam Description: Sugar
  misc_feature (1)..(278): NCBI GI NO: 32489184 NR Description: OSJNBa0027G07.4
  misc_feature (1)..(278): NCBI GI NO: 11991110 NR Description: monosaccharide transporter 1 [Oryza sativa]
  misc_feature (1)..(271): NCBI GI NO: 21740734 NR Description: OSJNBa0086B14.27
  misc_feature (1)..(271): NCBI GI NO: 32489200 NR Description: OSJNBa0027G07.27
  misc_feature (1)..(280): NCBI GI NO: 32489187 NR Description: OSJNBa0027G07.8
  misc_feature (1)..(275): NCBI GI NO: 21741620 NR Description: OSJNBa0027G07.5
  misc_feature (1)..(273): NCBI GI NO: 32489186 NR Description: OSJNBa0027G07.7
  misc_feature (1)..(270): NCBI GI NO: 15218693 NR Description: monosaccharide transporter, putative
  misc_feature (1)..(271): NCBI GI NO: 30349813 NR Description: putative monosaccharide-H+ symporter
  misc_feature (1)..(273): NCBI GI NO: 34394019 NR Description: putative monosaccharide transporter 3
MRGRADGARAALLRVRGPDADVEAELRDIAKAVEAARRGEDGAFRRMATRREYRPHLVLAVAVPMFFQLTGVIVLAFFAPLVFRTVGFGSSAALMGAVVLGAVNLGSLVLSTFVIDRYGRKVLFMAGGVQMVVCQVAIAWIMGAKIGKGGEAAMAHPYAVAVLVFTCLHTAGFGWSWGPLGWVIPSEIFPVDIRSAGQAMNVSIGLCLTFVQTQSFLAMLCRFKYATFAYYAAWVAVMTVFIALFLPETKGIPLESMGTIWVKHWYWKRFVHDRKQSNVALT

SEQ ID NO: 21626 - DNA, 1062 bp, Zea mays subsp. mays
  misc_feature (1)..(1062): Ceres Seq. ID no. 15225075
gggtcgtcctgaccaattgatggttctgcttctgctttaccactcaatctggttgagagtcgccggcgccggcgattcctcctccaccgattcgcccggcgggagtctccgcagggctcaccgggaccgcgggtccacgatggccgccaacttctggacgtcgtcgcactgcaagcagctgctggaccccgaggacgtggacctggtgccggcggcggaccgggagcgaggcatcacgccggaagagttccgcctcatcaagatccatatgtcgttccatatctggaggctagcacagcaggttaaagttaggcaaagagttgtagctacagcaatatcttacttcaggcgtgtgtatacaaggaagagcatgtcagactatgatcctcgtttggttgcacctacttgtttgtatttggcatctaaggtggaggagagtacagtgcaagcccgacttcttgtattttatataaaaaagatgtgtggttccgatgataagtatcggtttgaaattaaggatattcttgaaatggaaatgaagctcctggaagctctcgactattatttggttgttttccatccatatcgtcctctcttacagttgttgcaggatgctggcataacagacctgacacaatttgcctggggccttgttaatgatacatacaagatggaccttatcctcatataccctccctacatgattgcactggcctgcatatacatagcgagtgttttgaaagataaggacaccacagcatggtttgaagagctccgtgttgacatgaacatagttaagaatatctctatggaaatattagacttctatgacacctacaagattgatcctcaaaggggcatccctgaggataagataagccccgtgatgaacaagttgccggcaaaggcttaactcagatttggcgagcttaggagttgtaaactagtagtaaactacatcatacttccaccatgtgtgtactcagcctgcactgtcgcttgtgacgtgttgatgaactacttgatagattcaatgcaagaaccccatggaattgtttgtac

SEQ ID NO: 21627 - protein, 303 aa, Zea mays subsp. mays
  peptide (1)..(303): Ceres Seq. ID no. 15225076
  misc_feature (50)..(190): Pfam Name: Pfam Description:  Cyclin, N-terminal domain
  misc_feature (47)..(303): NCBI GI NO: 3334144 NR Description: G1/S-SPECIFIC CYCLIN C-TYPE
  misc_feature (47)..(302): NCBI GI NO: 15239665 NR Description: cyclin family [Arabidopsis thaliana]
  misc_feature (47)..(299): NCBI GI NO: 15239664 NR Description: cyclin family [Arabidopsis thaliana]
  misc_feature (47)..(302): NCBI GI NO: 28828497 NR Description: similar to Mus musculus (Mouse)
  misc_feature (47)..(300): NCBI GI NO: 37681751 NR Description: cyclin C [Danio rerio]
  misc_feature (34)..(300): NCBI GI NO: 34783612 NR Description: Unknown (protein for IMAGE:6165083) [Homo sapiens]
  misc_feature (46)..(300): NCBI GI NO: 4885119 NR Description: cyclin C [Homo sapiens]
  misc_feature (46)..(300): NCBI GI NO: 38382739 NR Description: Unknown (protein for IMAGE:6391891) [Mus musculus]
  misc_feature (47)..(300): NCBI GI NO: 1705767 NR Description: Cyclin C
  misc_feature (47)..(300): NCBI GI NO: 11042056 NR Description: dJ199J3.4 (cyclin C) [Homo sapiens]
GRPDQLMVLLLLYHSIWLRVAGAGDSSSTDSPGGSLRRAHRDRGSTMAANFWTSSHCKQLLDPEDVDLVPAADRERGITPEEFRLIKIHMSFHIWRLAQQVKVRQRVVATAISYFRRVYTRKSMSDYDPRLVAPTCLYLASKVEESTVQARLLVFYIKKMCGSDDKYRFEIKDILEMEMKLLEALDYYLVVFHPYRPLLQLLQDAGITDLTQFAWGLVNDTYKMDLILIYPPYMIALACIYIASVLKDKDTTAWFEELRVDMNIVKNISMEILDFYDTYKIDPQRGIPEDKISPVMNKLPAKA

SEQ ID NO: 21628 - protein, 297 aa, Zea mays subsp. mays
  peptide (1)..(297): Ceres Seq. ID no. 15225077
  misc_feature (44)..(184): Pfam Name: Pfam Description:  Cyclin, N-terminal domain
  misc_feature (41)..(297): NCBI GI NO: 3334144 NR Description: G1/S-SPECIFIC CYCLIN C-TYPE
  misc_feature (41)..(296): NCBI GI NO: 15239665 NR Description: cyclin family [Arabidopsis thaliana]
  misc_feature (41)..(293): NCBI GI NO: 15239664 NR Description: cyclin family [Arabidopsis thaliana]
  misc_feature (41)..(296): NCBI GI NO: 28828497 NR Description: similar to Mus musculus (Mouse)
  misc_feature (41)..(294): NCBI GI NO: 37681751 NR Description: cyclin C [Danio rerio]
  misc_feature (28)..(294): NCBI GI NO: 34783612 NR Description: Unknown (protein for IMAGE:6165083) [Homo sapiens]
  misc_feature (40)..(294): NCBI GI NO: 4885119 NR Description: cyclin C [Homo sapiens]
  misc_feature (40)..(294): NCBI GI NO: 38382739 NR Description: Unknown (protein for IMAGE:6391891) [Mus musculus]
  misc_feature (41)..(294): NCBI GI NO: 1705767 NR Description: Cyclin C
  misc_feature (41)..(294): NCBI GI NO: 11042056 NR Description: dJ199J3.4 (cyclin C) [Homo sapiens]
MVLLLLYHSIWLRVAGAGDSSSTDSPGGSLRRAHRDRGSTMAANFWTSSHCKQLLDPEDVDLVPAADRERGITPEEFRLIKIHMSFHIWRLAQQVKVRQRVVATAISYFRRVYTRKSMSDYDPRLVAPTCLYLASKVEESTVQARLLVFYIKKMCGSDDKYRFEIKDILEMEMKLLEALDYYLVVFHPYRPLLQLLQDAGITDLTQFAWGLVNDTYKMDLILIYPPYMIALACIYIASVLKDKDTTAWFEELRVDMNIVKNISMEILDFYDTYKIDPQRGIPEDKISPVMNKLPAKA

SEQ ID NO: 21629 - protein, 257 aa, Zea mays subsp. mays
  peptide (1)..(257): Ceres Seq. ID no. 15225078
  misc_feature (4)..(144): Pfam Name: Pfam Description:  Cyclin, N-terminal domain
  misc_feature (1)..(257): NCBI GI NO: 3334144 NR Description: G1/S-SPECIFIC CYCLIN C-TYPE
  misc_feature (1)..(256): NCBI GI NO: 15239665 NR Description: cyclin family [Arabidopsis thaliana]
  misc_feature (1)..(253): NCBI GI NO: 15239664 NR Description: cyclin family [Arabidopsis thaliana]
  misc_feature (1)..(256): NCBI GI NO: 28828497 NR Description: similar to Mus musculus (Mouse)
  misc_feature (1)..(254): NCBI GI NO: 37681751 NR Description: cyclin C [Danio rerio]
  misc_feature (1)..(254): NCBI GI NO: 34783612 NR Description: Unknown (protein for IMAGE:6165083) [Homo sapiens]
  misc_feature (1)..(254): NCBI GI NO: 4885119 NR Description: cyclin C [Homo sapiens]
  misc_feature (1)..(254): NCBI GI NO: 38382739 NR Description: Unknown (protein for IMAGE:6391891) [Mus musculus]
  misc_feature (1)..(254): NCBI GI NO: 1705767 NR Description: Cyclin C
  misc_feature (1)..(254): NCBI GI NO: 11042056 NR Description: dJ199J3.4 (cyclin C) [Homo sapiens]
MAANFWTSSHCKQLLDPEDVDLVPAADRERGITPEEFRLIKIHMSFHIWRLAQQVKVRQRVVATAISYFRRVYTRKSMSDYDPRLVAPTCLYLASKVEESTVQARLLVFYIKKMCGSDDKYRFEIKDILEMEMKLLEALDYYLVVFHPYRPLLQLLQDAGITDLTQFAWGLVNDTYKMDLILIYPPYMIALACIYIASVLKDKDTTAWFEELRVDMNIVKNISMEILDFYDTYKIDPQRGIPEDKISPVMNKLPAKA

SEQ ID NO: 21630 - DNA, 714 bp, Zea mays subsp. mays
  misc_feature (1)..(714): Ceres Seq. ID no. 15177734
gatcacaggaattcacgtcgatcgcttgagttagtttgcagccaagatgaacgacgccgatgtcgggaagcaggtgcagcagatggtccggttcatcctgcaggaggccgacgagaaagccagcgagatcagtgttgccgccgaggaggagttcagcatcgagaagctgcagctggtggagtcggaaaaacggagggtgcggcaggagtacgagcgccgcacagcctccacagcccgaaaccctcgccgccgatcggtttcggagaagagaagcaaatcaagatgtttctcggctcgctcccgcggcgcccgagcaaggaggctgcttacaagcagctgcggtcgcacatcatcatcatggcctcctgcgccgccgtcatccgcgccaccccttacatcctccatttcctcgcccgcgacggcgacatccaggaactcaagctagatctgtaggcccgtccgttgcttccccacctccagaggtgctacaaaggcaaccgttagttcgagcccactgcaaggtactatggagttagtggctatagtgcctgcttaagtttttttgttgttccaagtttagtgacaaactgacaatggtgtagcaactggcctgtgctgcgacaagtatttcgtttttgcctatctgtatggtctagtctttgtttgcactggtggatttgcagagatgttatcattcaacaatgttctgtggcc

SEQ ID NO: 21631 - protein, 158 aa, Zea mays subsp. mays
  peptide (1)..(158): Ceres Seq. ID no. 15177735
MSGSRCSRWSGSSCRRPTRKPARSVLPPRRSSASRSCSWWSRKNGGCGRSTSAAQPPQPETLAADRFRRREANQDVSRLAPAAPEQGGCLQAAAVAHHHHGLLRRRHPRHPLHPPFPRPRRRHPGTQARSVGPSVASPPPEVLQRQPLVRAHCKVLWS

SEQ ID NO: 21632 - protein, 150 aa, Zea mays subsp. mays
  peptide (1)..(150): Ceres Seq. ID no. 15177736
DHRNSRRSLELVCSQDERRRCREAGAADGPVHPAGGRRESQRDQCCRRGGVQHREAAAGGVGKTEGAAGVRAPHSLHSPKPSPPIGFGEEKQIKMFLGSLPRRPSKEAAYKQLRSHIIIMASCAAVIRATPYILHFLARDGDIQELKLDL

SEQ ID NO: 21633 - protein, 132 aa, Zea mays subsp. mays
  peptide (1)..(132): Ceres Seq. ID no. 15177737
  misc_feature (1)..(58): NCBI GI NO: 5565981 NR Description: unknown [Zea mays]
  misc_feature (1)..(58): NCBI GI NO: 34912000 NR Description: putative YLP
  misc_feature (1)..(58): NCBI GI NO: 12585474 NR Description: Vacuolar ATP synthase subunit E
  misc_feature (1)..(58): NCBI GI NO: 12585492 NR Description: Vacuolar ATP synthase subunit E
  misc_feature (1)..(58): NCBI GI NO: 3334405 NR Description: Vacuolar ATP synthase subunit E
  misc_feature (1)..(58): NCBI GI NO: 4099148 NR Description: YLP [Hordeum vulgare]
  misc_feature (1)..(58): NCBI GI NO: 4099150 NR Description: YLP [Hordeum vulgare]
  misc_feature (1)..(58): NCBI GI NO: 3334411 NR Description: Vacuolar ATP synthase subunit E
  misc_feature (1)..(58): NCBI GI NO: 15237054 NR Description: H+-transporting ATPase chain E, vacuolar
  misc_feature (1)..(58): NCBI GI NO: 20340245 NR Description: vacuolar ATPase subunit E-like protein
MNDADVGKQVQQMVRFILQEADEKASEISVAAEEEFSIEKLQLVESEKRRVRQEYERRTASTARNPRRRSVSEKRSKSRCFSARSRGARARRLLTSSCGRTSSSWPPAPPSSAPPLTSSISSPATATSRNSS

SEQ ID NO: 21634 - DNA, 1613 bp, Zea mays subsp. mays
  misc_feature (1)..(1613): Ceres Seq. ID no. 15179290
aacgaccgccgatctctcccacacagacacaggtcacacgcacactgcagcgtggcgcggctactccccgccatggccaccacctccgtcgccgcctcctctccccatccccatctgtcccgcccccgccggcggaactccagcgccacctccagagcctcgatccggggctgcctcctgcccatccgatgctcgtccgcctcgtcgtcgcaaccgccggcaaccggcggtgaggagggagagtcggggcgccggcggctgtcgaagtagtcgtcgtgggaggacagagatgtggagggggacgactacctctaccgcctcgggaaggaggctgacaacttgaacatcaccgtcggcgcacggtccggcatcgtcgacgaactcttcgtcggaaacttcctcgggaaagactcggatatcgtgttcgactaccggcagaaggcaactagaacgttcgagtacctgcagggggattactacatcgcacctgccttcctcgataaagttgcatgccacattgtaaagaactacattgcgcatcttcttaataatatcaaggttcccctaatacttgggatctggggcggaaaaggccaagggaaaacattccagactgaacttatatttagagcaatgggtgtggagccagtaattatgtctgcaggcgaactagaatctgaaaaagcaggtgaacccgggaggctaatacgtgatagatacagaactgcctcccaagtaatccaaaaccaagggaaaatgagttgcttgatgatcaacgatctagatgctggtgttggaagatttggaaacacacagatgacggtcaataatcaaatagctgttggaactttgatgaatttggcagataatcctactagggtgagcatcggccagaaatggagagaatctgatgttacacacagggtgccaataatagttactggaaatgatttttcaactctatatgcacccttaattcgtgatgggagaatggaaaaattctactggcagcccaaccgtgaagatataattagtattgttcatggcatgtatataaaggatggattatctgttgaagaagtatcaagaattgtagacgcatttccaaaccaagctctggacttctatggagctttgagatccaggacatatgatcaggctatcttggagtgggtcgaagaaatcggtgggcatgaacagctaactgagaagcttcttaagcgaaagaaaggcgaggagcttccaacgtttatacccccaaagccaacactggaagcattgattgagtcagggtactcgctggtgaaggagcaggaactaataatgagctccaagctttcaagagagtatatgaagaacttagaatagtttgtgatacacgagaggggtaacttgttgttttcagtttatttggagcaataatacaccatccaatttgtcccagctgcattttttttgggggggggggagggggatttgcctccgatccaacatccaaccaccagagtggaatcggtgcttcgattctcccagaaatcgtggtgggttcagatatgaactgctgaaaggaacgcatatcgtcattgtccttaattactctcatcgtgcattgc

SEQ ID NO: 21635 - protein, 244 aa, Zea mays subsp. mays
  peptide (1)..(244): Ceres Seq. ID no. 15179291
  misc_feature (1)..(150): Pfam Name: AAA Pfam Description: ATPase family associated with various cellular activities
  misc_feature (1)..(244): NCBI GI NO: 38346401 NR Description: OSJNBa0011F23.7
  misc_feature (1)..(244): NCBI GI NO: 19387266 NR Description: putative rubisco activase
  misc_feature (1)..(244): NCBI GI NO: 15219376 NR Description: rubisco activase -related [Arabidopsis thaliana]
  misc_feature (1)..(244): NCBI GI NO: 25535799 NR Description: ribulose-bisphosphate carboxylase activase (EC6
  misc_feature (1)..(240): NCBI GI NO: 8918359 NR Description: RuBisCO activase large isoform precursor
  misc_feature (1)..(240): NCBI GI NO: 8918361 NR Description: RuBisCO activase small isoform precursor
  misc_feature (1)..(240): NCBI GI NO: 32481067 NR Description: Rubisco activase beta form precursor
  misc_feature (1)..(241): NCBI GI NO: 10720247 NR Description: Ribulose bisphosphate carboxylase/ oxygenaseactivase
  misc_feature (1)..(240): NCBI GI NO: 29429152 NR Description: Ribulose bisphosphate carboxylase/ oxygenaseactivase
  misc_feature (1)..(240): NCBI GI NO: 3914603 NR Description: Ribulose bisphosphate carboxylase/ oxygenaseactivase
MGVEPVIMSAGELESEKAGEPGRLIRDRYRTASQVIQNQGKMSCLMINDLDAGVGRFGNTQMTVNNQIAVGTLMNLADNPTRVSIGQKWRESDVTHRVPIIVTGNDFSTLYAPLIRDGRMEKFYWQPNREDIISIVHGMYIKDGLSVEEVSRIVDAFPNQALDFYGALRSRTYDQAILEWVEEIGGHEQLTEKLLKRKKGEELPTFIPPKPTLEALIESGYSLVKEQELIMSSKLSREYMKNLE

SEQ ID NO: 21636 - protein, 237 aa, Zea mays subsp. mays
  peptide (1)..(237): Ceres Seq. ID no. 15179292
  misc_feature (1)..(143): Pfam Name: AAA Pfam Description: ATPase family associated with various cellular activities
  misc_feature (1)..(237): NCBI GI NO: 38346401 NR Description: OSJNBa0011F23.7
  misc_feature (1)..(237): NCBI GI NO: 19387266 NR Description: putative rubisco activase
  misc_feature (1)..(237): NCBI GI NO: 15219376 NR Description: rubisco activase -related [Arabidopsis thaliana]
  misc_feature (1)..(237): NCBI GI NO: 25535799 NR Description: ribulose-bisphosphate carboxylase activase (EC6
  misc_feature (1)..(233): NCBI GI NO: 8918359 NR Description: RuBisCO activase large isoform precursor
  misc_feature (1)..(233): NCBI GI NO: 8918361 NR Description: RuBisCO activase small isoform precursor
  misc_feature (1)..(233): NCBI GI NO: 32481067 NR Description: Rubisco activase beta form precursor
  misc_feature (1)..(234): NCBI GI NO: 10720247 NR Description: Ribulose bisphosphate carboxylase/ oxygenaseactivase
  misc_feature (1)..(233): NCBI GI NO: 29429152 NR Description: Ribulose bisphosphate carboxylase/ oxygenaseactivase
  misc_feature (1)..(233): NCBI GI NO: 3914603 NR Description: Ribulose bisphosphate carboxylase/ oxygenaseactivase
MSAGELESEKAGEPGRLIRDRYRTASQVIQNQGKMSCLMINDLDAGVGRFGNTQMTVNNQIAVGTLMNLADNPTRVSIGQKWRESDVTHRVPIIVTGNDFSTLYAPLIRDGRMEKFYWQPNREDIISIVHGMYIKDGLSVEEVSRIVDAFPNQALDFYGALRSRTYDQAILEWVEEIGGHEQLTEKLLKRKKGEELPTFIPPKPTLEALIESGYSLVKEQELIMSSKLSREYMKNLE

SEQ ID NO: 21637 - protein, 203 aa, Zea mays subsp. mays
  peptide (1)..(203): Ceres Seq. ID no. 15179293
  misc_feature (1)..(109): Pfam Name: AAA Pfam Description: ATPase family associated with various cellular activities
  misc_feature (1)..(203): NCBI GI NO: 38346401 NR Description: OSJNBa0011F23.7
  misc_feature (1)..(203): NCBI GI NO: 19387266 NR Description: putative rubisco activase
  misc_feature (1)..(203): NCBI GI NO: 15219376 NR Description: rubisco activase -related [Arabidopsis thaliana]
  misc_feature (1)..(203): NCBI GI NO: 25535799 NR Description: ribulose-bisphosphate carboxylase activase (EC6
  misc_feature (1)..(199): NCBI GI NO: 8918359 NR Description: RuBisCO activase large isoform precursor
  misc_feature (1)..(199): NCBI GI NO: 8918361 NR Description: RuBisCO activase small isoform precursor
  misc_feature (1)..(199): NCBI GI NO: 32481067 NR Description: Rubisco activase beta form precursor
  misc_feature (1)..(200): NCBI GI NO: 10720247 NR Description: Ribulose bisphosphate carboxylase/ oxygenaseactivase
  misc_feature (1)..(199): NCBI GI NO: 29429152 NR Description: Ribulose bisphosphate carboxylase/ oxygenaseactivase
  misc_feature (1)..(199): NCBI GI NO: 3914603 NR Description: Ribulose bisphosphate carboxylase/ oxygenaseactivase
MSCLMINDLDAGVGRFGNTQMTVNNQIAVGTLMNLADNPTRVSIGQKWRESDVTHRVPIIVTGNDFSTLYAPLIRDGRMEKFYWQPNREDIISIVHGMYIKDGLSVEEVSRIVDAFPNQALDFYGALRSRTYDQAILEWVEEIGGHEQLTEKLLKRKKGEELPTFIPPKPTLEALIESGYSLVKEQELIMSSKLSREYMKNLE

SEQ ID NO: 21638 - DNA, 908 bp, Zea mays subsp. mays
  misc_feature (1)..(908): Ceres Seq. ID no. 15179256
cggctccctgtggcccgcggcgtgagcgtgtcgtgtcccgcagggccacctttgctctctaaccccttccaccacacgcgaccgccgtccccgcgcgagttgccgaacccacgtctcccctcgccccgcgccgaccctaccaaccctcgggcccgcccatggagatctccgcctccgctgcgccggccgcctcctccccgcccgccaggccgctggtcctgcgcccgttcgcctcgtcatcgccccacccggctacgtcctcctcgaccaccatccgccgccgcccatcctcatcggccactgccacggtccgccgccgcgcgcgcacccgtccccgtacagggcggtccaagccccccgccgacgcgggcgactacttctccggcaacgacggccccggtctcggtggttccggcggcggtgacggaggaggaccggtggagctggaacagcgggttcggctctggatcagacggccccgacgactgggagcccgatgtgccggcgccccggaggtcagcggcggatgcggcgctcggggtcgtctacgagctcatgtgcctcatcgcgctctccaactgcacccagttcgccgtccgcaggctcgcgggcctcctctccgcccgcgtcgccgcattgcgattcgtccccaccgtctgctgatcatccgtgggggtttgttttacttcctcttcctcctgcccgtctacctgaaatcgcttctgtacatatatcagcctgcaactgcggttttaggggattggggccttgggggaatcaggacctctgcctgttgttcctgcggtgcgtgcctcaacgcattataccgttgaacagtagcaaaattcgtcgaatccaattggagaaacacaaaaataagatcaacttgtttatcctttgttgtaccc

SEQ ID NO: 21639 - protein, 224 aa, Zea mays subsp. mays
  peptide (1)..(224): Ceres Seq. ID no. 15179257
MEISASAAPAASSPPARPLVLRPFASSSPHPATSSSTTIRRRPSSSATATVRRRARTRPRTGRSKPPADAGDYFSGNDGPGLGGSGGGDGGGPVELEQRVRLWIRRPRRLGARCAGAPEVSGGCGARGRLRAHVPHRALQLHPVRRPQARGPPLRPRRRIAIRPHRLLIIRGGLFYFLFLLPVYLKSLLYIYQPATAVLGDWGLGGIRTSACCSCGACLNALYR

SEQ ID NO: 21640 - protein, 220 aa, Zea mays subsp. mays
  peptide (1)..(220): Ceres Seq. ID no. 15179258
  misc_feature (28)..(140): Pfam Name: Pfam Description:  Formin Homology 2 Domain
  misc_feature (12)..(143): NCBI GI NO: 2129478 NR Description: chitinase (EC 3.2.1.14) precursor - beet
  misc_feature (13)..(143): NCBI GI NO: 2129478 NR Description: chitinase (EC 3.2.1.14) precursor - beet
  misc_feature (13)..(133): NCBI GI NO: 6523547 NR Description: hydroxyproline-rich glycoprotein DZ-HRGP
  misc_feature (11)..(138): NCBI GI NO: 6523547 NR Description: hydroxyproline-rich glycoprotein DZ-HRGP
  misc_feature (13)..(183): NCBI GI NO: 20138131 NR Description: Vegetative cell wall protein gp1 precursor
  misc_feature (13)..(140): NCBI GI NO: 27375632 NR Description: blr0521 [Bradyrhizobium japonicum]
  misc_feature (10)..(145): NCBI GI NO: 81286 NR Description: extensin - Volvox carteri (fragment)
  misc_feature (8)..(128): NCBI GI NO: 81286 NR Description: extensin - Volvox carteri (fragment)
  misc_feature (9)..(142): NCBI GI NO: 7441828 NR Description: extensin-like cell wall protein
  misc_feature (1)..(133): NCBI GI NO: 81286 NR Description: extensin - Volvox carteri (fragment)
RLPVARGVSVSCPAGPPLLSNPFHHTRPPSPRELPNPRLPSPRADPTNPRARPWRSPPPLRRPPPPRPPGRWSCARSPRHRPTRLRPPRPPSAAAHPHRPLPRSAAARAPVPVQGGPSPPPTRATTSPATTAPVSVVPAAVTEEDRWSWNSGFGSGSDGPDDWEPDVPAPRRSAADAALGVVYELMCLIALSNCTQFAVRRLAGLLSARVAALRFVPTVC

SEQ ID NO: 21641 - protein, 137 aa, Zea mays subsp. mays
  peptide (1)..(137): Ceres Seq. ID no. 15179259
  misc_feature (19)..(72): Pfam Name: Pfam Description:  Formin Homology 2 Domain
MCRRPGGQRRMRRSGSSTSSCASSRSPTAPSSPSAGSRASSPPASPHCDSSPPSADHPWGFVLLPLPPARLPEIASVHISACNCGFRGLGPWGNQDLCLLFLRCVPQRIIPLNSSKIRRIQLEKHKNKINLFILCCT

SEQ ID NO: 21642 - DNA, 1319 bp, Zea mays subsp. mays
  misc_feature (1)..(1319): Ceres Seq. ID no. 15226642
gtagaacacagcatctccggtagcgtcaccgtaggcctcgcaagtaaactgacctgccttctccgctttcccctccgtctccgtcgggagtcgagacaaagggagccagagttagtcccggcgccgtgtcgcgagcggaaggagaaggactgaaggaggcgacgatgcaggtgaagcagaaggtctacgagttctacaaaggcacggtggagcgggtcacggccccgcgcaccgtctccgcgttcctcgagaagggcgtcctctccgtccccgagttcattctcgccggcgacaacctcgtcgccaagtgccccacctggtcctgggaagcgggcgatccaagcaagaggaagccgtatctccccgccaataagcagttcctcgtcacccgtaatgtgccctgtttaagacgtgccatctcggttgaggaagagtatgatgcagcaggagcagaggtggttctcgatgaggatggcgaaggctggcttgcaacacatggagtgcaagcatcaaagacagaagaggaggaagacattccctctatggacaccttggacatagggagatctgatggaataaagtctatcccctcttactttagcggtggcaaggatgaagaggaggaagatatacctgacatggatacttatgaagacacaggggataatttggctgctgctgaaccatcatactttatcgcagaagaaccacaagatgacaacattcttcataccagaacatatgatgttagcataacgtatgacaagtactaccaaactccacgtgtctggctaactggatatgacgagtcaagaatgccattaatgcctgaacttgtgtttgaagacatcagccaagaccacgcacgaaaaacggtgactattgaggaccatcctcacttattggctgggaagcatgcatcagtgcacccatgcaaacatgcagctgtgatgaaaaagatcatcgacgttccaatgtcggggggagtggaaccagaagttgacaagtaccttttcatatttttgaaattcatagcgacagtcataccgactattgagtacgattatacaatggacgtcgaccttggcagtacaagctgattattggttggcttgaagcttgtcacttgtctcgggaaaaggaagcaccctaccagaaggcgcaggaagaaggctgaattgcgtgtttgtggttgaacatttgtgcatatgtgcttgttccttggatcggtttgcatttgtgaacaaactctgaaaagctcaaaggcaagacccatcttgtacattctgtgacgctgtcagcttgtgaatccattcgtc

SEQ ID NO: 21643 - protein, 311 aa, Zea mays subsp. mays
  peptide (1)..(311): Ceres Seq. ID no. 15226643
  misc_feature (6)..(158): Pfam Name: Pfam Description:  Autophagocytosis associated protein
  misc_feature (1)..(311): NCBI GI NO: 34903638 NR Description: B1015E06.2
  misc_feature (1)..(311): NCBI GI NO: 18424474 NR Description: autophagocytosis protein - like
  misc_feature (1)..(311): NCBI GI NO: 21595613 NR Description: autophagocytosis protein-like
  misc_feature (1)..(311): NCBI GI NO: 9758466 NR Description: autophagocytosis protein AUT1-like
  misc_feature (1)..(231): NCBI GI NO: 37536838 NR Description: autophagocytosis protein AUT1-like
  misc_feature (4)..(173): NCBI GI NO: 28828597 NR Description: hypothetical protein [Dictyostelium discoideum]
  misc_feature (184)..(306): NCBI GI NO: 28828597 NR Description: hypothetical protein [Dictyostelium discoideum]
  misc_feature (13)..(302): NCBI GI NO: 34785406 NR Description: Unknown (protein for MGC:64156) [Danio rerio]
  misc_feature (5)..(302): NCBI GI NO: 13385890 NR Description: autophagy Apg3p/Aut1p-like [Mus musculus]
  misc_feature (5)..(302): NCBI GI NO: 19705511 NR Description: preconditioning-inducible gene 1 protein
MQVKQKVYEFYKGTVERVTAPRTVSAFLEKGVLSVPEFILAGDNLVAKCPTWSWEAGDPSKRKPYLPANKQFLVTRNVPCLRRAISVEEEYDAAGAEVVLDEDGEGWLATHGVQASKTEEEEDIPSMDTLDIGRSDGIKSIPSYFSGGKDEEEEDIPDMDTYEDTGDNLAAAEPSYFIAEEPQDDNILHTRTYDVSITYDKYYQTPRVWLTGYDESRMPLMPELVFEDISQDHARKTVTIEDHPHLLAGKHASVHPCKHAAVMKKIIDVPMSGGVEPEVDKYLFIFLKFIATVIPTIEYDYTMDVDLGSTS

SEQ ID NO: 21644 - protein, 185 aa, Zea mays subsp. mays
  peptide (1)..(185): Ceres Seq. ID no. 15226644
  misc_feature (59)..(177): Pfam Name: Pfam Description:  Autophagocytosis associated protein
  misc_feature (1)..(185): NCBI GI NO: 34903638 NR Description: B1015E06.2
  misc_feature (1)..(185): NCBI GI NO: 18424474 NR Description: autophagocytosis protein - like
  misc_feature (1)..(185): NCBI GI NO: 21595613 NR Description: autophagocytosis protein-like
  misc_feature (1)..(185): NCBI GI NO: 9758466 NR Description: autophagocytosis protein AUT1-like
  misc_feature (1)..(105): NCBI GI NO: 37536838 NR Description: autophagocytosis protein AUT1-like
  misc_feature (1)..(47): NCBI GI NO: 28828597 NR Description: hypothetical protein [Dictyostelium discoideum]
  misc_feature (58)..(180): NCBI GI NO: 28828597 NR Description: hypothetical protein [Dictyostelium discoideum]
  misc_feature (1)..(176): NCBI GI NO: 34785406 NR Description: Unknown (protein for MGC:64156) [Danio rerio]
  misc_feature (1)..(176): NCBI GI NO: 13385890 NR Description: autophagy Apg3p/Aut1p-like [Mus musculus]
  misc_feature (1)..(176): NCBI GI NO: 19705511 NR Description: preconditioning-inducible gene 1 protein
MDTLDIGRSDGIKSIPSYFSGGKDEEEEDIPDMDTYEDTGDNLAAAEPSYFIAEEPQDDNILHTRTYDVSITYDKYYQTPRVWLTGYDESRMPLMPELVFEDISQDHARKTVTIEDHPHLLAGKHASVHPCKHAAVMKKIIDVPMSGGVEPEVDKYLFIFLKFIATVIPTIEYDYTMDVDLGSTS

SEQ ID NO: 21645 - DNA, 1526 bp, Zea mays subsp. mays
  misc_feature (1)..(1526): Ceres Seq. ID no. 15226209
caaagatataatttcagatctaaaagatggccaggcttccttagtttgtgatggtctgtttttttcatgtaagatgtgcatgtcatatactaaatttagttgctagagatggcctgaaagtaatttcgaaaacaattgacaagatcaaagctcttgtactagctgtgaagggatctccattgcagtggaaggaacttatgaagtgtgctagcgagtcagaattagatacaaagaggggcatctcacttgatgtttcagcaagatggaattcaacttatttaatgctgcgggatgccttgtactacaaggatgcttttgcaaggcttaagtcttcaaatcgtcatatgtatgtaaaaaattatccatctccggatgagtgggacatggcactaaaaatctttcaatgcttgaaaaaagtttatagtctcgctgaaattctctctggcacttcatatccaacagcaaacttgttctatagaggtttttgtgacataaaagtattgctagatgactggtgttctagtgatgatgccaccatcagtgaaatggcaattgccatgagtcaaaaaattgagaaatattgggaacattctaacttggctcttgctgtggcatgctttcttgatcctcgatacaagaaaaaagttatagagtattacatgaagaaattccacggtgatgggtaccatgtggaacttgaaaaaattgttaatgtggtaagagggctctattgtttttattctagctctacacctgcaccagcaaagagtacatcaccggaaccagctaatagtgcatcagatattttaatggcaagtgtatctgatgaactggacagttttctgtatggtacaaatgaacctactctagttcggtccaatgagttggaaaagtacatggcagatccacttttgcgtcttggtggtccatttgatggcccatttgatattttagcgtggtggaagagcaagagggaagtgtatcctattctttcacaaattgttcgagatgtgatggccatacaagtatcaacggttgcatctgaatctgtttttaatgctgctggccgttttgttgatccttatcgtaatcgtcttgagccggagatggtagaggcattgatatgcaccaaagattggatagctgcagaaagaaaagattctaagattgttggttcaattgtgagtgaccttgaaattgagactttatctaccgtcatggctaacaaaataagagctgttgatgacaaggacatagaatggaaggaccaggagcatgatggtgagaacgaatatattgatagtgatcttgatgttatggatgaccacaatgaactttgagctatagctgtaggcttctagtttcagcttaatgtctactgcctttgagttactatgttatgtgtcttgggacttttataaactattatcgtgattgtgcatttgtgggtgtctgcttaattaattagacattgatgttgacttgttatatactccgtccgtcccaaaatatagctgtttctagtc

SEQ ID NO: 21646 - protein, 429 aa, Zea mays subsp. mays
  peptide (1)..(429): Ceres Seq. ID no. 15226210
  misc_feature (278)..(364): Pfam Name: Pfam Description:  hAT family dimerisation domain
  misc_feature (1)..(410): NCBI GI NO: 136125 NR Description: PUTATIVE AC TRANSPOSASE (ORFA)
  misc_feature (4)..(392): NCBI GI NO: 1091678 NR Description: activator-like transposable element
  misc_feature (105)..(390): NCBI GI NO: 136140 NR Description: PUTATIVE AC9 TRANSPOSASE
  misc_feature (1)..(101): NCBI GI NO: 136140 NR Description: PUTATIVE AC9 TRANSPOSASE
  misc_feature (1)..(403): NCBI GI NO: 37532356 NR Description: putative activator-like transposable element
  misc_feature (1)..(410): NCBI GI NO: 38344876 NR Description: OSJNBa0020P07.19
  misc_feature (4)..(384): NCBI GI NO: 37532082 NR Description: putative transposase
  misc_feature (4)..(245): NCBI GI NO: 29788816 NR Description: putative transposase
  misc_feature (166)..(369): NCBI GI NO: 7489762 NR Description: hypothetical protein - maize transposable elementAc
  misc_feature (1)..(363): NCBI GI NO: 4580990 NR Description: putative transposase [Arabidopsis thaliana]
MVCFFHVRCACHILNLVARDGLKVISKTIDKIKALVLAVKGSPLQWKELMKCASESELDTKRGISLDVSARWNSTYLMLRDALYYKDAFARLKSSNRHMYVKNYPSPDEWDMALKIFQCLKKVYSLAEILSGTSYPTANLFYRGFCDIKVLLDDWCSSDDATISEMAIAMSQKIEKYWEHSNLALAVACFLDPRYKKKVIEYYMKKFHGDGYHVELEKIVNVVRGLYCFYSSSTPAPAKSTSPEPANSASDILMASVSDELDSFLYGTNEPTLVRSNELEKYMADPLLRLGGPFDGPFDILAWWKSKREVYPILSQIVRDVMAIQVSTVASESVFNAAGRFVDPYRNRLEPEMVEALICTKDWIAAERKDSKIVGSIVSDLEIETLSTVMANKIRAVDDKDIEWKDQEHDGENEYIDSDLDVMDDHNEL

SEQ ID NO: 21647 - protein, 380 aa, Zea mays subsp. mays
  peptide (1)..(380): Ceres Seq. ID no. 15226211
  misc_feature (229)..(315): Pfam Name: Pfam Description:  hAT family dimerisation domain
  misc_feature (1)..(361): NCBI GI NO: 136125 NR Description: PUTATIVE AC TRANSPOSASE (ORFA)
  misc_feature (1)..(343): NCBI GI NO: 1091678 NR Description: activator-like transposable element
  misc_feature (56)..(341): NCBI GI NO: 136140 NR Description: PUTATIVE AC9 TRANSPOSASE
  misc_feature (1)..(52): NCBI GI NO: 136140 NR Description: PUTATIVE AC9 TRANSPOSASE
  misc_feature (1)..(354): NCBI GI NO: 37532356 NR Description: putative activator-like transposable element
  misc_feature (1)..(361): NCBI GI NO: 38344876 NR Description: OSJNBa0020P07.19
  misc_feature (1)..(335): NCBI GI NO: 37532082 NR Description: putative transposase
  misc_feature (1)..(196): NCBI GI NO: 29788816 NR Description: putative transposase
  misc_feature (117)..(320): NCBI GI NO: 7489762 NR Description: hypothetical protein - maize transposable elementAc
  misc_feature (1)..(314): NCBI GI NO: 4580990 NR Description: putative transposase [Arabidopsis thaliana]
MKCASESELDTKRGISLDVSARWNSTYLMLRDALYYKDAFARLKSSNRHMYVKNYPSPDEWDMALKIFQCLKKVYSLAEILSGTSYPTANLFYRGFCDIKVLLDDWCSSDDATISEMAIAMSQKIEKYWEHSNLALAVACFLDPRYKKKVIEYYMKKFHGDGYHVELEKIVNVVRGLYCFYSSSTPAPAKSTSPEPANSASDILMASVSDELDSFLYGTNEPTLVRSNELEKYMADPLLRLGGPFDGPFDILAWWKSKREVYPILSQIVRDVMAIQVSTVASESVFNAAGRFVDPYRNRLEPEMVEALICTKDWIAAERKDSKIVGSIVSDLEIETLSTVMANKIRAVDDKDIEWKDQEHDGENEYIDSDLDVMDDHNEL

SEQ ID NO: 21648 - protein, 352 aa, Zea mays subsp. mays
  peptide (1)..(352): Ceres Seq. ID no. 15226212
  misc_feature (201)..(287): Pfam Name: Pfam Description:  hAT family dimerisation domain
  misc_feature (1)..(333): NCBI GI NO: 136125 NR Description: PUTATIVE AC TRANSPOSASE (ORFA)
  misc_feature (1)..(315): NCBI GI NO: 1091678 NR Description: activator-like transposable element
  misc_feature (28)..(313): NCBI GI NO: 136140 NR Description: PUTATIVE AC9 TRANSPOSASE
  misc_feature (1)..(24): NCBI GI NO: 136140 NR Description: PUTATIVE AC9 TRANSPOSASE
  misc_feature (1)..(326): NCBI GI NO: 37532356 NR Description: putative activator-like transposable element
  misc_feature (1)..(333): NCBI GI NO: 38344876 NR Description: OSJNBa0020P07.19
  misc_feature (1)..(307): NCBI GI NO: 37532082 NR Description: putative transposase
  misc_feature (1)..(168): NCBI GI NO: 29788816 NR Description: putative transposase
  misc_feature (89)..(292): NCBI GI NO: 7489762 NR Description: hypothetical protein - maize transposable elementAc
  misc_feature (1)..(286): NCBI GI NO: 4580990 NR Description: putative transposase [Arabidopsis thaliana]
MLRDALYYKDAFARLKSSNRHMYVKNYPSPDEWDMALKIFQCLKKVYSLAEILSGTSYPTANLFYRGFCDIKVLLDDWCSSDDATISEMAIAMSQKIEKYWEHSNLALAVACFLDPRYKKKVIEYYMKKFHGDGYHVELEKIVNVVRGLYCFYSSSTPAPAKSTSPEPANSASDILMASVSDELDSFLYGTNEPTLVRSNELEKYMADPLLRLGGPFDGPFDILAWWKSKREVYPILSQIVRDVMAIQVSTVASESVFNAAGRFVDPYRNRLEPEMVEALICTKDWIAAERKDSKIVGSIVSDLEIETLSTVMANKIRAVDDKDIEWKDQEHDGENEYIDSDLDVMDDHNEL

SEQ ID NO: 21649 - DNA, 1788 bp, Zea mays subsp. mays
  misc_feature (1)..(1788): Ceres Seq. ID no. 15180094
acctcctctgtcgacgcaccaccccgaagcccccccgccgcgctcgcagggtgttcgacccttcgcccgcgcgccctcacgacatggcctcctccgtctccgccgccgccaaggccgccgcggcgttcgcgcacaaggtccagaaggagctggccgcgccggcgcagcgccgcgcgggcttgacccgccggaccaagccgtgcagcgtgcgcgccgtcgcttcgcccgcgcgcgccctgtcgtccaccggctcggtgaagagcgcgatgacgatgacggagaagatactggcgcgggcgtcggagcgcgcggcgttggagcctggggagaacgtgtgggtcgacgtcgacgtgctcatgacgcacgacgtctgcgggcccggcgccttcgacatcttcaagaaggagttcggggaggacgccagggtctgggaccgcgagaagctcgtcgtcatcccggaccactacatcttcaccagcgacgaccgcgccaaccgcaacgtcgacatcctcagggacttctgtgcggagcagaacatcaagtacttctatgacatcaaggacctcagcgatttcagggctaatccggactacaaaggcgtctgccacatcgcacttgctcaggaaggccactgccgaccaggcgaggttctcttgggcactgattctcacacatgcaatgctggagcttttggtcagtttgcaactggaatcggaaacactgacgcaggttttgtgttgggcactggaaaggctcttctcaaggtgccacctactatcaggtttatattagatggagagatgccgccttatttacttgcaaaggatctgattttgcaaattattggtgagatttcagtatctggtgcaacctacaaatcaatggagtttgttggatcaactgtagaaagtctaaccatggaagagcgtatgacactgtgcaacatggttattgaagctggtggaaagaacggtgttgtgcctgctgatgaaactacatttaaataccttgagggtaagacatcagtcgattatgaacctgtctacagtgatgctcaagccagattttttagcgactaccggtttgatgtatcaaaactggagccagtagttgccaagccacattcgcctgacaaccgtgctccagcaagagaatgcaaagatgtgaagatcgaccgagtctatattggttcttgcactggtggtaagaccgaggatttccttgctgctgcaaagttgttcttagcctcgggaaagaaggttaaagttcccacatttcttgtccctgccacgcaaaaggtgtggttggacgtatatagcctccctgtaccaggatctggtggcaaaacttgctcccagatatttgaggaggctggttgtgacacaccagcaagtcctaattgtggtgcttgtttgggtggccctcgtgatacatatgcacggatgaatgaacctactgtctgcgtgtccaccacgaacaggaactttccgggcaggatggggcacaaggaagggcaaatctacctggcgtctccctacactgcggctgcctcagccctgacggggtacgttacggacccaagggacttcctcatgtaacgtcttgaaacaacaacagatttcatgatgtaacagagtggctgtactgctgtttttcgtgctgaacttttgtctaggcatgtccttcgttgagaaataaactgcactagaataagcagcgacttctcgggcgccatagcagatgtgacctcatatttatttgtgcaactttttttgtttttggctctgt

SEQ ID NO: 21650 - protein, 531 aa, Zea mays subsp. mays
  peptide (1)..(531): Ceres Seq. ID no. 15180095
  misc_feature (90)..(521): Pfam Name: aconitate hydratase Pfam Description: Aconitase family
  misc_feature (77)..(530): NCBI GI NO: 18414006 NR Description: aconitase family [Arabidopsis thaliana]
  misc_feature (77)..(530): NCBI GI NO: 7450363 NR Description: hypothetical protein T9E8
  misc_feature (89)..(530): NCBI GI NO: 23043646 NR Description: hypothetical protein
  misc_feature (88)..(530): NCBI GI NO: 21673449 NR Description: 3-isopropylmalate dehydratase
  misc_feature (90)..(530): NCBI GI NO: 20094876 NR Description: 3-isopropylmalate dehydratase large subunit
  misc_feature (89)..(528): NCBI GI NO: 15668676 NR Description: 3-isopropylmalate dehydratase (leuC)
  misc_feature (88)..(526): NCBI GI NO: 15679385 NR Description: 3-isopropylmalate dehydratase, LeuD subunit
  misc_feature (89)..(526): NCBI GI NO: 15606262 NR Description: large subunit of isopropylmalate isomerase
  misc_feature (89)..(528): NCBI GI NO: 18977310 NR Description: 3-isopropylmalate dehydratase large subunit
  misc_feature (90)..(527): NCBI GI NO: 20091903 NR Description: 3-isopropylmalate dehydratase, large subunit
LLCRRTTPKPPRRARRVFDPSPARPHDMASSVSAAAKAAAAFAHKVQKELAAPAQRRAGLTRRTKPCSVRAVASPARALSSTGSVKSAMTMTEKILARASERAALEPGENVWVDVDVLMTHDVCGPGAFDIFKKEFGEDARVWDREKLVVIPDHYIFTSDDRANRNVDILRDFCAEQNIKYFYDIKDLSDFRANPDYKGVCHIALAQEGHCRPGEVLLGTDSHTCNAGAFGQFATGIGNTDAGFVLGTGKALLKVPPTIRFILDGEMPPYLLAKDLILQIIGEISVSGATYKSMEFVGSTVESLTMEERMTLCNMVIEAGGKNGVVPADETTFKYLEGKTSVDYEPVYSDAQARFFSDYRFDVSKLEPVVAKPHSPDNRAPARECKDVKIDRVYIGSCTGGKTEDFLAAAKLFLASGKKVKVPTFLVPATQKVWLDVYSLPVPGSGGKTCSQIFEEAGCDTPASPNCGACLGGPRDTYARMNEPTVCVSTTNRNFPGRMGHKEGQIYLASPYTAAASALTGYVTDPRDFLM

SEQ ID NO: 21651 - protein, 504 aa, Zea mays subsp. mays
  peptide (1)..(504): Ceres Seq. ID no. 15180096
  misc_feature (63)..(494): Pfam Name: aconitate hydratase Pfam Description: Aconitase family
  misc_feature (50)..(503): NCBI GI NO: 18414006 NR Description: aconitase family [Arabidopsis thaliana]
  misc_feature (50)..(503): NCBI GI NO: 7450363 NR Description: hypothetical protein T9E8
  misc_feature (62)..(503): NCBI GI NO: 23043646 NR Description: hypothetical protein
  misc_feature (61)..(503): NCBI GI NO: 21673449 NR Description: 3-isopropylmalate dehydratase
  misc_feature (63)..(503): NCBI GI NO: 20094876 NR Description: 3-isopropylmalate dehydratase large subunit
  misc_feature (62)..(501): NCBI GI NO: 15668676 NR Description: 3-isopropylmalate dehydratase (leuC)
  misc_feature (61)..(499): NCBI GI NO: 15679385 NR Description: 3-isopropylmalate dehydratase, LeuD subunit
  misc_feature (62)..(499): NCBI GI NO: 15606262 NR Description: large subunit of isopropylmalate isomerase
  misc_feature (62)..(501): NCBI GI NO: 18977310 NR Description: 3-isopropylmalate dehydratase large subunit
  misc_feature (63)..(500): NCBI GI NO: 20091903 NR Description: 3-isopropylmalate dehydratase, large subunit
MASSVSAAAKAAAAFAHKVQKELAAPAQRRAGLTRRTKPCSVRAVASPARALSSTGSVKSAMTMTEKILARASERAALEPGENVWVDVDVLMTHDVCGPGAFDIFKKEFGEDARVWDREKLVVIPDHYIFTSDDRANRNVDILRDFCAEQNIKYFYDIKDLSDFRANPDYKGVCHIALAQEGHCRPGEVLLGTDSHTCNAGAFGQFATGIGNTDAGFVLGTGKALLKVPPTIRFILDGEMPPYLLAKDLILQIIGEISVSGATYKSMEFVGSTVESLTMEERMTLCNMVIEAGGKNGVVPADETTFKYLEGKTSVDYEPVYSDAQARFFSDYRFDVSKLEPVVAKPHSPDNRAPARECKDVKIDRVYIGSCTGGKTEDFLAAAKLFLASGKKVKVPTFLVPATQKVWLDVYSLPVPGSGGKTCSQIFEEAGCDTPASPNCGACLGGPRDTYARMNEPTVCVSTTNRNFPGRMGHKEGQIYLASPYTAAASALTGYVTDPRDFLM

SEQ ID NO: 21652 - protein, 443 aa, Zea mays subsp. mays
  peptide (1)..(443): Ceres Seq. ID no. 15180097
  misc_feature (2)..(433): Pfam Name: aconitate hydratase Pfam Description: Aconitase family
  misc_feature (1)..(442): NCBI GI NO: 18414006 NR Description: aconitase family [Arabidopsis thaliana]
  misc_feature (1)..(442): NCBI GI NO: 7450363 NR Description: hypothetical protein T9E8
  misc_feature (1)..(442): NCBI GI NO: 23043646 NR Description: hypothetical protein
  misc_feature (1)..(442): NCBI GI NO: 21673449 NR Description: 3-isopropylmalate dehydratase
  misc_feature (2)..(442): NCBI GI NO: 20094876 NR Description: 3-isopropylmalate dehydratase large subunit
  misc_feature (1)..(440): NCBI GI NO: 15668676 NR Description: 3-isopropylmalate dehydratase (leuC)
  misc_feature (1)..(438): NCBI GI NO: 15679385 NR Description: 3-isopropylmalate dehydratase, LeuD subunit
  misc_feature (1)..(438): NCBI GI NO: 15606262 NR Description: large subunit of isopropylmalate isomerase
  misc_feature (1)..(440): NCBI GI NO: 18977310 NR Description: 3-isopropylmalate dehydratase large subunit
  misc_feature (2)..(439): NCBI GI NO: 20091903 NR Description: 3-isopropylmalate dehydratase, large subunit
MTMTEKILARASERAALEPGENVWVDVDVLMTHDVCGPGAFDIFKKEFGEDARVWDREKLVVIPDHYIFTSDDRANRNVDILRDFCAEQNIKYFYDIKDLSDFRANPDYKGVCHIALAQEGHCRPGEVLLGTDSHTCNAGAFGQFATGIGNTDAGFVLGTGKALLKVPPTIRFILDGEMPPYLLAKDLILQIIGEISVSGATYKSMEFVGSTVESLTMEERMTLCNMVIEAGGKNGVVPADETTFKYLEGKTSVDYEPVYSDAQARFFSDYRFDVSKLEPVVAKPHSPDNRAPARECKDVKIDRVYIGSCTGGKTEDFLAAAKLFLASGKKVKVPTFLVPATQKVWLDVYSLPVPGSGGKTCSQIFEEAGCDTPASPNCGACLGGPRDTYARMNEPTVCVSTTNRNFPGRMGHKEGQIYLASPYTAAASALTGYVTDPRDFLM

SEQ ID NO: 21653 - DNA, 1486 bp, Zea mays subsp. mays
  misc_feature (1)..(1486): Ceres Seq. ID no. 14303255
tagaacatcctaatcgaaaatcttttgatttgattttgcaggatccatccgagaacgagcagccacttctccgatgccgtcctcaatggccaaatccctcctcctccctccccagttcgtctccgtctcaccccgccacccccaccgcgccggattccccgtcctcaagccccgccgcgcctcgctgctggccttcaccggcggagacgtcacgcccccgccggacgccgacagcggctccaacaccaaccctctcgtcgatgtgccccgcgcgctctggcgccgcaccctgcagcctctcggcgactatggcttcggcaagcgcagcgtctgggagggcggcgtcggtctcttcatggtctccggggccgccctcctcgccctcgccctcgcatggcttaggggattccagctccgctcccgcttccgcaagtacaacaccgtcttcgagttcacgcaggcgtgtggcatctgcgtcggcacgcccgtccggatacgaggggtcaccgtcggctccgtcgtccgcgtcgactcctccctcaggagcatcgatgccaccgttgaggttggagatgataagatcatcataccacggaattcagtggtcgaggtgaatcagtcgggtcttctaatggagacgctcattgatatcacacccaaggatccactccctgcaccttcagtagggccacttgacccaaactgcatcaaagaaggtttgattctctgtgacaaagagaggatgaaaggacagcaaggtgtaagcttagatgcattggtgggaatatttacccgactaggtagagacatggaggagattggcgttagcaaaagctataagttggctgaaaaagttgcatctataatggaagaggcacaacctcttcttacacggattgaggatttagctgaagaaatgcaacctttgctctctgaagtcggtgatagtgatctgctgaaggatgtggagactatagctaaaggcctggccgacgcgtctgttgacctaagaaggctgaagtcgtccatgctcaccccagagaacacggatcttattaagcagtctattttcacccttatatttaccctgaagaacattgagagtatcagctcggacatctctgggttcacgggggatgagacgacaaggcagaacatcaagcttctgatcaagtctctcagcaggctattatgattgtttttcaatgtgcagaacagaatgatggattgctttgctttgctttgtttgagacaggaaatgatgctggtagagtagggtgactgtgtgtgtgtctcggtggcacagaggtgtaggaagagtagcagttaattaatgttccacaaggttttggttattctggtaataagtttctttttttttcttttttctttttaaaaaaactcagatcagtattgagctgttgtaggtcatatagtaggcccatttttcatcagttgatggatcgcccttgttggctgcctgaac

SEQ ID NO: 21654 - protein, 373 aa, Zea mays subsp. mays
  peptide (1)..(373): Ceres Seq. ID no. 14303256
  misc_feature (91)..(226): Pfam Name: Pfam Description:  mce related protein
  misc_feature (11)..(373): NCBI GI NO: 34906054 NR Description: P0698H10.22
  misc_feature (2)..(373): NCBI GI NO: 18402572 NR Description: expressed protein [Arabidopsis thaliana]
  misc_feature (27)..(373): NCBI GI NO: 21553847 NR Description: unknown [Arabidopsis thaliana]
  misc_feature (84)..(370): NCBI GI NO: 23128989 NR Description: hypothetical protein [Nostoc punctiforme]
  misc_feature (83)..(370): NCBI GI NO: 17227677 NR Description: hypothetical protein [Nostoc sp. PCC 7120]
  misc_feature (84)..(363): NCBI GI NO: 23043318 NR Description: hypothetical protein
  misc_feature (84)..(368): NCBI GI NO: 22299950 NR Description: ORF_ID:tll2407~hypothetical protein
  misc_feature (91)..(248): NCBI GI NO: 11465838 NR Description: ORF22 [Porphyra purpurea]
  misc_feature (84)..(356): NCBI GI NO: 16329641 NR Description: hypothetical protein [Synechocystis sp. PCC 6803]
  misc_feature (83)..(319): NCBI GI NO: 37523684 NR Description: hypothetical protein glr4115
MPSSMAKSLLLPPQFVSVSPRHPHRAGFPVLKPRRASLLAFTGGDVTPPPDADSGSNTNPLVDVPRALWRRTLQPLGDYGFGKRSVWEGGVGLFMVSGAALLALALAWLRGFQLRSRFRKYNTVFEFTQACGICVGTPVRIRGVTVGSVVRVDSSLRSIDATVEVGDDKIIIPRNSVVEVNQSGLLMETLIDITPKDPLPAPSVGPLDPNCIKEGLILCDKERMKGQQGVSLDALVGIFTRLGRDMEEIGVSKSYKLAEKVASIMEEAQPLLTRIEDLAEEMQPLLSEVGDSDLLKDVETIAKGLADASVDLRRLKSSMLTPENTDLIKQSIFTLIFTLKNIESISSDISGFTGDETTRQNIKLLIKSLSRLL

SEQ ID NO: 21655 - protein, 369 aa, Zea mays subsp. mays
  peptide (1)..(369): Ceres Seq. ID no. 14303257
  misc_feature (87)..(222): Pfam Name: Pfam Description:  mce related protein
  misc_feature (7)..(369): NCBI GI NO: 34906054 NR Description: P0698H10.22
  misc_feature (1)..(369): NCBI GI NO: 18402572 NR Description: expressed protein [Arabidopsis thaliana]
  misc_feature (23)..(369): NCBI GI NO: 21553847 NR Description: unknown [Arabidopsis thaliana]
  misc_feature (80)..(366): NCBI GI NO: 23128989 NR Description: hypothetical protein [Nostoc punctiforme]
  misc_feature (79)..(366): NCBI GI NO: 17227677 NR Description: hypothetical protein [Nostoc sp. PCC 7120]
  misc_feature (80)..(359): NCBI GI NO: 23043318 NR Description: hypothetical protein
  misc_feature (80)..(364): NCBI GI NO: 22299950 NR Description: ORF_ID:tll2407~hypothetical protein
  misc_feature (87)..(244): NCBI GI NO: 11465838 NR Description: ORF22 [Porphyra purpurea]
  misc_feature (80)..(352): NCBI GI NO: 16329641 NR Description: hypothetical protein [Synechocystis sp. PCC 6803]
  misc_feature (79)..(315): NCBI GI NO: 37523684 NR Description: hypothetical protein glr4115
MAKSLLLPPQFVSVSPRHPHRAGFPVLKPRRASLLAFTGGDVTPPPDADSGSNTNPLVDVPRALWRRTLQPLGDYGFGKRSVWEGGVGLFMVSGAALLALALAWLRGFQLRSRFRKYNTVFEFTQACGICVGTPVRIRGVTVGSVVRVDSSLRSIDATVEVGDDKIIIPRNSVVEVNQSGLLMETLIDITPKDPLPAPSVGPLDPNCIKEGLILCDKERMKGQQGVSLDALVGIFTRLGRDMEEIGVSKSYKLAEKVASIMEEAQPLLTRIEDLAEEMQPLLSEVGDSDLLKDVETIAKGLADASVDLRRLKSSMLTPENTDLIKQSIFTLIFTLKNIESISSDISGFTGDETTRQNIKLLIKSLSRLL

SEQ ID NO: 21656 - protein, 279 aa, Zea mays subsp. mays
  peptide (1)..(279): Ceres Seq. ID no. 14303258
  misc_feature (1)..(132): Pfam Name: Pfam Description:  mce related protein
  misc_feature (1)..(279): NCBI GI NO: 34906054 NR Description: P0698H10.22
  misc_feature (1)..(279): NCBI GI NO: 18402572 NR Description: expressed protein [Arabidopsis thaliana]
  misc_feature (1)..(279): NCBI GI NO: 21553847 NR Description: unknown [Arabidopsis thaliana]
  misc_feature (1)..(276): NCBI GI NO: 23128989 NR Description: hypothetical protein [Nostoc punctiforme]
  misc_feature (1)..(276): NCBI GI NO: 17227677 NR Description: hypothetical protein [Nostoc sp. PCC 7120]
  misc_feature (1)..(269): NCBI GI NO: 23043318 NR Description: hypothetical protein
  misc_feature (1)..(274): NCBI GI NO: 22299950 NR Description: ORF_ID:tll2407~hypothetical protein
  misc_feature (1)..(154): NCBI GI NO: 11465838 NR Description: ORF22 [Porphyra purpurea]
  misc_feature (1)..(262): NCBI GI NO: 16329641 NR Description: hypothetical protein [Synechocystis sp. PCC 6803]
  misc_feature (1)..(225): NCBI GI NO: 37523684 NR Description: hypothetical protein glr4115
MVSGAALLALALAWLRGFQLRSRFRKYNTVFEFTQACGICVGTPVRIRGVTVGSVVRVDSSLRSIDATVEVGDDKIIIPRNSVVEVNQSGLLMETLIDITPKDPLPAPSVGPLDPNCIKEGLILCDKERMKGQQGVSLDALVGIFTRLGRDMEEIGVSKSYKLAEKVASIMEEAQPLLTRIEDLAEEMQPLLSEVGDSDLLKDVETIAKGLADASVDLRRLKSSMLTPENTDLIKQSIFTLIFTLKNIESISSDISGFTGDETTRQNIKLLIKSLSRLL

SEQ ID NO: 21657 - DNA, 985 bp, Zea mays subsp. mays
  misc_feature (1)..(985): Ceres Seq. ID no. 14312486
agcagcataacaagaagacacaccaaaacctagctagcttgccgcacctgcttggggctgccaagtaaaagtagtaagctagagaagcaaagcaaagctccgatccaatccaatccaccgcgaggattatgtctctggtaaggctcctggacacgctggccctggactcgtgggtgcggaacccgttcaccatcttcggcacggcggtggccgccgacgcgtggctggccagcgacacgtcggcgttcgccaacacgcacatcgagagccgggacacggcggccgcctacgtgttcagcgccgcgctcccgccgggcgtcaagaaggaggaggtcacggtggagctggacgagggcaacgtgctggtcatcgccggcgagcgcagcgtgtgccgccaggagcgcagcgacgggtgccaccacatcgagcgcagccgcgccaccttcctcgccaggttccacctgcccgaggacgccgccgtcgacggcgtcagggccgccttggacgccggcaggctcaccgtcaccgtgcccaaggtcggggccgccgccgccgccatcgtgcccgagaagcccgccgccgacgcgccggcgctggcgcccgtgcccgtcgaggccggcccctgctgagcttctgacgatgccgacgccgacgccgaccgagacggccggccggctccctgttcctccacgtacacgcccccttgccggtgaacggatagtagcgtcccacgtcgtcgcgcgactgtgaggttgtcgctcgctcgcccgtgctgtctcaaagtttgtttccgtggtttggtcatggctttgcgtactacgtgatggactcagctgcctgtactgtactgcgtgcatgcatgtaaccatgaaaacaaaagggtggtattcctgcattgcacggctgcaacgtgtaattccgtctttaatcaatgttttttctgtgcttagtaaatgaaaaggcaagctaagctggaatcctatat

SEQ ID NO: 21658 - protein, 166 aa, Zea mays subsp. mays
  peptide (1)..(166): Ceres Seq. ID no. 14312487
  misc_feature (1)..(165): NCBI GI NO: 15408720 NR Description: P0443D08.1
  misc_feature (6)..(136): NCBI GI NO: 2911276 NR Description: LMW heat shock protein [Fragaria x ananassa]
  misc_feature (1)..(136): NCBI GI NO: 123543 NR Description: 16.9 KD CLASS I HEAT SHOCK PROTEIN
  misc_feature (1)..(136): NCBI GI NO: 169799 NR Description: 16.9 kDa heat shock protein
  misc_feature (6)..(137): NCBI GI NO: 71495 NR Description: heat shock protein (clone DChsp17.7) - carrot
  misc_feature (1)..(136): NCBI GI NO: 100883 NR Description: heat shock protein 17.2 - maize
  misc_feature (1)..(136): NCBI GI NO: 123545 NR Description: 16
  misc_feature (6)..(137): NCBI GI NO: 123548 NR Description: 17
  misc_feature (1)..(136): NCBI GI NO: 7441297 NR Description: heat shock protein 16.9 - pearl millet
  misc_feature (1)..(136): NCBI GI NO: 445136 NR Description: heat shock protein 16.9
MSLVRLLDTLALDSWVRNPFTIFGTAVAADAWLASDTSAFANTHIESRDTAAAYVFSAALPPGVKKEEVTVELDEGNVLVIAGERSVCRQERSDGCHHIERSRATFLARFHLPEDAAVDGVRAALDAGRLTVTVPKVGAAAAAIVPEKPAADAPALAPVPVEAGPC

SEQ ID NO: 21659 - DNA, 867 bp, Zea mays subsp. mays
  misc_feature (1)..(867): Ceres Seq. ID no. 14312480
aatcccgttcgggccgaagcaatccctctctgcattaacagcaaggagcgctgcaactcgccacttgcagtttcgacttttcgagatctgcgccgctgttgctgtccccactcggcctcccctctctctccccttcttccagacccttcccttcttccgctcacccacgcggacgccggctgcccccttccctgactgaccccctcgaggcccctcgatacgatacttcgggtgtaggggagcatgcggaagaaagggcgggcggtgccggagtggctcaacagcccaatttggtccgctaccccgcccgcgcccgcccagccggacccctacggcgccgacctcgctccgccgccacccccaaagccgccgccgccgccagctactgcctctcccgtaccgccgccgccgtcgtacgagcaggccgtaggggtgggtggtggccggagggaggaggaggacgacgagggcgccggggcggtgatacgggcacacctgctctccgacttcaaggccgcgctatcgaagaaggtggtgaacatgggagagctgcggcgcttagcctgcctcggcgtccccgacggcggtactggtgtccgacccgtcgtctggaaggtccccactcgcattctcttctgattctatagcgaattttggttgagagttcggagttttgcacttcctacttgccctgcaagggtttagtgttgatatttcactgggatagttggtcatttttccattctttctagctgacttatgtctgtcctcatttttttttctggttgtattgactattgagacatggagataaaagttacggagtgtataatttcttatatctgcagcgctggtggtttgtttggt

SEQ ID NO: 21660 - protein, 131 aa, Zea mays subsp. mays
  peptide (1)..(131): Ceres Seq. ID no. 14312481
  misc_feature (20)..(82): Pfam Name: Pfam Description:  Glycoprotein GG/GX
  misc_feature (1)..(125): NCBI GI NO: 15236337 NR Description: expressed protein [Arabidopsis thaliana]
  misc_feature (5)..(65): NCBI GI NO: 32406482 NR Description: predicted protein [Neurospora crassa]
MRKKGRAVPEWLNSPIWSATPPAPAQPDPYGADLAPPPPPKPPPPPATASPVPPPPSYEQAVGVGGGRREEEDDEGAGAVIRAHLLSDFKAALSKKVVNMGELRRLACLGVPDGGTGVRPVVWKVPTRILF

SEQ ID NO: 21661 - protein, 65 aa, Zea mays subsp. mays
  peptide (1)..(65): Ceres Seq. ID no. 14312482
IPFGPKQSLSALTARSAATRHLQFRLFEICAAVAVPTRPPLSLPFFQTLPFFRSPTRTPAAPFPD

SEQ ID NO: 21662 - DNA, 1201 bp, Zea mays subsp. mays
  misc_feature (1)..(1201): Ceres Seq. ID no. 15177545
aatcaggataaatatactatccttttgcgagacacatggacacgcggtgcgcgtcgtcgtctagctggagctggcggaccccataaatagtgctttagaccaagctgcgccctcgtgctcgtcgtcgtcatcttcttcctcctcctcctccaagcagcacggagcgattagctgctgctgctgccgctgcagcgggcagagatggcaggagcagaggttgccaacggcgtgcacgagggcgccctggatttggaggaaggcagaggaggcggagtcgatggagcggggtgtgagagctcggagcaggacggagccggtcgccgccccatgttctccgtgccgttcgtgcagaagatcctggcggaggcgttggggacctacttcctgatcttcgccgggtgcgcggcggtggcggtgaacctgcggacgggcggcacggtgacgttcccgggcatctgcgccgtgtggggcctggccgtgatggtgatggtgtactccgtgggccacatctccggcgcgcacctcaacccggccgtctccctcgccttcgccacctgcggccgcttcccctggaggcaggtgccggcgtacgcggcggcgcaggtcacgggggccacggcggccagcctgacgctgcgcctcctgttcgggagcgcgcgggagcacttcttcggcacggtgcccgccggctcggacgcgcagtcgctcgtcgtcgagttcatcatctccttcaacctcatgttcgtcgtctccggcgtcgccacggacaacagagccatcggcgaactcgccggcctcgccgttggagccaccgtcctgctaaacgtgctctttgccgggcctatatccggagcgtccatgaacccggcgaggaccctgggcccggcgctcgtcgtgggccgctacgccggcatctgggtgtacttcgcggggcccatctgcgggacggtggccggcgcctgggcctacaatctcatacgcttcaccgacaagcccctgcgagagatcacccagacctcctccttcttgcggagtgtcaggaggagctcgagctgaactactatatatatacacctcgtagctgcctgccacccaaacgactctcacgatctaaagatagcagttagcagtgttgtttctttaattttgtagccaaacaactcctctttttaattcttactgtcatttgtttacatgttgc

SEQ ID NO: 21663 - protein, 284 aa, Zea mays subsp. mays
  peptide (1)..(284): Ceres Seq. ID no. 15177546
  misc_feature (44)..(256): Pfam Name: Pfam Description:  Major intrinsic protein
  misc_feature (26)..(284): NCBI GI NO: 1076748 NR Description: major intrinsic protein - rice
  misc_feature (8)..(284): NCBI GI NO: 13447785 NR Description: NOD26-like membrane integral protein ZmNIP1-1
  misc_feature (52)..(282): NCBI GI NO: 34903716 NR Description: putative major intrinsic protein
  misc_feature (45)..(284): NCBI GI NO: 15234059 NR Description: major intrinsic protein (MIP) family
  misc_feature (45)..(284): NCBI GI NO: 21536953 NR Description: major intrinsic protein (MIP)- like
  misc_feature (45)..(284): NCBI GI NO: 2677614 NR Description: NLM1 protein (NodLikeMip1) [Arabidopsis thaliana]
  misc_feature (45)..(284): NCBI GI NO: 18415224 NR Description: major intrinsic protein (MIP) family
  misc_feature (16)..(284): NCBI GI NO: 15240348 NR Description: major intrinsic protein (MIP) family
  misc_feature (49)..(280): NCBI GI NO: 5139541 NR Description: nodulin26-like major intrinsic protein
  misc_feature (42)..(264): NCBI GI NO: 15220826 NR Description: major intrinsic protein (MIP) family
MAGAEVANGVHEGALDLEEGRGGGVDGAGCESSEQDGAGRRPMFSVPFVQKILAEALGTYFLIFAGCAAVAVNLRTGGTVTFPGICAVWGLAVMVMVYSVGHISGAHLNPAVSLAFATCGRFPWRQVPAYAAAQVTGATAASLTLRLLFGSAREHFFGTVPAGSDAQSLVVEFIISFNLMFVVSGVATDNRAIGELAGLAVGATVLLNVLFAGPISGASMNPARTLGPALVVGRYAGIWVYFAGPICGTVAGAWAYNLIRFTDKPLREITQTSSFLRSVRRSSS

SEQ ID NO: 21664 - protein, 242 aa, Zea mays subsp. mays
  peptide (1)..(242): Ceres Seq. ID no. 15177547
  misc_feature (2)..(214): Pfam Name: Pfam Description:  Major intrinsic protein
  misc_feature (1)..(242): NCBI GI NO: 1076748 NR Description: major intrinsic protein - rice
  misc_feature (1)..(242): NCBI GI NO: 13447785 NR Description: NOD26-like membrane integral protein ZmNIP1-1
  misc_feature (10)..(240): NCBI GI NO: 34903716 NR Description: putative major intrinsic protein
  misc_feature (3)..(242): NCBI GI NO: 15234059 NR Description: major intrinsic protein (MIP) family
  misc_feature (3)..(242): NCBI GI NO: 21536953 NR Description: major intrinsic protein (MIP)- like
  misc_feature (3)..(242): NCBI GI NO: 2677614 NR Description: NLM1 protein (NodLikeMip1) [Arabidopsis thaliana]
  misc_feature (3)..(242): NCBI GI NO: 18415224 NR Description: major intrinsic protein (MIP) family
  misc_feature (1)..(242): NCBI GI NO: 15240348 NR Description: major intrinsic protein (MIP) family
  misc_feature (7)..(238): NCBI GI NO: 5139541 NR Description: nodulin26-like major intrinsic protein
  misc_feature (1)..(222): NCBI GI NO: 15220826 NR Description: major intrinsic protein (MIP) family
MFSVPFVQKILAEALGTYFLIFAGCAAVAVNLRTGGTVTFPGICAVWGLAVMVMVYSVGHISGAHLNPAVSLAFATCGRFPWRQVPAYAAAQVTGATAASLTLRLLFGSAREHFFGTVPAGSDAQSLVVEFIISFNLMFVVSGVATDNRAIGELAGLAVGATVLLNVLFAGPISGASMNPARTLGPALVVGRYAGIWVYFAGPICGTVAGAWAYNLIRFTDKPLREITQTSSFLRSVRRSSS

SEQ ID NO: 21665 - protein, 191 aa, Zea mays subsp. mays
  peptide (1)..(191): Ceres Seq. ID no. 15177548
  misc_feature (1)..(163): Pfam Name: Pfam Description:  Major intrinsic protein
  misc_feature (1)..(191): NCBI GI NO: 1076748 NR Description: major intrinsic protein - rice
  misc_feature (1)..(191): NCBI GI NO: 13447785 NR Description: NOD26-like membrane integral protein ZmNIP1-1
  misc_feature (1)..(189): NCBI GI NO: 34903716 NR Description: putative major intrinsic protein
  misc_feature (1)..(191): NCBI GI NO: 15234059 NR Description: major intrinsic protein (MIP) family
  misc_feature (1)..(191): NCBI GI NO: 21536953 NR Description: major intrinsic protein (MIP)- like
  misc_feature (1)..(191): NCBI GI NO: 2677614 NR Description: NLM1 protein (NodLikeMip1) [Arabidopsis thaliana]
  misc_feature (1)..(191): NCBI GI NO: 18415224 NR Description: major intrinsic protein (MIP) family
  misc_feature (1)..(191): NCBI GI NO: 15240348 NR Description: major intrinsic protein (MIP) family
  misc_feature (1)..(187): NCBI GI NO: 5139541 NR Description: nodulin26-like major intrinsic protein
  misc_feature (1)..(171): NCBI GI NO: 15220826 NR Description: major intrinsic protein (MIP) family
MVMVYSVGHISGAHLNPAVSLAFATCGRFPWRQVPAYAAAQVTGATAASLTLRLLFGSAREHFFGTVPAGSDAQSLVVEFIISFNLMFVVSGVATDNRAIGELAGLAVGATVLLNVLFAGPISGASMNPARTLGPALVVGRYAGIWVYFAGPICGTVAGAWAYNLIRFTDKPLREITQTSSFLRSVRRSSS

SEQ ID NO: 21666 - DNA, 1896 bp, Zea mays subsp. mays
  misc_feature (1)..(1896): Ceres Seq. ID no. 15180647
aatccgcagcaattccattccccatcccaccgcttccccacctctcccccacccgcgcgtccggccgggtgcaccaatccgatggcttgactggcccccacaacgcaccgacggcgccgacaagctcccgtcacgccgccgccgccgctggcggcggcggcgcccgtcgcgctagctgctacggcggcagcatggacaccgcgctctgcgacgacctgctgcaggtggtgttcggtcttctcccgccctccgctgcaccggccgtgtccctcgtctcccgccgctggctcgcgctcctcagggccgcgacgtcgtccctcagcctccgcttgcctgcctcctcggcggcgaccctcgccgccctgctgtctcactatcccttcctcgccgccctgaccgtggtctccgctggtacgccggtccacgacgccgacgccgtgctgctcgctgtcgcggccgcgccggccgcttcccggctctccacgctgcggctcttgcccgattgggcggtctcccccgccgcgctgcttacggtctgccctgcactcgccggtctgacgtcgctccacctcaccgctgtccgccccctatctttccgctggctcaagctgttgccgcgcctcaagtcgttcgccctcgtcaactccgccgccgccgttgactccgcgggctcgagctcggatgacgccgacggcgaggccgaggacgtcgcagggacattgccgctggagaagctgtcactttgcggcatccgctccggcgaccgcgggcttgggtggctgtggcggcggtgcgggagcctcaagtggttgcagctgcgcgcctgcgacggtaccggggacgggcccgcgtcgctggccttcgcgggttgccttgctggcttgctcgcgcttgagcttcgtgcttgccgtgctgtcgccgaccgtgtactactccttgcagccgaccattgccgcacgctaacgtccctcctggtctatgacggcggcggcagcgaggcccttcaccggttcatccagcagcgtgctgctggtctgcacaccttggaccttcgcctcccgcttgacctgcacaacgatcatctcctcgccattggagctgactcagttcacaatgctacacatggcctagcttcacttcgcctccagagctgcgtccttatcacaggggacggcctccggtccctggcacgcacagccgccggagccggcatagaagagctcgccttggtgagttgcgacgtggtggagtgggagcccgggttgctgacattcctcagtcagagcatgccgcggctccgtcgacttaacctgtcttacaatgagacactgaacgacaaggtgatcggcgccatgctttcatcctgccggaatctcatcgacatcagactcagggggtgccggggcctgacgggaggctcgctcctctcgctgcttaggcactgtgggcagtcactggagatccttgacatctcccgctgtccgggcattgctataggtaacgttgagctctttgcccagcgcgccgctaggttgaatcatgtgatcatcgaggagagcgcgatgtcggaggaattgaaggcaatcgctcagaagaaaggcatgaaggttggctcattgccgtgcgaaggaggaccattctgaagtaaggttgtatctccttcagaatgcagttccatgttctgtgcaactcgatttgtgaatgtaaccttcactggaatgttaataaagtattgctgcttagtacttgtgtatgcagctttgtatctgccttgtaagcttattatgactagcctcttggtgcctgcttgacatgtaaattgagcgccaaaggtgtgctgtactgctgttgtatatgttcaacaattgccatggaataatacagaaaattcaaacc

SEQ ID NO: 21667 - protein, 546 aa, Zea mays subsp. mays
  peptide (1)..(546): Ceres Seq. ID no. 15180648
  misc_feature (64)..(532): NCBI GI NO: 15242713 NR Description: expressed protein [Arabidopsis thaliana]
  misc_feature (242)..(493): NCBI GI NO: 12848653 NR Description: unnamed protein product [Mus musculus]
  misc_feature (242)..(493): NCBI GI NO: 27734755 NR Description: F-box protein FBL2 [Homo sapiens]
  misc_feature (242)..(493): NCBI GI NO: 38503178 NR Description: F-box/LRR-repeat protein 2-like
  misc_feature (242)..(496): NCBI GI NO: 18414458 NR Description: F-box protein family (FBL4) [Arabidopsis thaliana]
  misc_feature (242)..(496): NCBI GI NO: 21536497 NR Description: F-box protein family, AtFBL4
  misc_feature (242)..(494): NCBI GI NO: 25151694 NR Description: rad-51
  misc_feature (242)..(494): NCBI GI NO: 25151696 NR Description: rad-51
  misc_feature (242)..(494): NCBI GI NO: 630513 NR Description: hypothetical protein C02F5
  misc_feature (242)..(525): NCBI GI NO: 24652783 NR Description: CG9003-PA [Drosophila melanogaster]
SAAIPFPIPPLPHLSPTRASGRVHQSDGLTGPHNAPTAPTSSRHAAAAAGGGGARRASCYGGSMDTALCDDLLQVVFGLLPPSAAPAVSLVSRRWLALLRAATSSLSLRLPASSAATLAALLSHYPFLAALTVVSAGTPVHDADAVLLAVAAAPAASRLSTLRLLPDWAVSPAALLTVCPALAGLTSLHLTAVRPLSFRWLKLLPRLKSFALVNSAAAVDSAGSSSDDADGEAEDVAGTLPLEKLSLCGIRSGDRGLGWLWRRCGSLKWLQLRACDGTGDGPASLAFAGCLAGLLALELRACRAVADRVLLLAADHCRTLTSLLVYDGGGSEALHRFIQQRAAGLHTLDLRLPLDLHNDHLLAIGADSVHNATHGLASLRLQSCVLITGDGLRSLARTAAGAGIEELALVSCDVVEWEPGLLTFLSQSMPRLRRLNLSYNETLNDKVIGAMLSSCRNLIDIRLRGCRGLTGGSLLSLLRHCGQSLEILDISRCPGIAIGNVELFAQRAARLNHVIIEESAMSEELKAIAQKKGMKVGSLPCEGGPF

SEQ ID NO: 21668 - protein, 483 aa, Zea mays subsp. mays
  peptide (1)..(483): Ceres Seq. ID no. 15180649
  misc_feature (1)..(469): NCBI GI NO: 15242713 NR Description: expressed protein [Arabidopsis thaliana]
  misc_feature (179)..(430): NCBI GI NO: 12848653 NR Description: unnamed protein product [Mus musculus]
  misc_feature (179)..(430): NCBI GI NO: 27734755 NR Description: F-box protein FBL2 [Homo sapiens]
  misc_feature (179)..(430): NCBI GI NO: 38503178 NR Description: F-box/LRR-repeat protein 2-like
  misc_feature (179)..(433): NCBI GI NO: 18414458 NR Description: F-box protein family (FBL4) [Arabidopsis thaliana]
  misc_feature (179)..(433): NCBI GI NO: 21536497 NR Description: F-box protein family, AtFBL4
  misc_feature (179)..(431): NCBI GI NO: 25151694 NR Description: rad-51
  misc_feature (179)..(431): NCBI GI NO: 25151696 NR Description: rad-51
  misc_feature (179)..(431): NCBI GI NO: 630513 NR Description: hypothetical protein C02F5
  misc_feature (179)..(462): NCBI GI NO: 24652783 NR Description: CG9003-PA [Drosophila melanogaster]
MDTALCDDLLQVVFGLLPPSAAPAVSLVSRRWLALLRAATSSLSLRLPASSAATLAALLSHYPFLAALTVVSAGTPVHDADAVLLAVAAAPAASRLSTLRLLPDWAVSPAALLTVCPALAGLTSLHLTAVRPLSFRWLKLLPRLKSFALVNSAAAVDSAGSSSDDADGEAEDVAGTLPLEKLSLCGIRSGDRGLGWLWRRCGSLKWLQLRACDGTGDGPASLAFAGCLAGLLALELRACRAVADRVLLLAADHCRTLTSLLVYDGGGSEALHRFIQQRAAGLHTLDLRLPLDLHNDHLLAIGADSVHNATHGLASLRLQSCVLITGDGLRSLARTAAGAGIEELALVSCDVVEWEPGLLTFLSQSMPRLRRLNLSYNETLNDKVIGAMLSSCRNLIDIRLRGCRGLTGGSLLSLLRHCGQSLEILDISRCPGIAIGNVELFAQRAARLNHVIIEESAMSEELKAIAQKKGMKVGSLPCEGGPF

SEQ ID NO: 21669 - DNA, 1714 bp, Zea mays subsp. mays
  misc_feature (1)..(1714): Ceres Seq. ID no. 15224334
acgtaaggscaaacgcgaacggaaccctccccagcagatgagcggagtaggtgggcggggttctcttccactcccgctccagctttctctggcccgatcgatgctacattcccgcggcgagccgctcgccttcctccgcgggccttgggctacccaacccatcgccgagccgcctcgcgcggtcccccctccatctttgcccggctctctcgcctcggaggacggacagagaaagagaggatgagaagggactcctcgaaccgcgtcccgcgctcgggctattggaccgaggggttgcggtggatttggagcgcggggtggactcgtcgctgatggtattctccgatgcaagaggcagggagagagcgggacagggcggcggcggcggcggatctcggaggcgtcgccgctagcgtcaggccaacggatacagcagctgtaagcacaaagccggcaaagcgatacccactggccttatggataggcatattgggcctgataataaaaggaaagggagaagccttgtcatgatcccagtattccagacacagaaatcccttacttgcactacccgatgccaaatacttatgataggaaagaatgtgcgtgcacaggggttaggttctttgctatcttgtcaatgcagaggtccgggagtggatgggttgagacgttgttgaatagccatcctaatattagctccaatggagagatcttctctgtcaaagaaagacgcagcaatatcaccgcgatcacgaaaacactggacagattgtacaatctggattggtatagcagtgctgctaagaacgaatgtacggctgccgtggggctgaaatggatgctcaatcagtgaaaattatagggtctaatgaagcaccatcaagagatagttgaatacttcaaccgaaggggtgtttccgcaatttttctactaagaagaaatcttcttcggcgttacgtctctatattagcaaatgctcatgatagtgccatgaaacagttgaatggaactcataaagctcatgtgcactccaaacatgaggctgaaatccttgctcaatataagccaaccattgacaaaaaaacattgattactgaactaaaacggtctgataagttggcagctgatgctctggtgaatttcaagaacaccaggcacgttgtcctgtactacgaggatgttgtcagcaatcgcacgatgctcatggatgttctggattttctcagattgccaaagaggaagctgttcagtcgacatgtgaaaatccacacaaaacgattgtgcgatcatatagataactgggcagatgttactgattttttgaagggcacaccgttcgagagctttttgaatggctcaagaagatgacatggctagctgatgtatatagtgctatagtgagttgtccttctggcgcctcgtaggttttttttttttttgataccatgatgaaataagtatgggccactgagagaaatagttaggtagagatgcttgatccaggctattagagctgtagaataaagattaaaaacaatacctttgtgattatcagatatctaatgcaagaacttgcaaaactgtctggagtcattcgtgtatacatcaaagtttacacttacacttgaaaatgaataggccaagctccgtggcagaggaactgaggaaaaaggcagagtagcctatacaaaactgatgatttttactagc

SEQ ID NO: 21670 - protein, 166 aa, Zea mays subsp. mays
  peptide (1)..(166): Ceres Seq. ID no. 15224335
  misc_feature (1)..(166): NCBI GI NO: 29824462 NR Description: unknown protein
  misc_feature (1)..(161): NCBI GI NO: 40823013 NR Description: At2g15730 [Arabidopsis thaliana]
  misc_feature (1)..(162): NCBI GI NO: 22329158 NR Description: hypothetical protein [Arabidopsis thaliana]
  misc_feature (1)..(164): NCBI GI NO: 33146729 NR Description: unknown protein
  misc_feature (1)..(58): NCBI GI NO: 14029013 NR Description: Unknown protein [Oryza sativa]
  misc_feature (112)..(166): NCBI GI NO: 14029013 NR Description: Unknown protein [Oryza sativa]
  misc_feature (1)..(133): NCBI GI NO: 15229813 NR Description: expressed protein [Arabidopsis thaliana]
  misc_feature (57)..(161): NCBI GI NO: 25411661 NR Description: hypothetical protein At2g15730
  misc_feature (57)..(161): NCBI GI NO: 30679514 NR Description: expressed protein [Arabidopsis thaliana]
  misc_feature (1)..(164): NCBI GI NO: 34904786 NR Description: contains ESTsAU096411
MKHHQEIVEYFNRRGVSAIFLLRRNLLRRYVSILANAHDSAMKQLNGTHKAHVHSKHEAEILAQYKPTIDKKTLITELKRSDKLAADALVNFKNTRHVVLYYEDVVSNRTMLMDVLDFLRLPKRKLFSRHVKIHTKRLCDHIDNWADVTDFLKGTPFESFLNGSRR

SEQ ID NO: 21671 - protein, 125 aa, Zea mays subsp. mays
  peptide (1)..(125): Ceres Seq. ID no. 15224336
  misc_feature (1)..(125): NCBI GI NO: 29824462 NR Description: unknown protein
  misc_feature (1)..(120): NCBI GI NO: 40823013 NR Description: At2g15730 [Arabidopsis thaliana]
  misc_feature (1)..(121): NCBI GI NO: 22329158 NR Description: hypothetical protein [Arabidopsis thaliana]
  misc_feature (1)..(123): NCBI GI NO: 33146729 NR Description: unknown protein
  misc_feature (1)..(17): NCBI GI NO: 14029013 NR Description: Unknown protein [Oryza sativa]
  misc_feature (71)..(125): NCBI GI NO: 14029013 NR Description: Unknown protein [Oryza sativa]
  misc_feature (1)..(92): NCBI GI NO: 15229813 NR Description: expressed protein [Arabidopsis thaliana]
  misc_feature (16)..(120): NCBI GI NO: 25411661 NR Description: hypothetical protein At2g15730
  misc_feature (16)..(120): NCBI GI NO: 30679514 NR Description: expressed protein [Arabidopsis thaliana]
  misc_feature (1)..(123): NCBI GI NO: 34904786 NR Description: contains ESTsAU096411
MKQLNGTHKAHVHSKHEAEILAQYKPTIDKKTLITELKRSDKLAADALVNFKNTRHVVLYYEDVVSNRTMLMDVLDFLRLPKRKLFSRHVKIHTKRLCDHIDNWADVTDFLKGTPFESFLNGSRR

SEQ ID NO: 21672 - protein, 93 aa, Zea mays subsp. mays
  peptide (1)..(93): Ceres Seq. ID no. 15224337
  misc_feature (1)..(93): NCBI GI NO: 29824462 NR Description: unknown protein
  misc_feature (1)..(93): NCBI GI NO: 40823013 NR Description: At2g15730 [Arabidopsis thaliana]
  misc_feature (1)..(93): NCBI GI NO: 22329158 NR Description: hypothetical protein [Arabidopsis thaliana]
  misc_feature (1)..(93): NCBI GI NO: 33146729 NR Description: unknown protein
  misc_feature (1)..(93): NCBI GI NO: 14029013 NR Description: Unknown protein [Oryza sativa]
  misc_feature (9)..(93): NCBI GI NO: 15229813 NR Description: expressed protein [Arabidopsis thaliana]
  misc_feature (42)..(93): NCBI GI NO: 25411661 NR Description: hypothetical protein At2g15730
  misc_feature (42)..(93): NCBI GI NO: 30679514 NR Description: expressed protein [Arabidopsis thaliana]
  misc_feature (26)..(93): NCBI GI NO: 34904786 NR Description: contains ESTsAU096411
  misc_feature (1)..(93): NCBI GI NO: 34904786 NR Description: contains ESTsAU096411
MPNTYDRKECACTGVRFFAILSMQRSGSGWVETLLNSHPNISSNGEIFSVKERRSNITAITKTLDRLYNLDWYSSAAKNECTAAVGLKWMLNQ

SEQ ID NO: 21673 - DNA, 1260 bp, Zea mays subsp. mays
  misc_feature (1)..(1260): Ceres Seq. ID no. 12637732
aacgatggacgccagcccatgggccaacgatcctccgtggaccgacttcctaaccgcacgaacctccgagacggagcgtggcgcccgcctcggcgcctccgccctccgtcggcggcgcacggggagcatagaaggtgtcgtactcgtacctctcgcacacgcccccatcgccacgcgtgcaacgaagctggctccgtcgccatggccctgctgccgttgcccccctgctccccgtgccaccgccgggccgcgcccttgccggcgcccacggccgcctcggcgcgccaccgcagggggagcctgcgcctcgctgcagccggtgcctgctccggacctaccgccgcgcggaagccccgtcccaccgccgccgacaggaggaggtgcgaatgctttgacctccatcggcggttagttccttacgcggaggcttactgctggcagaagtccattgtcgagaggaggaaaaggttgatagacagcggcgaagaccactccgacaccttgattgctttgcaacatccaccggtctacacattgggcaccgacaacaaggaggaatacctccatttcaacaaggaagatgctcctttcgaggttcatcgtattaatcgcggcggtgaagtgacgtaccatggccctggacagcttgttatgtacccgattatgaatctgcggtaccacaaagaggatcttcactggtacttcaggtcactcgaagaagtgatcatccgcgcacttaaatccgtcttctctatcacggcagcaagaatagaaggtctcactggtgtttgggttggggaccataaagttgcggcgatagggatccacggttctcggatgatagtttatcacgggctcgcactaaacataacaactgaccttgctccattcggaatgattgatccttgcggcataaaggaccgcagtgtggggagcattaaggagatactacaaagggtgtctgatgcggaagagatcgatgacgcgtcactgatggatatagcgtatgattccatgatcaaggagtttgcggaactcttccagctcagtctagacttcagccctggttgcagtttccagtgagaacaacgattttagcagaccgtatgatgctgccgttgtattctggacggaatgttagctcacggcctttcgtgctcggtatctccgtgtctgctgcactccaccatgtataccacatccacctttcagtcgcaggatatctctggaatctgtagcagtacagtcgggttcttcggt

SEQ ID NO: 21674 - protein, 360 aa, Zea mays subsp. mays
  peptide (1)..(360): Ceres Seq. ID no. 12637733
  misc_feature (126)..(352): NCBI GI NO: 18417727 NR Description: putative protein; protein id: At4g31050
  misc_feature (126)..(352): NCBI GI NO: 25405224 NR Description: F16N3.14 [imported] - Arabidopsis thaliana
  misc_feature (127)..(266): NCBI GI NO: 25407705 NR Description: hypothetical protein AT4g31050
  misc_feature (130)..(351): NCBI GI NO: 17230677 NR Description: lipoate-protein ligase B [Nostoc sp. PCC 7120]
  misc_feature (130)..(324): NCBI GI NO: 23125051 NR Description: hypothetical protein [Nostoc punctiforme]
  misc_feature (238)..(352): NCBI GI NO: 15220259 NR Description: hypothetical protein; protein id: At1g47580.1
  misc_feature (179)..(216): NCBI GI NO: 15220259 NR Description: hypothetical protein; protein id: At1g47580.1
  misc_feature (137)..(324): NCBI GI NO: 23041482 NR Description: hypothetical protein
  misc_feature (137)..(355): NCBI GI NO: 22298375 NR Description: lipoate-protein ligase
  misc_feature (137)..(350): NCBI GI NO: 16331217 NR Description: LipB protein [Synechocystis sp. PCC 6803]
NDGRQPMGQRSSVDRLPNRTNLRDGAWRPPRRLRPPSAAHGEHRRCRTRTSRTRPHRHACNEAGSVAMALLPLPPCSPCHRRAAPLPAPTAASARHRRGSLRLAAAGACSGPTAARKPRPTAADRRRCECFDLHRRLVPYAEAYCWQKSIVERRKRLIDSGEDHSDTLIALQHPPVYTLGTDNKEEYLHFNKEDAPFEVHRINRGGEVTYHGPGQLVMYPIMNLRYHKEDLHWYFRSLEEVIIRALKSVFSITAARIEGLTGVWVGDHKVAAIGIHGSRMIVYHGLALNITTDLAPFGMIDPCGIKDRSVGSIKEILQRVSDAEEIDDASLMDIAYDSMIKEFAELFQLSLDFSPGCSFQ

SEQ ID NO: 21675 - protein, 354 aa, Zea mays subsp. mays
  peptide (1)..(354): Ceres Seq. ID no. 12637734
  misc_feature (120)..(346): NCBI GI NO: 18417727 NR Description: putative protein; protein id: At4g31050
  misc_feature (120)..(346): NCBI GI NO: 25405224 NR Description: F16N3.14 [imported] - Arabidopsis thaliana
  misc_feature (121)..(260): NCBI GI NO: 25407705 NR Description: hypothetical protein AT4g31050
  misc_feature (124)..(345): NCBI GI NO: 17230677 NR Description: lipoate-protein ligase B [Nostoc sp. PCC 7120]
  misc_feature (124)..(318): NCBI GI NO: 23125051 NR Description: hypothetical protein [Nostoc punctiforme]
  misc_feature (232)..(346): NCBI GI NO: 15220259 NR Description: hypothetical protein; protein id: At1g47580.1
  misc_feature (173)..(210): NCBI GI NO: 15220259 NR Description: hypothetical protein; protein id: At1g47580.1
  misc_feature (131)..(318): NCBI GI NO: 23041482 NR Description: hypothetical protein
  misc_feature (131)..(349): NCBI GI NO: 22298375 NR Description: lipoate-protein ligase
  misc_feature (131)..(344): NCBI GI NO: 16331217 NR Description: LipB protein [Synechocystis sp. PCC 6803]
MGQRSSVDRLPNRTNLRDGAWRPPRRLRPPSAAHGEHRRCRTRTSRTRPHRHACNEAGSVAMALLPLPPCSPCHRRAAPLPAPTAASARHRRGSLRLAAAGACSGPTAARKPRPTAADRRRCECFDLHRRLVPYAEAYCWQKSIVERRKRLIDSGEDHSDTLIALQHPPVYTLGTDNKEEYLHFNKEDAPFEVHRINRGGEVTYHGPGQLVMYPIMNLRYHKEDLHWYFRSLEEVIIRALKSVFSITAARIEGLTGVWVGDHKVAAIGIHGSRMIVYHGLALNITTDLAPFGMIDPCGIKDRSVGSIKEILQRVSDAEEIDDASLMDIAYDSMIKEFAELFQLSLDFSPGCSFQ

SEQ ID NO: 21676 - protein, 293 aa, Zea mays subsp. mays
  peptide (1)..(293): Ceres Seq. ID no. 12637735
  misc_feature (59)..(285): NCBI GI NO: 18417727 NR Description: putative protein; protein id: At4g31050
  misc_feature (59)..(285): NCBI GI NO: 25405224 NR Description: F16N3.14 [imported] - Arabidopsis thaliana
  misc_feature (60)..(199): NCBI GI NO: 25407705 NR Description: hypothetical protein AT4g31050
  misc_feature (63)..(284): NCBI GI NO: 17230677 NR Description: lipoate-protein ligase B [Nostoc sp. PCC 7120]
  misc_feature (63)..(257): NCBI GI NO: 23125051 NR Description: hypothetical protein [Nostoc punctiforme]
  misc_feature (171)..(285): NCBI GI NO: 15220259 NR Description: hypothetical protein; protein id: At1g47580.1
  misc_feature (112)..(149): NCBI GI NO: 15220259 NR Description: hypothetical protein; protein id: At1g47580.1
  misc_feature (70)..(257): NCBI GI NO: 23041482 NR Description: hypothetical protein
  misc_feature (70)..(288): NCBI GI NO: 22298375 NR Description: lipoate-protein ligase
  misc_feature (70)..(283): NCBI GI NO: 16331217 NR Description: LipB protein [Synechocystis sp. PCC 6803]
MALLPLPPCSPCHRRAAPLPAPTAASARHRRGSLRLAAAGACSGPTAARKPRPTAADRRRCECFDLHRRLVPYAEAYCWQKSIVERRKRLIDSGEDHSDTLIALQHPPVYTLGTDNKEEYLHFNKEDAPFEVHRINRGGEVTYHGPGQLVMYPIMNLRYHKEDLHWYFRSLEEVIIRALKSVFSITAARIEGLTGVWVGDHKVAAIGIHGSRMIVYHGLALNITTDLAPFGMIDPCGIKDRSVGSIKEILQRVSDAEEIDDASLMDIAYDSMIKEFAELFQLSLDFSPGCSFQ

SEQ ID NO: 21677 - DNA, 2169 bp, Zea mays subsp. mays
  misc_feature (1)..(2169): Ceres Seq. ID no. 15225419
gttagtgtatcaaaaccaattcgcgacatcacttaggaaggggaaagcaggggccggaaaaagaagaagagacgggaatggcaagctccgactcaaatcccaccgatgcattcgagtacatgctgcttgagaaggatcctgatctctaccggacggttttctctggtccgagccagacaagcccatggattgacccgagtgtgttaaagctgaagcaccggatagggagaggtccatttggggatgtatggatagcaactcaccaccaaaggacagaggatttcgatcagtaccatgaggttgcggtgaagatgctgcatccaattaaagaggaccagctgcagatcttctcagcgaggttccatgagatcttcagcaaatgtcagggtctgggcaacgtttgtttcttgcatggcatctctacacagaatgggaggatttgtatagctatgaagttctatgaaggatccatcgggaacaagatggctcggcttaaaggtggaaagctccctttgtcagaagttctaagatatggggctgatttggcacgcggtgtactaggcctacacaccagggggatattgatcctaaatatgaaaccttgcaattttctcatagacgaaaatgattgtgctgtgctgggggattttgggattccatccctgctgtttggcctttcattacctaatccggaccttatccagaggcttggaactccaaattacatggctcctgaacaatggcaaccaaacatcagaggtccgattagttatgaaactgattcgtggggttttgcgtgcagcgtccttgagatgttgactggcattcagccatggcgtggaaagtcagcagatgagatatatcagttggttgtcttgaagaaagaaaagccaatattcccgtgcagtctacctccagacattgaaaatgtgctttctggatgttttgaatatgactttagaaaccgtcccttgatgaaagacattttgcatgcatttgagagtgctaaaggtgcagatcatgacaacattggttggggcaattctgaaaatgctatggtagacaggataaccatgccaaatcgcatcaattggttacactttaaggacaagcttcaagtgggcgacaaggtccgttcaagaaagcttaaaaactcttgcggtcctgaaactatggaaatccctgatggaaccatagttggcattgaggacgatggcgagcgtgacgcttacgttcttgtacgagtccacgcgctacacaaccctttaaaggttcgcttttcaacggtggagagggtaacatatggttttgctgctggagactgggtgcggctgagggaggaggacaagaagcgctctcaggttggcattcttcacagcatcgaccgtgacggtgcagtggcagttggtctgataggagtggataccccttggaagggcaattattcagacctccagatggctgaagcctactgtgtcggacagtttgtgcgcctgaaggccagcatttcaagcccaaggttcgaatggcagcgaaagcggggtggattagcttctactggccgaatttcacagatacatccgaacgggttgctcgtcgtgaaatttcctggcaagtttaaccttggcgaagtgtgcagttgcctggcagacccctccgaggtggaggtggtgagctttgacaaatgcgaggggattgtgaagaagtacgagcatctcgaggacttccattgggcagtgaggcccctgttcgttgctattggtttcctcacggcgatcaagctgggtgtttttgttggcaagagcatttcgaggccgaggagccggaaggttgccagcatctctgatcagagtggagattaccagcagcagcaccagcagcaggtagtccaacaaagtgctaatgcggcgtggcttcctccaccagttgcaaacatgttcttcggagatagtgttgggacttctggataagaaatcataactggcccggagttttgcttaaaatagcaatttggaattgtggttcctagttgtgtgcatatttaggcctgaaatggtttatcccttatctaagcatctgtacatatctgccttatgcaccacaagttctgtaaataaactctagaattatcgtcttaaacatacaagtatgcgaagctatttcttgctt

SEQ ID NO: 21678 - protein, 630 aa, Zea mays subsp. mays
  peptide (1)..(630): Ceres Seq. ID no. 15225420
  misc_feature (8)..(594): NCBI GI NO: 22329080 NR Description: protein kinase family [Arabidopsis thaliana]
  misc_feature (113)..(594): NCBI GI NO: 7485349 NR Description: hypothetical protein F10M6
  misc_feature (8)..(90): NCBI GI NO: 7485349 NR Description: hypothetical protein F10M6
  misc_feature (45)..(318): NCBI GI NO: 17505358 NR Description: mitogen activated protein kinase kinase kinase
  misc_feature (34)..(313): NCBI GI NO: 34393850 NR Description: putative serine/threonine protein kinase
  misc_feature (45)..(304): NCBI GI NO: 17505356 NR Description: mitogen activated protein kinase kinase kinase
  misc_feature (34)..(311): NCBI GI NO: 34901608 NR Description: P0571D04.18
  misc_feature (40)..(318): NCBI GI NO: 39595415 NR Description: Hypothetical protein CBG04061
  misc_feature (49)..(346): NCBI GI NO: 34334393 NR Description: NIMA-related kinase 2 [Chlamydomonas reinhardtii]
  misc_feature (34)..(308): NCBI GI NO: 15227883 NR Description: protein kinase family [Arabidopsis thaliana]
MASSDSNPTDAFEYMLLEKDPDLYRTVFSGPSQTSPWIDPSVLKLKHRIGRGPFGDVWIATHHQRTEDFDQYHEVAVKMLHPIKEDQLQIFSARFHEIFSKCQGLGNVCFLHGISTQNGRICIAMKFYEGSIGNKMARLKGGKLPLSEVLRYGADLARGVLGLHTRGILILNMKPCNFLIDENDCAVLGDFGIPSLLFGLSLPNPDLIQRLGTPNYMAPEQWQPNIRGPISYETDSWGFACSVLEMLTGIQPWRGKSADEIYQLVVLKKEKPIFPCSLPPDIENVLSGCFEYDFRNRPLMKDILHAFESAKGADHDNIGWGNSENAMVDRITMPNRINWLHFKDKLQVGDKVRSRKLKNSCGPETMEIPDGTIVGIEDDGERDAYVLVRVHALHNPLKVRFSTVERVTYGFAAGDWVRLREEDKKRSQVGILHSIDRDGAVAVGLIGVDTPWKGNYSDLQMAEAYCVGQFVRLKASISSPRFEWQRKRGGLASTGRISQIHPNGLLVVKFPGKFNLGEVCSCLADPSEVEVVSFDKCEGIVKKYEHLEDFHWAVRPLFVAIGFLTAIKLGVFVGKSISRPRSRKVASISDQSGDYQQQHQQQVVQQSANAAWLPPPVANMFFGDSVGTSG

SEQ ID NO: 21679 - protein, 616 aa, Zea mays subsp. mays
  peptide (1)..(616): Ceres Seq. ID no. 15225421
  misc_feature (1)..(580): NCBI GI NO: 22329080 NR Description: protein kinase family [Arabidopsis thaliana]
  misc_feature (99)..(580): NCBI GI NO: 7485349 NR Description: hypothetical protein F10M6
  misc_feature (1)..(76): NCBI GI NO: 7485349 NR Description: hypothetical protein F10M6
  misc_feature (31)..(304): NCBI GI NO: 17505358 NR Description: mitogen activated protein kinase kinase kinase
  misc_feature (20)..(299): NCBI GI NO: 34393850 NR Description: putative serine/threonine protein kinase
  misc_feature (31)..(290): NCBI GI NO: 17505356 NR Description: mitogen activated protein kinase kinase kinase
  misc_feature (20)..(297): NCBI GI NO: 34901608 NR Description: P0571D04.18
  misc_feature (26)..(304): NCBI GI NO: 39595415 NR Description: Hypothetical protein CBG04061
  misc_feature (35)..(332): NCBI GI NO: 34334393 NR Description: NIMA-related kinase 2 [Chlamydomonas reinhardtii]
  misc_feature (20)..(294): NCBI GI NO: 15227883 NR Description: protein kinase family [Arabidopsis thaliana]
MLLEKDPDLYRTVFSGPSQTSPWIDPSVLKLKHRIGRGPFGDVWIATHHQRTEDFDQYHEVAVKMLHPIKEDQLQIFSARFHEIFSKCQGLGNVCFLHGISTQNGRICIAMKFYEGSIGNKMARLKGGKLPLSEVLRYGADLARGVLGLHTRGILILNMKPCNFLIDENDCAVLGDFGIPSLLFGLSLPNPDLIQRLGTPNYMAPEQWQPNIRGPISYETDSWGFACSVLEMLTGIQPWRGKSADEIYQLVVLKKEKPIFPCSLPPDIENVLSGCFEYDFRNRPLMKDILHAFESAKGADHDNIGWGNSENAMVDRITMPNRINWLHFKDKLQVGDKVRSRKLKNSCGPETMEIPDGTIVGIEDDGERDAYVLVRVHALHNPLKVRFSTVERVTYGFAAGDWVRLREEDKKRSQVGILHSIDRDGAVAVGLIGVDTPWKGNYSDLQMAEAYCVGQFVRLKASISSPRFEWQRKRGGLASTGRISQIHPNGLLVVKFPGKFNLGEVCSCLADPSEVEVVSFDKCEGIVKKYEHLEDFHWAVRPLFVAIGFLTAIKLGVFVGKSISRPRSRKVASISDQSGDYQQQHQQQVVQQSANAAWLPPPVANMFFGDSVGTSG

SEQ ID NO: 21680 - protein, 552 aa, Zea mays subsp. mays
  peptide (1)..(552): Ceres Seq. ID no. 15225422
  misc_feature (1)..(516): NCBI GI NO: 22329080 NR Description: protein kinase family [Arabidopsis thaliana]
  misc_feature (35)..(516): NCBI GI NO: 7485349 NR Description: hypothetical protein F10M6
  misc_feature (1)..(12): NCBI GI NO: 7485349 NR Description: hypothetical protein F10M6
  misc_feature (1)..(240): NCBI GI NO: 17505358 NR Description: mitogen activated protein kinase kinase kinase
  misc_feature (1)..(235): NCBI GI NO: 34393850 NR Description: putative serine/threonine protein kinase
  misc_feature (1)..(226): NCBI GI NO: 17505356 NR Description: mitogen activated protein kinase kinase kinase
  misc_feature (1)..(233): NCBI GI NO: 34901608 NR Description: P0571D04.18
  misc_feature (1)..(240): NCBI GI NO: 39595415 NR Description: Hypothetical protein CBG04061
  misc_feature (1)..(268): NCBI GI NO: 34334393 NR Description: NIMA-related kinase 2 [Chlamydomonas reinhardtii]
  misc_feature (1)..(230): NCBI GI NO: 15227883 NR Description: protein kinase family [Arabidopsis thaliana]
MLHPIKEDQLQIFSARFHEIFSKCQGLGNVCFLHGISTQNGRICIAMKFYEGSIGNKMARLKGGKLPLSEVLRYGADLARGVLGLHTRGILILNMKPCNFLIDENDCAVLGDFGIPSLLFGLSLPNPDLIQRLGTPNYMAPEQWQPNIRGPISYETDSWGFACSVLEMLTGIQPWRGKSADEIYQLVVLKKEKPIFPCSLPPDIENVLSGCFEYDFRNRPLMKDILHAFESAKGADHDNIGWGNSENAMVDRITMPNRINWLHFKDKLQVGDKVRSRKLKNSCGPETMEIPDGTIVGIEDDGERDAYVLVRVHALHNPLKVRFSTVERVTYGFAAGDWVRLREEDKKRSQVGILHSIDRDGAVAVGLIGVDTPWKGNYSDLQMAEAYCVGQFVRLKASISSPRFEWQRKRGGLASTGRISQIHPNGLLVVKFPGKFNLGEVCSCLADPSEVEVVSFDKCEGIVKKYEHLEDFHWAVRPLFVAIGFLTAIKLGVFVGKSISRPRSRKVASISDQSGDYQQQHQQQVVQQSANAAWLPPPVANMFFGDSVGTSG

SEQ ID NO: 21681 - DNA, 718 bp, Zea mays subsp. mays
  misc_feature (1)..(718): Ceres Seq. ID no. 13598936
acatcctaatcgaaaaagttttacaatcatgtctcattctcatgatgtgcatatgcagtgaaaaacttcaacccaagaatggcgatgtcttggacaagagggttaaatcatggtgttgttccgaggcatgccgctcaattggtagagagcagaagccttgcaattgcaagcaaggcgaagaagggtggaaaggctgatgctggcaaaactcctgctctcagccaagagctcaagagtacaacagtgttcggggcaaacatcttcaaggagggttctgatccgaaaatccaaccagactctgagtatcctgactggctgtggcacttgctcgacaatcgtcctgtactaagtgagctgcggaggaaagatcccaagacactctcttatgaagacctgaagcgttttgtcaagttggacaaccgatccaggatcaagataaggaatgacctcaatgctaagaactgacctggagtcttggacgaaacaggacctgctctactgttctttttattattaatataatactagacgacatgaataatttttctggagtttttggcaaaacatagcgacttgggatgttaaaatgttaagatgtgcttggtttgttactcttttaggcagcttacgacactgtcatgctttttgttcttccatcttgggaaagatgcagctttgtgcccagtacttagcaaattatcaagttccatggttctgc

SEQ ID NO: 21682 - protein, 128 aa, Zea mays subsp. mays
  peptide (1)..(128): Ceres Seq. ID no. 15222458
  misc_feature (12)..(128): NCBI GI NO: 18395929 NR Description: expressed protein [Arabidopsis thaliana]
  misc_feature (20)..(128): NCBI GI NO: 15241366 NR Description: hypothetical protein [Arabidopsis thaliana]
MAMSWTRGLNHGVVPRHAAQLVESRSLAIASKAKKGGKADAGKTPALSQELKSTTVFGANIFKEGSDPKIQPDSEYPDWLWHLLDNRPVLSELRRKDPKTLSYEDLKRFVKLDNRSRIKIRNDLNAKN

SEQ ID NO: 21683 - protein, 126 aa, Zea mays subsp. mays
  peptide (1)..(126): Ceres Seq. ID no. 15222459
  misc_feature (10)..(126): NCBI GI NO: 18395929 NR Description: expressed protein [Arabidopsis thaliana]
  misc_feature (18)..(126): NCBI GI NO: 15241366 NR Description: hypothetical protein [Arabidopsis thaliana]
MSWTRGLNHGVVPRHAAQLVESRSLAIASKAKKGGKADAGKTPALSQELKSTTVFGANIFKEGSDPKIQPDSEYPDWLWHLLDNRPVLSELRRKDPKTLSYEDLKRFVKLDNRSRIKIRNDLNAKN

SEQ ID NO: 21684 - protein, 64 aa, Zea mays subsp. mays
  peptide (1)..(64): Ceres Seq. ID no. 15222460
ILIEKVLQSCLILMMCICSEKLQPKNGDVLDKRVKSWCCSEACRSIGREQKPCNCKQGEEGWKG

SEQ ID NO: 21685 - DNA, 1897 bp, Zea mays subsp. mays
  misc_feature (1)..(1897): Ceres Seq. ID no. 15177722
accttcctctcttctcccctcacccctttctggctttctcctccgccgaagccccgagtcctgccggaattctagatcccggaggcaacttgccacgggctcctccgctccggtcgctgaatcgtactatcgtgctctcgacagaaagcccggccgaaacccagccggaccaggaccaagccctgttcgccgtgcgcgcggtgccccgggccagatctgcgagatctgcaccgacaccgctacgcctatcacgagcctgtaggtggatgctctcgtgatctctcggaggccgcggggactgagcggcatctcggcggaggcgtagcctgcttagctggtggcctgccgagatgcagcggaacggggtggtggaatgcagcgtgtgtcgctcccgggtggtggtgccgagtccccggagcgtgtccagggcatacgacaagcaccgcagcaagatgtcgtccaagttccgcgcgctcaacgtcttcctcgttgtcggcgactgcatccttgttggtctccagcccatcctagtgttcatgtcaaaggttgatgggaagttccagttcagtcccatcagtgttaactttctgaccgaggttatgaaagtcatctttgctattgtgatgcttataattcagtctagaaagcaaaaggttggagaaaagccactcttggcacgttcaaccttcatacaggcagcccgtaacaatgtacttctagctgttcctgctcttctgtatgccatcaacaattacttaaaattcatcatgcagttgtacttcaatcctgcgactgtgaaaatgttaagtaatctaaaggtactggttatagctgttcttctgaaatttataatgagaaggagattctcagttattcagtgggaagctcttgctttattgcttattggaatcagcatcaatcaacttcgaactgtacctgcgggcaatacagcatttggtcttcctgtcactgctattgcatacatatatacattgatttttgtaactgttccttcaatggcttctgtctacaatgaatatgccttgaaaagccaatatgacactagcatttatcttcagaacttgtttctgtatggatatggagcaatattcaacttccttggcattctcgggactgccttattccaagggccagagagttttaatattcttcgaggacattcaagggccacgatgtttctcatatgtaataatgcagcacaaggcattctatcttcattcttcttcaagtatgcagacacaattttgaagaagtattcgtcaactgttgccacgatatttactggcctagcttctgctgcatttttggggcataccttgaccattaattttctcctgggcatatcagtggtgtttatttcaatgcaccagttcttctctccacttgctaaagtcaaagatgacaaaccagctgacttaatagagttggaagacacacaaaatcaccggtcatccgaatcttcttttgtaaatatgactgctggtgctgctgttgatgcgagccatcggattggaactgatgagaggcaacccctgttgcctacatgaactagtttcttgaggtttggtgtagcattgtaagttgaataaactattgtacactgtaaaggcaaaggaaagaaagaactaccaacatcttctccattttctttcatttttgggacgaggccggccggtggcctgccatctgtggccgtgggagtgacagagcagcaaacattttgataggcttataattcaatagggattttccagatacggcacttgtaacagaattttcttggaggtgtatatgaacaacggcgatgtgacaatcttttctgtacggaacatttatactattgagtgattgatttactattactatgttgttactc

SEQ ID NO: 21686 - protein, 405 aa, Zea mays subsp. mays
  peptide (1)..(405): Ceres Seq. ID no. 15177723
  misc_feature (105)..(341): Pfam Name: Pfam Description:  Nucleotide-sugar transporter
  misc_feature (1)..(404): NCBI GI NO: 38345234 NR Description: OSJNBa0084K20.12
  misc_feature (3)..(404): NCBI GI NO: 26450627 NR Description: unknown protein [Arabidopsis thaliana]
  misc_feature (3)..(404): NCBI GI NO: 18411150 NR Description: transporter-related protein [Arabidopsis thaliana]
  misc_feature (46)..(389): NCBI GI NO: 34907666 NR Description: putative transporter-like protein
  misc_feature (4)..(57): NCBI GI NO: 34907666 NR Description: putative transporter-like protein
  misc_feature (3)..(336): NCBI GI NO: 11358902 NR Description: transporter-like protein - Arabidopsis thaliana
  misc_feature (6)..(336): NCBI GI NO: 25408848 NR Description: hypothetical protein At2g43240
  misc_feature (215)..(391): NCBI GI NO: 25408848 NR Description: hypothetical protein At2g43240
  misc_feature (215)..(391): NCBI GI NO: 30689311 NR Description: expressed protein [Arabidopsis thaliana]
  misc_feature (6)..(336): NCBI GI NO: 30689311 NR Description: expressed protein [Arabidopsis thaliana]
MQRNGVVECSVCRSRVVVPSPRSVSRAYDKHRSKMSSKFRALNVFLVVGDCILVGLQPILVFMSKVDGKFQFSPISVNFLTEVMKVIFAIVMLIIQSRKQKVGEKPLLARSTFIQAARNNVLLAVPALLYAINNYLKFIMQLYFNPATVKMLSNLKVLVIAVLLKFIMRRRFSVIQWEALALLLIGISINQLRTVPAGNTAFGLPVTAIAYIYTLIFVTVPSMASVYNEYALKSQYDTSIYLQNLFLYGYGAIFNFLGILGTALFQGPESFNILRGHSRATMFLICNNAAQGILSSFFFKYADTILKKYSSTVATIFTGLASAAFLGHTLTINFLLGISVVFISMHQFFSPLAKVKDDKPADLIELEDTQNHRSSESSFVNMTAGAAVDASHRIGTDERQPLLPT

SEQ ID NO: 21687 - protein, 371 aa, Zea mays subsp. mays
  peptide (1)..(371): Ceres Seq. ID no. 15177724
  misc_feature (71)..(307): Pfam Name: Pfam Description:  Nucleotide-sugar transporter
  misc_feature (1)..(370): NCBI GI NO: 38345234 NR Description: OSJNBa0084K20.12
  misc_feature (1)..(370): NCBI GI NO: 26450627 NR Description: unknown protein [Arabidopsis thaliana]
  misc_feature (1)..(370): NCBI GI NO: 18411150 NR Description: transporter-related protein [Arabidopsis thaliana]
  misc_feature (12)..(355): NCBI GI NO: 34907666 NR Description: putative transporter-like protein
  misc_feature (1)..(23): NCBI GI NO: 34907666 NR Description: putative transporter-like protein
  misc_feature (1)..(302): NCBI GI NO: 11358902 NR Description: transporter-like protein - Arabidopsis thaliana
  misc_feature (1)..(302): NCBI GI NO: 25408848 NR Description: hypothetical protein At2g43240
  misc_feature (181)..(357): NCBI GI NO: 25408848 NR Description: hypothetical protein At2g43240
  misc_feature (181)..(357): NCBI GI NO: 30689311 NR Description: expressed protein [Arabidopsis thaliana]
  misc_feature (1)..(302): NCBI GI NO: 30689311 NR Description: expressed protein [Arabidopsis thaliana]
MSSKFRALNVFLVVGDCILVGLQPILVFMSKVDGKFQFSPISVNFLTEVMKVIFAIVMLIIQSRKQKVGEKPLLARSTFIQAARNNVLLAVPALLYAINNYLKFIMQLYFNPATVKMLSNLKVLVIAVLLKFIMRRRFSVIQWEALALLLIGISINQLRTVPAGNTAFGLPVTAIAYIYTLIFVTVPSMASVYNEYALKSQYDTSIYLQNLFLYGYGAIFNFLGILGTALFQGPESFNILRGHSRATMFLICNNAAQGILSSFFFKYADTILKKYSSTVATIFTGLASAAFLGHTLTINFLLGISVVFISMHQFFSPLAKVKDDKPADLIELEDTQNHRSSESSFVNMTAGAAVDASHRIGTDERQPLLPT

SEQ ID NO: 21688 - protein, 343 aa, Zea mays subsp. mays
  peptide (1)..(343): Ceres Seq. ID no. 15177725
  misc_feature (43)..(279): Pfam Name: Pfam Description:  Nucleotide-sugar transporter
  misc_feature (1)..(342): NCBI GI NO: 38345234 NR Description: OSJNBa0084K20.12
  misc_feature (1)..(342): NCBI GI NO: 26450627 NR Description: unknown protein [Arabidopsis thaliana]
  misc_feature (1)..(342): NCBI GI NO: 18411150 NR Description: transporter-related protein [Arabidopsis thaliana]
  misc_feature (1)..(327): NCBI GI NO: 34907666 NR Description: putative transporter-like protein
  misc_feature (1)..(274): NCBI GI NO: 11358902 NR Description: transporter-like protein - Arabidopsis thaliana
  misc_feature (1)..(274): NCBI GI NO: 25408848 NR Description: hypothetical protein At2g43240
  misc_feature (153)..(329): NCBI GI NO: 25408848 NR Description: hypothetical protein At2g43240
  misc_feature (153)..(329): NCBI GI NO: 30689311 NR Description: expressed protein [Arabidopsis thaliana]
  misc_feature (1)..(274): NCBI GI NO: 30689311 NR Description: expressed protein [Arabidopsis thaliana]
  misc_feature (132)..(342): NCBI GI NO: 11358902 NR Description: transporter-like protein - Arabidopsis thaliana
MSKVDGKFQFSPISVNFLTEVMKVIFAIVMLIIQSRKQKVGEKPLLARSTFIQAARNNVLLAVPALLYAINNYLKFIMQLYFNPATVKMLSNLKVLVIAVLLKFIMRRRFSVIQWEALALLLIGISINQLRTVPAGNTAFGLPVTAIAYIYTLIFVTVPSMASVYNEYALKSQYDTSIYLQNLFLYGYGAIFNFLGILGTALFQGPESFNILRGHSRATMFLICNNAAQGILSSFFFKYADTILKKYSSTVATIFTGLASAAFLGHTLTINFLLGISVVFISMHQFFSPLAKVKDDKPADLIELEDTQNHRSSESSFVNMTAGAAVDASHRIGTDERQPLLPT

SEQ ID NO: 21689 - DNA, 1692 bp, Zea mays subsp. mays
  misc_feature (1)..(1692): Ceres Seq. ID no. 15180156
ctcgccaccgcttccttcccgatgccgccgtcgacgatccgaagcatctccatcaccgtctccgacgacgacggtgctgcggcggcaccgtcacggcggccgcgcgctggaagacggaaggcggcggcgcgtagcttggggcagcgggcggtgcggctggtggcgcggtggtggcccgttctcctgctcctcccggctgtcgcgctcctcctcttcgaggcgtcgcggctccgcgcctcatccccgggccccgccccaccggtctccagcctcggacggctcgacccgaccacacgtctcgtccatggcgtgcgcgagccttgcttgaagctccttagccccaaaagtttggcaaatgtggtgttcccggagggtacaagactcgattctgtggtgagcagaatcacgtacaaaactgatgacgatgactatgacacataccactccgaagcaaactctacatatttactgcaacatgcggaagcaacaaggttcgacctgtttacaggatttcagacacttgctgaaagggaagatagcttcaaggtgaatgagactgttagtgtgcactgtggtttctacagcgacaatggtggcttcaaaatttctgaggaggacaggagatacatgagagcctgtaaagttgttgtgtctacctgtgcatttggtggtggggatgatctatatcaacctattggaatggtcaattcttctattggcagggtttgctatgtggctttctgggatgaagtgacactagcagctcaggaagctgaaggaaaggtaattggtgatgatagcatgataggaaggtggcggatcattattgtcaggagcctcccttttgtagatcaacgattaaatgggaagataccaaagatgttgactcatcgccttttcacagaggcaaggtactctatatgggttgactctaaataccaattacgaagagatcctataggaatgcttgaagctcttctttggaggacaaactctacatttgctatctctgaacatggagcacggagtaacatatatgatgaggggaaagctattgttcaaaagcacaaggctacccctgaagaggtagaggtacaattgactcggtatcgtcaagatggaatgccggacacaaaaagattgcacggactgaaagctctagccgaagcctctgttattgtgagggaactcacccctgcaacgaaccatttcatgtgtgcttggtttaatgaagtggttcgcttcacatctcgtgatcagctcagttttccatacgttttgtggcggctaaacatgcatggattgagcatgtttcctgtatgcactcgcagggatcttgtgaatagtttgggtcacacaaggaaagtaaaacctcttacacagacaaattcagggtcttctactacttcgtaaccttccccccagttcatttgctggtagccaactaaccattgatttacatagtcgatactcgacatctctggttcacaattttgttgttgtatattatcatctttgcgttcttcctgcgagggaatcctggatctgaaccagaaacacgttaagctgttgcttcactgcaaagcaatcacacgatgttggcactatatatgtaaaagatatgccttctttggttagaagagaatgaacacttttgtgccccctttccgtttcctgatgtgttgaacatgc

SEQ ID NO: 21690 - protein, 470 aa, Zea mays subsp. mays
  peptide (1)..(470): Ceres Seq. ID no. 15180157
  misc_feature (152)..(452): Pfam Name: DUF616 Pfam Description: Protein of unknown function
  misc_feature (8)..(467): NCBI GI NO: 34909520 NR Description: P0481E12.30
  misc_feature (11)..(461): NCBI GI NO: 40539063 NR Description: hypothetical protein
  misc_feature (15)..(459): NCBI GI NO: 30694104 NR Description: expressed protein [Arabidopsis thaliana]
  misc_feature (15)..(459): NCBI GI NO: 10177269 NR Description: gb|AAC32911
  misc_feature (15)..(295): NCBI GI NO: 21536990 NR Description: unknown [Arabidopsis thaliana]
  misc_feature (168)..(457): NCBI GI NO: 15233955 NR Description: expressed protein [Arabidopsis thaliana]
  misc_feature (155)..(452): NCBI GI NO: 15227062 NR Description: hypothetical protein [Arabidopsis thaliana]
  misc_feature (168)..(452): NCBI GI NO: 25403429 NR Description: protein F12K21.12
  misc_feature (152)..(455): NCBI GI NO: 7452444 NR Description: hypothetical protein F20M13
  misc_feature (152)..(455): NCBI GI NO: 18420250 NR Description: expressed protein [Arabidopsis thaliana]
LATASFPMPPSTIRSISITVSDDDGAAAAPSRRPRAGRRKAAARSLGQRAVRLVARWWPVLLLLPAVALLLFEASRLRASSPGPAPPVSSLGRLDPTTRLVHGVREPCLKLLSPKSLANVVFPEGTRLDSVVSRITYKTDDDDYDTYHSEANSTYLLQHAEATRFDLFTGFQTLAEREDSFKVNETVSVHCGFYSDNGGFKISEEDRRYMRACKVVVSTCAFGGGDDLYQPIGMVNSSIGRVCYVAFWDEVTLAAQEAEGKVIGDDSMIGRWRIIIVRSLPFVDQRLNGKIPKMLTHRLFTEARYSIWVDSKYQLRRDPIGMLEALLWRTNSTFAISEHGARSNIYDEGKAIVQKHKATPEEVEVQLTRYRQDGMPDTKRLHGLKALAEASVIVRELTPATNHFMCAWFNEVVRFTSRDQLSFPYVLWRLNMHGLSMFPVCTRRDLVNSLGHTRKVKPLTQTNSGSSTTS

SEQ ID NO: 21691 - protein, 463 aa, Zea mays subsp. mays
  peptide (1)..(463): Ceres Seq. ID no. 15180158
  misc_feature (145)..(445): Pfam Name: DUF616 Pfam Description: Protein of unknown function
  misc_feature (1)..(460): NCBI GI NO: 34909520 NR Description: P0481E12.30
  misc_feature (4)..(454): NCBI GI NO: 40539063 NR Description: hypothetical protein
  misc_feature (8)..(452): NCBI GI NO: 30694104 NR Description: expressed protein [Arabidopsis thaliana]
  misc_feature (8)..(452): NCBI GI NO: 10177269 NR Description: gb|AAC32911
  misc_feature (8)..(288): NCBI GI NO: 21536990 NR Description: unknown [Arabidopsis thaliana]
  misc_feature (161)..(450): NCBI GI NO: 15233955 NR Description: expressed protein [Arabidopsis thaliana]
  misc_feature (148)..(445): NCBI GI NO: 15227062 NR Description: hypothetical protein [Arabidopsis thaliana]
  misc_feature (161)..(445): NCBI GI NO: 25403429 NR Description: protein F12K21.12
  misc_feature (145)..(448): NCBI GI NO: 7452444 NR Description: hypothetical protein F20M13
  misc_feature (145)..(448): NCBI GI NO: 18420250 NR Description: expressed protein [Arabidopsis thaliana]
MPPSTIRSISITVSDDDGAAAAPSRRPRAGRRKAAARSLGQRAVRLVARWWPVLLLLPAVALLLFEASRLRASSPGPAPPVSSLGRLDPTTRLVHGVREPCLKLLSPKSLANVVFPEGTRLDSVVSRITYKTDDDDYDTYHSEANSTYLLQHAEATRFDLFTGFQTLAEREDSFKVNETVSVHCGFYSDNGGFKISEEDRRYMRACKVVVSTCAFGGGDDLYQPIGMVNSSIGRVCYVAFWDEVTLAAQEAEGKVIGDDSMIGRWRIIIVRSLPFVDQRLNGKIPKMLTHRLFTEARYSIWVDSKYQLRRDPIGMLEALLWRTNSTFAISEHGARSNIYDEGKAIVQKHKATPEEVEVQLTRYRQDGMPDTKRLHGLKALAEASVIVRELTPATNHFMCAWFNEVVRFTSRDQLSFPYVLWRLNMHGLSMFPVCTRRDLVNSLGHTRKVKPLTQTNSGSSTTS

SEQ ID NO: 21692 - protein, 261 aa, Zea mays subsp. mays
  peptide (1)..(261): Ceres Seq. ID no. 15180159
  misc_feature (1)..(243): Pfam Name: DUF616 Pfam Description: Protein of unknown function
  misc_feature (1)..(258): NCBI GI NO: 34909520 NR Description: P0481E12.30
  misc_feature (1)..(252): NCBI GI NO: 40539063 NR Description: hypothetical protein
  misc_feature (1)..(250): NCBI GI NO: 30694104 NR Description: expressed protein [Arabidopsis thaliana]
  misc_feature (1)..(250): NCBI GI NO: 10177269 NR Description: gb|AAC32911
  misc_feature (1)..(86): NCBI GI NO: 21536990 NR Description: unknown [Arabidopsis thaliana]
  misc_feature (1)..(248): NCBI GI NO: 15233955 NR Description: expressed protein [Arabidopsis thaliana]
  misc_feature (1)..(243): NCBI GI NO: 15227062 NR Description: hypothetical protein [Arabidopsis thaliana]
  misc_feature (1)..(243): NCBI GI NO: 25403429 NR Description: protein F12K21.12
  misc_feature (1)..(246): NCBI GI NO: 7452444 NR Description: hypothetical protein F20M13
  misc_feature (1)..(246): NCBI GI NO: 18420250 NR Description: expressed protein [Arabidopsis thaliana]
MRACKVVVSTCAFGGGDDLYQPIGMVNSSIGRVCYVAFWDEVTLAAQEAEGKVIGDDSMIGRWRIIIVRSLPFVDQRLNGKIPKMLTHRLFTEARYSIWVDSKYQLRRDPIGMLEALLWRTNSTFAISEHGARSNIYDEGKAIVQKHKATPEEVEVQLTRYRQDGMPDTKRLHGLKALAEASVIVRELTPATNHFMCAWFNEVVRFTSRDQLSFPYVLWRLNMHGLSMFPVCTRRDLVNSLGHTRKVKPLTQTNSGSSTTS

SEQ ID NO: 21693 - DNA, 1143 bp, Zea mays subsp. mays
  misc_feature (1)..(1143): Ceres Seq. ID no. 15180313
aacgagagttcttcttggatcgtggactcgatcgaatactcgatcgcggcgcgacacattgcccacgccgcgccgactagctagctaccagcctagctagctaccaccaacgaccaccacaccagtacaccactgcacttcgtcccactgctcggcccgatcacgatcgatccagtgaagatgccgccagctcccagccccggcgcacacggcgccagcggcgcggcgacgccgcccagcaagccgcagagcccgctgcgcatcacgcacgacggcgagttctacgcgcgcctgctcaccagggagagctcgctgggcaacccctcgttccgctactacggcgcggggagcggcgccgtgccgttcgtgtgggagtcccagccggggacgcccaaggacgcctactcctgccggatgctggccgccgccgccgcggtcgcggtcacgccggtcatcaccccgccgccctcctactacctccacggcgtgccgctcgggcgtgccaaccggcgccacggcaagacgaccggcgggtacaagcagctcaagtgggtcaagctcggcttcatcgccaccgtcttccgccgccttgccttcggtaataagtcgcggccctcgtcgtcgtcgtcgtcggcggcggtcaagtcctcgtcctcgtcctctgctcgctggctcttctccggctctagcgtcgccgaggcccgtgaccaggagtgctgcggctacgacgatcctgcggctgctgagccgcggacgaagggggcggtgctctgcctcggcatccgcgcgaccccgtggatggtgcagttctgcggcggccagagggagcaggctggctgggtgtacggctggcgcccgtagtcgtcgtccggtcgctgtcgaccaaatcatatgtgcaacggccggtccgtgtccgtgcatgcagtgtggttggccggacgcccggacccgacctttatattggatctaattgttcgtgcatatggatgttcctgtgtttgatccagtgtccggtcaccgtgctcggaaacaagataagataaaagctgtttcggggtggcgtgcctggcgtcgtgttgctatgcccagatatatatgtatacatgtatcttgcacctcccccgaaccattgttattgttgtc

SEQ ID NO: 21694 - protein, 226 aa, Zea mays subsp. mays
  peptide (1)..(226): Ceres Seq. ID no. 15180314
  misc_feature (1)..(220): NCBI GI NO: 34907876 NR Description: P0031D02.26
  misc_feature (24)..(172): NCBI GI NO: 34896128 NR Description: P0701D05.18
  misc_feature (31)..(159): NCBI GI NO: 18405403 NR Description: expressed protein [Arabidopsis thaliana]
  misc_feature (31)..(159): NCBI GI NO: 21537311 NR Description: unknown [Arabidopsis thaliana]
MPPAPSPGAHGASGAATPPSKPQSPLRITHDGEFYARLLTRESSLGNPSFRYYGAGSGAVPFVWESQPGTPKDAYSCRMLAAAAAVAVTPVITPPPSYYLHGVPLGRANRRHGKTTGGYKQLKWVKLGFIATVFRRLAFGNKSRPSSSSSSAAVKSSSSSSARWLFSGSSVAEARDQECCGYDDPAAAEPRTKGAVLCLGIRATPWMVQFCGGQREQAGWVYGWRP

SEQ ID NO: 21695 - protein, 148 aa, Zea mays subsp. mays
  peptide (1)..(148): Ceres Seq. ID no. 15180315
  misc_feature (1)..(142): NCBI GI NO: 34907876 NR Description: P0031D02.26
  misc_feature (1)..(94): NCBI GI NO: 34896128 NR Description: P0701D05.18
  misc_feature (1)..(81): NCBI GI NO: 18405403 NR Description: expressed protein [Arabidopsis thaliana]
  misc_feature (1)..(81): NCBI GI NO: 21537311 NR Description: unknown [Arabidopsis thaliana]
MLAAAAAVAVTPVITPPPSYYLHGVPLGRANRRHGKTTGGYKQLKWVKLGFIATVFRRLAFGNKSRPSSSSSSAAVKSSSSSSARWLFSGSSVAEARDQECCGYDDPAAAEPRTKGAVLCLGIRATPWMVQFCGGQREQAGWVYGWRP

SEQ ID NO: 21696 - DNA, 1237 bp, Zea mays subsp. mays
  misc_feature (1)..(1237): Ceres Seq. ID no. 13598926
gtagccctgcagtcacccagagcagacccggatttcgctcttgcggtcgctggggttttagcattggctgatcagttcgatccgatccggctgcgaaggcgagatggcgttcgcggtttctggggcggtgctcggtggggccgtaagggctccccgactcaccggcggcggggagggtagtctagtcttccggcacaccggcctcttcttaactcggcgtgctcgagttggatgttcggggacgcacggggccatgcgcgcggcggccgcggccaggaaggcggtcatggttcctgagggcgagaatgatggcctcgcatcaagggctgactcggctcaattccagtcggatgaactggaggtaccagacatttctgaagagacaacgtgcggtgctggtgtggctgatgctcaagccttgaacagagttcgagtggtccccccaccaagcgatggacaaaaaatattccagattgaccccatgttgcaaggctataagtaccatcttgagtatcggtacagcctctatagaagaatccgttcagacattgatgaacatgaaggaggcttggaagccttctcccgtagttatgagaagtttggatttaatcgcagcgcggaaggtatcacatatcgagaatgggctcctggagcattttctgcagcattggtgggtgacttcaacaactgggatccaaatgcagatcgtatgagcaaaaatgagtttggtgtttgggaaatttttctgcctaacaatgcagatggtacatcacctattcctcatggatctcgtgtaaaggtgagaatggatactccatcagggataaaggattcaattccagcctggatcaagtactcagtgcaggccccaggagaaataccatatgatgggatttattatgatcctcctgaagaggtaaagtatgtgttcaggcatgcgcaacctaaacgaccaaaatcattgcggatatatgaaacacatgtcggaatgagtagcccggtatgtcaccttttccttttgattctttagacagtgctaggcatatgtaacacccggccacctgggggacgtcgtccccccagggcgagttttttttgactgctagccacctgcagttttagttaattataggcttcaacgatatttagatactagcatcttctcacattggtcttccttatctaagcgtatgtaatctaagtgtatatatttattttcattcaatttaaaaaaacc

SEQ ID NO: 21697 - protein, 308 aa, Zea mays subsp. mays
  peptide (1)..(308): Ceres Seq. ID no. 13598927
  misc_feature (1)..(299): NCBI GI NO: 7433846 NR Description: 1,4-alpha-glucan branching enzyme (EC 2
  misc_feature (1)..(299): NCBI GI NO: 1169911 NR Description: 1
  misc_feature (62)..(299): NCBI GI NO: 913865 NR Description: branching enzyme II BEII
  misc_feature (41)..(298): NCBI GI NO: 477282 NR Description: starch branching enzyme isoform RBE3 - rice
  misc_feature (15)..(299): NCBI GI NO: 3822022 NR Description: starch branching enzyme IIb [Hordeum vulgare]
  misc_feature (97)..(299): NCBI GI NO: 7433848 NR Description: 1,4-alpha-glucan branching enzyme (EC 2
  misc_feature (79)..(299): NCBI GI NO: 5689138 NR Description: starch branching enzyme rbe4 [Oryza sativa]
  misc_feature (40)..(299): NCBI GI NO: 13447952 NR Description: starch branching enzyme IIa variant
  misc_feature (53)..(299): NCBI GI NO: 7433853 NR Description: probable 1,4-alpha-glucan branching enzyme (EC2
  misc_feature (53)..(299): NCBI GI NO: 11037534 NR Description: starch branching enzyme 2 [Triticum aestivum]
MAFAVSGAVLGGAVRAPRLTGGGEGSLVFRHTGLFLTRRARVGCSGTHGAMRAAAAARKAVMVPEGENDGLASRADSAQFQSDELEVPDISEETTCGAGVADAQALNRVRVVPPPSDGQKIFQIDPMLQGYKYHLEYRYSLYRRIRSDIDEHEGGLEAFSRSYEKFGFNRSAEGITYREWAPGAFSAALVGDFNNWDPNADRMSKNEFGVWEIFLPNNADGTSPIPHGSRVKVRMDTPSGIKDSIPAWIKYSVQAPGEIPYDGIYYDPPEEVKYVFRHAQPKRPKSLRIYETHVGMSSPVCHLFLLIL

SEQ ID NO: 21698 - protein, 258 aa, Zea mays subsp. mays
  peptide (1)..(258): Ceres Seq. ID no. 13598928
  misc_feature (1)..(249): NCBI GI NO: 7433846 NR Description: 1,4-alpha-glucan branching enzyme (EC 2
  misc_feature (1)..(249): NCBI GI NO: 1169911 NR Description: 1
  misc_feature (12)..(249): NCBI GI NO: 913865 NR Description: branching enzyme II BEII
  misc_feature (1)..(248): NCBI GI NO: 477282 NR Description: starch branching enzyme isoform RBE3 - rice
  misc_feature (1)..(249): NCBI GI NO: 3822022 NR Description: starch branching enzyme IIb [Hordeum vulgare]
  misc_feature (47)..(249): NCBI GI NO: 7433848 NR Description: 1,4-alpha-glucan branching enzyme (EC 2
  misc_feature (29)..(249): NCBI GI NO: 5689138 NR Description: starch branching enzyme rbe4 [Oryza sativa]
  misc_feature (1)..(249): NCBI GI NO: 13447952 NR Description: starch branching enzyme IIa variant
  misc_feature (3)..(249): NCBI GI NO: 7433853 NR Description: probable 1,4-alpha-glucan branching enzyme (EC2
  misc_feature (3)..(249): NCBI GI NO: 11037534 NR Description: starch branching enzyme 2 [Triticum aestivum]
MRAAAAARKAVMVPEGENDGLASRADSAQFQSDELEVPDISEETTCGAGVADAQALNRVRVVPPPSDGQKIFQIDPMLQGYKYHLEYRYSLYRRIRSDIDEHEGGLEAFSRSYEKFGFNRSAEGITYREWAPGAFSAALVGDFNNWDPNADRMSKNEFGVWEIFLPNNADGTSPIPHGSRVKVRMDTPSGIKDSIPAWIKYSVQAPGEIPYDGIYYDPPEEVKYVFRHAQPKRPKSLRIYETHVGMSSPVCHLFLLIL

SEQ ID NO: 21699 - protein, 247 aa, Zea mays subsp. mays
  peptide (1)..(247): Ceres Seq. ID no. 13598929
  misc_feature (1)..(238): NCBI GI NO: 7433846 NR Description: 1,4-alpha-glucan branching enzyme (EC 2
  misc_feature (1)..(238): NCBI GI NO: 1169911 NR Description: 1
  misc_feature (1)..(238): NCBI GI NO: 913865 NR Description: branching enzyme II BEII
  misc_feature (1)..(237): NCBI GI NO: 477282 NR Description: starch branching enzyme isoform RBE3 - rice
  misc_feature (1)..(238): NCBI GI NO: 3822022 NR Description: starch branching enzyme IIb [Hordeum vulgare]
  misc_feature (36)..(238): NCBI GI NO: 7433848 NR Description: 1,4-alpha-glucan branching enzyme (EC 2
  misc_feature (18)..(238): NCBI GI NO: 5689138 NR Description: starch branching enzyme rbe4 [Oryza sativa]
  misc_feature (1)..(238): NCBI GI NO: 13447952 NR Description: starch branching enzyme IIa variant
  misc_feature (1)..(238): NCBI GI NO: 7433853 NR Description: probable 1,4-alpha-glucan branching enzyme (EC2
  misc_feature (1)..(238): NCBI GI NO: 11037534 NR Description: starch branching enzyme 2 [Triticum aestivum]
MVPEGENDGLASRADSAQFQSDELEVPDISEETTCGAGVADAQALNRVRVVPPPSDGQKIFQIDPMLQGYKYHLEYRYSLYRRIRSDIDEHEGGLEAFSRSYEKFGFNRSAEGITYREWAPGAFSAALVGDFNNWDPNADRMSKNEFGVWEIFLPNNADGTSPIPHGSRVKVRMDTPSGIKDSIPAWIKYSVQAPGEIPYDGIYYDPPEEVKYVFRHAQPKRPKSLRIYETHVGMSSPVCHLFLLIL

SEQ ID NO: 21700 - DNA, 587 bp, Zea mays subsp. mays
  misc_feature (1)..(587): Ceres Seq. ID no. 13598930
acccaagtcgcgtgcttccattcccagcccaaccgaagcgaagcacgccaccggcctcgaagggatcagcttctctagcactcatcctcgtggccttgttcctcctcttctatatgggactgcgtcggagtggagatccgtgccgacatagtccgactttgtcgctcgctgcctacgattgatggcctcaccttcaccaaccgagttcagtagggaagcagctcgtcagtctctcatcgcaatctcccagaccattccggagacaccttcacccgagacggtgaaggcaccgatctccattgcagaaaacgggaagctgggcgatggggcggataagttcagatcaaagctgatgtccatcacagacctgtcttctgatgcccaacctgcgcagtgccctcccgaggatattgctgcttgatcgtgtgattttcctgctcgacttgcggacataatgtatcagtgcttgctgatgctctgggcatttaactgtcgtgcattaaactgaacgtccttgtgttactagtcgtttttctttgttaaaatattcagggaaaccggtggaaatatattgtgcaagttttttt

SEQ ID NO: 21701 - protein, 79 aa, Zea mays subsp. mays
  peptide (1)..(79): Ceres Seq. ID no. 13598931
  misc_feature (1)..(79): NCBI GI NO: 38346711 NR Description: OSJNBa0086O06.9
MASPSPTEFSREAARQSLIAISQTIPETPSPETVKAPISIAENGKLGDGADKFRSKLMSITDLSSDAQPAQCPPEDIAA

SEQ ID NO: 21702 - protein, 59 aa, Zea mays subsp. mays
  peptide (1)..(59): Ceres Seq. ID no. 13598932
PSRVLPFPAQPKRSTPPASKGSASLALILVALFLLFYMGLRRSGDPCRHSPTLSLAAYD

SEQ ID NO: 21703 - protein, 49 aa, Zea mays subsp. mays
  peptide (1)..(49): Ceres Seq. ID no. 13598933
PKSRASIPSPTEAKHATGLEGISFSSTHPRGLVPPLLYGTASEWRSVPT

SEQ ID NO: 21704 - DNA, 1097 bp, Zea mays subsp. mays
  misc_feature (1)..(1097): Ceres Seq. ID no. 14305144
gattcccggatggatgtgccggcccggcccggcccgctcggcgctcgtgcttctccccagtcccgtccatccaaagcgttttgcacttgtgcacaaactgcggctgctgtagatacgcgcgccgccactccaaggtccaagcctcccttgctcccgccaccgcccctcaccatgggcagcgccgccacctctccgcagccgtctgggaatctgacgcaggacgagctcaagcgcgtggcggcgcaccgcgcgttggagttcgtggagtccggcatgacgctgggcctgggcacgggttccacggccgcgcacgcgctggaccgcctgggcgacctcctccgcgcgggcgcgctgcccggggtcgccggcgttcccacctccctcaagacggaggcccacgccgcccgcgtcgggatcccgctgcttccgctcgacgccgcctcgggcgccagcatccgcctctccatcgacggcgccgacgaggtcgacccggacctcaacctcgtcaagggccgcggcgggtcgctgctccgggagaagatgatcgagggcgccggcgatcggttcgtcgtcatcgtcgacgagtccaagctcgtgccgaggctcggctgcacgggcgccgtccccgtcgaggtcatccccttcggcgcaccccacacgctcggcctcatccgcaaggtgttcgatggagtgcctggcttccacgccaggctgaggacggtccccgccgccaatggggaggactcggacgcgccgttcctcaccgacaacggcaactacatcgtggagatgttcttcgaggacggtatccgcggcgacctgctggacatcagcgatcgtctgctccggatcaccggcgtcatcgagcatggcatgtttcttggcatggccactacagtcatcgtcgctaacaaggacggcaccgtcacagtcatcaacaagaagaagtaataatctacaagtagcctgtatgtgtgcgtccgtgtgtgatccagctacctaagttctgctcgttaccgttgtgaaaccatcattttgttttatcatctcatatctttcctactggtgattccaatatatcttatttattatccctc

SEQ ID NO: 21705 - protein, 316 aa, Zea mays subsp. mays
  peptide (1)..(316): Ceres Seq. ID no. 14305145
  misc_feature (121)..(307): Pfam Name: phosphoriboisomerase A Pfam Description: Ribose 5-phosphate isomerase A
  misc_feature (52)..(316): NCBI GI NO: 38347196 NR Description: OSJNBa0023J03.8
  misc_feature (60)..(311): NCBI GI NO: 21592672 NR Description: putative ribose 5-phosphate isomerase
  misc_feature (61)..(314): NCBI GI NO: 15226223 NR Description: ribose 5-phosphate isomerase -related
  misc_feature (60)..(311): NCBI GI NO: 15223936 NR Description: ribose 5-phosphate isomerase -related
  misc_feature (60)..(311): NCBI GI NO: 13430836 NR Description: putative ribose 5-phosphate isomerase
  misc_feature (63)..(314): NCBI GI NO: 18654317 NR Description: ribose-5-phosphate isomerase [Spinacia oleracea]
  misc_feature (60)..(314): NCBI GI NO: 34393836 NR Description: putative ribose-5-phosphate isomerase
  misc_feature (61)..(314): NCBI GI NO: 34393835 NR Description: putative ribose-5-phosphate isomerase
  misc_feature (24)..(311): NCBI GI NO: 22963952 NR Description: hypothetical protein [Rhodopseudomonas palustris]
  misc_feature (71)..(311): NCBI GI NO: 39935050 NR Description: ribose 5-phosphate isomerase
DSRMDVPARPGPLGARASPQSRPSKAFCTCAQTAAAVDTRAATPRSKPPLLPPPPLTMGSAATSPQPSGNLTQDELKRVAAHRALEFVESGMTLGLGTGSTAAHALDRLGDLLRAGALPGVAGVPTSLKTEAHAARVGIPLLPLDAASGASIRLSIDGADEVDPDLNLVKGRGGSLLREKMIEGAGDRFVVIVDESKLVPRLGCTGAVPVEVIPFGAPHTLGLIRKVFDGVPGFHARLRTVPAANGEDSDAPFLTDNGNYIVEMFFEDGIRGDLLDISDRLLRITGVIEHGMFLGMATTVIVANKDGTVTVINKKK

SEQ ID NO: 21706 - protein, 313 aa, Zea mays subsp. mays
  peptide (1)..(313): Ceres Seq. ID no. 14305146
  misc_feature (118)..(304): Pfam Name: phosphoriboisomerase A Pfam Description: Ribose 5-phosphate isomerase A
  misc_feature (49)..(313): NCBI GI NO: 38347196 NR Description: OSJNBa0023J03.8
  misc_feature (57)..(308): NCBI GI NO: 21592672 NR Description: putative ribose 5-phosphate isomerase
  misc_feature (58)..(311): NCBI GI NO: 15226223 NR Description: ribose 5-phosphate isomerase -related
  misc_feature (57)..(308): NCBI GI NO: 15223936 NR Description: ribose 5-phosphate isomerase -related
  misc_feature (57)..(308): NCBI GI NO: 13430836 NR Description: putative ribose 5-phosphate isomerase
  misc_feature (60)..(311): NCBI GI NO: 18654317 NR Description: ribose-5-phosphate isomerase [Spinacia oleracea]
  misc_feature (57)..(311): NCBI GI NO: 34393836 NR Description: putative ribose-5-phosphate isomerase
  misc_feature (58)..(311): NCBI GI NO: 34393835 NR Description: putative ribose-5-phosphate isomerase
  misc_feature (21)..(308): NCBI GI NO: 22963952 NR Description: hypothetical protein [Rhodopseudomonas palustris]
  misc_feature (68)..(308): NCBI GI NO: 39935050 NR Description: ribose 5-phosphate isomerase
MDVPARPGPLGARASPQSRPSKAFCTCAQTAAAVDTRAATPRSKPPLLPPPPLTMGSAATSPQPSGNLTQDELKRVAAHRALEFVESGMTLGLGTGSTAAHALDRLGDLLRAGALPGVAGVPTSLKTEAHAARVGIPLLPLDAASGASIRLSIDGADEVDPDLNLVKGRGGSLLREKMIEGAGDRFVVIVDESKLVPRLGCTGAVPVEVIPFGAPHTLGLIRKVFDGVPGFHARLRTVPAANGEDSDAPFLTDNGNYIVEMFFEDGIRGDLLDISDRLLRITGVIEHGMFLGMATTVIVANKDGTVTVINKKK

SEQ ID NO: 21707 - protein, 302 aa, Zea mays subsp. mays
  peptide (1)..(302): Ceres Seq. ID no. 14305147
FPDGCAGPARPARRSCFSPVPSIQSVLHLCTNCGCCRYARRHSKVQASLAPATAPHHGQRRHLSAAVWESDAGRAQARGGAPRVGVRGVRHDAGPGHGFHGRARAGPPGRPPPRGRAARGRRRSHLPQDGGPRRPRRDPAASARRRLGRQHPPLHRRRRRGRPGPQPRQGPRRVAAPGEDDRGRRRSVRRHRRRVQARAEARLHGRRPRRGHPLRRTPHARPHPQGVRWSAWLPRQAEDGPRRQWGGLGRAVPHRQRQLHRGDVLRGRYPRRPAGHQRSSAPDHRRHRAWHVSWHGHYSHRR

SEQ ID NO: 21708 - DNA, 2180 bp, Zea mays subsp. mays
  misc_feature (1)..(2180): Ceres Seq. ID no. 15180702
aaaaaaaaaaacagccctaacagcaggggcagcggtttccgaaaagagaggcgtggagtgggggagagggccgagccaagccacctccaccgcagcaggcggcggagccgtacgcgaagcgaaagcgaggaaagccttctgaatcaggcttcctcgcgccgccgccgcttcctgctctcagcggcgtggataggtttcccgcccgcccgggcctggttgctcgtcttccttccttggtacaattcaattgattacctcaccagggagggagggtgctgcatccacggaccacggcttcacatgagtgaaagggatagaaagtgcagcgaccgtggacgaaaggactcgtgcttttgagcaattcaggaggagtacaagcatcacgaagccttcattctggaatgctgtccagtcgaaggaacagcgggattatcctacgggaagggtcagttagggactggtccgagttcaacgatccctctccgtccccaaaaccgttgtactcgcagtcctatgtcgcagtgagaggattcctgctgtcgagcaagctaaagtcagtgtatgcggctatgacttcacagaggcatagccgatcgcaggagagatcaaaatcaaaggggttgagctgcaggagagttgcagtccgtctactgttctttttcatgttaggcattttcattgggttcatgcctttattctctgtcgacgtctacaagaaaatagtatctgaaaacaagatgcttccgttccacgagggtgtgattgagacggaaatggtgggtaccaaagttaaggagtcggagacgattgtagtagagaaagagatcgaactgatcgacgagcctcatattcaagagagccctccagtccctgcattgttggatgatgatgtggatttttctgaatcatcacatgtgttacctgctattagagaatctgacattcccgtgaagaagttgctgataatcgtgacaatcacttctgtccggccacaacaggcatattacttgaatcggctagcccataccttgaaagctgtacaggcacctcttctatggttactggtggaatggcctgaacagtcctatgaaacagcagaaattctgaggtcttccggggttatgtacaggcatcttatgtgcagaaagaataccacgagtgttcggaagattgctgtttgtcaaaggaataatgcaatctatcatgtcaaaaggcatcaccttgatggtataatgcattttgctgatgaagaacggtcatactcagctgatgtatttgaagaaatgcagaagatcaggcgctttggctcatggcctgtaacaatccatattggaacaaagtatagggcagttctggaaggccctatttgcaaagctaaccgagtcatgagatggcacacagtccagacggctcaaaagaagagttcaactcgtcgattcccaattggtttctctgcatttgctttcaatagtacactgttatgggaccctcaaagatggaaccgcccgcctatggattctgttatagtccacacaggtggaagaggtggtttgcaggagtcacggtttatagaaaagcttgttaaaagtgagcgccaaatagagggtcttccagacaattgcaacagggtcatggtctggaatttcaacctggaacctcctcagctgaactaccccgcaggctgggcactttataagaacctagaagctgacatacctgtaatatagcttcctgcgagctacgttatgccttgctcctagaggtggtttctcccggcaaggcagaaggttgaagcacgtctccagcggcatgttagttctaaatttcaactccctgtcctttaaggtgcccaggtaaagctgctggttgatgccatcctgaacaagttgcgccaaagatttcgtgccgagatctgtcttcagtaatgcaatgtcatcctgaacaagttgcagcggcaatcaaaataggatcccccccccctgccttttagtctcgtgtattccttttgtgctcttcatttttttttcctcatcagctagatacgacatgtagactttcttttaggttttttttgtttttgtttttcatactgtgtgttaccttacagatgtaaaagcgcccccgtacattgcaactgttaaagaggaaaagcaaaataccgtcatttagcttcttcaaat

SEQ ID NO: 21709 - protein, 441 aa, Zea mays subsp. mays
  peptide (1)..(441): Ceres Seq. ID no. 15180703
  misc_feature (206)..(425): Pfam Name: Pfam Description:  Glycosyltransferase family 43
  misc_feature (116)..(440): NCBI GI NO: 32879545 NR Description: beta3-glucuronyltransferase [Zea mays]
  misc_feature (4)..(440): NCBI GI NO: 34911082 NR Description: P0485G01.28
  misc_feature (64)..(437): NCBI GI NO: 31979311 NR Description: 3-beta-glucuronosyltransferase [Hordeum vulgare]
  misc_feature (81)..(435): NCBI GI NO: 32968189 NR Description: beta3-glucuronyltransferase [Triticum aestivum]
  misc_feature (83)..(436): NCBI GI NO: 31979313 NR Description: 3-beta-glucuronosyltransferase [Hordeum vulgare]
  misc_feature (177)..(436): NCBI GI NO: 18396409 NR Description: glycosyltransferase family 43
  misc_feature (180)..(438): NCBI GI NO: 32968172 NR Description: beta3-glucuronyltransferase
  misc_feature (177)..(431): NCBI GI NO: 5668771 NR Description: Contains similarity to gb|D88035 glyco proteinspecific UDP-glucuronyltransferase from Rattus norvegicus
  misc_feature (177)..(369): NCBI GI NO: 6693039 NR Description: T22C5.4 [Arabidopsis thaliana]
  misc_feature (185)..(440): NCBI GI NO: 38344768 NR Description: OSJNBa0068L06.11
MLSSRRNSGIILREGSVRDWSEFNDPSPSPKPLYSQSYVAVRGFLLSSKLKSVYAAMTSQRHSRSQERSKSKGLSCRRVAVRLLFFFMLGIFIGFMPLFSVDVYKKIVSENKMLPFHEGVIETEMVGTKVKESETIVVEKEIELIDEPHIQESPPVPALLDDDVDFSESSHVLPAIRESDIPVKKLLIIVTITSVRPQQAYYLNRLAHTLKAVQAPLLWLLVEWPEQSYETAEILRSSGVMYRHLMCRKNTTSVRKIAVCQRNNAIYHVKRHHLDGIMHFADEERSYSADVFEEMQKIRRFGSWPVTIHIGTKYRAVLEGPICKANRVMRWHTVQTAQKKSSTRRFPIGFSAFAFNSTLLWDPQRWNRPPMDSVIVHTGGRGGLQESRFIEKLVKSERQIEGLPDNCNRVMVWNFNLEPPQLNYPAGWALYKNLEADIPVI

SEQ ID NO: 21710 - protein, 385 aa, Zea mays subsp. mays
  peptide (1)..(385): Ceres Seq. ID no. 15180704
  misc_feature (150)..(369): Pfam Name: Pfam Description:  Glycosyltransferase family 43
  misc_feature (60)..(384): NCBI GI NO: 32879545 NR Description: beta3-glucuronyltransferase [Zea mays]
  misc_feature (1)..(384): NCBI GI NO: 34911082 NR Description: P0485G01.28
  misc_feature (8)..(381): NCBI GI NO: 31979311 NR Description: 3-beta-glucuronosyltransferase [Hordeum vulgare]
  misc_feature (25)..(379): NCBI GI NO: 32968189 NR Description: beta3-glucuronyltransferase [Triticum aestivum]
  misc_feature (27)..(380): NCBI GI NO: 31979313 NR Description: 3-beta-glucuronosyltransferase [Hordeum vulgare]
  misc_feature (121)..(380): NCBI GI NO: 18396409 NR Description: glycosyltransferase family 43
  misc_feature (124)..(382): NCBI GI NO: 32968172 NR Description: beta3-glucuronyltransferase
  misc_feature (121)..(375): NCBI GI NO: 5668771 NR Description: Contains similarity to gb|D88035 glyco proteinspecific UDP-glucuronyltransferase from Rattus norvegicus
  misc_feature (121)..(313): NCBI GI NO: 6693039 NR Description: T22C5.4 [Arabidopsis thaliana]
  misc_feature (129)..(384): NCBI GI NO: 38344768 NR Description: OSJNBa0068L06.11
MTSQRHSRSQERSKSKGLSCRRVAVRLLFFFMLGIFIGFMPLFSVDVYKKIVSENKMLPFHEGVIETEMVGTKVKESETIVVEKEIELIDEPHIQESPPVPALLDDDVDFSESSHVLPAIRESDIPVKKLLIIVTITSVRPQQAYYLNRLAHTLKAVQAPLLWLLVEWPEQSYETAEILRSSGVMYRHLMCRKNTTSVRKIAVCQRNNAIYHVKRHHLDGIMHFADEERSYSADVFEEMQKIRRFGSWPVTIHIGTKYRAVLEGPICKANRVMRWHTVQTAQKKSSTRRFPIGFSAFAFNSTLLWDPQRWNRPPMDSVIVHTGGRGGLQESRFIEKLVKSERQIEGLPDNCNRVMVWNFNLEPPQLNYPAGWALYKNLEADIPVI

SEQ ID NO: 21711 - protein, 354 aa, Zea mays subsp. mays
  peptide (1)..(354): Ceres Seq. ID no. 15180705
  misc_feature (119)..(338): Pfam Name: Pfam Description:  Glycosyltransferase family 43
  misc_feature (29)..(353): NCBI GI NO: 32879545 NR Description: beta3-glucuronyltransferase [Zea mays]
  misc_feature (1)..(353): NCBI GI NO: 34911082 NR Description: P0485G01.28
  misc_feature (1)..(350): NCBI GI NO: 31979311 NR Description: 3-beta-glucuronosyltransferase [Hordeum vulgare]
  misc_feature (1)..(348): NCBI GI NO: 32968189 NR Description: beta3-glucuronyltransferase [Triticum aestivum]
  misc_feature (1)..(349): NCBI GI NO: 31979313 NR Description: 3-beta-glucuronosyltransferase [Hordeum vulgare]
  misc_feature (90)..(349): NCBI GI NO: 18396409 NR Description: glycosyltransferase family 43
  misc_feature (93)..(351): NCBI GI NO: 32968172 NR Description: beta3-glucuronyltransferase
  misc_feature (90)..(344): NCBI GI NO: 5668771 NR Description: Contains similarity to gb|D88035 glyco proteinspecific UDP-glucuronyltransferase from Rattus norvegicus
  misc_feature (90)..(282): NCBI GI NO: 6693039 NR Description: T22C5.4 [Arabidopsis thaliana]
  misc_feature (98)..(353): NCBI GI NO: 38344768 NR Description: OSJNBa0068L06.11
MLGIFIGFMPLFSVDVYKKIVSENKMLPFHEGVIETEMVGTKVKESETIVVEKEIELIDEPHIQESPPVPALLDDDVDFSESSHVLPAIRESDIPVKKLLIIVTITSVRPQQAYYLNRLAHTLKAVQAPLLWLLVEWPEQSYETAEILRSSGVMYRHLMCRKNTTSVRKIAVCQRNNAIYHVKRHHLDGIMHFADEERSYSADVFEEMQKIRRFGSWPVTIHIGTKYRAVLEGPICKANRVMRWHTVQTAQKKSSTRRFPIGFSAFAFNSTLLWDPQRWNRPPMDSVIVHTGGRGGLQESRFIEKLVKSERQIEGLPDNCNRVMVWNFNLEPPQLNYPAGWALYKNLEADIPVI

SEQ ID NO: 21712 - DNA, 976 bp, Zea mays subsp. mays
  misc_feature (1)..(976): Ceres Seq. ID no. 15179263
accagcccctctcgcctcacgaaaaggcgcaggccaaggccaaggccaagccgccccctccctcctctcgtctccactctctctctctctctggcagccaaaggcgaggccgagatccggcgcgcggaggatgccttccaggtccatgagccggctgtccgtcgagtccgcctcgggcagcgggggcggctgccgggaggccgagccggtgctctgcgcgcctcggccgcgcagggcccagcagcagctggtccacgtccacccccgcggcgccgacctcatcctcggcccgccgcccttcctgctcaacgagagcagcgaggagggtcgctgcagctgggcggcgttgggcggcgggtcgccgccggcgcgcgcgggcaacccgctggtgcacgaccccagcttcctgctgagccagcgccaccccgcggcggacccgccgctggagctcggcttcttcgaccacctgatccgcaccagcagctacgtgcaccggccgacgacgacgacgtcgtataccagctccggcaccagcagcagcggcggcagtagcagcaagagcagttttggcccgtcgtcgttcgcgcccgccgtgaggatccaggggttcgacgtcgccgcgtgccggagctcccacggcggcgggggcggccgcgtgctgtccgccgcccgcgcgtgagcggtcgagctccatggtgtggagggggatgaaatcaaagagggaggaggaagaaccttgtgtacagattctgtgtctgacgagtcgtgttcgtgttcgtgtccgctgtactaattgtgaacaccaccacacatagcatagcatatagcatagcatatcaaagactactaggtcggtcggagtcggacggtcagcgctcgtgttcttgtagcagtcgagcgagcgactaggctaccgcgcgccatgtaacgtacggtcctgcaaacaatactgcacgtataaagatggaaaccgtgc

SEQ ID NO: 21713 - protein, 225 aa, Zea mays subsp. mays
  peptide (1)..(225): Ceres Seq. ID no. 15179264
  misc_feature (49)..(222): NCBI GI NO: 34907108 NR Description: OSJNBa0052O12.19
PAPLASRKGAGQGQGQAAPSLLSSPLSLSLWQPKARPRSGARRMPSRSMSRLSVESASGSGGGCREAEPVLCAPRPRRAQQQLVHVHPRGADLILGPPPFLLNESSEEGRCSWAALGGGSPPARAGNPLVHDPSFLLSQRHPAADPPLELGFFDHLIRTSSYVHRPTTTTSYTSSGTSSSGGSSSKSSFGPSSFAPAVRIQGFDVAACRSSHGGGGGRVLSAARA

SEQ ID NO: 21714 - protein, 183 aa, Zea mays subsp. mays
  peptide (1)..(183): Ceres Seq. ID no. 15179265
  misc_feature (60)..(166): Pfam Name: Pfam Description:  Herpesvirus glycoprotein D
TSPSRLTKRRRPRPRPSRPLPPLVSTLSLSLAAKGEAEIRRAEDAFQVHEPAVRRVRLGQRGRLPGGRAGALRASAAQGPAAAGPRPPPRRRPHPRPAALPAQREQRGGSLQLGGVGRRVAAGARGQPAGARPQLPAEPAPPRGGPAAGARLLRPPDPHQQLRAPADDDDVVYQLRHQQQRRQ

SEQ ID NO: 21715 - protein, 182 aa, Zea mays subsp. mays
  peptide (1)..(182): Ceres Seq. ID no. 15179266
  misc_feature (6)..(179): NCBI GI NO: 34907108 NR Description: OSJNBa0052O12.19
MPSRSMSRLSVESASGSGGGCREAEPVLCAPRPRRAQQQLVHVHPRGADLILGPPPFLLNESSEEGRCSWAALGGGSPPARAGNPLVHDPSFLLSQRHPAADPPLELGFFDHLIRTSSYVHRPTTTTSYTSSGTSSSGGSSSKSSFGPSSFAPAVRIQGFDVAACRSSHGGGGGRVLSAARA

SEQ ID NO: 21716 - DNA, 799 bp, Zea mays subsp. mays
  misc_feature (1)..(799): Ceres Seq. ID no. 14302128
aataatataaccacagaaatccatcgacgaacaactgagaagagctgcgcctgcgcctgcgcctgcgggaaagggagaacatggtggggaagaagaggggtgttatctccccgctggaccatctcgctgggctgctggaggtgcgcgtggtgaggggagtggacctcgccatccgcgacctccgatccagcgacccctacgtcgtccttcgcatcggcaaggcgcagaaagtgaagacgcgagtggtcaagaagagcatcaatccggaatggaacgaaaaactcaccctctctattgaagaccctgccgttcctattagactggaagtatttgacaaggacactttcgttgatgatgcaatgggtaacgcggagctggacatccgcccgttagtcgagattgtgaagatgaagctccagggtgtcgctgacaaaacggtggtaaagaagctggtgcccaacagacagaactgcctagccgaggagagctccatatacatatcggaggggaaggtgaagcaagacctggtcgtacggctaaggaacgtagagtgtggcgaaatcgagctccaacttcagtgggtccacctccctggctctaagggtgtatgagaagagttatgagcgctgcctagcttgcactgctcaggttcttcgcttcacattaaagtaatctatttgaactgtagttgtaatctatagagataaaagcagtgtaaaaatagtagaaatcgttatggattaaagacagtcgacccagctcttgctagttgaaaagaacccagctcttgccatttgac

SEQ ID NO: 21717 - protein, 176 aa, Zea mays subsp. mays
  peptide (1)..(176): Ceres Seq. ID no. 14302129
  misc_feature (19)..(98): Pfam Name: Pfam Description:  C2 domain
  misc_feature (10)..(176): NCBI GI NO: 30684739 NR Description: C2 domain-containing protein
  misc_feature (12)..(176): NCBI GI NO: 18409682 NR Description: C2 domain-containing protein
  misc_feature (12)..(172): NCBI GI NO: 33146442 NR Description: zinc finger and C2 domain protein-like
  misc_feature (10)..(176): NCBI GI NO: 15221907 NR Description: C2 domain-containing protein
  misc_feature (10)..(176): NCBI GI NO: 25405940 NR Description: protein T1N15.21 [imported] - Arabidopsis thaliana
  misc_feature (12)..(176): NCBI GI NO: 13430460 NR Description: unknown protein [Arabidopsis thaliana]
  misc_feature (12)..(176): NCBI GI NO: 15240322 NR Description: C2 domain-containing protein
  misc_feature (9)..(176): NCBI GI NO: 15219500 NR Description: C2 domain-containing protein
  misc_feature (13)..(176): NCBI GI NO: 18409675 NR Description: C2 domain-containing protein
  misc_feature (12)..(172): NCBI GI NO: 33146446 NR Description: zinc finger and C2 domain protein-like
MVGKKRGVISPLDHLAGLLEVRVVRGVDLAIRDLRSSDPYVVLRIGKAQKVKTRVVKKSINPEWNEKLTLSIEDPAVPIRLEVFDKDTFVDDAMGNAELDIRPLVEIVKMKLQGVADKTVVKKLVPNRQNCLAEESSIYISEGKVKQDLVVRLRNVECGEIELQLQWVHLPGSKGV

SEQ ID NO: 21718 - DNA, 583 bp, Zea mays subsp. mays
  misc_feature (1)..(583): Ceres Seq. ID no. 12420140
aaaatgcaaatgtgagctccttctcgtttggagaggccgacattgacagcacagtgaaaacagcaaagaagaaagggtccagcaacttgtctactgatctgaacggcaagaccatgcccaagaaggattcagcgtctgcagagaaacagcctccgaaccgtgcgaggccgaaaggaatgagtggcagcagcaattttgcagacgggaaggcctcaacctcaacaaccggagatcatgaaggccgtcgtacccggcagcctcctggcggcgacagcagcattttgctgggctagcgtgcatatgaatcttgccctatgccgccgccgcacgggtggttggtccgtcagtctgtggtcttgttttcgtggtcaggccatgtgtcccatctccggtccttcagatgatctggttcgcatctgtcttgtgtatggttttgatatgtgttggttgtgacatgccccatggaacaaccctatcgctatgctgttttgttgtgtacaatggatgacgtgtgctgccgttttgttgtgtgtacaatggatatgtctggttgttgaataagaagaaattggtatatggtacc

SEQ ID NO: 21719 - protein, 96 aa, Zea mays subsp. mays
  peptide (1)..(96): Ceres Seq. ID no. 12420141
  misc_feature (1)..(95): NCBI GI NO: 33146622 NR Description: hypothetical protein
NANVSSFSFGEADIDSTVKTAKKKGSSNLSTDLNGKTMPKKDSASAEKQPPNRARPKGMSGSSNFADGKASTSTTGDHEGRRTRQPPGGDSSILLG

SEQ ID NO: 21720 - protein, 72 aa, Zea mays subsp. mays
  peptide (1)..(72): Ceres Seq. ID no. 12420142
MKAVVPGSLLAATAAFCWASVHMNLALCRRRTGGWSVSLWSCFRGQAMCPISGPSDDLVRICLVYGFDMCWL

SEQ ID NO: 21721 - protein, 59 aa, Zea mays subsp. mays
  peptide (1)..(59): Ceres Seq. ID no. 12420143
  misc_feature (1)..(58): NCBI GI NO: 33146622 NR Description: hypothetical protein
MPKKDSASAEKQPPNRARPKGMSGSSNFADGKASTSTTGDHEGRRTRQPPGGDSSILLG

SEQ ID NO: 21722 - DNA, 2433 bp, Zea mays subsp. mays
  misc_feature (1)..(2433): Ceres Seq. ID no. 15179301
atcgaacatcggagagatgcgcgcgggcggcggcgcgcctccccgacacgcaccactctccccgaccgcctccgccactgccacgctagtacccgcttctgtcgccatgcccacgccgcgcctcgtacacctccgccacctcctctcattccgctccgcccttccccgcccgctgggtcccaaccaaagccacccgctccccgggtcggttcacccgtcccttctcctcccccgtgccatggctggtgtcgcatacgcaggtctggcgacggggtcggcggaatacgaggaggtgctcgggtgcctcgcgtcgctgataacgcagaaggtgcgcgcggacaccggcaaccgcggcaaccagtgggagctcatgtccaagtacgtccagatactggaactggaggaatccatcgcgcagttgaaagtggttcacgttgctgggaccaaagggaagggttcaacatgcacatttgctgagtcaatccttcgatcatgtggtttccacactgggctcttcacttcaccacatttgatggatgtccgcgagcgatttcggcttgatgggctggacatttcagaagaaaagtttattaggtatttctggtggtgctggaagacactgaaggacaagactggtgatggtgtaccgatgccggcctactttaggttccttgcactgctagcattcaagatcttttcagatgagcagcaggtggatgtcgtagtgctcgaggttggtttgggagggaagtatgatgcaacaaatgtggtcagagcacctgtagtttgtggaataacatcccttgggtatgatcatatggaaattcttggaaacacacttggagaaattactagagagaaggctgggatactgaagaaaggagttccagcgtatacagttccacagccagaagaggcaatgtctgtactgatgaagcgagctactgaattgggtgtttctcttcaagttgtccaccctttggacccacagaaattagaggatcaacctcttggactccatggtgagcaccaatacatgaatgcaggtcttgcaattgcattggctaatacctggcttgagaggcaaggccatttgaacagattacatgtcaaacattctggtaccttgccagatcagttcatcaaagggctgtcgagtgcttgtctgcatggtcgaggacagattattccaaattcacaagtgaactcagaaaatgatcgtgattcttcattggttttctatttggatggggcacatagctcagaaagcatggaaatgtgtgcaagatggtttgcccacgctacaaatagtgatggaatacagccaggtccttcggagcagcctcacactgatagggattccaggaagtttctccttttcaattgcatgactgtaagagatcctcagagattgctcccacgtcttctagatacatgtgctcaaaatggtctccactttgagcatgccttatttgtgccaaaccaatcacagtacaacaagcttggatcccttgcatccccaccttcagagcgtgaacaaattgatttgtcatggcagttgtcgcttcaaaaggtgtggggaaacctgcctcatcacaataaaggtctaaatgatgtaaactctagcggagctacctcggtttttgaatctcttccattggcaattaaatggctaagggaaactgctcaacaaaatcaatcgattcagtttcaggtcttagttaccggctcgctgcaccttgtcggcgatgtcttaagattgctcaagaacaataagtaacttcatttggaatggcacattgttcagattgaactggctgcctacggaccactaaggcactaactggagcttatcgaaatttgtgattgggatagcacaacataccaacttggttacaaggctggaagaaattgaaagacatttttatttcagttccaatcagcggtaaaattgttgtatttaatcgtttctttaagttcctggcgttatgtgccatcacatcctcactccagaaggatgtaaccaatttttagaatgtacaattagtggattctcagcgacacatctttgtatgattggtggacggatctgcgtagcctttgcaacagacaatcaagaagacgctttgacggcctgctaattcatttttggtggaatttatggctggaacgaaataacagaattttccaaagtcagcatagaagcgttaatcaagtggcccttgcagtcatcagatattgctagtagctgaggtcttgttgatctggtctagtgggtttttgttcttctccttttattttttcttttttaccctctcccctccggttctctggttttgtatcttccatttctttgctctctaatctaatatatttcggagtggcaagtcttttgccccttcctttcaaaaaaaaaaaaacaattagtggatt

SEQ ID NO: 21723 - protein, 592 aa, Zea mays subsp. mays
  peptide (1)..(592): Ceres Seq. ID no. 15179302
  misc_feature (221)..(310): Pfam Name: Pfam Description:  Mur ligase family, catalytic domain
  misc_feature (36)..(354): NCBI GI NO: 37535812 NR Description: putative folylpolyglutamate synthetase
  misc_feature (375)..(589): NCBI GI NO: 37535812 NR Description: putative folylpolyglutamate synthetase
  misc_feature (89)..(589): NCBI GI NO: 30681208 NR Description: folylpolyglutamate synthase (fpgs2)
  misc_feature (89)..(589): NCBI GI NO: 17976705 NR Description: dihydrofolate synthetase / folylpolyglutamatesynthetase
  misc_feature (93)..(526): NCBI GI NO: 17976757 NR Description: dihydrofolate synthetase [Arabidopsis thaliana]
  misc_feature (544)..(589): NCBI GI NO: 17976757 NR Description: dihydrofolate synthetase [Arabidopsis thaliana]
  misc_feature (88)..(573): NCBI GI NO: 10177571 NR Description: tetrahydrofolylpolyglutamate synthase-like protein
  misc_feature (171)..(526): NCBI GI NO: 15228213 NR Description: dihydrofolate synthetase (dhfs)
  misc_feature (544)..(589): NCBI GI NO: 15228213 NR Description: dihydrofolate synthetase (dhfs)
  misc_feature (92)..(432): NCBI GI NO: 30694288 NR Description: folylpolyglutamate-dihydrofolate synthase
SNIGEMRAGGGAPPRHAPLSPTASATATLVPASVAMPTPRLVHLRHLLSFRSALPRPLGPNQSHPLPGSVHPSLLLPRAMAGVAYAGLATGSAEYEEVLGCLASLITQKVRADTGNRGNQWELMSKYVQILELEESIAQLKVVHVAGTKGKGSTCTFAESILRSCGFHTGLFTSPHLMDVRERFRLDGLDISEEKFIRYFWWCWKTLKDKTGDGVPMPAYFRFLALLAFKIFSDEQQVDVVVLEVGLGGKYDATNVVRAPVVCGITSLGYDHMEILGNTLGEITREKAGILKKGVPAYTVPQPEEAMSVLMKRATELGVSLQVVHPLDPQKLEDQPLGLHGEHQYMNAGLAIALANTWLERQGHLNRLHVKHSGTLPDQFIKGLSSACLHGRGQIIPNSQVNSENDRDSSLVFYLDGAHSSESMEMCARWFAHATNSDGIQPGPSEQPHTDRDSRKFLLFNCMTVRDPQRLLPRLLDTCAQNGLHFEHALFVPNQSQYNKLGSLASPPSEREQIDLSWQLSLQKVWGNLPHHNKGLNDVNSSGATSVFESLPLAIKWLRETAQQNQSIQFQVLVTGSLHLVGDVLRLLKNNK

SEQ ID NO: 21724 - protein, 587 aa, Zea mays subsp. mays
  peptide (1)..(587): Ceres Seq. ID no. 15179303
  misc_feature (216)..(305): Pfam Name: Pfam Description:  Mur ligase family, catalytic domain
  misc_feature (31)..(349): NCBI GI NO: 37535812 NR Description: putative folylpolyglutamate synthetase
  misc_feature (370)..(584): NCBI GI NO: 37535812 NR Description: putative folylpolyglutamate synthetase
  misc_feature (84)..(584): NCBI GI NO: 30681208 NR Description: folylpolyglutamate synthase (fpgs2)
  misc_feature (84)..(584): NCBI GI NO: 17976705 NR Description: dihydrofolate synthetase / folylpolyglutamatesynthetase
  misc_feature (88)..(521): NCBI GI NO: 17976757 NR Description: dihydrofolate synthetase [Arabidopsis thaliana]
  misc_feature (539)..(584): NCBI GI NO: 17976757 NR Description: dihydrofolate synthetase [Arabidopsis thaliana]
  misc_feature (83)..(568): NCBI GI NO: 10177571 NR Description: tetrahydrofolylpolyglutamate synthase-like protein
  misc_feature (166)..(521): NCBI GI NO: 15228213 NR Description: dihydrofolate synthetase (dhfs)
  misc_feature (539)..(584): NCBI GI NO: 15228213 NR Description: dihydrofolate synthetase (dhfs)
  misc_feature (87)..(427): NCBI GI NO: 30694288 NR Description: folylpolyglutamate-dihydrofolate synthase
MRAGGGAPPRHAPLSPTASATATLVPASVAMPTPRLVHLRHLLSFRSALPRPLGPNQSHPLPGSVHPSLLLPRAMAGVAYAGLATGSAEYEEVLGCLASLITQKVRADTGNRGNQWELMSKYVQILELEESIAQLKVVHVAGTKGKGSTCTFAESILRSCGFHTGLFTSPHLMDVRERFRLDGLDISEEKFIRYFWWCWKTLKDKTGDGVPMPAYFRFLALLAFKIFSDEQQVDVVVLEVGLGGKYDATNVVRAPVVCGITSLGYDHMEILGNTLGEITREKAGILKKGVPAYTVPQPEEAMSVLMKRATELGVSLQVVHPLDPQKLEDQPLGLHGEHQYMNAGLAIALANTWLERQGHLNRLHVKHSGTLPDQFIKGLSSACLHGRGQIIPNSQVNSENDRDSSLVFYLDGAHSSESMEMCARWFAHATNSDGIQPGPSEQPHTDRDSRKFLLFNCMTVRDPQRLLPRLLDTCAQNGLHFEHALFVPNQSQYNKLGSLASPPSEREQIDLSWQLSLQKVWGNLPHHNKGLNDVNSSGATSVFESLPLAIKWLRETAQQNQSIQFQVLVTGSLHLVGDVLRLLKNNK

SEQ ID NO: 21725 - protein, 557 aa, Zea mays subsp. mays
  peptide (1)..(557): Ceres Seq. ID no. 15179304
  misc_feature (186)..(275): Pfam Name: Pfam Description:  Mur ligase family, catalytic domain
  misc_feature (1)..(319): NCBI GI NO: 37535812 NR Description: putative folylpolyglutamate synthetase
  misc_feature (340)..(554): NCBI GI NO: 37535812 NR Description: putative folylpolyglutamate synthetase
  misc_feature (54)..(554): NCBI GI NO: 30681208 NR Description: folylpolyglutamate synthase (fpgs2)
  misc_feature (54)..(554): NCBI GI NO: 17976705 NR Description: dihydrofolate synthetase / folylpolyglutamatesynthetase
  misc_feature (58)..(491): NCBI GI NO: 17976757 NR Description: dihydrofolate synthetase [Arabidopsis thaliana]
  misc_feature (509)..(554): NCBI GI NO: 17976757 NR Description: dihydrofolate synthetase [Arabidopsis thaliana]
  misc_feature (53)..(538): NCBI GI NO: 10177571 NR Description: tetrahydrofolylpolyglutamate synthase-like protein
  misc_feature (136)..(491): NCBI GI NO: 15228213 NR Description: dihydrofolate synthetase (dhfs)
  misc_feature (509)..(554): NCBI GI NO: 15228213 NR Description: dihydrofolate synthetase (dhfs)
  misc_feature (57)..(397): NCBI GI NO: 30694288 NR Description: folylpolyglutamate-dihydrofolate synthase
MPTPRLVHLRHLLSFRSALPRPLGPNQSHPLPGSVHPSLLLPRAMAGVAYAGLATGSAEYEEVLGCLASLITQKVRADTGNRGNQWELMSKYVQILELEESIAQLKVVHVAGTKGKGSTCTFAESILRSCGFHTGLFTSPHLMDVRERFRLDGLDISEEKFIRYFWWCWKTLKDKTGDGVPMPAYFRFLALLAFKIFSDEQQVDVVVLEVGLGGKYDATNVVRAPVVCGITSLGYDHMEILGNTLGEITREKAGILKKGVPAYTVPQPEEAMSVLMKRATELGVSLQVVHPLDPQKLEDQPLGLHGEHQYMNAGLAIALANTWLERQGHLNRLHVKHSGTLPDQFIKGLSSACLHGRGQIIPNSQVNSENDRDSSLVFYLDGAHSSESMEMCARWFAHATNSDGIQPGPSEQPHTDRDSRKFLLFNCMTVRDPQRLLPRLLDTCAQNGLHFEHALFVPNQSQYNKLGSLASPPSEREQIDLSWQLSLQKVWGNLPHHNKGLNDVNSSGATSVFESLPLAIKWLRETAQQNQSIQFQVLVTGSLHLVGDVLRLLKNNK

SEQ ID NO: 21726 - DNA, 1644 bp, Zea mays subsp. mays
  misc_feature (1)..(1644): Ceres Seq. ID no. 13598923
aaccgcgccgctctctctctctctctcgcacgagccgcgccggcgccgccaccacgcgcgcgggagacagagaccacagccgcagccaccggcgggcggaataggaatggtggcgccggggggaggagcaggaggaggtccgtcgcggtggccggcggcggaggagcttgacactgtacggaagaaggtggtggagattagtggaagggatgaacaagaggttatggttgctgcttgcccctacagaatttgccctttgggggctcatattgatcatcagggtggagtagtcacagctatgaccataaattatggagtactccttggtttcgttccctctaatggttctgaggttttacttcattctggtcagtttgaaggtgctataagattcagagttgatgacttgcaaaagcctattgataaacctgagaacataaactggggaagttatgcaaaaggtgctgttagtgcactgcagaatagtggatatgatctaaggaagggtatcataggatatatttctggtgtgaaaggtcttgatagttcagggctcagttcttctgcggcggttggcatcgcctacttgctggctttagaacatgtaaatgatctggttatatcaccagtagataacattcagttagacaagtacattgaaaataaatacttgggtctcgaaaatggcattctagatccatctgccattttgctttcacggtatggctatctcaccttcatggactgcaagactgcttcaccttcctacgtctgcttctcggagctgaataaaagccaacagcctcagggacagctaccattcaagattttgttggcattttcaggactccaacataatctgccaaagaagcgtggatataatacacgagtttctgagtgcaaagaggctgcccgtgctcttttgcatgcttcaggctgtgaagatacaccaaatatactttgcaatgttgacccagttgtatatgagacccagaagtgtgtattggaagaaaatctttccaggagagctgaacactacttttttgaaatgaagcgggttacaaagggcagggatgcatgggctcatgggaacctacaagaacttggacagctgatctctgaatctggtcgcagctccatactcaactacgaatgtgggagcaaagagatgatccagctgtacgagatcctgctgaaggcccccggcgccctcggcgcccggttcagcggcgccggcttcaggggctgctgcctggccatcgtggagagcgaccgcgcggaggatgcggctgcatacgtccgtgccgagtacgaaaaggcccagcccgagctggtctccaggatccccgcggatcgccgtgttctggtctgcgagcccggggactccgcgcgcgtcatattgcctgatcctcacctgagctcctgatgccatttcgtggcccggacagacggaatgatgactctactagtccattcgctgcgtttggattcgtttttagttaagccccttttgagcatcggatattttcctttcctttattgtttctaataaaaataaattaatttctgtaaactttatataagcttctagcttttttagataaaagtatataatatctatctacttctctactacamtammgt

SEQ ID NO: 21727 - protein, 474 aa, Zea mays subsp. mays
  peptide (1)..(474): Ceres Seq. ID no. 15222449
  misc_feature (36)..(250): NCBI GI NO: 38567889 NR Description: OSJNBa0060N03.9
  misc_feature (332)..(448): NCBI GI NO: 38567889 NR Description: OSJNBa0060N03.9
  misc_feature (50)..(467): NCBI GI NO: 22330971 NR Description: GHMP kinase family [Arabidopsis thaliana]
  misc_feature (139)..(322): NCBI GI NO: 6630560 NR Description: galactokinase-like protein [Arabidopsis thaliana]
  misc_feature (356)..(467): NCBI GI NO: 6630560 NR Description: galactokinase-like protein [Arabidopsis thaliana]
  misc_feature (50)..(139): NCBI GI NO: 6630560 NR Description: galactokinase-like protein [Arabidopsis thaliana]
  misc_feature (357)..(467): NCBI GI NO: 12322772 NR Description: putative galactokinase, 5' partial; 97-568
  misc_feature (80)..(440): NCBI GI NO: 120900 NR Description: Galactokinase (Galactose kinase)
  misc_feature (80)..(440): NCBI GI NO: 23003215 NR Description: hypothetical protein [Lactobacillus gasseri]
  misc_feature (142)..(440): NCBI GI NO: 18310327 NR Description: galactokinase [Clostridium perfringens]
TAPLSLSLSHEPRRRRHHARGRQRPQPQPPAGGIGMVAPGGGAGGGPSRWPAAEELDTVRKKVVEISGRDEQEVMVAACPYRICPLGAHIDHQGGVVTAMTINYGVLLGFVPSNGSEVLLHSGQFEGAIRFRVDDLQKPIDKPENINWGSYAKGAVSALQNSGYDLRKGIIGYISGVKGLDSSGLSSSAAVGIAYLLALEHVNDLVISPVDNIQLDKYIENKYLGLENGILDPSAILLSRYGYLTFMDCKTASPSYVCFSELNKSQQPQGQLPFKILLAFSGLQHNLPKKRGYNTRVSECKEAARALLHASGCEDTPNILCNVDPVVYETQKCVLEENLSRRAEHYFFEMKRVTKGRDAWAHGNLQELGQLISESGRSSILNYECGSKEMIQLYEILLKAPGALGARFSGAGFRGCCLAIVESDRAEDAAAYVRAEYEKAQPELVSRIPADRRVLVCEPGDSARVILPDPHLSS

SEQ ID NO: 21728 - protein, 439 aa, Zea mays subsp. mays
  peptide (1)..(439): Ceres Seq. ID no. 15222450
  misc_feature (1)..(215): NCBI GI NO: 38567889 NR Description: OSJNBa0060N03.9
  misc_feature (297)..(413): NCBI GI NO: 38567889 NR Description: OSJNBa0060N03.9
  misc_feature (15)..(432): NCBI GI NO: 22330971 NR Description: GHMP kinase family [Arabidopsis thaliana]
  misc_feature (104)..(287): NCBI GI NO: 6630560 NR Description: galactokinase-like protein [Arabidopsis thaliana]
  misc_feature (321)..(432): NCBI GI NO: 6630560 NR Description: galactokinase-like protein [Arabidopsis thaliana]
  misc_feature (15)..(104): NCBI GI NO: 6630560 NR Description: galactokinase-like protein [Arabidopsis thaliana]
  misc_feature (322)..(432): NCBI GI NO: 12322772 NR Description: putative galactokinase, 5' partial; 97-568
  misc_feature (45)..(405): NCBI GI NO: 120900 NR Description: Galactokinase (Galactose kinase)
  misc_feature (45)..(405): NCBI GI NO: 23003215 NR Description: hypothetical protein [Lactobacillus gasseri]
  misc_feature (107)..(405): NCBI GI NO: 18310327 NR Description: galactokinase [Clostridium perfringens]
MVAPGGGAGGGPSRWPAAEELDTVRKKVVEISGRDEQEVMVAACPYRICPLGAHIDHQGGVVTAMTINYGVLLGFVPSNGSEVLLHSGQFEGAIRFRVDDLQKPIDKPENINWGSYAKGAVSALQNSGYDLRKGIIGYISGVKGLDSSGLSSSAAVGIAYLLALEHVNDLVISPVDNIQLDKYIENKYLGLENGILDPSAILLSRYGYLTFMDCKTASPSYVCFSELNKSQQPQGQLPFKILLAFSGLQHNLPKKRGYNTRVSECKEAARALLHASGCEDTPNILCNVDPVVYETQKCVLEENLSRRAEHYFFEMKRVTKGRDAWAHGNLQELGQLISESGRSSILNYECGSKEMIQLYEILLKAPGALGARFSGAGFRGCCLAIVESDRAEDAAAYVRAEYEKAQPELVSRIPADRRVLVCEPGDSARVILPDPHLSS

SEQ ID NO: 21729 - protein, 400 aa, Zea mays subsp. mays
  peptide (1)..(400): Ceres Seq. ID no. 15222451
  misc_feature (1)..(176): NCBI GI NO: 38567889 NR Description: OSJNBa0060N03.9
  misc_feature (258)..(374): NCBI GI NO: 38567889 NR Description: OSJNBa0060N03.9
  misc_feature (1)..(393): NCBI GI NO: 22330971 NR Description: GHMP kinase family [Arabidopsis thaliana]
  misc_feature (65)..(248): NCBI GI NO: 6630560 NR Description: galactokinase-like protein [Arabidopsis thaliana]
  misc_feature (282)..(393): NCBI GI NO: 6630560 NR Description: galactokinase-like protein [Arabidopsis thaliana]
  misc_feature (1)..(65): NCBI GI NO: 6630560 NR Description: galactokinase-like protein [Arabidopsis thaliana]
  misc_feature (283)..(393): NCBI GI NO: 12322772 NR Description: putative galactokinase, 5' partial; 97-568
  misc_feature (6)..(366): NCBI GI NO: 120900 NR Description: Galactokinase (Galactose kinase)
  misc_feature (6)..(366): NCBI GI NO: 23003215 NR Description: hypothetical protein [Lactobacillus gasseri]
  misc_feature (68)..(366): NCBI GI NO: 18310327 NR Description: galactokinase [Clostridium perfringens]
MVAACPYRICPLGAHIDHQGGVVTAMTINYGVLLGFVPSNGSEVLLHSGQFEGAIRFRVDDLQKPIDKPENINWGSYAKGAVSALQNSGYDLRKGIIGYISGVKGLDSSGLSSSAAVGIAYLLALEHVNDLVISPVDNIQLDKYIENKYLGLENGILDPSAILLSRYGYLTFMDCKTASPSYVCFSELNKSQQPQGQLPFKILLAFSGLQHNLPKKRGYNTRVSECKEAARALLHASGCEDTPNILCNVDPVVYETQKCVLEENLSRRAEHYFFEMKRVTKGRDAWAHGNLQELGQLISESGRSSILNYECGSKEMIQLYEILLKAPGALGARFSGAGFRGCCLAIVESDRAEDAAAYVRAEYEKAQPELVSRIPADRRVLVCEPGDSARVILPDPHLSS

SEQ ID NO: 21730 - DNA, 3044 bp, Zea mays subsp. mays
  misc_feature (1)..(3044): Ceres Seq. ID no. 15179283
accacgctccggtcagcctcgcctcccttctccgtctcattcccccaatcccacgccactcccgcaggaatccccacccaaattcccgtctccccgatcgccgcccttctcggtgcccgtaaaccctacccccggagtcgcccgtgcgctgtcgtgcccgcgttgccaccgtcggtggtccgcggcgcccgtaaccaaaacctaaccgcagcctgcagatcccgattccgcagggaggcgggagaggtgaaggccgcctcgccgcagatggagcccgcgggcgcgcgcaaggagtggcgcgccgtccccggctcctcgctccgctccaatggcgccgaggatgccgcggagcacgggaaactggggcagtcggaggaccgagctatctacgaggaaggggcgggtggactggaggacttctgcgccatcaccattgatgggagcggagggctcagcgaggacatcctgcagcagcgcctgcagagcgttgtgcggcaaagggagcagctgcagcaggtcgagatggagctgcgtgcgcaggccattgcacacccgcagatcattcaggcgcaacaaagcttccaggctacttccaaggaacatgccgcagctgtggccaagatcaaggagcaactgcatgagcgggagcaatacattcttgaactagaaatgaaactcaatgacaaggatagagaactaaatgctctgaagattgatcatcaaacggtgtgggcaaatcaagatcttattagagaacagaccaaagagctggcaactgtcagaagggaacgcgacaactctgaagctgaaagagcccaacatcttacacaaattcatgagctccaagaacatctgcgagaaaaagaaagccagttcattgcattagaggaacagcatagggctgctcaagacaacattctttacaaagatgagcagttgagggaagcccatgcttgggtatctcaagttcgagaaatggatgctttgcagtctcaatccctacaagttgagttacgtgagcgcatggagcaatttaatcaatattggattagctcccagcagcagtatgctgaaatgcagcggagtcttctccatacaatacaacaactccagcaagaattaactgaggcaagggaacagtctggtgcacaaaaagatggtccacaagtttctcgggaagggtcagctgaatcatcactagttcaaagcatgggaaacagcgtggcttcaaatggtagtgcaactgcagatgggaaccagcaattgttgaaaaataatggaagcgtggatgtctctgttcaggccaatagtgcctcagctgtacctgttccttcttccctactgggaatcggtggtccggctgcgcatatcgctgcgatgcatgcttttatgattcatcctcaaggcattcctcaacccttagtagcatcacccaactctggtgttcctcaatttggcagttttcagtctcagtctacaattcaaccaaattcacaatggccaaatcagcaggaagtacaaaatgtctcacaaccacaagatgaaacaaactatcagacatcccaatcagaccggactgttttacaacaaggcgctattaatactgatgagttgtcctcaaagccaagccaggatagtcagccagaccatcttaatgcccatgtgaaacaacagcaaagccctgcaagtgcacctactgaatcaactcatgaacttactgttgttgaagcgaatgtagctgaacatgtatcttgtgacgaacaacaaaaaatcttaaacgaacaggattcactgtcaaatatgaacaaccatattggaatagttgagcatctagagcaaaataccgaatccaaggatgaaagagctgcatctgataagcaacctgaacctgtatctaggcagcataaacatttgaactttcctccgttcactacccagattcacttgaaaaagagtgcaacagagaatcctaatgttgtaaatcaggttgatataatgaaatcagttgcaggtggttttagttcgcagttacctcgtgcaccaaaggaaccttctctcctagatgagagatctctattggcttgcattgtacgtgcagttcctgctgggactgagggtggaatcaggataagttcaactctgccaaataggcttgggaaaatgttggctccccttcactggcatgactataagaagcaatacgggaagctcgacgattttgtggctagtcatccagagctgtttgtgattgagggagacttcattcaccttcgtgatggagcacagcagattatttctgccactacagctgctgcaaaaatagctgctgcgacagcatcttctgcctcttactcatccttactgccttctgttgccgttactcctgtggcacaaaatactcggcaaaagaggaggcccgcagttgattccagatcatcaaatgcaattccctctggaaacggcttcacagatcaatttaacatcattcagggtgtcagcgacgtaacaatttcaggcaaagtaagaaatatccaagataatggcttcatagatgaagttcgcactgggcagccatccgtgctcacagctgctactgccaacggagcaagacatgacaaatgtgcaaataataccagacatggttatggtggaaaacaacaggggaggaccactgggacgacatacctttccagaagatgaaccaactttcactgggcgatgatgctgttggaattggaaaccatgcgagtggcgatgatgcggttggggaaaccatacgagtgacgatgctttggcttcgaaatgatggtgaagatgacctggattaaagttattctagattcattttttattttgcactattggtcttcacagagcctgtatggttgggggccttgttttggcaaagctgtactgatatatccctaccccaagaatcagaagcctgccaaagttttgcgactatgtacctcgtctgcgcttgtgtattgtggtgcacttgaatgatgcgaatgttatatcgaatccccgtccttgatcgtgag

SEQ ID NO: 21731 - protein, 899 aa, Zea mays subsp. mays
  peptide (1)..(899): Ceres Seq. ID no. 15179284
  misc_feature (145)..(441): Pfam Name: Pfam Description:  Myosin tail
  misc_feature (68)..(506): NCBI GI NO: 18423534 NR Description: expressed protein [Arabidopsis thaliana]
  misc_feature (674)..(804): NCBI GI NO: 18423534 NR Description: expressed protein [Arabidopsis thaliana]
  misc_feature (75)..(506): NCBI GI NO: 9759201 NR Description: gene_id:MNC6.16~unknown protein
  misc_feature (674)..(804): NCBI GI NO: 9759201 NR Description: gene_id:MNC6.16~unknown protein
  misc_feature (147)..(389): NCBI GI NO: 23480318 NR Description: Drosop hila melanogaster CG8797 gene product-related
  misc_feature (489)..(638): NCBI GI NO: 23480318 NR Description: Drosop hila melanogaster CG8797 gene product-related
  misc_feature (157)..(417): NCBI GI NO: 2246532 NR Description: ORF 73, contains large complex repeat CR 73
  misc_feature (158)..(417): NCBI GI NO: 11037008 NR Description: latent nuclear antigen [Human herpesvirus 8]
  misc_feature (157)..(421): NCBI GI NO: 5669894 NR Description: latent nuclear antigen [Human herpesvirus 8]
  misc_feature (153)..(421): NCBI GI NO: 13936996 NR Description: ORF73 [Human herpesvirus 8]
TTLRSASPPFSVSFPQSHATPAGIPTQIPVSPIAALLGARKPYPRSRPCAVVPALPPSVVRGARNQNLTAACRSRFRREAGEVKAASPQMEPAGARKEWRAVPGSSLRSNGAEDAAEHGKLGQSEDRAIYEEGAGGLEDFCAITIDGSGGLSEDILQQRLQSVVRQREQLQQVEMELRAQAIAHPQIIQAQQSFQATSKEHAAAVAKIKEQLHEREQYILELEMKLNDKDRELNALKIDHQTVWANQDLIREQTKELATVRRERDNSEAERAQHLTQIHELQEHLREKESQFIALEEQHRAAQDNILYKDEQLREAHAWVSQVREMDALQSQSLQVELRERMEQFNQYWISSQQQYAEMQRSLLHTIQQLQQELTEAREQSGAQKDGPQVSREGSAESSLVQSMGNSVASNGSATADGNQQLLKNNGSVDVSVQANSASAVPVPSSLLGIGGPAAHIAAMHAFMIHPQGIPQPLVASPNSGVPQFGSFQSQSTIQPNSQWPNQQEVQNVSQPQDETNYQTSQSDRTVLQQGAINTDELSSKPSQDSQPDHLNAHVKQQQSPASAPTESTHELTVVEANVAEHVSCDEQQKILNEQDSLSNMNNHIGIVEHLEQNTESKDERAASDKQPEPVSRQHKHLNFPPFTTQIHLKKSATENPNVVNQVDIMKSVAGGFSSQLPRAPKEPSLLDERSLLACIVRAVPAGTEGGIRISSTLPNRLGKMLAPLHWHDYKKQYGKLDDFVASHPELFVIEGDFIHLRDGAQQIISATTAAAKIAAATASSASYSSLLPSVAVTPVAQNTRQKRRPAVDSRSSNAIPSGNGFTDQFNIIQGVSDVTISGKVRNIQDNGFIDEVRTGQPSVLTAATANGARHDKCANNTRHGYGGKQQGRTTGTTYLSRR

SEQ ID NO: 21732 - protein, 810 aa, Zea mays subsp. mays
  peptide (1)..(810): Ceres Seq. ID no. 15179285
  misc_feature (56)..(352): Pfam Name: Pfam Description:  Myosin tail
  misc_feature (1)..(417): NCBI GI NO: 18423534 NR Description: expressed protein [Arabidopsis thaliana]
  misc_feature (585)..(715): NCBI GI NO: 18423534 NR Description: expressed protein [Arabidopsis thaliana]
  misc_feature (1)..(417): NCBI GI NO: 9759201 NR Description: gene_id:MNC6.16~unknown protein
  misc_feature (585)..(715): NCBI GI NO: 9759201 NR Description: gene_id:MNC6.16~unknown protein
  misc_feature (58)..(300): NCBI GI NO: 23480318 NR Description: Drosop hila melanogaster CG8797 gene product-related
  misc_feature (400)..(549): NCBI GI NO: 23480318 NR Description: Drosop hila melanogaster CG8797 gene product-related
  misc_feature (68)..(328): NCBI GI NO: 2246532 NR Description: ORF 73, contains large complex repeat CR 73
  misc_feature (69)..(328): NCBI GI NO: 11037008 NR Description: latent nuclear antigen [Human herpesvirus 8]
  misc_feature (68)..(332): NCBI GI NO: 5669894 NR Description: latent nuclear antigen [Human herpesvirus 8]
  misc_feature (64)..(332): NCBI GI NO: 13936996 NR Description: ORF73 [Human herpesvirus 8]
MEPAGARKEWRAVPGSSLRSNGAEDAAEHGKLGQSEDRAIYEEGAGGLEDFCAITIDGSGGLSEDILQQRLQSVVRQREQLQQVEMELRAQAIAHPQIIQAQQSFQATSKEHAAAVAKIKEQLHEREQYILELEMKLNDKDRELNALKIDHQTVWANQDLIREQTKELATVRRERDNSEAERAQHLTQIHELQEHLREKESQFIALEEQHRAAQDNILYKDEQLREAHAWVSQVREMDALQSQSLQVELRERMEQFNQYWISSQQQYAEMQRSLLHTIQQLQQELTEAREQSGAQKDGPQVSREGSAESSLVQSMGNSVASNGSATADGNQQLLKNNGSVDVSVQANSASAVPVPSSLLGIGGPAAHIAAMHAFMIHPQGIPQPLVASPNSGVPQFGSFQSQSTIQPNSQWPNQQEVQNVSQPQDETNYQTSQSDRTVLQQGAINTDELSSKPSQDSQPDHLNAHVKQQQSPASAPTESTHELTVVEANVAEHVSCDEQQKILNEQDSLSNMNNHIGIVEHLEQNTESKDERAASDKQPEPVSRQHKHLNFPPFTTQIHLKKSATENPNVVNQVDIMKSVAGGFSSQLPRAPKEPSLLDERSLLACIVRAVPAGTEGGIRISSTLPNRLGKMLAPLHWHDYKKQYGKLDDFVASHPELFVIEGDFIHLRDGAQQIISATTAAAKIAAATASSASYSSLLPSVAVTPVAQNTRQKRRPAVDSRSSNAIPSGNGFTDQFNIIQGVSDVTISGKVRNIQDNGFIDEVRTGQPSVLTAATANGARHDKCANNTRHGYGGKQQGRTTGTTYLSRR

SEQ ID NO: 21733 - protein, 725 aa, Zea mays subsp. mays
  peptide (1)..(725): Ceres Seq. ID no. 15179286
  misc_feature (1)..(267): Pfam Name: Pfam Description:  Myosin tail
  misc_feature (1)..(332): NCBI GI NO: 18423534 NR Description: expressed protein [Arabidopsis thaliana]
  misc_feature (500)..(630): NCBI GI NO: 18423534 NR Description: expressed protein [Arabidopsis thaliana]
  misc_feature (1)..(332): NCBI GI NO: 9759201 NR Description: gene_id:MNC6.16~unknown protein
  misc_feature (500)..(630): NCBI GI NO: 9759201 NR Description: gene_id:MNC6.16~unknown protein
  misc_feature (1)..(215): NCBI GI NO: 23480318 NR Description: Drosop hila melanogaster CG8797 gene product-related
  misc_feature (315)..(464): NCBI GI NO: 23480318 NR Description: Drosop hila melanogaster CG8797 gene product-related
  misc_feature (1)..(243): NCBI GI NO: 2246532 NR Description: ORF 73, contains large complex repeat CR 73
  misc_feature (1)..(243): NCBI GI NO: 11037008 NR Description: latent nuclear antigen [Human herpesvirus 8]
  misc_feature (1)..(247): NCBI GI NO: 5669894 NR Description: latent nuclear antigen [Human herpesvirus 8]
  misc_feature (1)..(247): NCBI GI NO: 13936996 NR Description: ORF73 [Human herpesvirus 8]
MELRAQAIAHPQIIQAQQSFQATSKEHAAAVAKIKEQLHEREQYILELEMKLNDKDRELNALKIDHQTVWANQDLIREQTKELATVRRERDNSEAERAQHLTQIHELQEHLREKESQFIALEEQHRAAQDNILYKDEQLREAHAWVSQVREMDALQSQSLQVELRERMEQFNQYWISSQQQYAEMQRSLLHTIQQLQQELTEAREQSGAQKDGPQVSREGSAESSLVQSMGNSVASNGSATADGNQQLLKNNGSVDVSVQANSASAVPVPSSLLGIGGPAAHIAAMHAFMIHPQGIPQPLVASPNSGVPQFGSFQSQSTIQPNSQWPNQQEVQNVSQPQDETNYQTSQSDRTVLQQGAINTDELSSKPSQDSQPDHLNAHVKQQQSPASAPTESTHELTVVEANVAEHVSCDEQQKILNEQDSLSNMNNHIGIVEHLEQNTESKDERAASDKQPEPVSRQHKHLNFPPFTTQIHLKKSATENPNVVNQVDIMKSVAGGFSSQLPRAPKEPSLLDERSLLACIVRAVPAGTEGGIRISSTLPNRLGKMLAPLHWHDYKKQYGKLDDFVASHPELFVIEGDFIHLRDGAQQIISATTAAAKIAAATASSASYSSLLPSVAVTPVAQNTRQKRRPAVDSRSSNAIPSGNGFTDQFNIIQGVSDVTISGKVRNIQDNGFIDEVRTGQPSVLTAATANGARHDKCANNTRHGYGGKQQGRTTGTTYLSRR

SEQ ID NO: 21734 - DNA, 991 bp, Zea mays subsp. mays
  misc_feature (1)..(991): Ceres Seq. ID no. 12637760
attacatgttctggagctttcagagggatgggattcattggtcactgcacgtgcagctgaactcctaagtttaaatcttgaaaccatggagaagttgaaggaatcagaagagctattggaacgatgccttgcagtcaagaaaaagattctacctgaagatcatcttcaggtagcttatacgttggtacacctggcaaggttaacattgcacagagttgtaaaggatcgggatgtaaacagcgatgtaactgcatattacctcgcaaaagcaaaaacagttcagcaatgattcaatcaggattacagaaggacaattaaattcttcaagaaaagatcagaataaaattaacaacacatcaactgcagatacagataagagtgcagcaataattctttttcaagcacttcatgtttttggactcattgatattgcagcgaagcagttgctagggcaaggggagcaagactataattctgttcaagatgctctgcagaagtgtgtttcactttacaaagagcctcatacacgaaggttggtgaaaaatgctgccaagcaggactacatgatatgcctgacgagcctgatcgatatggttcagagcttgtttcccattccacacataccggggttgcaggagttgctttgcgaggccgaacaaattttaggagagctagaagaagagagtactaggaagaagcaatgatacgtaggaaccaacacccatatgggtggaagcatttgttaattgcaagttgtgagccatatattttttcagttggtcgagatcgcccacctatatgggtggaagcatttgtttgacgaggtgctgaatcgagtgacgggttaaagagtttaatgcttgtttgcgcagtggtgttatgacgtggtcttcaacatagagtcctagtttctcggtggtggtggtccacaagatagatcatgttgctgaaatcttggatgctttctaaatcaaaatccttgacattggcg

SEQ ID NO: 21735 - protein, 95 aa, Zea mays subsp. mays
  peptide (1)..(95): Ceres Seq. ID no. 12637761
  misc_feature (3)..(91): NCBI GI NO: 15240284 NR Description: putative protein; protein id: At5g37580.1
  misc_feature (18)..(91): NCBI GI NO: 9757968 NR Description: gene_id:K12B20.4~unknown protein
LHVLELSEGWDSLVTARAAELLSLNLETMEKLKESEELLERCLAVKKKILPEDHLQVAYTLVHLARLTLHRVVKDRDVNSDVTAYYLAKAKTVQQ

SEQ ID NO: 21736 - protein, 67 aa, Zea mays subsp. mays
  peptide (1)..(67): Ceres Seq. ID no. 12637762
  misc_feature (1)..(63): NCBI GI NO: 15240284 NR Description: putative protein; protein id: At5g37580.1
  misc_feature (1)..(63): NCBI GI NO: 9757968 NR Description: gene_id:K12B20.4~unknown protein
MEKLKESEELLERCLAVKKKILPEDHLQVAYTLVHLARLTLHRVVKDRDVNSDVTAYYLAKAKTVQQ

SEQ ID NO: 21737 - DNA, 610 bp, Zea mays subsp. mays
  misc_feature (1)..(610): Ceres Seq. ID no. 12637716
ataccccaccgtagtggcagcgagccagcgacctcgagtagcagcagaggctccgcaggggcgaaaaggtgtgaagcttccttcggagatcccagtagcagaagcaacgcaggcatcggcttgcgacaggagaggacggagatgacgcagaagcagaccctgttcaaggggcagagcaagaagaagactatccctcccaaccgccacggcaaggcgcctcatgttcgtaaaggaaagagagccgtcaagcccaccaagttcacaaaggacatggacgccgagaaggaactcaccaagttcatcaaccagtgcaacgaaataaaagctgcgaatcttgctagcaaagagggcggtgacctcaacatagtaaaggcggatggcgaggaatctaaatcaaagaaataggaagccagaaactgaaaacgagtgtgtgaaacgtgatgcgtggtaaactgttaatgccatgtattctgctgaagaaaattcggttccgtatggctgggtagatgaacatgtttagcgcaaagtgacggtgtaactgcaaccggggtaatggcttgcaagttttgttctgtgccatctctatttctccgaattattatattgatgg

SEQ ID NO: 21738 - protein, 134 aa, Zea mays subsp. mays
  peptide (1)..(134): Ceres Seq. ID no. 12637717
  misc_feature (48)..(132): NCBI GI NO: 34903208 NR Description: unnamed protein product
  misc_feature (48)..(134): NCBI GI NO: 15231119 NR Description: putative protein; protein id: At3g52040
IPHRSGSEPATSSSSRGSAGAKRCEASFGDPSSRSNAGIGLRQERTEMTQKQTLFKGQSKKKTIPPNRHGKAPHVRKGKRAVKPTKFTKDMDAEKELTKFINQCNEIKAANLASKEGGDLNIVKADGEESKSKK

SEQ ID NO: 21739 - protein, 87 aa, Zea mays subsp. mays
  peptide (1)..(87): Ceres Seq. ID no. 12637718
  misc_feature (1)..(85): NCBI GI NO: 34903208 NR Description: unnamed protein product
  misc_feature (1)..(87): NCBI GI NO: 15231119 NR Description: putative protein; protein id: At3g52040
MTQKQTLFKGQSKKKTIPPNRHGKAPHVRKGKRAVKPTKFTKDMDAEKELTKFINQCNEIKAANLASKEGGDLNIVKADGEESKSKK

SEQ ID NO: 21740 - DNA, 847 bp, Zea mays subsp. mays
  misc_feature (1)..(847): Ceres Seq. ID no. 14306359
accaggcaccagcatagatctcgtgctcgccactattattctgcacagcaacgcatcagccttctggaaccatctcgccgccgccacaccacaatccacaacccgtcgaagcgaagcaagcaatggccggagtcggatcgaaggccctcgccgttgccgccgttctggcggccgtctccttctcggtggccgccgcggccgagaagctatcgccggaatgctgcaagcacatgttgcggaacggcgagttcccgaccacggcggcggtgcaagcgctggcatcgcagcatacggtgttgaagagcgtcgtgcttcgcgaaccgggccaactgaagtccgtgtcgccatcccctaccgcttccacgggaaagcgccgcgacggctatgacgacgacaatggcggcggcgagaacgacgggcaggtgatcctgtacgcgagacggctggacctgtcggtggagaaccagaacctgcggtcgctccttgacgggatgcactggcgggtggtggagctggagaaggtgtgcagccggatgaagacgcggatgagcaagatgaagcaggccaggagaggcggcggcggccgcaccgccaggtcgctccctaggatgtgttcttgatccagctcgccctgccactagcgcttagcggtgatcgcaacactgtaccatagcgacgatgtacatactctagttgctaggaatcaatcaaaagcggatcgcagctgggatctgtccggacatgcgctgcgcggccggccgatccggcgccggcgggagccacagcatccacaagatgcgctagctatggtagcattaataactaactgctcgcaccgatcccacct

SEQ ID NO: 21741 - protein, 165 aa, Zea mays subsp. mays
  peptide (1)..(165): Ceres Seq. ID no. 14306360
  misc_feature (27)..(165): NCBI GI NO: 33146528 NR Description: putative phototropic response protein family
  misc_feature (27)..(165): NCBI GI NO: 34898504 NR Description: OJ1612_A04.8
MAGVGSKALAVAAVLAAVSFSVAAAAEKLSPECCKHMLRNGEFPTTAAVQALASQHTVLKSVVLREPGQLKSVSPSPTASTGKRRDGYDDDNGGGENDGQVILYARRLDLSVENQNLRSLLDGMHWRVVELEKVCSRMKTRMSKMKQARRGGGGRTARSLPRMCS

SEQ ID NO: 21742 - protein, 129 aa, Zea mays subsp. mays
  peptide (1)..(129): Ceres Seq. ID no. 14306361
  misc_feature (1)..(129): NCBI GI NO: 33146528 NR Description: putative phototropic response protein family
  misc_feature (1)..(129): NCBI GI NO: 34898504 NR Description: OJ1612_A04.8
MLRNGEFPTTAAVQALASQHTVLKSVVLREPGQLKSVSPSPTASTGKRRDGYDDDNGGGENDGQVILYARRLDLSVENQNLRSLLDGMHWRVVELEKVCSRMKTRMSKMKQARRGGGGRTARSLPRMCS

SEQ ID NO: 21743 - protein, 128 aa, Zea mays subsp. mays
  peptide (1)..(128): Ceres Seq. ID no. 14306362
PGTSIDLVLATIILHSNASAFWNHLAAATPQSTTRRSEASNGRSRIEGPRRCRRSGGRLLLGGRRGREAIAGMLQAHVAERRVPDHGGGASAGIAAYGVEERRASRTGPTEVRVAIPYRFHGKAPRRL

SEQ ID NO: 21744 - DNA, 734 bp, Zea mays subsp. mays
  misc_feature (1)..(734): Ceres Seq. ID no. 12637827
catatgaagatgacctaccctcgccaaaacctgctccaaaacttgtacccaaaagtgaaccagatgatagcagccctgctaaaccaacaccatcagggcacgctcagagcgctacaccttcatccaaatccactcaaaagaggaaatcagggggtggtgatgcaaatatttctaatggtgcaccctcgaaaaagataaagatggaacatgaaaccggaacattggctgtcaaggatgaaaatccgtcttatttggaaccaacttcgaaagcatctctttcagcaagaagagaatcatcacccattacagaggaagaagtcaggacagtacttcgtgcaatttcacccacgacaagccaagatctggtgtcgaggttcaagactcgtctaataactcaagaggacaagaaagcatttttgggcattgtgacgaaaatatctcgcatacttaagcacaacggcggtaggtatatcgttcttcggcacgaacatatgtgaacagacaaattactctacctgtatagtgcaacagattctttaatgccacaaggcaacagcatgagtttttccccctagcttagagcttagggtttaggtattaggtatattgggtactggcaaccaagatgctcagcaagaggcctctgcagtttttctcccttataatgtacttcctgagagctgagaatgaaatgagaaaacgagaatggaatctatggtagattcttataatcc

SEQ ID NO: 21745 - protein, 164 aa, Zea mays subsp. mays
  peptide (1)..(164): Ceres Seq. ID no. 12637828
  misc_feature (2)..(160): Pfam Name: TFIIF-alpha Pfam Description: Transcription initiation factor IIF
  misc_feature (2)..(162): NCBI GI NO: 37531856 NR Description: putative transcription initiation factor
  misc_feature (13)..(162): NCBI GI NO: 15235418 NR Description: putative protein; protein id: At4g12610.1
  misc_feature (13)..(162): NCBI GI NO: 39545900 NR Description: mutant TFIIF-alpha [Arabidopsis thaliana]
YEDDLPSPKPAPKLVPKSEPDDSSPAKPTPSGHAQSATPSSKSTQKRKSGGGDANISNGAPSKKIKMEHETGTLAVKDENPSYLEPTSKASLSARRESSPITEEEVRTVLRAISPTTSQDLVSRFKTRLITQEDKKAFLGIVTKISRILKHNGGRYIVLRHEHM

SEQ ID NO: 21746 - protein, 98 aa, Zea mays subsp. mays
  peptide (1)..(98): Ceres Seq. ID no. 12637829
  misc_feature (1)..(94): Pfam Name: TFIIF-alpha Pfam Description: Transcription initiation factor IIF
  misc_feature (1)..(96): NCBI GI NO: 37531856 NR Description: putative transcription initiation factor
  misc_feature (1)..(96): NCBI GI NO: 15235418 NR Description: putative protein; protein id: At4g12610.1
  misc_feature (1)..(96): NCBI GI NO: 39545900 NR Description: mutant TFIIF-alpha [Arabidopsis thaliana]
MEHETGTLAVKDENPSYLEPTSKASLSARRESSPITEEEVRTVLRAISPTTSQDLVSRFKTRLITQEDKKAFLGIVTKISRILKHNGGRYIVLRHEHM

SEQ ID NO: 21747 - DNA, 1350 bp, Zea mays subsp. mays
  misc_feature (1)..(1350): Ceres Seq. ID no. 15179271
ctaatcggtcatctgatgctactgtttccaaatcatttcctgaagaatttgaggatttggaatctgtgaggaatcagagaataaagccagaatctctggaaggtgatctggcagttactggagaaatgaacaaagatgatgacaacgggcatttagtttcacagcaggaacatcgcttcttgagcaactcccctggttttgatattgcacaatcgtgggctaagtagcgtgtgatggcaagtggaagcagtaaaaatgatgagcttgatgctgtcgctcttcctgttggtgtaaaacttagcaaagttcagtctgatcattctccagatatgcagactgaaactcttggtgctgacacaactgttgctagtggacatgctgcctttggattatctttttctgatgttcgtttggagaaagtaatggacgtatgtagttctgcgatcacatttctgaggaatagaatggataggcctcgaaagcgtggttcaaactcattatccagccgggctgccctgatgcttgatgcagaaagagaaccagaaaagacatggagccccatagttgaaatacattatgtagggggaacttatagaggtagatgtcaagaaggtgtccctgaaggaaagggacgtctaaccttcagtgacggaagcttttatgatggactctggaggtatggtaagagatctggtttggggactctatttcacagtaacggtgatgtataccatggaacgtggagggatgaccttattcatggaaagggctggtactattttcacagcggtgaccgctggtttgcaaatttttggaagggcaaggctaatggtgagggtagattttatgccaatgatgggagtatcttctttggccatttccgaaatggatggcgccatggggagagcctgttggtagatgcaaacggttcaaggtggatcgaagtttgggctgatggtgtacttatcaacagaactaaaatggagaaataaggttcagatctaaatacattttcctgatgtttctaaaacttggctcctcagatggctacgcttcaaagtctcagatattgcaaggcactctggtccggagcctctctactgtacacgaagtcgtcctatattcagtcttgaaagtcgtaaataggtgcgctgttgaggtttcgatgccctaatttcaaaggggcagactgcaggcgtttctgtatataccactagactgcaagtatgggaggatgcctttgttcatacggctgatggatcaagctgggaacagctatatacccaactgtacctgaacgtgaagtgtgtttgattagttccactgataacccatagatattttcttgtc

SEQ ID NO: 21748 - protein, 252 aa, Zea mays subsp. mays
  peptide (1)..(252): Ceres Seq. ID no. 15179272
  misc_feature (166)..(188): Pfam Name: Pfam Description:  MORN repeat
  misc_feature (1)..(251): NCBI GI NO: 5882723 NR Description: F25A4.3 [Arabidopsis thaliana]
  misc_feature (1)..(251): NCBI GI NO: 15222086 NR Description: expressed protein [Arabidopsis thaliana]
  misc_feature (1)..(251): NCBI GI NO: 25406404 NR Description: hypothetical protein F9E10.14
  misc_feature (117)..(239): NCBI GI NO: 29346157 NR Description: putative phosphatidylinositol-4-phosphate 5-kinase
  misc_feature (117)..(243): NCBI GI NO: 40062709 NR Description: MORN repeat protein [uncultured bacterium 314]
  misc_feature (117)..(243): NCBI GI NO: 22330351 NR Description: phosphatidylinositol-4-phosphate 5-kinase -related
  misc_feature (117)..(243): NCBI GI NO: 25404297 NR Description: hypothetical protein T7P1.4
  misc_feature (117)..(242): NCBI GI NO: 40062709 NR Description: MORN repeat protein [uncultured bacterium 314]
  misc_feature (117)..(241): NCBI GI NO: 23481997 NR Description: MORN repeat, putative [Plasmodium yoelii yoelii]
  misc_feature (117)..(242): NCBI GI NO: 22297733 NR Description: ORF_ID:tlr0189~hypothetical protein
MASGSSKNDELDAVALPVGVKLSKVQSDHSPDMQTETLGADTTVASGHAAFGLSFSDVRLEKVMDVCSSAITFLRNRMDRPRKRGSNSLSSRAALMLDAEREPEKTWSPIVEIHYVGGTYRGRCQEGVPEGKGRLTFSDGSFYDGLWRYGKRSGLGTLFHSNGDVYHGTWRDDLIHGKGWYYFHSGDRWFANFWKGKANGEGRFYANDGSIFFGHFRNGWRHGESLLVDANGSRWIEVWADGVLINRTKMEK

SEQ ID NO: 21749 - protein, 220 aa, Zea mays subsp. mays
  peptide (1)..(220): Ceres Seq. ID no. 15179273
  misc_feature (134)..(156): Pfam Name: Pfam Description:  MORN repeat
  misc_feature (1)..(219): NCBI GI NO: 5882723 NR Description: F25A4.3 [Arabidopsis thaliana]
  misc_feature (1)..(219): NCBI GI NO: 15222086 NR Description: expressed protein [Arabidopsis thaliana]
  misc_feature (1)..(219): NCBI GI NO: 25406404 NR Description: hypothetical protein F9E10.14
  misc_feature (85)..(207): NCBI GI NO: 29346157 NR Description: putative phosphatidylinositol-4-phosphate 5-kinase
  misc_feature (85)..(211): NCBI GI NO: 40062709 NR Description: MORN repeat protein [uncultured bacterium 314]
  misc_feature (85)..(211): NCBI GI NO: 22330351 NR Description: phosphatidylinositol-4-phosphate 5-kinase -related
  misc_feature (85)..(211): NCBI GI NO: 25404297 NR Description: hypothetical protein T7P1.4
  misc_feature (85)..(210): NCBI GI NO: 40062709 NR Description: MORN repeat protein [uncultured bacterium 314]
  misc_feature (85)..(209): NCBI GI NO: 23481997 NR Description: MORN repeat, putative [Plasmodium yoelii yoelii]
  misc_feature (85)..(210): NCBI GI NO: 22297733 NR Description: ORF_ID:tlr0189~hypothetical protein
MQTETLGADTTVASGHAAFGLSFSDVRLEKVMDVCSSAITFLRNRMDRPRKRGSNSLSSRAALMLDAEREPEKTWSPIVEIHYVGGTYRGRCQEGVPEGKGRLTFSDGSFYDGLWRYGKRSGLGTLFHSNGDVYHGTWRDDLIHGKGWYYFHSGDRWFANFWKGKANGEGRFYANDGSIFFGHFRNGWRHGESLLVDANGSRWIEVWADGVLINRTKMEK

SEQ ID NO: 21750 - protein, 189 aa, Zea mays subsp. mays
  peptide (1)..(189): Ceres Seq. ID no. 15179274
  misc_feature (103)..(125): Pfam Name: Pfam Description:  MORN repeat
  misc_feature (1)..(188): NCBI GI NO: 5882723 NR Description: F25A4.3 [Arabidopsis thaliana]
  misc_feature (1)..(188): NCBI GI NO: 15222086 NR Description: expressed protein [Arabidopsis thaliana]
  misc_feature (1)..(188): NCBI GI NO: 25406404 NR Description: hypothetical protein F9E10.14
  misc_feature (54)..(176): NCBI GI NO: 29346157 NR Description: putative phosphatidylinositol-4-phosphate 5-kinase
  misc_feature (54)..(180): NCBI GI NO: 40062709 NR Description: MORN repeat protein [uncultured bacterium 314]
  misc_feature (54)..(180): NCBI GI NO: 22330351 NR Description: phosphatidylinositol-4-phosphate 5-kinase -related
  misc_feature (54)..(180): NCBI GI NO: 25404297 NR Description: hypothetical protein T7P1.4
  misc_feature (54)..(179): NCBI GI NO: 40062709 NR Description: MORN repeat protein [uncultured bacterium 314]
  misc_feature (54)..(178): NCBI GI NO: 23481997 NR Description: MORN repeat, putative [Plasmodium yoelii yoelii]
  misc_feature (54)..(179): NCBI GI NO: 22297733 NR Description: ORF_ID:tlr0189~hypothetical protein
MDVCSSAITFLRNRMDRPRKRGSNSLSSRAALMLDAEREPEKTWSPIVEIHYVGGTYRGRCQEGVPEGKGRLTFSDGSFYDGLWRYGKRSGLGTLFHSNGDVYHGTWRDDLIHGKGWYYFHSGDRWFANFWKGKANGEGRFYANDGSIFFGHFRNGWRHGESLLVDANGSRWIEVWADGVLINRTKMEK

SEQ ID NO: 21751 - DNA, 1675 bp, Zea mays subsp. mays
  misc_feature (1)..(1675): Ceres Seq. ID no. 15179308
ttctcttacctttctcaatgtctctacctggccgaactccacacgcccgccgcctctcccgagcccggccgcccccgccacgccctcggcgccggctgcccctcccgcgcccggccgtccccgccccccgccgtggccgcccccaccgcgcccgacccccgacgtgcccagcccccgacgcccgcccccaccgaggtcgtcccgaccgccgccgctgatgccccctccacgcccgcgcccgcctcgcctggccgtccccgccctcggccccgcccgcccccattgaggtatcagcaatctctcgctgcttcgatcgatcgtagctgaaaaacatgcagcaggcagatgatacatacttttatatggctcgatttcgattgaatgcaatgcaatgatggcaacaaggaccaagctaagcaagcttatcattagcctgctcctcctctgtatctcgatctatttttatctcgtttgcaatgatggcaaggaccaagctaagaatgcatcaagcagtggccagctcgatgatccagataattcagaattgcttgctgcgtggaaatttaacgcgactccgtgctagtacgcagccaagttagatcgtcgaggccgacctgagacaagggggcagctgagctgggtactcatcacccggccccatatatgcatgtaatatactgctagctacctcaaatgcagttacactgatcaagaggacaggacagacgatctgccacataattgtaagctatatatagctaccgcagtgagttatcaccttaataagggtacgcagtgagttatcaccttaatcagaataaaattgaaacctccaaggatgccaaacttgtactcacaactgaaagccttaagcatgggctcaacatgctccaaagcatgcaaaatgataacaagagctccaaaaaatcactgaaggatgttgtcatagagaatgagtttgagaaaaggcttttggcagatgttatacctccaaatgacattggagttacctttgatgatattggagccttggagaatgtaaaggacacgttaaaggagctggtgatgctccatttgcaaagacctaagttgttctgcaaagggcagttaacaaagccttgcaaggggatattgcttttcggacctcctggcactggaaaaactatgcttgccaaagtagtagcaactgaagcaggcgctaatttcatcaatatatcaatgtcgagcattacatgtaagtggtttggtgaaggggagaagtatgtaaaggttgttttctcactagcaagtaaaatagcacccagtgttatatttattgatgaggtatgcaagcacacaagtttactttagtaaccactaccttgccgatgcatgaacaagatgacgggttagactttgtcgaaaccctcttcaacagtggaggtatcgaccatcactcttcattgtaacccgatggtgatcggcgaccgtgagcttccatgttattgtgttctgatacttgagactttttattatgactatgtatgagatattgtctcttattagtactggatgatgagatgtgtcttattatgactatggatgagacttttgtgatgtaattgatgagactatggatttaaatattgttatgtgattgtgtgtgagatgttttatatgaaaatatgttgtgctt

SEQ ID NO: 21752 - protein, 154 aa, Zea mays subsp. mays
  peptide (1)..(154): Ceres Seq. ID no. 15179309
  misc_feature (81)..(147): Pfam Name: AAA Pfam Description: ATPase family associated with various cellular activities
  misc_feature (1)..(147): NCBI GI NO: 30678418 NR Description: expressed protein [Arabidopsis thaliana]
  misc_feature (1)..(147): NCBI GI NO: 33146850 NR Description: putative MSP1
  misc_feature (1)..(147): NCBI GI NO: 7487016 NR Description: hypothetical protein T14P8
  misc_feature (1)..(147): NCBI GI NO: 20259341 NR Description: unknown protein [Arabidopsis thaliana]
  misc_feature (1)..(147): NCBI GI NO: 30679158 NR Description: expressed protein [Arabidopsis thaliana]
  misc_feature (1)..(147): NCBI GI NO: 15234019 NR Description: expressed protein [Arabidopsis thaliana]
  misc_feature (1)..(147): NCBI GI NO: 25518408 NR Description: hypothetical protein F22D16
  misc_feature (1)..(147): NCBI GI NO: 15234347 NR Description: hypothetical protein [Arabidopsis thaliana]
  misc_feature (1)..(147): NCBI GI NO: 34912822 NR Description: P0501G01.20
  misc_feature (6)..(147): NCBI GI NO: 34904204 NR Description: P0492F05.26
MLQSMQNDNKSSKKSLKDVVIENEFEKRLLADVIPPNDIGVTFDDIGALENVKDTLKELVMLHLQRPKLFCKGQLTKPCKGILLFGPPGTGKTMLAKVVATEAGANFINISMSSITCKWFGEGEKYVKVVFSLASKIAPSVIFIDEVCKHTSLL

SEQ ID NO: 21753 - protein, 150 aa, Zea mays subsp. mays
  peptide (1)..(150): Ceres Seq. ID no. 15179310
  misc_feature (77)..(143): Pfam Name: AAA Pfam Description: ATPase family associated with various cellular activities
  misc_feature (1)..(143): NCBI GI NO: 30678418 NR Description: expressed protein [Arabidopsis thaliana]
  misc_feature (1)..(143): NCBI GI NO: 33146850 NR Description: putative MSP1
  misc_feature (1)..(143): NCBI GI NO: 7487016 NR Description: hypothetical protein T14P8
  misc_feature (1)..(143): NCBI GI NO: 20259341 NR Description: unknown protein [Arabidopsis thaliana]
  misc_feature (1)..(143): NCBI GI NO: 30679158 NR Description: expressed protein [Arabidopsis thaliana]
  misc_feature (1)..(143): NCBI GI NO: 15234019 NR Description: expressed protein [Arabidopsis thaliana]
  misc_feature (1)..(143): NCBI GI NO: 25518408 NR Description: hypothetical protein F22D16
  misc_feature (1)..(143): NCBI GI NO: 15234347 NR Description: hypothetical protein [Arabidopsis thaliana]
  misc_feature (1)..(143): NCBI GI NO: 34912822 NR Description: P0501G01.20
  misc_feature (2)..(143): NCBI GI NO: 34904204 NR Description: P0492F05.26
MQNDNKSSKKSLKDVVIENEFEKRLLADVIPPNDIGVTFDDIGALENVKDTLKELVMLHLQRPKLFCKGQLTKPCKGILLFGPPGTGKTMLAKVVATEAGANFINISMSSITCKWFGEGEKYVKVVFSLASKIAPSVIFIDEVCKHTSLL

SEQ ID NO: 21754 - protein, 108 aa, Zea mays subsp. mays
  peptide (1)..(108): Ceres Seq. ID no. 15179311
FSYLSQCLYLAELHTPAASPEPGRPRHALGAGCPSRARPSPPPAVAAPTAPDPRRAQPPTPAPTEVVPTAAADAPSTPAPASPGRPRPRPRPPPLRYQQSLAASIDRS

SEQ ID NO: 21755 - DNA, 875 bp, Zea mays subsp. mays
  misc_feature (1)..(875): Ceres Seq. ID no. 14303245
atccccaatatatccccactcttcgcctcctttctggagcagctagggttccgtcctcgatccgatccgccgagtgcacaccacctttccccactccgatcgaatcgatggccgccgagggcgagaagaagatgataaccctcaaaagctccgatggcgaggagttcgaggtggaagaggcggtggcgatggagtcgcagaccatccgccacatgatcgaggatgactgcgccgacaacggtatccctcttcctaacgtcaactccaagatcctatccaaggtaatcgagtactgcaacaagcacgtacatgccgccgccgccaagagcgagtgctcgcgcagcctcttcggcggctactccgactacccgaactacatggccaacacggagtcgttccgcgccaaggcgcggtcgcagagcgcgccgaagcagaggccgcagtacgagcggtccagctccctacgcagggcgtcggcggcgcagaggtcggcggcggcggcggcctcctccctgcacgccaagttcaccaacaaggcgtacccgggctctggcaggctggatcggcttggcttgccggccaggtactgatactgagcctgcctaattcgcgtcaggatgatgtgctgccgctgtgtctcgagcgaggaggacgacgacgaagaagtgcaatcgactagtggtagttaggttcccccgtgccttggttgtgctattaccatcaacagttttttctgtttcttgctttgggtagctacccatgtttaaagttgctggtagctgtaatgatgctataatgcgtgcttaactgctgacgaacctttttcctctacatttccgtggtatatatatatgtgccgtcaaatcatgcatggg

SEQ ID NO: 21756 - protein, 195 aa, Zea mays subsp. mays
  peptide (1)..(195): Ceres Seq. ID no. 14303246
  misc_feature (43)..(102): Pfam Name: Pfam Description:  Skp1 family, tetramerisation domain
  misc_feature (108)..(195): NCBI GI NO: 38567921 NR Description: OSJNBa0088I22.17
  misc_feature (40)..(112): NCBI GI NO: 7378764 NR Description: putative kinetochore protein
  misc_feature (40)..(107): NCBI GI NO: 32330695 NR Description: SKP1/ASK1-like protein [Triticum aestivum]
  misc_feature (40)..(107): NCBI GI NO: 40644754 NR Description: putative SKP1 protein [Triticum aestivum]
  misc_feature (43)..(121): NCBI GI NO: 18958259 NR Description: kinetochore protein [Brassica juncea]
  misc_feature (43)..(121): NCBI GI NO: 18958253 NR Description: kinetochore protein [Brassica juncea]
  misc_feature (43)..(110): NCBI GI NO: 18410982 NR Description: E3 ubiquitin ligase SCF complex subunit, SKP1/ASK1
  misc_feature (43)..(110): NCBI GI NO: 18958257 NR Description: kinetochore protein [Brassica juncea]
  misc_feature (43)..(110): NCBI GI NO: 4959710 NR Description: Skp1 [Medicago sativa]
  misc_feature (42)..(106): NCBI GI NO: 18400912 NR Description: E3 ubiquitin ligase SCF complex subunit SKP1/ASK1
PQYIPTLRLLSGAARVPSSIRSAECTPPFPTPIESMAAEGEKKMITLKSSDGEEFEVEEAVAMESQTIRHMIEDDCADNGIPLPNVNSKILSKVIEYCNKHVHAAAAKSECSRSLFGGYSDYPNYMANTESFRAKARSQSAPKQRPQYERSSSLRRASAAQRSAAAAASSLHAKFTNKAYPGSGRLDRLGLPARY

SEQ ID NO: 21757 - protein, 160 aa, Zea mays subsp. mays
  peptide (1)..(160): Ceres Seq. ID no. 14303247
  misc_feature (8)..(67): Pfam Name: Pfam Description:  Skp1 family, tetramerisation domain
  misc_feature (73)..(160): NCBI GI NO: 38567921 NR Description: OSJNBa0088I22.17
  misc_feature (5)..(77): NCBI GI NO: 7378764 NR Description: putative kinetochore protein
  misc_feature (5)..(72): NCBI GI NO: 32330695 NR Description: SKP1/ASK1-like protein [Triticum aestivum]
  misc_feature (5)..(72): NCBI GI NO: 40644754 NR Description: putative SKP1 protein [Triticum aestivum]
  misc_feature (8)..(86): NCBI GI NO: 18958259 NR Description: kinetochore protein [Brassica juncea]
  misc_feature (8)..(86): NCBI GI NO: 18958253 NR Description: kinetochore protein [Brassica juncea]
  misc_feature (8)..(75): NCBI GI NO: 18410982 NR Description: E3 ubiquitin ligase SCF complex subunit, SKP1/ASK1
  misc_feature (8)..(75): NCBI GI NO: 18958257 NR Description: kinetochore protein [Brassica juncea]
  misc_feature (8)..(75): NCBI GI NO: 4959710 NR Description: Skp1 [Medicago sativa]
  misc_feature (7)..(71): NCBI GI NO: 18400912 NR Description: E3 ubiquitin ligase SCF complex subunit SKP1/ASK1
MAAEGEKKMITLKSSDGEEFEVEEAVAMESQTIRHMIEDDCADNGIPLPNVNSKILSKVIEYCNKHVHAAAAKSECSRSLFGGYSDYPNYMANTESFRAKARSQSAPKQRPQYERSSSLRRASAAQRSAAAAASSLHAKFTNKAYPGSGRLDRLGLPARY

SEQ ID NO: 21758 - protein, 152 aa, Zea mays subsp. mays
  peptide (1)..(152): Ceres Seq. ID no. 14303248
  misc_feature (1)..(59): Pfam Name: Pfam Description:  Skp1 family, tetramerisation domain
  misc_feature (65)..(152): NCBI GI NO: 38567921 NR Description: OSJNBa0088I22.17
  misc_feature (1)..(69): NCBI GI NO: 7378764 NR Description: putative kinetochore protein
  misc_feature (1)..(64): NCBI GI NO: 32330695 NR Description: SKP1/ASK1-like protein [Triticum aestivum]
  misc_feature (1)..(64): NCBI GI NO: 40644754 NR Description: putative SKP1 protein [Triticum aestivum]
  misc_feature (1)..(78): NCBI GI NO: 18958259 NR Description: kinetochore protein [Brassica juncea]
  misc_feature (1)..(78): NCBI GI NO: 18958253 NR Description: kinetochore protein [Brassica juncea]
  misc_feature (1)..(67): NCBI GI NO: 18410982 NR Description: E3 ubiquitin ligase SCF complex subunit, SKP1/ASK1
  misc_feature (1)..(67): NCBI GI NO: 18958257 NR Description: kinetochore protein [Brassica juncea]
  misc_feature (1)..(67): NCBI GI NO: 4959710 NR Description: Skp1 [Medicago sativa]
  misc_feature (1)..(63): NCBI GI NO: 18400912 NR Description: E3 ubiquitin ligase SCF complex subunit SKP1/ASK1
MITLKSSDGEEFEVEEAVAMESQTIRHMIEDDCADNGIPLPNVNSKILSKVIEYCNKHVHAAAAKSECSRSLFGGYSDYPNYMANTESFRAKARSQSAPKQRPQYERSSSLRRASAAQRSAAAAASSLHAKFTNKAYPGSGRLDRLGLPARY

SEQ ID NO: 21759 - DNA, 2007 bp, Zea mays subsp. mays
  misc_feature (1)..(2007): Ceres Seq. ID no. 12566921
  misc_feature (307)..(307): n is a, c, t, g, unknown, or other
atccatccatcctcctcgcggctcgcgccccgaaaaatggcgccaacccctccccagtctcccgcgcggcgctgccccagctatttccccctcccctgaattgaccccagccgcgcctcccaaaccctaacctaacccccgccccctgggccccggccatggcgtcactgcccaagccgccgccgccgccgcgccccaagacgaggggcaactacaactgcggccgctgcggccagcccaagaagggccacgtctgcgtcggccccggccccggccccggcgccgctgcgtcgccctcctcctcgtncggggccggaggggagcacgggctgcgccgcgccctctccttcgacgaggccggcacgccgtcctcgccggagaagaagcccaaggtggaggacgttcggacgaggcggagctggacgaggaggccacggtggacgtgggcgcccgcgcggtgtccagggaggtcatggcggaggttctgcaccgcctcggtccccgcggggtcatggccgccgcgggggtcagccgaggctggcgggactgcgcgggccgggtctggcgcgcggccgaggagctccgcctccgcgtcctcgcctcctctggcgccggcctcctcgccgcgctgctcccgcgctgccccgcgctctcccgcctccacctccggatggaaagtgatgttgatggcactaccctggcttgtattgcattttcctgtccaagtttaagaactcttgagattaccatggctgctgatgctgtcaacaggatgactggggaggatctaagtcgttttgtttcagagaagtcttctctctcagtcctcaaaattggtggttgctctaatttggatattcttaatctgtgctcttcaagcctttcaattctttggttgtcagatctttgttccctttcgaaatcggttatgaactgtcctaatatgagtgagctatcactgtgcttcacagaacatagtagtgattgtaccaatctgattactttgatggatggcctaggtcgtacatgtcctaacttggaaaaaatgcacatatcatcaaaacaattatctaatgaagctgtatgtgctctagagaatgctaatctcaggggactgttcatgctatccctgattctaggttcaaaaataactgatgcagctgttgcatctattgttcggtcatgtgcaagcttggaattacttgatttaagtggatctagcattagtgacaatggtgttgggatgatatgtaaagcataccctcgtactttatcaaggctgctccttgctctttgcccaaatgtgaccacacgtgggatccagctagccacagcacagttgccatgtcttcaactcatggactgtggaatgagcctatgtgctaatgtgaagaatgaaaaagagggtccatattttggtgaaatcaatggaggtattagaattattcgaaaactgtccatcttaaagaggcaacctattcaccaaaagcttattataaagcatgggaatttgaagaagctcagcctgtggggctgttctgcattagatgctctatatctaaattgtccagagttaaatgatctcaatcttaactcttgcacaaatctacatccagaacgtctgcttcttcagtgcccaaatttaaagaatgtctatgcatccggatgccaagacatgttgattggagcaatcagaaatcaggttctgaatgagttcgctgcagttgaaccatctcttccatgcaagcggctagcggatggctccaaacgggttcaactccctcagttcctaaagcagcagccgtcgaaggacaacaaattaattgaattgagccagacccagtgcactgtgcatcttggttcataataacaccaccagagccagttaacggagcattgtacaccgaattatgtgaatcatgcaccacataacattatcaattcgttgtatacttctgtattgcatcagaacctgtagtgattgttgtataagctgctaattgctgc

SEQ ID NO: 21760 - protein, 464 aa, Zea mays subsp. mays
  peptide (1)..(464): Ceres Seq. ID no. 12566922
  misc_feature (3)..(460): NCBI GI NO: 18087570 NR Description: AT3g54650/T5N23_10 [Arabidopsis thaliana]
  misc_feature (3)..(412): NCBI GI NO: 18410106 NR Description: F-box protein family, AtFBL17
MAEVLHRLGPRGVMAAAGVSRGWRDCAGRVWRAAEELRLRVLASSGAGLLAALLPRCPALSRLHLRMESDVDGTTLACIAFSCPSLRTLEITMAADAVNRMTGEDLSRFVSEKSSLSVLKIGGCSNLDILNLCSSSLSILWLSDLCSLSKSVMNCPNMSELSLCFTEHSSDCTNLITLMDGLGRTCPNLEKMHISSKQLSNEAVCALENANLRGLFMLSLILGSKITDAAVASIVRSCASLELLDLSGSSISDNGVGMICKAYPRTLSRLLLALCPNVTTRGIQLATAQLPCLQLMDCGMSLCANVKNEKEGPYFGEINGGIRIIRKLSILKRQPIHQKLIIKHGNLKKLSLWGCSALDALYLNCPELNDLNLNSCTNLHPERLLLQCPNLKNVYASGCQDMLIGAIRNQVLNEFAAVEPSLPCKRLADGSKRVQLPQFLKQQPSKDNKLIELSQTQCTVHLGS

SEQ ID NO: 21761 - protein, 451 aa, Zea mays subsp. mays
  peptide (1)..(451): Ceres Seq. ID no. 12566923
  misc_feature (1)..(447): NCBI GI NO: 18087570 NR Description: AT3g54650/T5N23_10 [Arabidopsis thaliana]
  misc_feature (1)..(399): NCBI GI NO: 18410106 NR Description: F-box protein family, AtFBL17
MAAAGVSRGWRDCAGRVWRAAEELRLRVLASSGAGLLAALLPRCPALSRLHLRMESDVDGTTLACIAFSCPSLRTLEITMAADAVNRMTGEDLSRFVSEKSSLSVLKIGGCSNLDILNLCSSSLSILWLSDLCSLSKSVMNCPNMSELSLCFTEHSSDCTNLITLMDGLGRTCPNLEKMHISSKQLSNEAVCALENANLRGLFMLSLILGSKITDAAVASIVRSCASLELLDLSGSSISDNGVGMICKAYPRTLSRLLLALCPNVTTRGIQLATAQLPCLQLMDCGMSLCANVKNEKEGPYFGEINGGIRIIRKLSILKRQPIHQKLIIKHGNLKKLSLWGCSALDALYLNCPELNDLNLNSCTNLHPERLLLQCPNLKNVYASGCQDMLIGAIRNQVLNEFAAVEPSLPCKRLADGSKRVQLPQFLKQQPSKDNKLIELSQTQCTVHLGS

SEQ ID NO: 21762 - protein, 398 aa, Zea mays subsp. mays
  peptide (1)..(398): Ceres Seq. ID no. 12566924
  misc_feature (1)..(394): NCBI GI NO: 18087570 NR Description: AT3g54650/T5N23_10 [Arabidopsis thaliana]
  misc_feature (1)..(346): NCBI GI NO: 18410106 NR Description: F-box protein family, AtFBL17
MESDVDGTTLACIAFSCPSLRTLEITMAADAVNRMTGEDLSRFVSEKSSLSVLKIGGCSNLDILNLCSSSLSILWLSDLCSLSKSVMNCPNMSELSLCFTEHSSDCTNLITLMDGLGRTCPNLEKMHISSKQLSNEAVCALENANLRGLFMLSLILGSKITDAAVASIVRSCASLELLDLSGSSISDNGVGMICKAYPRTLSRLLLALCPNVTTRGIQLATAQLPCLQLMDCGMSLCANVKNEKEGPYFGEINGGIRIIRKLSILKRQPIHQKLIIKHGNLKKLSLWGCSALDALYLNCPELNDLNLNSCTNLHPERLLLQCPNLKNVYASGCQDMLIGAIRNQVLNEFAAVEPSLPCKRLADGSKRVQLPQFLKQQPSKDNKLIELSQTQCTVHLGS

SEQ ID NO: 21763 - DNA, 1778 bp, Zea mays subsp. mays
  misc_feature (1)..(1778): Ceres Seq. ID no. 15179320
atcttcccatacgagctgtgtttctccaagttcgctgctggccatatcgacgtcgtcatcctcgatccagacgagtgcgtgtgccatctccacgggtcttcgacagatttagcaagaatgtttggaagaggatctcctaggatgaacttgatccaagctgcaactatgaaaaaaatatcccccagatctactactaacaagcgcaagaagagaacatcaccaaaaggtattttgttacctattcttgcttattttcttgtaatagttggtcgtcacatgctttattttcaagaagagaacatcacatgctttattttcttgtaatagttggtcgtcttagagcaaactggaatagtggactagaaaagggtttagttgaaattcttcaagatcacaacaatgattgttataagggtcaaaatgggtggtcatcggaagcatggaatagaattgtcaagttattccatgagaaattctcttatgtcacatttacaaaatgccaaatccaagataaagagaaagagttaaagagagactacaaggctcttaaagaggcaaggcaacaaagcggggtatcatgggatgagaggttgtgtagaatagaagcagaagaacccatttggaataacctcaccactagtaacgagagacttaagaagtttcggactaaatctttcccactatttgaggctttaggagagctatatgatggaaatattgctgagggaaccatgaattttacttctattgagccttctcgacctcctgtcacacaaccttgtcaaggtgctgctacacagccttctcaagctgctttcacacttacacaaccttctcaaatcgctttcacacaaccttctctagctgctttcgcacgaccttctcgaaccgcttttagacatccttctctagccgctttcccacagccttctcaagccgcttttgcacagccttctcaaaccattttcacacagccttctgaagccactttcacacagccttctgaagccactttcacacagccttctgaagccactttcacacagccttctcaagccgctttcacacaaccttctcaagctaatatctcacaagccatttgtgatgaagatgatgagctcagagtattggatccaccagcccctgcatcagtgagcaaaagggcaaaaaatgttggtactggtaattcaagaacaagaattaacaagcgtacacaagatgggaatgtggttgagatgatgggaaggtttctagaaatgaaagaaaaacaagctgaggcggatgaaagggccacaactaatgcaaatgaggatgatttccctattcaaacatgcattgctattgtggatggaatggaagagttttctgatgatgagaaggttgattcttatgatgtttttaaggatgcccaaaaccgggccattttcatgactgccaaagatgctacgcgcataaaatggttgaggaagaagattgcaagaacatgatatgatatatgaagctaaagtaatgaaggatgattttgtagtatcgtccagcataaagaaagaaagctgcaatttgtgctattgtcagagatggatatttaactttagcaatttgcaactcttaagtaatctgttaaattaaagatgagatcttgcagacttttcttattacctaatggattctcttattagctgattcaaatctaatcatgcatattgtagtaaggactatgtatgttgaatcaatgactctggttcaattttaaatatcacatgtgttttaagtttctc

SEQ ID NO: 21764 - protein, 393 aa, Zea mays subsp. mays
  peptide (1)..(393): Ceres Seq. ID no. 15179321
  misc_feature (158)..(252): Pfam Name: SPRR Pfam Description: Cornifin
  misc_feature (208)..(390): NCBI GI NO: 38344751 NR Description: OSJNBa0089K21.9
  misc_feature (7)..(84): NCBI GI NO: 38344751 NR Description: OSJNBa0089K21.9
  misc_feature (85)..(178): NCBI GI NO: 38344751 NR Description: OSJNBa0089K21.9
  misc_feature (12)..(150): NCBI GI NO: 34907580 NR Description: B1078G07.31
  misc_feature (341)..(387): NCBI GI NO: 34907580 NR Description: B1078G07.31
  misc_feature (237)..(391): NCBI GI NO: 37535590 NR Description: hypothetical protein
  misc_feature (10)..(162): NCBI GI NO: 37535590 NR Description: hypothetical protein
  misc_feature (208)..(390): NCBI GI NO: 37535088 NR Description: hypothetical protein
  misc_feature (12)..(153): NCBI GI NO: 21741991 NR Description: OSJNBa0060P14.2
  misc_feature (278)..(392): NCBI GI NO: 21741991 NR Description: OSJNBa0060P14.2
MLYFLVIVGRLRANWNSGLEKGLVEILQDHNNDCYKGQNGWSSEAWNRIVKLFHEKFSYVTFTKCQIQDKEKELKRDYKALKEARQQSGVSWDERLCRIEAEEPIWNNLTTSNERLKKFRTKSFPLFEALGELYDGNIAEGTMNFTSIEPSRPPVTQPCQGAATQPSQAAFTLTQPSQIAFTQPSLAAFARPSRTAFRHPSLAAFPQPSQAAFAQPSQTIFTQPSEATFTQPSEATFTQPSEATFTQPSQAAFTQPSQANISQAICDEDDELRVLDPPAPASVSKRAKNVGTGNSRTRINKRTQDGNVVEMMGRFLEMKEKQAEADERATTNANEDDFPIQTCIAIVDGMEEFSDDEKVDSYDVFKDAQNRAIFMTAKDATRIKWLRKKIART

SEQ ID NO: 21765 - protein, 251 aa, Zea mays subsp. mays
  peptide (1)..(251): Ceres Seq. ID no. 15179322
  misc_feature (16)..(110): Pfam Name: SPRR Pfam Description: Cornifin
  misc_feature (66)..(248): NCBI GI NO: 38344751 NR Description: OSJNBa0089K21.9
  misc_feature (1)..(36): NCBI GI NO: 38344751 NR Description: OSJNBa0089K21.9
  misc_feature (199)..(245): NCBI GI NO: 34907580 NR Description: B1078G07.31
  misc_feature (95)..(249): NCBI GI NO: 37535590 NR Description: hypothetical protein
  misc_feature (1)..(20): NCBI GI NO: 37535590 NR Description: hypothetical protein
  misc_feature (66)..(248): NCBI GI NO: 37535088 NR Description: hypothetical protein
  misc_feature (1)..(11): NCBI GI NO: 21741991 NR Description: OSJNBa0060P14.2
  misc_feature (136)..(250): NCBI GI NO: 21741991 NR Description: OSJNBa0060P14.2
  misc_feature (1)..(100): NCBI GI NO: 34915330 NR Description: hypothetical protein~similar to Oryza sativachromosome 10
  misc_feature (1)..(100): NCBI GI NO: 37535236 NR Description: hypothetical protein
MNFTSIEPSRPPVTQPCQGAATQPSQAAFTLTQPSQIAFTQPSLAAFARPSRTAFRHPSLAAFPQPSQAAFAQPSQTIFTQPSEATFTQPSEATFTQPSEATFTQPSQAAFTQPSQANISQAICDEDDELRVLDPPAPASVSKRAKNVGTGNSRTRINKRTQDGNVVEMMGRFLEMKEKQAEADERATTNANEDDFPIQTCIAIVDGMEEFSDDEKVDSYDVFKDAQNRAIFMTAKDATRIKWLRKKIART

SEQ ID NO: 21766 - DNA, 612 bp, Zea mays subsp. mays
  misc_feature (1)..(612): Ceres Seq. ID no. 12483999
  misc_feature (602)..(602): n is a, c, t, g, unknown, or other
  misc_feature (584)..(584): n is a, c, t, g, unknown, or other
aggccaccaaaggtaccttgcaatcacaacgaacagaagctctcgatctcaccgacaccgaggaagaagagatcaatggcgtccgagcagggagtcgtgatcgcgtgccacagcaaggctgagttcgacgcccacatgaccaaggcccaggaagccggcaagctggtggtcatcgacttcactgccgcctggtgcggtccatgccgcgccatcgccccactgttcgtcgaacacgccaagaagttcactcaggtcgtcttcctgaaggtggacgtggacgaagtgaaggaagtcaccgcggcctacgaggtcgaggcgatgccgaccttccacttcgtcaagaacggcaagacggtcgcgaccatcgtgggtgccaggaaggacgagctcctggcccagatcgagaagcatgccgcgcctgcgcctgcgtctgcgtctgcctaaaggagatcagtcgtcgccgtcaataagggccagcacgtatggctgtaaatgttgtcgttatcagttctggctttgtcgtttgtgggcgattgtgaactagtagtatgtttgtttctatccgagccggaggcgatacttanccatggatacttgttgtnagttcgttcc

SEQ ID NO: 21767 - protein, 147 aa, Zea mays subsp. mays
  peptide (1)..(147): Ceres Seq. ID no. 12484000
  misc_feature (26)..(147): NCBI GI NO: 3915131 NR Description: Thioredoxin H-type
  misc_feature (26)..(134): NCBI GI NO: 27461140 NR Description: thioredoxin H [Triticum aestivum]
  misc_feature (27)..(145): NCBI GI NO: 267124 NR Description: Thioredoxin H-type 1 (TRX-H1)
  misc_feature (27)..(147): NCBI GI NO: 40287476 NR Description: thioredoxin [Capsicum annuum]
  misc_feature (26)..(139): NCBI GI NO: 15230385 NR Description: thioredoxin h; protein id: At3g51030
  misc_feature (27)..(139): NCBI GI NO: 33621084 NR Description: thioredoxin H3 [Ipomoea batatas]
  misc_feature (27)..(143): NCBI GI NO: 13624884 NR Description: thioredoxin h [Pisum sativum]
  misc_feature (28)..(147): NCBI GI NO: 16588843 NR Description: thioredoxin H [Prunus persica]
  misc_feature (28)..(138): NCBI GI NO: 11135312 NR Description: Thioredoxin H-type (TRX-H)
  misc_feature (27)..(139): NCBI GI NO: 12082335 NR Description: thioredoxin h
RPPKVPCNHNEQKLSISPTPRKKRSMASEQGVVIACHSKAEFDAHMTKAQEAGKLVVIDFTAAWCGPCRAIAPLFVEHAKKFTQVVFLKVDVDEVKEVTAAYEVEAMPTFHFVKNGKTVATIVGARKDELLAQIEKHAAPAPASASA

SEQ ID NO: 21768 - protein, 122 aa, Zea mays subsp. mays
  peptide (1)..(122): Ceres Seq. ID no. 12484001
  misc_feature (1)..(122): NCBI GI NO: 3915131 NR Description: Thioredoxin H-type
  misc_feature (1)..(109): NCBI GI NO: 27461140 NR Description: thioredoxin H [Triticum aestivum]
  misc_feature (2)..(120): NCBI GI NO: 267124 NR Description: Thioredoxin H-type 1 (TRX-H1)
  misc_feature (2)..(122): NCBI GI NO: 40287476 NR Description: thioredoxin [Capsicum annuum]
  misc_feature (1)..(114): NCBI GI NO: 15230385 NR Description: thioredoxin h; protein id: At3g51030
  misc_feature (2)..(114): NCBI GI NO: 33621084 NR Description: thioredoxin H3 [Ipomoea batatas]
  misc_feature (2)..(118): NCBI GI NO: 13624884 NR Description: thioredoxin h [Pisum sativum]
  misc_feature (3)..(122): NCBI GI NO: 16588843 NR Description: thioredoxin H [Prunus persica]
  misc_feature (3)..(113): NCBI GI NO: 11135312 NR Description: Thioredoxin H-type (TRX-H)
  misc_feature (2)..(114): NCBI GI NO: 12082335 NR Description: thioredoxin h
MASEQGVVIACHSKAEFDAHMTKAQEAGKLVVIDFTAAWCGPCRAIAPLFVEHAKKFTQVVFLKVDVDEVKEVTAAYEVEAMPTFHFVKNGKTVATIVGARKDELLAQIEKHAAPAPASASA

SEQ ID NO: 21769 - protein, 102 aa, Zea mays subsp. mays
  peptide (1)..(102): Ceres Seq. ID no. 12484002
  misc_feature (1)..(102): NCBI GI NO: 3915131 NR Description: Thioredoxin H-type
  misc_feature (1)..(89): NCBI GI NO: 27461140 NR Description: thioredoxin H [Triticum aestivum]
  misc_feature (1)..(100): NCBI GI NO: 267124 NR Description: Thioredoxin H-type 1 (TRX-H1)
  misc_feature (1)..(102): NCBI GI NO: 40287476 NR Description: thioredoxin [Capsicum annuum]
  misc_feature (1)..(94): NCBI GI NO: 15230385 NR Description: thioredoxin h; protein id: At3g51030
  misc_feature (1)..(94): NCBI GI NO: 33621084 NR Description: thioredoxin H3 [Ipomoea batatas]
  misc_feature (1)..(98): NCBI GI NO: 13624884 NR Description: thioredoxin h [Pisum sativum]
  misc_feature (1)..(102): NCBI GI NO: 16588843 NR Description: thioredoxin H [Prunus persica]
  misc_feature (1)..(93): NCBI GI NO: 11135312 NR Description: Thioredoxin H-type (TRX-H)
  misc_feature (1)..(94): NCBI GI NO: 12082335 NR Description: thioredoxin h
MTKAQEAGKLVVIDFTAAWCGPCRAIAPLFVEHAKKFTQVVFLKVDVDEVKEVTAAYEVEAMPTFHFVKNGKTVATIVGARKDELLAQIEKHAAPAPASASA

SEQ ID NO: 21770 - DNA, 823 bp, Zea mays subsp. mays
  misc_feature (1)..(823): Ceres Seq. ID no. 15175556
aagcgaggcggcggccccgcgttctccgtctccgtctccgtccgcccggcgtaaagaaaagcctccctcaccacagccgccacgccatggccgaggagaccgacaccaggcctgcctccgcgagctcccgaggccgccccgcgcccgaggacgacgacagggaggagggcgagatcaccgacatcgcctgcgctccttccccgcccgccacgcacccgctcgagcactcctggaccttctggttcgacaacccgcagagcaagtccaagcaggccgcctgggggagctccatccgcccaatacacaccttctccaccgtcgaggaattctgggggctttacaataacattaatcaccctagcaaattgatcgtgggagctgatttccattgcttcaagaacaagatcgagccaaaatgggaagaccctatttgtgcgaatggtggtaaaggtgtgtattgggcggatggagctcgacggccgcaacatcaccgttaacgaggcccagtcccgcggcggccgtggaggcggcggtggcggatacggtggcgggcgccgtgatggaggcggctacggcggtggcggtggaggctacggcggtggtcgtggaggctacggcggcggtgggggatacggtggtgcaaaccgcggcggcggctacggcaacaacgacgggaactggaggaactgagcggtggggtccgctgaggcctagttatcttgttcgcttctgctaccgtgttcaccctagtctagagggggtttatcttcgtctgtggtcgtctcgtgtccgtatgtttcgtttcgtgttcgttgttgttgtt

SEQ ID NO: 21771 - protein, 164 aa, Zea mays subsp. mays
  peptide (1)..(164): Ceres Seq. ID no. 15175557
  misc_feature (29)..(149): Pfam Name: Pfam Description:  Eukaryotic initiation factor 4E
  misc_feature (29)..(149): NCBI GI NO: 6016334 NR Description: EUKARYOTIC TRANSLATION INITIATION FACTOR 4E
  misc_feature (29)..(152): NCBI GI NO: 34905982 NR Description: eukaryotic translation initiation factor 4E
  misc_feature (29)..(149): NCBI GI NO: 30923212 NR Description: Eukaryotic translation initiation factor 4E
  misc_feature (28)..(148): NCBI GI NO: 25176242 NR Description: eucaryotic initiation factor 4E [Capsicum annuum]
  misc_feature (55)..(149): NCBI GI NO: 283021 NR Description: translation iation factor eIF-4F chain p26 -wheat
  misc_feature (28)..(148): NCBI GI NO: 25176244 NR Description: eucaryotic initiation factor 4E [Capsicum annuum]
  misc_feature (28)..(148): NCBI GI NO: 25176246 NR Description: eucaryotic initiation factor 4E [Capsicum annuum]
  misc_feature (28)..(148): NCBI GI NO: 38565045 NR Description: eukaryotic translation initiation factor 4E
  misc_feature (49)..(149): NCBI GI NO: 37813067 NR Description: eukaryotic translation initiation factor 4E
  misc_feature (50)..(148): NCBI GI NO: 7862169 NR Description: eIF4E [Lycopersicon esculentum]
ARRRPRVLRLRLRPPGVKKSLPHHSRHAMAEETDTRPASASSRGRPAPEDDDREEGEITDIACAPSPPATHPLEHSWTFWFDNPQSKSKQAAWGSSIRPIHTFSTVEEFWGLYNNINHPSKLIVGADFHCFKNKIEPKWEDPICANGGKGVYWADGARRPQHHR

SEQ ID NO: 21772 - protein, 136 aa, Zea mays subsp. mays
  peptide (1)..(136): Ceres Seq. ID no. 15175558
  misc_feature (1)..(121): Pfam Name: Pfam Description:  Eukaryotic initiation factor 4E
  misc_feature (1)..(121): NCBI GI NO: 6016334 NR Description: EUKARYOTIC TRANSLATION INITIATION FACTOR 4E
  misc_feature (1)..(124): NCBI GI NO: 34905982 NR Description: eukaryotic translation initiation factor 4E
  misc_feature (1)..(121): NCBI GI NO: 30923212 NR Description: Eukaryotic translation initiation factor 4E
  misc_feature (1)..(120): NCBI GI NO: 25176242 NR Description: eucaryotic initiation factor 4E [Capsicum annuum]
  misc_feature (27)..(121): NCBI GI NO: 283021 NR Description: translation iation factor eIF-4F chain p26 -wheat
  misc_feature (1)..(120): NCBI GI NO: 25176244 NR Description: eucaryotic initiation factor 4E [Capsicum annuum]
  misc_feature (1)..(120): NCBI GI NO: 25176246 NR Description: eucaryotic initiation factor 4E [Capsicum annuum]
  misc_feature (1)..(120): NCBI GI NO: 38565045 NR Description: eukaryotic translation initiation factor 4E
  misc_feature (21)..(121): NCBI GI NO: 37813067 NR Description: eukaryotic translation initiation factor 4E
  misc_feature (22)..(120): NCBI GI NO: 7862169 NR Description: eIF4E [Lycopersicon esculentum]
MAEETDTRPASASSRGRPAPEDDDREEGEITDIACAPSPPATHPLEHSWTFWFDNPQSKSKQAAWGSSIRPIHTFSTVEEFWGLYNNINHPSKLIVGADFHCFKNKIEPKWEDPICANGGKGVYWADGARRPQHHR

SEQ ID NO: 21773 - protein, 114 aa, Zea mays subsp. mays
  peptide (1)..(114): Ceres Seq. ID no. 15175559
SEAAAPRSPSPSPSARRKEKPPSPQPPRHGRGDRHQACLRELPRPPRARGRRQGGGRDHRHRLRSFPARHAPARALLDLLVRQPAEQVQAGRLGELHPPNTHLLHRRGILGALQ

SEQ ID NO: 21774 - DNA, 575 bp, Zea mays subsp. mays
  misc_feature (1)..(575): Ceres Seq. ID no. 15175988
tccaacctacccagcctcggccagccacctccccgtcgctctcacgctcttcgtgcccgccgcctcccctcttcccctccacctcactcctcccgtctgacgcacatggcctccatcgccggatcttccgctctctccttcgccatgcctgtcaaggcaatcaactcaaattctctagccttctccccggtgaggaagggtaacacattcctccgcctgcaaccagtgcctatgagatctgtttcctgcgctgccaagaaggatacggtggacacgttcatgagcgtgtactacaagtccaagaaggggcgcaagacggagaaggaggtgcaggaggcggaggcggccatactggagccggcctacgcggacgaggaggcctaaaagctcgtggtcgttttgcttagcccattttaattagaacttgatggatgtagtgtgtgtctgtctcaagtcattttaattagaactcttaaagctcgtggtcggtcggtcagtcagtcagtcattgtcgttgatgtccagcgttgtgttttttttatattctctaatggaatctctcagattgattcggc

SEQ ID NO: 21775 - protein, 127 aa, Zea mays subsp. mays
  peptide (1)..(127): Ceres Seq. ID no. 15175989
  misc_feature (48)..(99): NCBI GI NO: 7442270 NR Description: acyl carrier protein - maize
  misc_feature (36)..(99): NCBI GI NO: 113172 NR Description: Acyl carrier protein III, chloroplast precursor
  misc_feature (83)..(125): NCBI GI NO: 37534052 NR Description: putative Cell elongation protein DIMINUTO
  misc_feature (36)..(110): NCBI GI NO: 113169 NR Description: Acyl carrier protein II, chloroplast precursor
  misc_feature (83)..(126): NCBI GI NO: 15230955 NR Description: cell elongation protein (DWARF1) (DIMINUTO) (DIM)
  misc_feature (86)..(126): NCBI GI NO: 21326148 NR Description: ovule/fiber cell elongation protein Ghfe1
  misc_feature (83)..(126): NCBI GI NO: 19698879 NR Description: unknown protein [Arabidopsis thaliana]
  misc_feature (83)..(124): NCBI GI NO: 13194621 NR Description: brassinosteroid biosynthetic protein LKB
  misc_feature (83)..(126): NCBI GI NO: 602302 NR Description: diminuto
SNLPSLGQPPPRRSHALRARRLPSSPPPHSSRLTHMASIAGSSALSFAMPVKAINSNSLAFSPVRKGNTFLRLQPVPMRSVSCAAKKDTVDTFMSVYYKSKKGRKTEKEVQEAEAAILEPAYADEEA

SEQ ID NO: 21776 - protein, 92 aa, Zea mays subsp. mays
  peptide (1)..(92): Ceres Seq. ID no. 15175990
  misc_feature (13)..(64): NCBI GI NO: 7442270 NR Description: acyl carrier protein - maize
  misc_feature (1)..(64): NCBI GI NO: 113172 NR Description: Acyl carrier protein III, chloroplast precursor
  misc_feature (48)..(90): NCBI GI NO: 37534052 NR Description: putative Cell elongation protein DIMINUTO
  misc_feature (1)..(75): NCBI GI NO: 113169 NR Description: Acyl carrier protein II, chloroplast precursor
  misc_feature (48)..(91): NCBI GI NO: 15230955 NR Description: cell elongation protein (DWARF1) (DIMINUTO) (DIM)
  misc_feature (51)..(91): NCBI GI NO: 21326148 NR Description: ovule/fiber cell elongation protein Ghfe1
  misc_feature (48)..(91): NCBI GI NO: 19698879 NR Description: unknown protein [Arabidopsis thaliana]
  misc_feature (48)..(89): NCBI GI NO: 13194621 NR Description: brassinosteroid biosynthetic protein LKB
  misc_feature (48)..(91): NCBI GI NO: 602302 NR Description: diminuto
MASIAGSSALSFAMPVKAINSNSLAFSPVRKGNTFLRLQPVPMRSVSCAAKKDTVDTFMSVYYKSKKGRKTEKEVQEAEAAILEPAYADEEA

SEQ ID NO: 21777 - protein, 79 aa, Zea mays subsp. mays
  peptide (1)..(79): Ceres Seq. ID no. 15175991
  misc_feature (1)..(51): NCBI GI NO: 7442270 NR Description: acyl carrier protein - maize
  misc_feature (1)..(51): NCBI GI NO: 113172 NR Description: Acyl carrier protein III, chloroplast precursor
  misc_feature (35)..(77): NCBI GI NO: 37534052 NR Description: putative Cell elongation protein DIMINUTO
  misc_feature (1)..(62): NCBI GI NO: 113169 NR Description: Acyl carrier protein II, chloroplast precursor
  misc_feature (35)..(78): NCBI GI NO: 15230955 NR Description: cell elongation protein (DWARF1) (DIMINUTO) (DIM)
  misc_feature (38)..(78): NCBI GI NO: 21326148 NR Description: ovule/fiber cell elongation protein Ghfe1
  misc_feature (35)..(78): NCBI GI NO: 19698879 NR Description: unknown protein [Arabidopsis thaliana]
  misc_feature (35)..(76): NCBI GI NO: 13194621 NR Description: brassinosteroid biosynthetic protein LKB
  misc_feature (35)..(78): NCBI GI NO: 602302 NR Description: diminuto
MPVKAINSNSLAFSPVRKGNTFLRLQPVPMRSVSCAAKKDTVDTFMSVYYKSKKGRKTEKEVQEAEAAILEPAYADEEA

SEQ ID NO: 21778 - DNA, 568 bp, Zea mays subsp. mays
  misc_feature (1)..(568): Ceres Seq. ID no. 12634179
atttcccatctctctctgcgccgtcccgtgctccctccgctagttctcccaattccttccccacctcctcggtcgtcgcctcccccagagagcaggagccgcctcgtccctgccggtcccgaccccgacccccatcccgtccgcgtccaacgccatgaatcccgagtacgactacctcttcaagctgctcctcatcggggactccggtgttgggaagtcttgcctgctgctgaggtttgcggatgattcatggcgttggacgggacgggacggaacggaagcctacgatcgactgtacatacaggggttgggacttgggagggagctcgggttcttgttgggttttcctttgggtggagagcgagggagcgcagtcgagagccagcgagcagtctctcgtgcagtgcagtgcagtgcagtgcagctccggcgtagatgagattgtattgtgaccaagccgggagggaaagcagggaggggaggacaaagatgttttgtcacgtttcaggctccggccatcgccggagtttgtccggggaatatatcgatttcctacagaaatccgcgc

SEQ ID NO: 21779 - protein, 94 aa, Zea mays subsp. mays
  peptide (1)..(94): Ceres Seq. ID no. 12634180
  misc_feature (1)..(94): NCBI GI NO: 4886443 NR Description: hypothetical protein [Homo sapiens]
  misc_feature (1)..(33): NCBI GI NO: 34906164 NR Description: putative GTP-binding protein
  misc_feature (1)..(33): NCBI GI NO: 5902803 NR Description: Ras-related protein ARA-5
  misc_feature (1)..(33): NCBI GI NO: 1619841 NR Description: rab1-like [Caenorhabditis elegans]
  misc_feature (1)..(33): NCBI GI NO: 17558550 NR Description: RAB family RAB-1 (22.5 kD) (rab-1)
  misc_feature (1)..(33): NCBI GI NO: 39588485 NR Description: Hypothetical protein CBG01077
  misc_feature (1)..(33): NCBI GI NO: 303732 NR Description: GTP-binding protein [Pisum sativum]
  misc_feature (1)..(33): NCBI GI NO: 303750 NR Description: GTP-binding protein [Pisum sativum]
  misc_feature (1)..(33): NCBI GI NO: 466172 NR Description: GTP-BINDING PROTEIN YPTM2
  misc_feature (1)..(33): NCBI GI NO: 730510 NR Description: RAS-RELATED PROTEIN RIC1
MNPEYDYLFKLLLIGDSGVGKSCLLLRFADDSWRWTGRDGTEAYDRLYIQGLGLGRELGFLLGFPLGGERGSAVESQRAVSRAVQCSAVQLRRR

SEQ ID NO: 21780 - protein, 81 aa, Zea mays subsp. mays
  peptide (1)..(81): Ceres Seq. ID no. 12634181
ISHLSLRRPVLPPLVLPIPSPPPRSSPPPESRSRLVPAGPDPDPHPVRVQRHESRVRLPLQAAPHRGLRCWEVLPAAEVCG

SEQ ID NO: 21781 - protein, 69 aa, Zea mays subsp. mays
  peptide (1)..(69): Ceres Seq. ID no. 12634182
MIHGVGRDGTERKPTIDCTYRGWDLGGSSGSCWVFLWVESEGAQSRASEQSLVQCSAVQCSSGVDEIVL

SEQ ID NO: 21782 - DNA, 553 bp, Zea mays subsp. mays
  misc_feature (1)..(553): Ceres Seq. ID no. 12783705
aactcgcaattccgcattcgttccaactcctgagcactttctcctcgtcccagacaagccaatcgaagccgagatacgaccatggactccaccggcaccggagcagggggtaaggggaagaagggagcggccgggcgcaaggtcggcgggccaaggaagaagtcggtgtcgaggtccgtgaaggccggtctccagttccccgtcggccgcatcgggcgccgcgcccgccgcgctcctcttctccctcctcgcctactacctccactaagcgtgtgcgtgcttacgtacgcgcgcatggacgacgatggatccgtccaccgttgccattgcagttgcctcgctcgttcttggtgactgttgctgcggtggtcgacttggaagacgtcacctgcaccgctgtttccatatattattattgatgtgatctgatatgaatatatatgcatggtgacgggttgtgttaattacatagacgtgatttaatttatctatttgtgtcaagtcgttctgtaatcatgcgatgaaatatatgatttggttttccatttgtttg

SEQ ID NO: 21783 - protein, 90 aa, Zea mays subsp. mays
  peptide (1)..(90): Ceres Seq. ID no. 12783706
  misc_feature (1)..(50): NCBI GI NO: 729671 NR Description: Histone H2A
  misc_feature (1)..(50): NCBI GI NO: 34914498 NR Description: putative histone H2A
  misc_feature (8)..(46): NCBI GI NO: 122006 NR Description: HISTONE H2A
  misc_feature (10)..(50): NCBI GI NO: 122007 NR Description: Histone H2A
  misc_feature (8)..(46): NCBI GI NO: 729669 NR Description: Histone H2A
  misc_feature (9)..(46): NCBI GI NO: 7649159 NR Description: histone H2A [Euphorbia esula]
  misc_feature (8)..(50): NCBI GI NO: 15241857 NR Description: putative protein; protein id: At5g02560
  misc_feature (8)..(46): NCBI GI NO: 27529852 NR Description: H2A histone [Nicotiana tabacum]
  misc_feature (11)..(50): NCBI GI NO: 122003 NR Description: HISTONE H2A
  misc_feature (9)..(50): NCBI GI NO: 121974 NR Description: HISTONE H2A.2.1
MDSTGTGAGGKGKKGAAGRKVGGPRKKSVSRSVKAGLQFPVGRIGRRARRAPLLPPRLLPPLSVCVLTYARMDDDGSVHRCHCSCLARSW

SEQ ID NO: 21784 - protein, 59 aa, Zea mays subsp. mays
  peptide (1)..(59): Ceres Seq. ID no. 12783707
TRNSAFVPTPEHFLLVPDKPIEAEIRPWTPPAPEQGVRGRRERPGARSAGQGRSRCRGP

SEQ ID NO: 21785 - DNA, 914 bp, Zea mays subsp. mays
  misc_feature (1)..(914): Ceres Seq. ID no. 15175549
atatatccccactcttcgcctcctttctggagcagctagggttccgtcctcgatccgatccgccgagtgcacaccacctttccccactccgatcgaatcgatggccgccgagggcgagaagaagatgataaccctcaaaagctccgatggcgaggagttcgaggtggaagaggcggtggcgatggagtcgcagaccatccgccacatgatcgaggatgactgcgccgacaacggtatccctcttcctaacgtcaactccaagatcctatccaaggtaatcgagtactgcaacaagcacgtacatgccgccgccgccgccgccgccgcctcgaaggccggttccgacgacgtgggtgccgcctccgccaacagcaccgccgcctccggtgaggacctcaagaactgggatgcggaggaggatctggtggtggtggcggcggcggcggtgggacgagcggtcgttgccccgtggacgcgctgaagctgggcgtgtgcgccaacttgctgaacgggctgatcaacgcgaccctggggacgccgcccaggacgccgtgctgcacgctgatccaggggctggcggacctggaggcggcggtgtgcctctgcaccgtcctcagggccaacgtcctgggcatcaacctcaacctgcccatcaacctcagcctcctcgtcaactactgcggcaggcgcgtcccctcgggcttccagtgcttctgactatcacacgcccatcgatcgatcgatctgcaggctaaataatttgtccaagctagtatacgtacgttgatatatatatgatgtagtattatatatatgtccatgcatgcaatgcatctcgtcgtctatcgcatgttgttgttgttgttgttgtttttcgatgatcctgtctctgttataaatatcattattattgc

SEQ ID NO: 21786 - protein, 159 aa, Zea mays subsp. mays
  peptide (1)..(159): Ceres Seq. ID no. 15175550
  misc_feature (41)..(100): Pfam Name: Pfam Description:  Skp1 family, tetramerisation domain
  misc_feature (38)..(138): NCBI GI NO: 32330695 NR Description: SKP1/ASK1-like protein [Triticum aestivum]
  misc_feature (38)..(138): NCBI GI NO: 7378764 NR Description: putative kinetochore protein
  misc_feature (38)..(138): NCBI GI NO: 40644754 NR Description: putative SKP1 protein [Triticum aestivum]
  misc_feature (41)..(138): NCBI GI NO: 3719211 NR Description: UIP2 [Arabidopsis thaliana]
  misc_feature (41)..(138): NCBI GI NO: 18422184 NR Description: E3 ubiquitin ligase SCF complex subunit, SKP1/ASK1
  misc_feature (40)..(138): NCBI GI NO: 18394828 NR Description: SKP1, putative [Arabidopsis thaliana]
  misc_feature (41)..(138): NCBI GI NO: 18958257 NR Description: kinetochore protein [Brassica juncea]
  misc_feature (41)..(138): NCBI GI NO: 18958259 NR Description: kinetochore protein [Brassica juncea]
  misc_feature (40)..(144): NCBI GI NO: 18400912 NR Description: E3 ubiquitin ligase SCF complex subunit SKP1/ASK1
  misc_feature (41)..(138): NCBI GI NO: 18958253 NR Description: kinetochore protein [Brassica juncea]
YIPTLRLLSGAARVPSSIRSAECTPPFPTPIESMAAEGEKKMITLKSSDGEEFEVEEAVAMESQTIRHMIEDDCADNGIPLPNVNSKILSKVIEYCNKHVHAAAAAAAASKAGSDDVGAASANSTAASGEDLKNWDAEEDLVVVAAAAVGRAVVAPWTR

SEQ ID NO: 21787 - protein, 150 aa, Zea mays subsp. mays
  peptide (1)..(150): Ceres Seq. ID no. 15175551
  misc_feature (1)..(29): NCBI GI NO: 34898430 NR Description: Similar to Zea mays PRP gene.(X60432)
  misc_feature (1)..(28): NCBI GI NO: 283044 NR Description: hybrid proline-rich protein - maize
  misc_feature (1)..(28): NCBI GI NO: 283044 NR Description: hybrid proline-rich protein - maize
  misc_feature (1)..(26): NCBI GI NO: 283044 NR Description: hybrid proline-rich protein - maize
  misc_feature (1)..(28): NCBI GI NO: 283044 NR Description: hybrid proline-rich protein - maize
  misc_feature (1)..(28): NCBI GI NO: 34898430 NR Description: Similar to Zea mays PRP gene.(X60432)
  misc_feature (1)..(34): NCBI GI NO: 25453525 NR Description: cell wall-plasma membrane linker protein homolog
  misc_feature (1)..(29): NCBI GI NO: 7446488 NR Description: cytokinin-induced proline rich protein
  misc_feature (1)..(35): NCBI GI NO: 19521 NR Description: proline rich protein [Lycopersicon esculentum]
  misc_feature (1)..(35): NCBI GI NO: 1709767 NR Description: 36.4 KD PROLINE-RICH PROTEIN
MPPPPPPPPRRPVPTTWVPPPPTAPPPPVRTSRTGMRRRIWWWWRRRRWDERSLPRGRAEAGRVRQLAERADQRDPGDAAQDAVLHADPGAGGPGGGGVPLHRPQGQRPGHQPQPAHQPQPPRQLLRQARPLGLPVLLTITRPSIDRSAG

SEQ ID NO: 21788 - protein, 126 aa, Zea mays subsp. mays
  peptide (1)..(126): Ceres Seq. ID no. 15175552
  misc_feature (8)..(67): Pfam Name: Pfam Description:  Skp1 family, tetramerisation domain
  misc_feature (5)..(105): NCBI GI NO: 32330695 NR Description: SKP1/ASK1-like protein [Triticum aestivum]
  misc_feature (5)..(105): NCBI GI NO: 7378764 NR Description: putative kinetochore protein
  misc_feature (5)..(105): NCBI GI NO: 40644754 NR Description: putative SKP1 protein [Triticum aestivum]
  misc_feature (8)..(105): NCBI GI NO: 3719211 NR Description: UIP2 [Arabidopsis thaliana]
  misc_feature (8)..(105): NCBI GI NO: 18422184 NR Description: E3 ubiquitin ligase SCF complex subunit, SKP1/ASK1
  misc_feature (7)..(105): NCBI GI NO: 18394828 NR Description: SKP1, putative [Arabidopsis thaliana]
  misc_feature (8)..(105): NCBI GI NO: 18958257 NR Description: kinetochore protein [Brassica juncea]
  misc_feature (8)..(105): NCBI GI NO: 18958259 NR Description: kinetochore protein [Brassica juncea]
  misc_feature (7)..(111): NCBI GI NO: 18400912 NR Description: E3 ubiquitin ligase SCF complex subunit SKP1/ASK1
  misc_feature (8)..(105): NCBI GI NO: 18958253 NR Description: kinetochore protein [Brassica juncea]
MAAEGEKKMITLKSSDGEEFEVEEAVAMESQTIRHMIEDDCADNGIPLPNVNSKILSKVIEYCNKHVHAAAAAAAASKAGSDDVGAASANSTAASGEDLKNWDAEEDLVVVAAAAVGRAVVAPWTR

SEQ ID NO: 21789 - DNA, 749 bp, Zea mays subsp. mays
  misc_feature (1)..(749): Ceres Seq. ID no. 13598962
  misc_feature (723)..(723): n is a, c, t, g, unknown, or other
  misc_feature (730)..(730): n is a, c, t, g, unknown, or other
  misc_feature (725)..(725): n is a, c, t, g, unknown, or other
  misc_feature (747)..(747): n is a, c, t, g, unknown, or other
  misc_feature (746)..(746): n is a, c, t, g, unknown, or other
  misc_feature (731)..(731): n is a, c, t, g, unknown, or other
  misc_feature (748)..(748): n is a, c, t, g, unknown, or other
  misc_feature (724)..(724): n is a, c, t, g, unknown, or other
accacactccactgctctcctccactccactgcctcccatccctgctgctccctctcccatcccggttccatcatgggcggcctctcggtgatcgcaccgcccgcgcgggactcggcttccccgcagcaccggcgcgcgcgccgcgcgttcctcgtgtccaactacctcatcctgggctgcgcctccgggtgcggcttcctcacgctctcgctccgcctggccccctccgtcgacggcttcctcctcatcctgctgcacgcgctcacggtggccgggcggagcgagagcgagcaggaccgcaagaggcggacacagcttcaggaagaatgggactcatgggttgccaagtggaagcagatgcatgaggaggagcgtgcttacaggagggagctcagggatggggaggccagcgacgacgaggaagagtatgaggccaaggaagttgaggtggaggaagtcgttgatgtccgtcaagaagttcttgcattcgacctagatcaggagtgaaaacacttattatagaatctgttgatttctttcctgttggtgttaaagttcattggggtcgcattgcataataggccctagtgatcaagtgcgcaatttactgatcgttgtactgcttatttgtacacttgctgcttgaattgttggatcatgtgtttagatatcaaattttgctgctggattactaaaaaaaaaaaaaaaaaatatcgataccnnncgacnntcgagggggggcccnnnt

SEQ ID NO: 21790 - protein, 168 aa, Zea mays subsp. mays
  peptide (1)..(168): Ceres Seq. ID no. 15222467
  misc_feature (25)..(91): NCBI GI NO: 38345379 NR Description: OSJNBa0067K08.8
  misc_feature (96)..(168): NCBI GI NO: 37537002 NR Description: putative eukaryotic initiation factor subunit
  misc_feature (96)..(168): NCBI GI NO: 6685536 NR Description: Eukaryotic translation initiation factor 3 subunit9
  misc_feature (96)..(161): NCBI GI NO: 18421140 NR Description: eukaryotic translation initiation factor 3 subunit9
  misc_feature (96)..(161): NCBI GI NO: 18420952 NR Description: eukaryotic translation initiation factor 3b
  misc_feature (96)..(161): NCBI GI NO: 7689383 NR Description: eIF3b [Arabidopsis thaliana]
  misc_feature (38)..(91): NCBI GI NO: 15237310 NR Description: expressed protein [Arabidopsis thaliana]
  misc_feature (38)..(91): NCBI GI NO: 21553926 NR Description: unknown [Arabidopsis thaliana]
  misc_feature (38)..(91): NCBI GI NO: 21703131 NR Description: AT5g16250/T21H19_170 [Arabidopsis thaliana]
  misc_feature (31)..(91): NCBI GI NO: 18396262 NR Description: expressed protein [Arabidopsis thaliana]
PHSTALLHSTASHPCCSLSHPGSIMGGLSVIAPPARDSASPQHRRARRAFLVSNYLILGCASGCGFLTLSLRLAPSVDGFLLILLHALTVAGRSESEQDRKRRTQLQEEWDSWVAKWKQMHEEERAYRRELRDGEASDDEEEYEAKEVEVEEVVDVRQEVLAFDLDQE

SEQ ID NO: 21791 - protein, 144 aa, Zea mays subsp. mays
  peptide (1)..(144): Ceres Seq. ID no. 15222468
  misc_feature (1)..(67): NCBI GI NO: 38345379 NR Description: OSJNBa0067K08.8
  misc_feature (72)..(144): NCBI GI NO: 37537002 NR Description: putative eukaryotic initiation factor subunit
  misc_feature (72)..(144): NCBI GI NO: 6685536 NR Description: Eukaryotic translation initiation factor 3 subunit9
  misc_feature (72)..(137): NCBI GI NO: 18421140 NR Description: eukaryotic translation initiation factor 3 subunit9
  misc_feature (72)..(137): NCBI GI NO: 18420952 NR Description: eukaryotic translation initiation factor 3b
  misc_feature (72)..(137): NCBI GI NO: 7689383 NR Description: eIF3b [Arabidopsis thaliana]
  misc_feature (14)..(67): NCBI GI NO: 15237310 NR Description: expressed protein [Arabidopsis thaliana]
  misc_feature (14)..(67): NCBI GI NO: 21703131 NR Description: AT5g16250/T21H19_170 [Arabidopsis thaliana]
  misc_feature (14)..(67): NCBI GI NO: 21553926 NR Description: unknown [Arabidopsis thaliana]
  misc_feature (7)..(67): NCBI GI NO: 18396262 NR Description: expressed protein [Arabidopsis thaliana]
MGGLSVIAPPARDSASPQHRRARRAFLVSNYLILGCASGCGFLTLSLRLAPSVDGFLLILLHALTVAGRSESEQDRKRRTQLQEEWDSWVAKWKQMHEEERAYRRELRDGEASDDEEEYEAKEVEVEEVVDVRQEVLAFDLDQE

SEQ ID NO: 21792 - protein, 121 aa, Zea mays subsp. mays
  peptide (1)..(121): Ceres Seq. ID no. 15222469
TTLHCSPPLHCLPSLLLPLPSRFHHGRPLGDRTARAGLGFPAAPARAPRVPRVQLPHPGLRLRVRLPHALAPPGPLRRRLPPHPAARAHGGRAERERAGPQEADTASGRMGLMGCQVEADA

SEQ ID NO: 21793 - DNA, 3034 bp, Zea mays subsp. mays
  misc_feature (1)..(3034): Ceres Seq. ID no. 15176878
acctgccttttcttcttcaagcgtgcacattccttccccacttctctctctctctctctctcgtgacgacggcgacggcaacgactggggcgaccgtcgctgccgccctacttgccggttgctcggatcttcttcggcccgttagccgtcgacgagcaccaccaggtacgccaaccccttcatcttctcttcctgctgtgcgaaactgaggacccaaaccctaacctactatttgtttttcggatctgatctatgcatgcattacgcctactaacttcgattgctctgcaaaaataatcggtgtatacatgagtagacccacgtcccgggcaaaattctgaagcccattgttgatgtgggcatattagcaaatctctcgtgttcaccccagcttaaaaatataagctgtttggtgccgctcgtgtatttaccatgtttttgctactattgattgtgccagggcaaccagatacttcagtggcttcgcaaggatgtcctggtgcactattgagtctgatcctggtgagttttcgcatggtctcatcaatgactatatgtgctgttccttgtcattttcgattcgtgggaggtgtatggcatgttagcgtgcgggtaggatactcccttattttttcccctgcccgtccacctctgcatatcatgcaatttctgtgttttgcttataagtgtagtgggctcggttatacccgagttatcttcaaggggacaattttcctttagtcatgatgattgcattcatcgtctttttaagtcattcagcatgtgctcttcaccgttcctaatagtagcgttaggaaaccaacttatgtcatcagtcgtcacacttttgaatgatctaccaacccattggtatctctgttctttggcatattacttcccccctactttcacgaaacagcaaactgttgatgagttgaaacacattttgttatgcttactcccatttgtacttctgagttctgtcttagttgttcttactggtgtttgaaaccattgcttatgttatacttgagcaggtgtgttcactgagctgattcagcaaatgcaagtgaaaggtgtacaggttagcttccagggctctgttgcgttccttgcctgaactgcttgttttgtagcaactgtttttttcctcatccattgaactattattgtatctgcaatggcattatgcgctcgacctgttcattcactagtgtacactagttcttctgaagttttgtttcttgctcatgttctgaaactcacatcaacctggaactctcatttttggaagtgccttactgccatattatatgactgtaggataagcataataatatgtagctgattgtaatcttgtttgtcaacaggatcttgaagacatgcactttagtttaaggtagaataactgataatttgttgtcaatagttgctctttttttacctttatgcaacggtcaactcaatttgaaatggggagggtccttgtattatcaaaaagtaagggaggccttgagtgaggcttattctacatttgtttattcacttgcattcgtttagtatgggacctctagtcacatgacaacatgccagctaccaattatatttgtttgaggtcatgcttttatttcttgagtttgataatgttggtacttaagttacaataataatatatatagaacaggtgcctctagaaatatgtgacgatcatttttttgtcaagttatccatagaaaaaaaatttgaacccagaaatttatatgtttgggatgttctttaaacaggtggaagagctttactctctcgatgtgggctctcttagtcaactgcggtgagaatctttattatttatgtcgtcattatctgcaatctgaatgccttgaacacatatttgtcctctccacttttcttaggccagtatatgggctaatttttctcttcaagtggatacccggggagaaggatgaacggcctgttgtcagagatcctaacccaaaccttttctttgcgcaccaagttagttctgttctgtttctgtccctttagctaaccacgtttgctactctgtgcttaacaataacaggatatccttttacttattttcaggtcatcactaatgcatgtgctactcaagctattctctcagttctcatgaatcgccctgaaattgacattggcccagaattatctcaattgaaggaattcacaggagcttttacaccagatctgaagggcttggctattagcaacagcgaatctatccggacagctcataacagctttgcaaggccagagccatttatttctgatgagcagagggccgcaactaaggatgatgatgtttaccatttcataagctatttaccttttgaaggtgtcctgtatgagctggatggactgaaggaagggcctgtgaatcttgggcagtgcgatggtgctgatgatcttgattggctacggatggtgcagccagttattcaagaaaggattgagcgctactcacaaagcgagatcaggttcaatctcatggccatcataaagaacaggaaagaggtgtacagtgctgagcttgaggaactggagaagagaagggagcagattttgcaggagatgaataatgcttcctccacagaatccttgagcagttcgcttacggaggtgatatcggcaatcgaaactgtcacggagaaggtcatcatggaagaagagaagttcaagaagtggaagaaggagaacattcggaggaaacataactacatccctttcttgttcaacttgctgaagatgcttgcagagaagcagcagctaaaacctctggtcgagaaggccaaacagcaaaagtcagcaagcccgagcacgagttgatggtgaaatgtcaatagactggtagcttttgccgatgtcttctgagcgtcgtgttatcttatcagatacattgccaagtcggcagctcagataaattatgaccgatgttatttataccatgttgcacgccgtgatgtatcagcagctatgccatttttttttgcagagc

SEQ ID NO: 21794 - protein, 237 aa, Zea mays subsp. mays
  peptide (1)..(237): Ceres Seq. ID no. 15176879
  misc_feature (1)..(233): NCBI GI NO: 6686411 NR Description: F1E22.3 [Arabidopsis thaliana]
  misc_feature (1)..(233): NCBI GI NO: 18408331 NR Description: expressed protein [Arabidopsis thaliana]
  misc_feature (1)..(233): NCBI GI NO: 15724238 NR Description: F5I14.29/F5I14.29 [Arabidopsis thaliana]
  misc_feature (1)..(225): NCBI GI NO: 15237324 NR Description: ubiquitin C-terminal hydrolase-related protein
  misc_feature (1)..(232): NCBI GI NO: 27806179 NR Description: ubiquitin carboxyl-terminal hydrolase L5
  misc_feature (1)..(232): NCBI GI NO: 7706753 NR Description: ubiquitin C-terminal hydrolase UCH37
  misc_feature (1)..(232): NCBI GI NO: 12841686 NR Description: unnamed protein product [Mus musculus]
  misc_feature (1)..(232): NCBI GI NO: 18203632 NR Description: Ubiquitin carboxyl-terminal hydrolase isozyme L5
  misc_feature (1)..(232): NCBI GI NO: 15930175 NR Description: Unknown (protein for MGC:9314) [Homo sapiens]
  misc_feature (1)..(232): NCBI GI NO: 30584639 NR Description: Homo sapiens ubiquitin carboxyl-terminal hydrolaseL5
MNRPEIDIGPELSQLKEFTGAFTPDLKGLAISNSESIRTAHNSFARPEPFISDEQRAATKDDDVYHFISYLPFEGVLYELDGLKEGPVNLGQCDGADDLDWLRMVQPVIQERIERYSQSEIRFNLMAIIKNRKEVYSAELEELEKRREQILQEMNNASSTESLSSSLTEVISAIETVTEKVIMEEEKFKKWKKENIRRKHNYIPFLFNLLKMLAEKQQLKPLVEKAKQQKSASPSTS

SEQ ID NO: 21795 - protein, 134 aa, Zea mays subsp. mays
  peptide (1)..(134): Ceres Seq. ID no. 15176880
  misc_feature (1)..(130): NCBI GI NO: 6686411 NR Description: F1E22.3 [Arabidopsis thaliana]
  misc_feature (1)..(130): NCBI GI NO: 18408331 NR Description: expressed protein [Arabidopsis thaliana]
  misc_feature (1)..(130): NCBI GI NO: 15724238 NR Description: F5I14.29/F5I14.29 [Arabidopsis thaliana]
  misc_feature (1)..(122): NCBI GI NO: 15237324 NR Description: ubiquitin C-terminal hydrolase-related protein
  misc_feature (1)..(129): NCBI GI NO: 27806179 NR Description: ubiquitin carboxyl-terminal hydrolase L5
  misc_feature (1)..(129): NCBI GI NO: 7706753 NR Description: ubiquitin C-terminal hydrolase UCH37
  misc_feature (1)..(129): NCBI GI NO: 12841686 NR Description: unnamed protein product [Mus musculus]
  misc_feature (1)..(129): NCBI GI NO: 18203632 NR Description: Ubiquitin carboxyl-terminal hydrolase isozyme L5
  misc_feature (1)..(129): NCBI GI NO: 15930175 NR Description: Unknown (protein for MGC:9314) [Homo sapiens]
  misc_feature (1)..(129): NCBI GI NO: 30584639 NR Description: Homo sapiens ubiquitin carboxyl-terminal hydrolaseL5
MVQPVIQERIERYSQSEIRFNLMAIIKNRKEVYSAELEELEKRREQILQEMNNASSTESLSSSLTEVISAIETVTEKVIMEEEKFKKWKKENIRRKHNYIPFLFNLLKMLAEKQQLKPLVEKAKQQKSASPSTS

SEQ ID NO: 21796 - DNA, 1061 bp, Zea mays subsp. mays
  misc_feature (1)..(1061): Ceres Seq. ID no. 14312747
aggaaaaccaaccaccactcccaccaccctccgcctccgcctgcgccacagctgccgattcgaaagccctcgtcctgacccctcgcaaaaccctagctccaaccaccatgaagggcaaggccaacgcctccaagaaggatgaggccaggctccgggccggcggcggtggcccgatgggcggaatgctgcctcaacaaggcatgatgaggcctcctaacattcttggtggtgctggtgccggcttccccagcacggcccagatgggcggcggacctatgggcatgccggttggccacccgcacatgggtattatgcagcagggcggcggtggcggtggtggtggcatgccgggcctggggttccacccgggattgggcggcggcggaatgcattctggggcggatatgcttcaggccgccgcggcatccgggaaccccgtggcgcagcagcagtacatggccttgatgcagcagcagcagcagcagatgatgatgatgcagcagcagcaacagcagcacgggaacggcggtttaggatacccggcggcaatgggctacggctatggccggccaccgatgcattacccaatgggctacccagtgctgcccccgcactcgcatgctgagccttacaacatcttcagcgacgagaacgccaacagctgctcactgatgtgatcagcaattccgcatggaatggccctgttccaagtaaaccatctcaaggagctcaatgtcaccgctgatcaccgacagacatcgccatggttgaagcgccgtgaatcaatcaacaatcagtatgcttggggatgagtcctagctagaaccctgtccctttcctgctccttccccccctttctctagcttattttcgccttgctttaaaaaaaaaggaacttccttgaatgcgaagttaggtatagtaattatgaggtttccataagggaggggaggagagaggagacgatagggacttcgtacggggtcgttcgcttgtgggttcttccctcctggcttcattaaggtggactaatggtagaacaatgttgtcaatctcagtcg

SEQ ID NO: 21797 - protein, 224 aa, Zea mays subsp. mays
  peptide (1)..(224): Ceres Seq. ID no. 14312748
  misc_feature (138)..(210): Pfam Name: Pfam Description:  Atrophin-1 family
  misc_feature (54)..(224): NCBI GI NO: 6729032 NR Description: unknown protein [Arabidopsis thaliana]
  misc_feature (54)..(224): NCBI GI NO: 30679432 NR Description: glycine-rich protein [Arabidopsis thaliana]
  misc_feature (53)..(224): NCBI GI NO: 18397481 NR Description: heavy-metal-associated domain-containing protein
  misc_feature (65)..(173): NCBI GI NO: 31199749 NR Description: ENSANGP00000021618 [Anopheles gambiae]
  misc_feature (36)..(210): NCBI GI NO: 27754558 NR Description: unknown protein [Arabidopsis thaliana]
  misc_feature (36)..(210): NCBI GI NO: 15239643 NR Description: heavy-metal-associated domain-containing protein
  misc_feature (53)..(224): NCBI GI NO: 30687142 NR Description: heavy-metal-associated domain-containing protein
  misc_feature (3)..(199): NCBI GI NO: 31206687 NR Description: ENSANGP00000010576 [Anopheles gambiae]
  misc_feature (37)..(210): NCBI GI NO: 18397481 NR Description: heavy-metal-associated domain-containing protein
ENQPPLPPPSASACATAADSKALVLTPRKTLAPTTMKGKANASKKDEARLRAGGGGPMGGMLPQQGMMRPPNILGGAGAGFPSTAQMGGGPMGMPVGHPHMGIMQQGGGGGGGGMPGLGFHPGLGGGGMHSGADMLQAAAASGNPVAQQQYMALMQQQQQQMMMMQQQQQQHGNGGLGYPAAMGYGYGRPPMHYPMGYPVLPPHSHAEPYNIFSDENANSCSLM

SEQ ID NO: 21798 - protein, 189 aa, Zea mays subsp. mays
  peptide (1)..(189): Ceres Seq. ID no. 14312749
  misc_feature (103)..(175): Pfam Name: Pfam Description:  Atrophin-1 family
  misc_feature (19)..(189): NCBI GI NO: 6729032 NR Description: unknown protein [Arabidopsis thaliana]
  misc_feature (19)..(189): NCBI GI NO: 30679432 NR Description: glycine-rich protein [Arabidopsis thaliana]
  misc_feature (18)..(189): NCBI GI NO: 18397481 NR Description: heavy-metal-associated domain-containing protein
  misc_feature (30)..(138): NCBI GI NO: 31199749 NR Description: ENSANGP00000021618 [Anopheles gambiae]
  misc_feature (1)..(175): NCBI GI NO: 27754558 NR Description: unknown protein [Arabidopsis thaliana]
  misc_feature (1)..(175): NCBI GI NO: 15239643 NR Description: heavy-metal-associated domain-containing protein
  misc_feature (18)..(189): NCBI GI NO: 30687142 NR Description: heavy-metal-associated domain-containing protein
  misc_feature (1)..(164): NCBI GI NO: 31206687 NR Description: ENSANGP00000010576 [Anopheles gambiae]
  misc_feature (2)..(175): NCBI GI NO: 18397481 NR Description: heavy-metal-associated domain-containing protein
MKGKANASKKDEARLRAGGGGPMGGMLPQQGMMRPPNILGGAGAGFPSTAQMGGGPMGMPVGHPHMGIMQQGGGGGGGGMPGLGFHPGLGGGGMHSGADMLQAAAASGNPVAQQQYMALMQQQQQQMMMMQQQQQQHGNGGLGYPAAMGYGYGRPPMHYPMGYPVLPPHSHAEPYNIFSDENANSCSLM

SEQ ID NO: 21799 - protein, 167 aa, Zea mays subsp. mays
  peptide (1)..(167): Ceres Seq. ID no. 14312750
  misc_feature (81)..(153): Pfam Name: Pfam Description:  Atrophin-1 family
  misc_feature (1)..(167): NCBI GI NO: 6729032 NR Description: unknown protein [Arabidopsis thaliana]
  misc_feature (1)..(167): NCBI GI NO: 30679432 NR Description: glycine-rich protein [Arabidopsis thaliana]
  misc_feature (1)..(167): NCBI GI NO: 18397481 NR Description: heavy-metal-associated domain-containing protein
  misc_feature (8)..(116): NCBI GI NO: 31199749 NR Description: ENSANGP00000021618 [Anopheles gambiae]
  misc_feature (1)..(153): NCBI GI NO: 27754558 NR Description: unknown protein [Arabidopsis thaliana]
  misc_feature (1)..(153): NCBI GI NO: 15239643 NR Description: heavy-metal-associated domain-containing protein
  misc_feature (1)..(167): NCBI GI NO: 30687142 NR Description: heavy-metal-associated domain-containing protein
  misc_feature (1)..(142): NCBI GI NO: 31206687 NR Description: ENSANGP00000010576 [Anopheles gambiae]
  misc_feature (1)..(153): NCBI GI NO: 18397481 NR Description: heavy-metal-associated domain-containing protein
MGGMLPQQGMMRPPNILGGAGAGFPSTAQMGGGPMGMPVGHPHMGIMQQGGGGGGGGMPGLGFHPGLGGGGMHSGADMLQAAAASGNPVAQQQYMALMQQQQQQMMMMQQQQQQHGNGGLGYPAAMGYGYGRPPMHYPMGYPVLPPHSHAEPYNIFSDENANSCSLM

SEQ ID NO: 21800 - DNA, 1489 bp, Zea mays subsp. mays
  misc_feature (1)..(1489): Ceres Seq. ID no. 15179287
aaaaaaaaggttaaatttacccgttccggcggccgaccgtgcacgacctggccgcctgggcgcctggcgagtggcgaccgtctgcctgccctgcacgcccacttgccgccgccccggcttcgccactaccgccatcccgaccggctcgcgcgccaccgccatctcctcctgcgctcgccttgctgccgcggccgcccccaccacaaggacccagaggggctgccctcgatctgactgaccccacgggacaggatggacaaggggaaatcggtggtagccgagctgtcggcatcgtccagctcgctcccgtcgccctccttctatcctttctcaaagaaggctaaacctcggaaattggtcagcttgtgcctgggcacccttggtcagcatcttgaagatatcatcactgatatttcagaatttgctgccttatttccaccccacataacgttggcaattatgtctattgcaaggagaaaaagcctcctgaatgataaagttttgacttctcttgctgaaagctcctggcaaatcctagatatatctggatctgatgttactgatgctggtttggctactgtagcaaatgtttgtagtaatttacgggcagttgatattagttgctgtgaaaaaattactactgctggtgtgtctgagattgtatgccactgcccatccttggagatattgagatgtggaggctgtccaagaagtgaagtaacggcacggaggtgcttgaatctcttgaaacccaaattgaatgctcttgaagaggactcatgggaggaacttgatacactagatataggaggcggtgcagagtccttaagatggcttgtttggccaatgatagatgataagtcaaaggtgactctagctgtcgaatgccctcgtgttactgtcaacccacagccatcgctgttcaacctctccggatattccaaagtcccaatagaagcattgtcaagcgtaccactggaccattcagtggttgaggacattgatcccaaaacatgggctgtttctgctgctcctccaagacctgttgctccagtgaatccaaatgttccaagtgctccgcctgaaataccgatggcagaaaggttcaggctggcctatgtggagagggaagcgaggctggcacccaagagggccaagcgggaaaggcagcggcgtcggcgcgctgagagggactacatgatggttgacatcgacgcaaggtcggtcgcacttgctgctcaagcaagcaggaacctgcgcaagagctgattgtttcttgtctacgctatttgtggagacttgagagtagagaatcatgaggcaagaaatgctgttcaatccttctactttcaaggcaaagatagcatatatatatggacacagtattgtatagttgtattggcagtagcggtagcgtttacactgccatgtactagtaatagaaaaaaatctgagtgggaataacagggaaggcgtgccttatcaaacc

SEQ ID NO: 21801 - protein, 338 aa, Zea mays subsp. mays
  peptide (1)..(338): Ceres Seq. ID no. 15179288
  misc_feature (1)..(338): NCBI GI NO: 30687441 NR Description: expressed protein [Arabidopsis thaliana]
  misc_feature (123)..(338): NCBI GI NO: 7485340 NR Description: hypothetical protein F10M23
  misc_feature (29)..(137): NCBI GI NO: 7485340 NR Description: hypothetical protein F10M23
MDKGKSVVAELSASSSSLPSPSFYPFSKKAKPRKLVSLCLGTLGQHLEDIITDISEFAALFPPHITLAIMSIARRKSLLNDKVLTSLAESSWQILDISGSDVTDAGLATVANVCSNLRAVDISCCEKITTAGVSEIVCHCPSLEILRCGGCPRSEVTARRCLNLLKPKLNALEEDSWEELDTLDIGGGAESLRWLVWPMIDDKSKVTLAVECPRVTVNPQPSLFNLSGYSKVPIEALSSVPLDHSVVEDIDPKTWAVSAAPPRPVAPVNPNVPSAPPEIPMAERFRLAYVEREARLAPKRAKRERQRRRRAERDYMMVDIDARSVALAAQASRNLRKS

SEQ ID NO: 21802 - protein, 269 aa, Zea mays subsp. mays
  peptide (1)..(269): Ceres Seq. ID no. 15179289
  misc_feature (1)..(269): NCBI GI NO: 30687441 NR Description: expressed protein [Arabidopsis thaliana]
  misc_feature (54)..(269): NCBI GI NO: 7485340 NR Description: hypothetical protein F10M23
  misc_feature (1)..(68): NCBI GI NO: 7485340 NR Description: hypothetical protein F10M23
MSIARRKSLLNDKVLTSLAESSWQILDISGSDVTDAGLATVANVCSNLRAVDISCCEKITTAGVSEIVCHCPSLEILRCGGCPRSEVTARRCLNLLKPKLNALEEDSWEELDTLDIGGGAESLRWLVWPMIDDKSKVTLAVECPRVTVNPQPSLFNLSGYSKVPIEALSSVPLDHSVVEDIDPKTWAVSAAPPRPVAPVNPNVPSAPPEIPMAERFRLAYVEREARLAPKRAKRERQRRRRAERDYMMVDIDARSVALAAQASRNLRKS

SEQ ID NO: 21803 - DNA, 586 bp, Zea mays subsp. mays
  misc_feature (1)..(586): Ceres Seq. ID no. 13622600
atgttctgctgtcttgatgagctctacccgaaccacagaggccgtgcatgtcccggagggcgaccgtgcaggagcagatatcctcgcccttcatggactcgccgccgccgcacctcgacgcccccttcttcggggccgatctgatcccctccggccgcctccgtcggatgcgcgggtaccgctactcccccggaggcctcgaggaagagataatgatgtttcagacaagagttttactgggaggaatgaacatgtacgatcgctaccaggattggcgccttgatgtagataacatgacatacgaggagttggtcgagcttggagacagaattggatacgtcaacacagggctacgtgaggacgagattgctcgcagccttaggaaggccaagcacccatccttcggttccttgcgattcgcagcagaagtggaaaggaaatgcactatttgccaagaagaatttcagtcaaatgaagagatgggaaggctagtctgtggccatagctaccatgtgttgtgcatcaagcagtggctctctcagaagacacttgcccggtttgcaaactgccgtcagcaagaatgaaa

SEQ ID NO: 21804 - protein, 178 aa, Zea mays subsp. mays
  peptide (1)..(178): Ceres Seq. ID no. 13622601
  misc_feature (132)..(168): Pfam Name: RING finger Pfam Description: Zinc finger, C3HC4 type
  misc_feature (1)..(113): NCBI GI NO: 34911396 NR Description: RING zinc finger protein-like
  misc_feature (136)..(168): NCBI GI NO: 34911396 NR Description: RING zinc finger protein-like
  misc_feature (1)..(166): NCBI GI NO: 15219544 NR Description: RING zinc finger protein -related
  misc_feature (29)..(168): NCBI GI NO: 15220067 NR Description: zinc finger
  misc_feature (40)..(166): NCBI GI NO: 15220912 NR Description: zinc-finger protein (C-terminal) -related
  misc_feature (40)..(166): NCBI GI NO: 21554695 NR Description: zinc-finger protein (C-terminal), putative
  misc_feature (57)..(166): NCBI GI NO: 25511721 NR Description: F2H15.19 protein - Arabidopsis thaliana
  misc_feature (37)..(168): NCBI GI NO: 38344619 NR Description: OSJNBb0003A12.5
  misc_feature (53)..(168): NCBI GI NO: 11358785 NR Description: RING-H2 finger protein RHG1a
  misc_feature (53)..(167): NCBI GI NO: 7486381 NR Description: hypothetical protein F3L17
MSRRATVQEQISSPFMDSPPPHLDAPFFGADLIPSGRLRRMRGYRYSPGGLEEEIMMFQTRVLLGGMNMYDRYQDWRLDVDNMTYEELVELGDRIGYVNTGLREDEIARSLRKAKHPSFGSLRFAAEVERKCTICQEEFQSNEEMGRLVCGHSYHVLCIKQWLSQKTLARFANCRQQE

SEQ ID NO: 21805 - protein, 163 aa, Zea mays subsp. mays
  peptide (1)..(163): Ceres Seq. ID no. 13622602
  misc_feature (117)..(153): Pfam Name: RING finger Pfam Description: Zinc finger, C3HC4 type
  misc_feature (1)..(98): NCBI GI NO: 34911396 NR Description: RING zinc finger protein-like
  misc_feature (121)..(153): NCBI GI NO: 34911396 NR Description: RING zinc finger protein-like
  misc_feature (1)..(151): NCBI GI NO: 15219544 NR Description: RING zinc finger protein -related
  misc_feature (14)..(153): NCBI GI NO: 15220067 NR Description: zinc finger
  misc_feature (25)..(151): NCBI GI NO: 15220912 NR Description: zinc-finger protein (C-terminal) -related
  misc_feature (25)..(151): NCBI GI NO: 21554695 NR Description: zinc-finger protein (C-terminal), putative
  misc_feature (42)..(151): NCBI GI NO: 25511721 NR Description: F2H15.19 protein - Arabidopsis thaliana
  misc_feature (22)..(153): NCBI GI NO: 38344619 NR Description: OSJNBb0003A12.5
  misc_feature (38)..(153): NCBI GI NO: 11358785 NR Description: RING-H2 finger protein RHG1a
  misc_feature (38)..(152): NCBI GI NO: 7486381 NR Description: hypothetical protein F3L17
MDSPPPHLDAPFFGADLIPSGRLRRMRGYRYSPGGLEEEIMMFQTRVLLGGMNMYDRYQDWRLDVDNMTYEELVELGDRIGYVNTGLREDEIARSLRKAKHPSFGSLRFAAEVERKCTICQEEFQSNEEMGRLVCGHSYHVLCIKQWLSQKTLARFANCRQQE

SEQ ID NO: 21806 - protein, 138 aa, Zea mays subsp. mays
  peptide (1)..(138): Ceres Seq. ID no. 13622603
  misc_feature (92)..(128): Pfam Name: RING finger Pfam Description: Zinc finger, C3HC4 type
  misc_feature (1)..(73): NCBI GI NO: 34911396 NR Description: RING zinc finger protein-like
  misc_feature (96)..(128): NCBI GI NO: 34911396 NR Description: RING zinc finger protein-like
  misc_feature (1)..(126): NCBI GI NO: 15219544 NR Description: RING zinc finger protein -related
  misc_feature (1)..(128): NCBI GI NO: 15220067 NR Description: zinc finger
  misc_feature (1)..(126): NCBI GI NO: 15220912 NR Description: zinc-finger protein (C-terminal) -related
  misc_feature (1)..(126): NCBI GI NO: 21554695 NR Description: zinc-finger protein (C-terminal), putative
  misc_feature (17)..(126): NCBI GI NO: 25511721 NR Description: F2H15.19 protein - Arabidopsis thaliana
  misc_feature (1)..(128): NCBI GI NO: 38344619 NR Description: OSJNBb0003A12.5
  misc_feature (13)..(128): NCBI GI NO: 11358785 NR Description: RING-H2 finger protein RHG1a
  misc_feature (13)..(127): NCBI GI NO: 7486381 NR Description: hypothetical protein F3L17
MRGYRYSPGGLEEEIMMFQTRVLLGGMNMYDRYQDWRLDVDNMTYEELVELGDRIGYVNTGLREDEIARSLRKAKHPSFGSLRFAAEVERKCTICQEEFQSNEEMGRLVCGHSYHVLCIKQWLSQKTLARFANCRQQE

SEQ ID NO: 21807 - DNA, 1417 bp, Zea mays subsp. mays
  misc_feature (1)..(1417): Ceres Seq. ID no. 15227053
aggactgtttctcttgttattagcttctcgtacgtgtgtgttctgttctgttcaccagaaagcaaactacttctttaagtgattccaacagcggaggccggaggccatgggcgcccggcaggcggcggcgttcctgctcggctgcgtcgccgcgctcaccgtcgtcgtgctgctgctgcagcgccgccccgaggagctcaccaccagggcaccactgctgcaagtcttcggaggggaagggggaggggcagggccgtcgtcgtcgccgtctcagtccagctcctcctactcaccaccaccagtagataccaatgccactgccgcagccggcgatccacgccttccgccgccgcccaaccatggcgaggacgaagacgaagaagaagaggagttccgcgggctcgcggcagcggtgtcgcgcgcggcgacggcggacgaccggacggtgatcatcacgtgcgtcaaccaggcgtgggcggcgcccggctcgctgctggacctgttcctggagagcttccgcgtgggcgacggcacggcgcccctgctgcgccacctgctcatcgtggccatggacgccgccgccatggcccggtgccgcgcgctccacccgcactgctacctctactccccggcccgcggcgtcgacttcgcgcccgccaagcccttcctgtccagggactacctggagctcgtctggagcaagctcaggctgcagcgccgcgtgctccgcctcggctacagcctcctcttcaccgacgccgacgtgctgtggctccgcaacccgctcaagcacgtcacggcgtacgccgacatgaccgtctcctgcgacgtcttcttcggcgacccggacggcgtcgacaacttccccaacacgggattcttccacgtcaggcccaacagccgcaccatcgccatggccgccgcgtggcaccgggcccgggacaggttcccgggcaagaacgagcagcccgtcttcaacgccatcaagaagggcctcgtcgccgacctcggcctccgcctgcagtacatagacccggccttcgtcgcgggcttctgcagctacggcagggacctcggcaaggtctgcaccatgcacgccaactgctgcgtcggcctccgcgccaagatcaccgacctccggaccctgctccacgactggaagaactacaccgccatgccgcactgggccaagcaccaggccaagtggaccgtccccggagcgtgcatccattgacggccacgacccatgatgcatcttcctagctacacgtcgatcgcaggaaaaggacactaactagtacaataccatggatgagatgaattcacatatattactctagcttatatgcgtccgaatcgtcagagcttgcgtcttgcgttgcgcctcccgaaagaaaaggaacacaatttagttatc

SEQ ID NO: 21808 - protein, 375 aa, Zea mays subsp. mays
  peptide (1)..(375): Ceres Seq. ID no. 15227054
  misc_feature (26)..(375): NCBI GI NO: 34897440 NR Description: putative regulatory protein
  misc_feature (1)..(375): NCBI GI NO: 19386737 NR Description: P0678F11.26
  misc_feature (8)..(375): NCBI GI NO: 34897442 NR Description: putative regulatory protein
  misc_feature (91)..(375): NCBI GI NO: 19386795 NR Description: OJ1485_B09.3
  misc_feature (86)..(373): NCBI GI NO: 19386738 NR Description: P0678F11.28
  misc_feature (57)..(373): NCBI GI NO: 19386741 NR Description: P0678F11.31
  misc_feature (93)..(375): NCBI GI NO: 34904674 NR Description: P0446G09.1
  misc_feature (107)..(373): NCBI GI NO: 15235236 NR Description: hypothetical protein common family
  misc_feature (87)..(373): NCBI GI NO: 23306127 NR Description: Putataive InsB from Escherichia coli
  misc_feature (113)..(373): NCBI GI NO: 6063544 NR Description: similar to Arabidopsis thaliana chromosome 2
MGARQAAAFLLGCVAALTVVVLLLQRRPEELTTRAPLLQVFGGEGGGAGPSSSPSQSSSSYSPPPVDTNATAAAGDPRLPPPPNHGEDEDEEEEEFRGLAAAVSRAATADDRTVIITCVNQAWAAPGSLLDLFLESFRVGDGTAPLLRHLLIVAMDAAAMARCRALHPHCYLYSPARGVDFAPAKPFLSRDYLELVWSKLRLQRRVLRLGYSLLFTDADVLWLRNPLKHVTAYADMTVSCDVFFGDPDGVDNFPNTGFFHVRPNSRTIAMAAAWHRARDRFPGKNEQPVFNAIKKGLVADLGLRLQYIDPAFVAGFCSYGRDLGKVCTMHANCCVGLRAKITDLRTLLHDWKNYTAMPHWAKHQAKWTVPGACIH

SEQ ID NO: 21809 - protein, 221 aa, Zea mays subsp. mays
  peptide (1)..(221): Ceres Seq. ID no. 15227055
  misc_feature (1)..(221): NCBI GI NO: 34897440 NR Description: putative regulatory protein
  misc_feature (1)..(221): NCBI GI NO: 19386737 NR Description: P0678F11.26
  misc_feature (1)..(221): NCBI GI NO: 34897442 NR Description: putative regulatory protein
  misc_feature (1)..(221): NCBI GI NO: 19386795 NR Description: OJ1485_B09.3
  misc_feature (1)..(219): NCBI GI NO: 19386738 NR Description: P0678F11.28
  misc_feature (1)..(219): NCBI GI NO: 19386741 NR Description: P0678F11.31
  misc_feature (1)..(221): NCBI GI NO: 34904674 NR Description: P0446G09.1
  misc_feature (1)..(219): NCBI GI NO: 15235236 NR Description: hypothetical protein common family
  misc_feature (1)..(219): NCBI GI NO: 23306127 NR Description: Putataive InsB from Escherichia coli
  misc_feature (1)..(219): NCBI GI NO: 6063544 NR Description: similar to Arabidopsis thaliana chromosome 2
MDAAAMARCRALHPHCYLYSPARGVDFAPAKPFLSRDYLELVWSKLRLQRRVLRLGYSLLFTDADVLWLRNPLKHVTAYADMTVSCDVFFGDPDGVDNFPNTGFFHVRPNSRTIAMAAAWHRARDRFPGKNEQPVFNAIKKGLVADLGLRLQYIDPAFVAGFCSYGRDLGKVCTMHANCCVGLRAKITDLRTLLHDWKNYTAMPHWAKHQAKWTVPGACIH

SEQ ID NO: 21810 - protein, 216 aa, Zea mays subsp. mays
  peptide (1)..(216): Ceres Seq. ID no. 15227056
  misc_feature (1)..(216): NCBI GI NO: 34897440 NR Description: putative regulatory protein
  misc_feature (1)..(216): NCBI GI NO: 19386737 NR Description: P0678F11.26
  misc_feature (1)..(216): NCBI GI NO: 34897442 NR Description: putative regulatory protein
  misc_feature (1)..(216): NCBI GI NO: 19386795 NR Description: OJ1485_B09.3
  misc_feature (1)..(214): NCBI GI NO: 19386738 NR Description: P0678F11.28
  misc_feature (1)..(214): NCBI GI NO: 19386741 NR Description: P0678F11.31
  misc_feature (1)..(216): NCBI GI NO: 34904674 NR Description: P0446G09.1
  misc_feature (1)..(214): NCBI GI NO: 15235236 NR Description: hypothetical protein common family
  misc_feature (1)..(214): NCBI GI NO: 23306127 NR Description: Putataive InsB from Escherichia coli
  misc_feature (1)..(214): NCBI GI NO: 6063544 NR Description: similar to Arabidopsis thaliana chromosome 2
MARCRALHPHCYLYSPARGVDFAPAKPFLSRDYLELVWSKLRLQRRVLRLGYSLLFTDADVLWLRNPLKHVTAYADMTVSCDVFFGDPDGVDNFPNTGFFHVRPNSRTIAMAAAWHRARDRFPGKNEQPVFNAIKKGLVADLGLRLQYIDPAFVAGFCSYGRDLGKVCTMHANCCVGLRAKITDLRTLLHDWKNYTAMPHWAKHQAKWTVPGACIH

SEQ ID NO: 21811 - DNA, 671 bp, Zea mays subsp. mays
  misc_feature (1)..(671): Ceres Seq. ID no. 12593692
agagcctctggccgctgcccgaccccgacgccagctgcccagttcttcgccggcgacgagcactccaccagacgagaggggattccaagatgccgagggccaccagcgacgcgaagctcctgatccagtccctcggcaaggcgtacgctgccacaccaacaaatctcaagattattgacctctacgtgggttttgcggttgccactgcccttattcaggttgcttacatgggattggttgggtcgtttcccttcaactccttcctctcaggagtcctttcatgcataggaactgcagttcttgctgtttgcctccgcattcaagtgaacaaagacaacaaagaattcaaggaccttcccccagaaagggcctttgctgatttcgtcctatgcaatctggtgctccacctagtgatcatgaatttcctcggataagcaactgctgcaccatgttggttaaaggttttgtagccctaggttgtggttgctgattgtcgcctttaaatgtttggaactgtcgtgatcgtgatgtcgaatatccatatgatctgttgaaggattacttgtgtaagctgagtattcccggagggagctattagtcgaatggacagtttgcccagcgctgagaatgtaacctagcatgttctttatttgaagaataattcatttttc

SEQ ID NO: 21812 - protein, 143 aa, Zea mays subsp. mays
  peptide (1)..(143): Ceres Seq. ID no. 12593693
  misc_feature (32)..(143): Pfam Name: Pfam Description:  DAD family
  misc_feature (30)..(143): NCBI GI NO: 6014901 NR Description: DEFENDER AGAINST CELL DEATH 1
  misc_feature (30)..(143): NCBI GI NO: 20138058 NR Description: Defender against cell death 2 (DAD-2)
  misc_feature (30)..(143): NCBI GI NO: 20138059 NR Description: Defender against cell death 1 (DAD-1)
  misc_feature (30)..(143): NCBI GI NO: 20138097 NR Description: Defender against cell death 1 (DAD-1) (CitDAD-1-1)
  misc_feature (33)..(143): NCBI GI NO: 20138057 NR Description: Defender against cell death 1 (DAD-1)
  misc_feature (33)..(143): NCBI GI NO: 29423681 NR Description: DAD1 [Petunia x hybrida]
  misc_feature (32)..(143): NCBI GI NO: 4126407 NR Description: homolog to defender against apoptotic death 1
  misc_feature (30)..(143): NCBI GI NO: 20138029 NR Description: Defender against cell death 1 (DAD-1)
  misc_feature (29)..(143): NCBI GI NO: 25313138 NR Description: defender against cell death protein
  misc_feature (30)..(143): NCBI GI NO: 4106446 NR Description: defender against apoptotic death 1 homolog
SLWPLPDPDASCPVLRRRRALHQTRGDSKMPRATSDAKLLIQSLGKAYAATPTNLKIIDLYVGFAVATALIQVAYMGLVGSFPFNSFLSGVLSCIGTAVLAVCLRIQVNKDNKEFKDLPPERAFADFVLCNLVLHLVIMNFLG

SEQ ID NO: 21813 - protein, 114 aa, Zea mays subsp. mays
  peptide (1)..(114): Ceres Seq. ID no. 12593694
  misc_feature (3)..(114): Pfam Name: Pfam Description:  DAD family
  misc_feature (1)..(114): NCBI GI NO: 6014901 NR Description: DEFENDER AGAINST CELL DEATH 1
  misc_feature (1)..(114): NCBI GI NO: 20138058 NR Description: Defender against cell death 2 (DAD-2)
  misc_feature (1)..(114): NCBI GI NO: 20138059 NR Description: Defender against cell death 1 (DAD-1)
  misc_feature (1)..(114): NCBI GI NO: 20138097 NR Description: Defender against cell death 1 (DAD-1) (CitDAD-1-1)
  misc_feature (4)..(114): NCBI GI NO: 20138057 NR Description: Defender against cell death 1 (DAD-1)
  misc_feature (4)..(114): NCBI GI NO: 29423681 NR Description: DAD1 [Petunia x hybrida]
  misc_feature (3)..(114): NCBI GI NO: 4126407 NR Description: homolog to defender against apoptotic death 1
  misc_feature (1)..(114): NCBI GI NO: 20138029 NR Description: Defender against cell death 1 (DAD-1)
  misc_feature (1)..(114): NCBI GI NO: 25313138 NR Description: defender against cell death protein
  misc_feature (1)..(114): NCBI GI NO: 4106446 NR Description: defender against apoptotic death 1 homolog
MPRATSDAKLLIQSLGKAYAATPTNLKIIDLYVGFAVATALIQVAYMGLVGSFPFNSFLSGVLSCIGTAVLAVCLRIQVNKDNKEFKDLPPERAFADFVLCNLVLHLVIMNFLG

SEQ ID NO: 21814 - DNA, 1378 bp, Zea mays subsp. mays
  misc_feature (1)..(1378): Ceres Seq. ID no. 14303290
ctctttctcttccaaggagaacaaccaccgtctctctctcccccgtctatctcttcttggagcctggagaagaggaaggatcagggaacgggggaagaggttgctgccacagctcaggtctcaagtttggattcagacaagtagacaaacaccagttggttaagatggcagctggtttccagatcggtgtgatcgggtcacttgcactctctgttgcatcttcagtttccattgtcctctgcaacaaagctctcatcagcacacttggttttccattcgctacaacattaacaagctggcatctgatggtgaccttctgcaccctccatgtggcacagcgcttacgtttcttcgagcccaaggcaattgatggacagacagtcatactctttgggttgctgaatggcacgtcaattggtcttctcaatctgagtttaggattcaactccattggattctaccagatgacaaaattggcgatcatacctttcactgtgctattggagactatcttcttgaagaaaagattcagcgagagtatcaagctttctcttctggtcttacttcttggagtaggaattgcttcagttactgatctcaagctaaatctgcttgggtccatcctttctggcctcgccattgccaccacctgtgttggccaaattctcacaaatacaatacagaagaggttgaaggtctcctcaacgcaacttctgtaccaatctgcgccttaccaggcggcaattctgtttgcatctgggccttttgtagatcaactccttactaaccggagtgtctttgcacacaaatactctgctacagttctgggtttcgttgtcctctcttgcttgattgcggtgtctgtgaacttcagtacatttcttgtgattggaacaacatccccagtgacgtaccaggtgcttggtcaccttaagacatgtctggttctatcatttggctacactctattacatgatcctttcactctaaggaacatattgggcattctaattgccatatttgggatggcactatactcctatttctctgtaagagagggcaagaagaagtcagcaaatgatgccctgccagtttcacagatgccagataaggaggttgaaccgcttttggcaactaaagacagcaatgacaccaagaaagcaaatggtttatctcacgactgctagggcttttcttgtagtttaggtctagtatgaactgcccttagaatttaatggacttggaaagccattcttttcattcttgatttcctttttaggaaaggaagattttaaaatttgtagataatgtgtattttgacgttaaagttattgtttgattgtattctacacacagcagttccatctgaagttttact

SEQ ID NO: 21815 - protein, 394 aa, Zea mays subsp. mays
  peptide (1)..(394): Ceres Seq. ID no. 14303291
  misc_feature (216)..(347): Pfam Name: Pfam Description:  Integral membrane protein DUF6
  misc_feature (60)..(386): NCBI GI NO: 30683853 NR Description: transporter-related [Arabidopsis thaliana]
  misc_feature (57)..(376): NCBI GI NO: 13384378 NR Description: putative phosphate translocator
  misc_feature (56)..(390): NCBI GI NO: 27311731 NR Description: putative integral membrane protein
  misc_feature (59)..(389): NCBI GI NO: 22329373 NR Description: transporter-related [Arabidopsis thaliana]
  misc_feature (59)..(393): NCBI GI NO: 34896140 NR Description: P0701D05.25
  misc_feature (59)..(389): NCBI GI NO: 13699188 NR Description: putative glucose-6-phosphate/phosphate-tranlocat or
  misc_feature (155)..(376): NCBI GI NO: 37535412 NR Description: putative glucose-6-phosphate/phosphate-translocator
  misc_feature (155)..(389): NCBI GI NO: 25406945 NR Description: hypothetical protein
  misc_feature (70)..(383): NCBI GI NO: 15234794 NR Description: transporter-related [Arabidopsis thaliana]
  misc_feature (64)..(366): NCBI GI NO: 18420440 NR Description: transporter-related [Arabidopsis thaliana]
LSLPRRTTTVSLSPVYLFLEPGEEEGSGNGGRGCCHSSGLKFGFRQVDKHQLVKMAAGFQIGVIGSLALSVASSVSIVLCNKALISTLGFPFATTLTSWHLMVTFCTLHVAQRLRFFEPKAIDGQTVILFGLLNGTSIGLLNLSLGFNSIGFYQMTKLAIIPFTVLLETIFLKKRFSESIKLSLLVLLLGVGIASVTDLKLNLLGSILSGLAIATTCVGQILTNTIQKRLKVSSTQLLYQSAPYQAAILFASGPFVDQLLTNRSVFAHKYSATVLGFVVLSCLIAVSVNFSTFLVIGTTSPVTYQVLGHLKTCLVLSFGYTLLHDPFTLRNILGILIAIFGMALYSYFSVREGKKKSANDALPVSQMPDKEVEPLLATKDSNDTKKANGLSHDC

SEQ ID NO: 21816 - protein, 340 aa, Zea mays subsp. mays
  peptide (1)..(340): Ceres Seq. ID no. 14303292
  misc_feature (162)..(293): Pfam Name: Pfam Description:  Integral membrane protein DUF6
  misc_feature (6)..(332): NCBI GI NO: 30683853 NR Description: transporter-related [Arabidopsis thaliana]
  misc_feature (3)..(322): NCBI GI NO: 13384378 NR Description: putative phosphate translocator
  misc_feature (2)..(336): NCBI GI NO: 27311731 NR Description: putative integral membrane protein
  misc_feature (5)..(335): NCBI GI NO: 22329373 NR Description: transporter-related [Arabidopsis thaliana]
  misc_feature (5)..(339): NCBI GI NO: 34896140 NR Description: P0701D05.25
  misc_feature (5)..(335): NCBI GI NO: 13699188 NR Description: putative glucose-6-phosphate/phosphate-tranlocat or
  misc_feature (101)..(322): NCBI GI NO: 37535412 NR Description: putative glucose-6-phosphate/phosphate-translocator
  misc_feature (101)..(335): NCBI GI NO: 25406945 NR Description: hypothetical protein
  misc_feature (16)..(329): NCBI GI NO: 15234794 NR Description: transporter-related [Arabidopsis thaliana]
  misc_feature (10)..(312): NCBI GI NO: 18420440 NR Description: transporter-related [Arabidopsis thaliana]
MAAGFQIGVIGSLALSVASSVSIVLCNKALISTLGFPFATTLTSWHLMVTFCTLHVAQRLRFFEPKAIDGQTVILFGLLNGTSIGLLNLSLGFNSIGFYQMTKLAIIPFTVLLETIFLKKRFSESIKLSLLVLLLGVGIASVTDLKLNLLGSILSGLAIATTCVGQILTNTIQKRLKVSSTQLLYQSAPYQAAILFASGPFVDQLLTNRSVFAHKYSATVLGFVVLSCLIAVSVNFSTFLVIGTTSPVTYQVLGHLKTCLVLSFGYTLLHDPFTLRNILGILIAIFGMALYSYFSVREGKKKSANDALPVSQMPDKEVEPLLATKDSNDTKKANGLSHDC

SEQ ID NO: 21817 - protein, 293 aa, Zea mays subsp. mays
  peptide (1)..(293): Ceres Seq. ID no. 14303293
  misc_feature (115)..(246): Pfam Name: Pfam Description:  Integral membrane protein DUF6
  misc_feature (1)..(285): NCBI GI NO: 30683853 NR Description: transporter-related [Arabidopsis thaliana]
  misc_feature (1)..(275): NCBI GI NO: 13384378 NR Description: putative phosphate translocator
  misc_feature (1)..(289): NCBI GI NO: 27311731 NR Description: putative integral membrane protein
  misc_feature (1)..(288): NCBI GI NO: 22329373 NR Description: transporter-related [Arabidopsis thaliana]
  misc_feature (1)..(292): NCBI GI NO: 34896140 NR Description: P0701D05.25
  misc_feature (1)..(288): NCBI GI NO: 13699188 NR Description: putative glucose-6-phosphate/phosphate-tranlocat or
  misc_feature (54)..(275): NCBI GI NO: 37535412 NR Description: putative glucose-6-phosphate/phosphate-translocator
  misc_feature (54)..(288): NCBI GI NO: 25406945 NR Description: hypothetical protein
  misc_feature (1)..(282): NCBI GI NO: 15234794 NR Description: transporter-related [Arabidopsis thaliana]
  misc_feature (1)..(265): NCBI GI NO: 18420440 NR Description: transporter-related [Arabidopsis thaliana]
MVTFCTLHVAQRLRFFEPKAIDGQTVILFGLLNGTSIGLLNLSLGFNSIGFYQMTKLAIIPFTVLLETIFLKKRFSESIKLSLLVLLLGVGIASVTDLKLNLLGSILSGLAIATTCVGQILTNTIQKRLKVSSTQLLYQSAPYQAAILFASGPFVDQLLTNRSVFAHKYSATVLGFVVLSCLIAVSVNFSTFLVIGTTSPVTYQVLGHLKTCLVLSFGYTLLHDPFTLRNILGILIAIFGMALYSYFSVREGKKKSANDALPVSQMPDKEVEPLLATKDSNDTKKANGLSHDC

SEQ ID NO: 21818 - DNA, 601 bp, Zea mays subsp. mays
  misc_feature (1)..(601): Ceres Seq. ID no. 13622541
aacaaatcgacgaagtccctgaactcatttccagcctctccgcgccccaaccaccgccaccgcgtgcgagatcacaagcctccacaccgtgaccaccggcgccgctgcggcgtcctgagcaggcggcgagcctcgtgcacagggcaggctcggctcgccggggcggacgagatgagcgggcacgactccaagtacttctctaccaccaagaagggggagatccccgagctgaaggaggagctcaactcccagtacaaggacaagagaaaagatgctgtcaagaaagtgattgctgctatgactgtaggaaaagatgtctcatcattgttcactgatgttgtgaactgcatgcagactgagaacttggagctcaagaaactagtatatttgtatctcatcaactatgctaaaagtcaacctgatcttgccattcttgctgtgaacacatttgttaaggttagaaattctttttcgtaaacgcgtaggagaactgcgcaccaatatattaagaagaatatagaaaaggtcaaaaatagaccacaacaagaaaaaccaccttacggtggcaaaaaaacccggaaatatacaaaagggtccatct

SEQ ID NO: 21819 - protein, 158 aa, Zea mays subsp. mays
  peptide (1)..(158): Ceres Seq. ID no. 13622542
  misc_feature (70)..(152): Pfam Name: Pfam Description:  Adaptin N terminal region
  misc_feature (58)..(152): NCBI GI NO: 7484822 NR Description: beta-adaptin homolog F16G20
  misc_feature (58)..(152): NCBI GI NO: 7385053 NR Description: beta-adaptin-like protein B [Arabidopsis thaliana]
  misc_feature (58)..(152): NCBI GI NO: 15233354 NR Description: beta-adaptin, putative [Arabidopsis thaliana]
  misc_feature (58)..(152): NCBI GI NO: 18086376 NR Description: AT4g23460/F16G20_160 [Arabidopsis thaliana]
  misc_feature (58)..(152): NCBI GI NO: 15236506 NR Description: beta-adaptin, putative [Arabidopsis thaliana]
  misc_feature (61)..(152): NCBI GI NO: 7385055 NR Description: beta-adaptin-like protein C [Arabidopsis thaliana]
  misc_feature (62)..(153): NCBI GI NO: 32699183 NR Description: Adaptin or adaptin-related protein protein 3
  misc_feature (41)..(152): NCBI GI NO: 31242911 NR Description: ENSANGP00000013886 [Anopheles gambiae]
  misc_feature (62)..(152): NCBI GI NO: 21465527 NR Description: Chain B, Ap2 Clathrin Adaptor Core
  misc_feature (62)..(152): NCBI GI NO: 32699184 NR Description: Adaptin or adaptin-related protein protein 3
NKSTKSLNSFPASPRPNHRHRVRDHKPPHRDHRRRCGVLSRRRASCTGQARLAGADEMSGHDSKYFSTTKKGEIPELKEELNSQYKDKRKDAVKKVIAAMTVGKDVSSLFTDVVNCMQTENLELKKLVYLYLINYAKSQPDLAILAVNTFVKVRNSFS

SEQ ID NO: 21820 - protein, 101 aa, Zea mays subsp. mays
  peptide (1)..(101): Ceres Seq. ID no. 13622543
  misc_feature (13)..(95): Pfam Name: Pfam Description:  Adaptin N terminal region
  misc_feature (1)..(95): NCBI GI NO: 7484822 NR Description: beta-adaptin homolog F16G20
  misc_feature (1)..(95): NCBI GI NO: 7385053 NR Description: beta-adaptin-like protein B [Arabidopsis thaliana]
  misc_feature (1)..(95): NCBI GI NO: 18086376 NR Description: AT4g23460/F16G20_160 [Arabidopsis thaliana]
  misc_feature (1)..(95): NCBI GI NO: 15236506 NR Description: beta-adaptin, putative [Arabidopsis thaliana]
  misc_feature (1)..(95): NCBI GI NO: 15233354 NR Description: beta-adaptin, putative [Arabidopsis thaliana]
  misc_feature (4)..(95): NCBI GI NO: 7385055 NR Description: beta-adaptin-like protein C [Arabidopsis thaliana]
  misc_feature (5)..(96): NCBI GI NO: 32699183 NR Description: Adaptin or adaptin-related protein protein 3
  misc_feature (1)..(95): NCBI GI NO: 31242911 NR Description: ENSANGP00000013886 [Anopheles gambiae]
  misc_feature (5)..(95): NCBI GI NO: 21465527 NR Description: Chain B, Ap2 Clathrin Adaptor Core
  misc_feature (5)..(95): NCBI GI NO: 32699184 NR Description: Adaptin or adaptin-related protein protein 3
MSGHDSKYFSTTKKGEIPELKEELNSQYKDKRKDAVKKVIAAMTVGKDVSSLFTDVVNCMQTENLELKKLVYLYLINYAKSQPDLAILAVNTFVKVRNSFS

SEQ ID NO: 21821 - DNA, 970 bp, Zea mays subsp. mays
  misc_feature (1)..(970): Ceres Seq. ID no. 14305939
gcacaagcgtccacagctcttgcactagctagagaccgaacagagagagattgaagaaccatgatgaggtctggccttatctcgctatgtttccacctagccctggccatcacactggctgcaagtgttcctggccttgctcgtagtagggtaatcgacatggaaccgcaactcaaaccgacgctgcaactagaaccaaagcatggtgtatctcaaccagacagaaaccaagaacccaaaccgacaccacagcctgagccaaaaccagagcctaaaccggaaccgaaacctgcaccacaaccagaccccaaacccgcaccacagccggacccaaaacccgcaccacaaccggacccaaaaccagaacccaaacctacaccacagccagacccaaaaccttcaccacaaccaggcccagagccgaaacccaagccagcgccacagcctgaaccaaaacccacactgcaaccagatccgaaacctgagccaaaaccaacaccacaaccacccttcccacagcccgagcctcaaccagatcccgaaccccaacccgaaccatccaagccaggccctaaaccccaacctgaaccatccaagctagaacctcagccaggatctaaacctacaccggagccaaaaccctaaccagatccatcgaagcggagccaccgtcgtctcttccaccaccatttggcacgggcgtcgtggaagggaactgagaggagcatagtggaaccgatcatcatcgtggatgccatctatagcttttggctatgactgataagtaatactgtttgtgtaagagtgagctctcttttttatatagggtgtgtgtattgtgtgtagtactatatttggacgatgtgtgtgtacccacctttttccgtgtgtttccatcagcatgcatccatgatccatgtatatgtcttgctaagtttgtattatcaatgaataaaaaaacatgcctttt

SEQ ID NO: 21822 - protein, 194 aa, Zea mays subsp. mays
  peptide (1)..(194): Ceres Seq. ID no. 14305940
  misc_feature (50)..(121): Pfam Name: PARP Pfam Description: Procyclic acidic repetitive protein
  misc_feature (2)..(194): NCBI GI NO: 22830951 NR Description: contains ESTsAU077704
  misc_feature (2)..(194): NCBI GI NO: 22830955 NR Description: contains ESTsAU077703
  misc_feature (35)..(194): NCBI GI NO: 4138732 NR Description: proline-rich protein [Zea mays]
  misc_feature (35)..(194): NCBI GI NO: 4138732 NR Description: proline-rich protein [Zea mays]
  misc_feature (35)..(194): NCBI GI NO: 4138732 NR Description: proline-rich protein [Zea mays]
  misc_feature (35)..(194): NCBI GI NO: 29367369 NR Description: proline-rich protein
  misc_feature (33)..(194): NCBI GI NO: 29367369 NR Description: proline-rich protein
  misc_feature (35)..(194): NCBI GI NO: 4138732 NR Description: proline-rich protein [Zea mays]
  misc_feature (35)..(194): NCBI GI NO: 4138732 NR Description: proline-rich protein [Zea mays]
  misc_feature (35)..(194): NCBI GI NO: 4138732 NR Description: proline-rich protein [Zea mays]
MMRSGLISLCFHLALAITLAASVPGLARSRVIDMEPQLKPTLQLEPKHGVSQPDRNQEPKPTPQPEPKPEPKPEPKPAPQPDPKPAPQPDPKPAPQPDPKPEPKPTPQPDPKPSPQPGPEPKPKPAPQPEPKPTLQPDPKPEPKPTPQPPFPQPEPQPDPEPQPEPSKPGPKPQPEPSKLEPQPGSKPTPEPKP

SEQ ID NO: 21823 - protein, 193 aa, Zea mays subsp. mays
  peptide (1)..(193): Ceres Seq. ID no. 14305941
  misc_feature (49)..(120): Pfam Name: PARP Pfam Description: Procyclic acidic repetitive protein
  misc_feature (1)..(193): NCBI GI NO: 22830951 NR Description: contains ESTsAU077704
  misc_feature (1)..(193): NCBI GI NO: 22830955 NR Description: contains ESTsAU077703
  misc_feature (34)..(193): NCBI GI NO: 4138732 NR Description: proline-rich protein [Zea mays]
  misc_feature (34)..(193): NCBI GI NO: 4138732 NR Description: proline-rich protein [Zea mays]
  misc_feature (34)..(193): NCBI GI NO: 4138732 NR Description: proline-rich protein [Zea mays]
  misc_feature (34)..(193): NCBI GI NO: 29367369 NR Description: proline-rich protein
  misc_feature (32)..(193): NCBI GI NO: 29367369 NR Description: proline-rich protein
  misc_feature (34)..(193): NCBI GI NO: 4138732 NR Description: proline-rich protein [Zea mays]
  misc_feature (34)..(193): NCBI GI NO: 4138732 NR Description: proline-rich protein [Zea mays]
  misc_feature (34)..(193): NCBI GI NO: 4138732 NR Description: proline-rich protein [Zea mays]
MRSGLISLCFHLALAITLAASVPGLARSRVIDMEPQLKPTLQLEPKHGVSQPDRNQEPKPTPQPEPKPEPKPEPKPAPQPDPKPAPQPDPKPAPQPDPKPEPKPTPQPDPKPSPQPGPEPKPKPAPQPEPKPTLQPDPKPEPKPTPQPPFPQPEPQPDPEPQPEPSKPGPKPQPEPSKLEPQPGSKPTPEPKP

SEQ ID NO: 21824 - protein, 161 aa, Zea mays subsp. mays
  peptide (1)..(161): Ceres Seq. ID no. 14305942
  misc_feature (17)..(88): Pfam Name: PARP Pfam Description: Procyclic acidic repetitive protein
  misc_feature (1)..(161): NCBI GI NO: 22830951 NR Description: contains ESTsAU077704
  misc_feature (1)..(161): NCBI GI NO: 22830955 NR Description: contains ESTsAU077703
  misc_feature (2)..(161): NCBI GI NO: 4138732 NR Description: proline-rich protein [Zea mays]
  misc_feature (2)..(161): NCBI GI NO: 4138732 NR Description: proline-rich protein [Zea mays]
  misc_feature (2)..(161): NCBI GI NO: 4138732 NR Description: proline-rich protein [Zea mays]
  misc_feature (2)..(161): NCBI GI NO: 29367369 NR Description: proline-rich protein
  misc_feature (1)..(161): NCBI GI NO: 29367369 NR Description: proline-rich protein
  misc_feature (2)..(161): NCBI GI NO: 4138732 NR Description: proline-rich protein [Zea mays]
  misc_feature (2)..(161): NCBI GI NO: 4138732 NR Description: proline-rich protein [Zea mays]
  misc_feature (2)..(161): NCBI GI NO: 4138732 NR Description: proline-rich protein [Zea mays]
MEPQLKPTLQLEPKHGVSQPDRNQEPKPTPQPEPKPEPKPEPKPAPQPDPKPAPQPDPKPAPQPDPKPEPKPTPQPDPKPSPQPGPEPKPKPAPQPEPKPTLQPDPKPEPKPTPQPPFPQPEPQPDPEPQPEPSKPGPKPQPEPSKLEPQPGSKPTPEPKP

SEQ ID NO: 21825 - protein, 132 aa, Zea mays subsp. mays
  peptide (1)..(132): Ceres Seq. ID no. 14305943
  misc_feature (1)..(132): Pfam Name: Pfam Description:  Ubiquitin carboxyl-terminal hydrolase
MVYLNQTETKNPNRHHSLSQNQSLNRNRNLHHNQTPNPHHSRTQNPHHNRTQNQNPNLHHSQTQNLHHNQAQSRNPSQRHSLNQNPHCNQIRNLSQNQHHNHPSHSPSLNQIPNPNPNHPSQALNPNLNHPS

SEQ ID NO: 21826 - DNA, 1239 bp, Zea mays subsp. mays
  misc_feature (1)..(1239): Ceres Seq. ID no. 14302164
taggctctaggttctttgaacattttaagttgttcactccaagtgtgaaaccaggtccctatttggacctgaagtgaagcattttaaagttgaaggacccagattctcacttcgagagtttatgaacctagatgagaatctaaggctctggaagttatggaacttgaccagaaaatagatctagttcatgagcttgatggtcatattatgcaatgtgtccgtgatcaaaatggaaatcacgttatacagaagtgcattgagtgtgtccccacagaacatattggttttgtagtgtctgcttttcagggacaagttactagcctttcaatgcatccatatggctgccgtgtaattcagagaatcttggagcactgcggtggtaactcacaaggccagtgcataatagacgagatattacagtgggtgtgcatccttgcgcaggatcagtatggcaactatgttacacagcatgttctagaaagaggaaaagctcatgagaggagccaaattattactaaattggccgggcaggttgttaccatgagccaaaataaatatgcatcaaatgtgatagagaagtgttttcaacatggtgatattgcggagcgggatcttctgatcagacggattgtggagcagacagagggcaacaacaatttattggcaatgatgaaggaccagtatgctaattacgtggtccataagatacttgaaacttgcaacgaggatcagcgggagcttctgctcagccacgtaaaggatcatatgcaagcattgaggaagtacacatacggcaagcacatcgtaagccgagtcgagcagctctgtggcgacgttgtcaccctttcaggaactgccgagtcaggttcttgaaacgaaccgccgcctaattcttcataggctggagggtgtcctgctcttttgctcattccgtcagtgacgaagaaagcaaaacggatcaagtctaactctggcgcttcagaacagactaacaaagctgtcgtcgaagattgtataggtatgactctgttcagggatagtcttgaggttatagaacagaagggtagtggtgtgcatcagtgtatctgtttactggataatagtggttggttaggtgtgtgcagaaaaagtttagcgctatggtttgtatgtgatacatattaactgtgccttggaatgttcatatgttgtcctgattgcgtgtgatatctctcgttcagttcaagttgcgttttctgc

SEQ ID NO: 21827 - protein, 238 aa, Zea mays subsp. mays
  peptide (1)..(238): Ceres Seq. ID no. 14302165
  misc_feature (12)..(46): Pfam Name: Pfam Description:  Pumilio-family RNA binding repeat
  misc_feature (1)..(237): NCBI GI NO: 9293981 NR Description: RNA binding protein-like [Arabidopsis thaliana]
  misc_feature (1)..(237): NCBI GI NO: 30685690 NR Description: pumilio-family RNA-binding protein, putative
  misc_feature (1)..(223): NCBI GI NO: 34908236 NR Description: putative pumilio/Mpt5 family RNA-binding protein
  misc_feature (1)..(204): NCBI GI NO: 8071634 NR Description: pumilio domain-containing protein PPD1
  misc_feature (1)..(223): NCBI GI NO: 14719326 NR Description: putative pumilio/Mpt5 family RNA-binding protein
  misc_feature (1)..(223): NCBI GI NO: 20513851 NR Description: BPM [Hordeum vulgare]
  misc_feature (1)..(223): NCBI GI NO: 15227038 NR Description: pumilio-family RNA-binding protein, putative
  misc_feature (1)..(223): NCBI GI NO: 15227052 NR Description: pumilio-family RNA-binding protein, putative
  misc_feature (1)..(223): NCBI GI NO: 15227051 NR Description: pumilio-family RNA-binding protein, putative
  misc_feature (1)..(223): NCBI GI NO: 20465637 NR Description: putative pumilio/Mpt5 family RNA-binding protein
MELDQKIDLVHELDGHIMQCVRDQNGNHVIQKCIECVPTEHIGFVVSAFQGQVTSLSMHPYGCRVIQRILEHCGGNSQGQCIIDEILQWVCILAQDQYGNYVTQHVLERGKAHERSQIITKLAGQVVTMSQNKYASNVIEKCFQHGDIAERDLLIRRIVEQTEGNNNLLAMMKDQYANYVVHKILETCNEDQRELLLSHVKDHMQALRKYTYGKHIVSRVEQLCGDVVTLSGTAESGS

SEQ ID NO: 21828 - protein, 221 aa, Zea mays subsp. mays
  peptide (1)..(221): Ceres Seq. ID no. 14302166
  misc_feature (1)..(29): Pfam Name: Pfam Description:  Pumilio-family RNA binding repeat
  misc_feature (1)..(220): NCBI GI NO: 9293981 NR Description: RNA binding protein-like [Arabidopsis thaliana]
  misc_feature (1)..(220): NCBI GI NO: 30685690 NR Description: pumilio-family RNA-binding protein, putative
  misc_feature (1)..(206): NCBI GI NO: 34908236 NR Description: putative pumilio/Mpt5 family RNA-binding protein
  misc_feature (1)..(187): NCBI GI NO: 8071634 NR Description: pumilio domain-containing protein PPD1
  misc_feature (1)..(206): NCBI GI NO: 14719326 NR Description: putative pumilio/Mpt5 family RNA-binding protein
  misc_feature (1)..(206): NCBI GI NO: 20513851 NR Description: BPM [Hordeum vulgare]
  misc_feature (1)..(206): NCBI GI NO: 15227038 NR Description: pumilio-family RNA-binding protein, putative
  misc_feature (1)..(206): NCBI GI NO: 15227052 NR Description: pumilio-family RNA-binding protein, putative
  misc_feature (1)..(206): NCBI GI NO: 15227051 NR Description: pumilio-family RNA-binding protein, putative
  misc_feature (1)..(206): NCBI GI NO: 20465637 NR Description: putative pumilio/Mpt5 family RNA-binding protein
MQCVRDQNGNHVIQKCIECVPTEHIGFVVSAFQGQVTSLSMHPYGCRVIQRILEHCGGNSQGQCIIDEILQWVCILAQDQYGNYVTQHVLERGKAHERSQIITKLAGQVVTMSQNKYASNVIEKCFQHGDIAERDLLIRRIVEQTEGNNNLLAMMKDQYANYVVHKILETCNEDQRELLLSHVKDHMQALRKYTYGKHIVSRVEQLCGDVVTLSGTAESGS

SEQ ID NO: 21829 - protein, 181 aa, Zea mays subsp. mays
  peptide (1)..(181): Ceres Seq. ID no. 14302167
  misc_feature (1)..(180): NCBI GI NO: 9293981 NR Description: RNA binding protein-like [Arabidopsis thaliana]
  misc_feature (1)..(180): NCBI GI NO: 30685690 NR Description: pumilio-family RNA-binding protein, putative
  misc_feature (1)..(166): NCBI GI NO: 34908236 NR Description: putative pumilio/Mpt5 family RNA-binding protein
  misc_feature (1)..(147): NCBI GI NO: 8071634 NR Description: pumilio domain-containing protein PPD1
  misc_feature (1)..(166): NCBI GI NO: 14719326 NR Description: putative pumilio/Mpt5 family RNA-binding protein
  misc_feature (1)..(166): NCBI GI NO: 20513851 NR Description: BPM [Hordeum vulgare]
  misc_feature (1)..(166): NCBI GI NO: 15227038 NR Description: pumilio-family RNA-binding protein, putative
  misc_feature (1)..(166): NCBI GI NO: 15227052 NR Description: pumilio-family RNA-binding protein, putative
  misc_feature (1)..(166): NCBI GI NO: 15227051 NR Description: pumilio-family RNA-binding protein, putative
  misc_feature (1)..(166): NCBI GI NO: 20465637 NR Description: putative pumilio/Mpt5 family RNA-binding protein
MHPYGCRVIQRILEHCGGNSQGQCIIDEILQWVCILAQDQYGNYVTQHVLERGKAHERSQIITKLAGQVVTMSQNKYASNVIEKCFQHGDIAERDLLIRRIVEQTEGNNNLLAMMKDQYANYVVHKILETCNEDQRELLLSHVKDHMQALRKYTYGKHIVSRVEQLCGDVVTLSGTAESGS

SEQ ID NO: 21830 - DNA, 1904 bp, Zea mays subsp. mays
  misc_feature (1)..(1904): Ceres Seq. ID no. 15180208
accattcgcccccctcacgtcccatcgcgccgctcccttcgtcctggggtgtcctcctccatggccaccgccaccgccgcctgccgctcgcccacggccgccgccgccgcgccctgacgctgctgctgctgctagactgctagaggaggaggccggggcaggcagctcgcgagctcgatcgcctggcgggcccgagctggagtcgatggtgctggatctcaatgccgagtcgccgacgcccggctcggcctcggccgcctcgagctccagcgtcgtagtgggcgggggcttcttccggttcgacctgctcggagggacacccgacgaggagggttgctcgccctcgccacccatcgtgacgcgccagctcttccccttgccgtacccggacgctgcaggtagcaccgccgcctcgacggcgtcgaacgggtcgccgccgccggaggtggcgggggcatgggcgcgccgcccagcggatctcggggcgccggcgctggcacaggggaaggtgatgtctgcgccttcgtcgcccgcggttttgtctcctgccgccgggaagaagagccggcgggggcccaggtcgcggagctcgcaataccggggcgtcaccttctacaggaggaccggccgctgggagtcacacatctgggactgcgggaagcaggtctacctgggtggatttgatactgcgcacgccgcagcaagggcctatgatcgcgctgccatcaagttcagaggccttgacgccgacatcaacttccagttgaaggactatgaagatgacttgaagcagatgaggaattggactaaggaggagtttgttcacatactccgacgtcaaagcactgggtttgccagggggagctcaaagtaccgcggtgtgacactacacaagtgtggtcggtgggaagctcggatgggtcagcttctcggaaagaagtacatctaccttggtctatttgacagtgaaatcgaagcagcaagagcgtatgatagggcagccattcgcttcaatggaccggatgctgttaggaactttgattctgtttcctatgatggagatgtcccacttccacctgcaattgagaaagatgtggttgatggagacatccttgatctgaatttgaggatttcacaacctaacgtgcatgatctcagaagtgatggtaccctgactggttttggattaagttgtaattctcctgaagcttcaagctccattgtttctcagccaatgggcccccagtggcctgtccatcctcacagcagatcgatgcggccccagcatccacatctgtatgcatctccttgtccaggcttctttgtgaacctcagggaggcgcctatgcaggaagaggagaaccggtccgagccggcgtgtccccagccgttcccctcctgggcatggcaaacgcagggctcccgtgccccagttctccctgccaccactgcagcatcatcaggattctctaccgccgctgccaccggcgtggacgcggccacagccggccacagcgtgccgccgccgtctggtagcctccggcagttctcgggctaccaccagctccgcttccccccaaccgcctgacggagacagaccacctcctgttgagttggcggcggcggcggcgtctcatagctggccggtggttggctggctgcccatgcaacgccacgccggtgggtgcgggtcggtattcggtaacagtcgccactgttgggtatggttttgtgggactacagaggatgcagtgatctctcgctgctgctgtgtgctgtctctctcgctccctctacccacccacacctgtttgtaatatgaatttatcgccctctcgcgctcgtgattcgtccatcttcgtttcgttttgatggccaccggatgggatcatgagcgtgttgcg

SEQ ID NO: 21831 - protein, 528 aa, Zea mays subsp. mays
  peptide (1)..(528): Ceres Seq. ID no. 15180209
  misc_feature (196)..(259): Pfam Name: Pfam Description:  AP2 domain
  misc_feature (69)..(528): NCBI GI NO: 34900512 NR Description: putative indeterminate spikelet 1
  misc_feature (69)..(513): NCBI GI NO: 18476518 NR Description: APETALA2-like protein [Hordeum vulgare]
  misc_feature (69)..(528): NCBI GI NO: 29124121 NR Description: APETALA2-like protein
  misc_feature (73)..(508): NCBI GI NO: 7489779 NR Description: indeterminate spikelet 1 - maize
  misc_feature (69)..(445): NCBI GI NO: 28876023 NR Description: putative transcription factor AP2 family protein
  misc_feature (148)..(509): NCBI GI NO: 25354653 NR Description: probable AP2 domain transcription factor
  misc_feature (65)..(383): NCBI GI NO: 15234566 NR Description: floral homeotic protein APETALA2
  misc_feature (103)..(395): NCBI GI NO: 38345500 NR Description: OSJNBa0010D21.13
  misc_feature (186)..(497): NCBI GI NO: 5081557 NR Description: PHAP2B protein [Petunia x hybrida]
  misc_feature (94)..(428): NCBI GI NO: 21717332 NR Description: transcription factor AHAP2 [Malus x domestica]
PFAPLTSHRAAPFVLGCPPPWPPPPPPAARPRPPPPRPDAAAAARLLEEEAGAGSSRARSPGGPELESMVLDLNAESPTPGSASAASSSSVVVGGGFFRFDLLGGTPDEEGCSPSPPIVTRQLFPLPYPDAAGSTAASTASNGSPPPEVAGAWARRPADLGAPALAQGKVMSAPSSPAVLSPAAGKKSRRGPRSRSSQYRGVTFYRRTGRWESHIWDCGKQVYLGGFDTAHAAARAYDRAAIKFRGLDADINFQLKDYEDDLKQMRNWTKEEFVHILRRQSTGFARGSSKYRGVTLHKCGRWEARMGQLLGKKYIYLGLFDSEIEAARAYDRAAIRFNGPDAVRNFDSVSYDGDVPLPPAIEKDVVDGDILDLNLRISQPNVHDLRSDGTLTGFGLSCNSPEASSSIVSQPMGPQWPVHPHSRSMRPQHPHLYASPCPGFFVNLREAPMQEEENRSEPACPQPFPSWAWQTQGSRAPVLPATTAASSGFSTAAATGVDAATAGHSVPPPSGSLRQFSGYHQLRFPPTA

SEQ ID NO: 21832 - protein, 460 aa, Zea mays subsp. mays
  peptide (1)..(460): Ceres Seq. ID no. 15180210
  misc_feature (128)..(191): Pfam Name: Pfam Description:  AP2 domain
  misc_feature (1)..(460): NCBI GI NO: 34900512 NR Description: putative indeterminate spikelet 1
  misc_feature (1)..(445): NCBI GI NO: 18476518 NR Description: APETALA2-like protein [Hordeum vulgare]
  misc_feature (1)..(460): NCBI GI NO: 29124121 NR Description: APETALA2-like protein
  misc_feature (5)..(440): NCBI GI NO: 7489779 NR Description: indeterminate spikelet 1 - maize
  misc_feature (1)..(377): NCBI GI NO: 28876023 NR Description: putative transcription factor AP2 family protein
  misc_feature (80)..(441): NCBI GI NO: 25354653 NR Description: probable AP2 domain transcription factor
  misc_feature (1)..(315): NCBI GI NO: 15234566 NR Description: floral homeotic protein APETALA2
  misc_feature (35)..(327): NCBI GI NO: 38345500 NR Description: OSJNBa0010D21.13
  misc_feature (118)..(429): NCBI GI NO: 5081557 NR Description: PHAP2B protein [Petunia x hybrida]
  misc_feature (26)..(360): NCBI GI NO: 21717332 NR Description: transcription factor AHAP2 [Malus x domestica]
MVLDLNAESPTPGSASAASSSSVVVGGGFFRFDLLGGTPDEEGCSPSPPIVTRQLFPLPYPDAAGSTAASTASNGSPPPEVAGAWARRPADLGAPALAQGKVMSAPSSPAVLSPAAGKKSRRGPRSRSSQYRGVTFYRRTGRWESHIWDCGKQVYLGGFDTAHAAARAYDRAAIKFRGLDADINFQLKDYEDDLKQMRNWTKEEFVHILRRQSTGFARGSSKYRGVTLHKCGRWEARMGQLLGKKYIYLGLFDSEIEAARAYDRAAIRFNGPDAVRNFDSVSYDGDVPLPPAIEKDVVDGDILDLNLRISQPNVHDLRSDGTLTGFGLSCNSPEASSSIVSQPMGPQWPVHPHSRSMRPQHPHLYASPCPGFFVNLREAPMQEEENRSEPACPQPFPSWAWQTQGSRAPVLPATTAASSGFSTAAATGVDAATAGHSVPPPSGSLRQFSGYHQLRFPPTA

SEQ ID NO: 21833 - protein, 358 aa, Zea mays subsp. mays
  peptide (1)..(358): Ceres Seq. ID no. 15180211
  misc_feature (26)..(89): Pfam Name: Pfam Description:  AP2 domain
  misc_feature (1)..(358): NCBI GI NO: 34900512 NR Description: putative indeterminate spikelet 1
  misc_feature (1)..(343): NCBI GI NO: 18476518 NR Description: APETALA2-like protein [Hordeum vulgare]
  misc_feature (1)..(358): NCBI GI NO: 29124121 NR Description: APETALA2-like protein
  misc_feature (1)..(338): NCBI GI NO: 7489779 NR Description: indeterminate spikelet 1 - maize
  misc_feature (1)..(275): NCBI GI NO: 28876023 NR Description: putative transcription factor AP2 family protein
  misc_feature (1)..(339): NCBI GI NO: 25354653 NR Description: probable AP2 domain transcription factor
  misc_feature (1)..(213): NCBI GI NO: 15234566 NR Description: floral homeotic protein APETALA2
  misc_feature (1)..(225): NCBI GI NO: 38345500 NR Description: OSJNBa0010D21.13
  misc_feature (16)..(327): NCBI GI NO: 5081557 NR Description: PHAP2B protein [Petunia x hybrida]
  misc_feature (1)..(258): NCBI GI NO: 21717332 NR Description: transcription factor AHAP2 [Malus x domestica]
MSAPSSPAVLSPAAGKKSRRGPRSRSSQYRGVTFYRRTGRWESHIWDCGKQVYLGGFDTAHAAARAYDRAAIKFRGLDADINFQLKDYEDDLKQMRNWTKEEFVHILRRQSTGFARGSSKYRGVTLHKCGRWEARMGQLLGKKYIYLGLFDSEIEAARAYDRAAIRFNGPDAVRNFDSVSYDGDVPLPPAIEKDVVDGDILDLNLRISQPNVHDLRSDGTLTGFGLSCNSPEASSSIVSQPMGPQWPVHPHSRSMRPQHPHLYASPCPGFFVNLREAPMQEEENRSEPACPQPFPSWAWQTQGSRAPVLPATTAASSGFSTAAATGVDAATAGHSVPPPSGSLRQFSGYHQLRFPPTA

SEQ ID NO: 21834 - DNA, 421 bp, Zea mays subsp. mays
  misc_feature (1)..(421): Ceres Seq. ID no. 13624441
acctaggcgagctgccgagctattgctcggcgcctccatctcgtccacaccacacagccgttgagtccaattcgctcactcaccgtcaaacccacacctcaaactccttcccttcaagaatgtcagattatccactgcggcctcttcctcctcttcctccgcccctcccaccatgattgccacccatctctccccagccctcaagcagtaccgcttcccgtccccgctccactccacctctcacaaccaccaccttcccgtgcacctcccgctcccccgccgccaccgcaacttcgctaagcccgccgcggccgcgccagacctcctcgccagcgtcgagtccgtggtctccgcggcctccgtcctggccgccatcgtgctcgtccacgagtccgggcacttcctggccgcggcctcccgg

SEQ ID NO: 21835 - protein, 83 aa, Zea mays subsp. mays
  peptide (1)..(83): Ceres Seq. ID no. 13624442
  misc_feature (2)..(82): NCBI GI NO: 29837756 NR Description: unknown protein
MIATHLSPALKQYRFPSPLHSTSHNHHLPVHLPLPRRHRNFAKPAAAAPDLLASVESVVSAASVLAAIVLVHESGHFLAAASR

SEQ ID NO: 21836 - protein, 57 aa, Zea mays subsp. mays
  peptide (1)..(57): Ceres Seq. ID no. 13624443
  misc_feature (5)..(57): Pfam Name: Pfam Description:  Extensin-like region
  misc_feature (10)..(57): NCBI GI NO: 20138131 NR Description: Vegetative cell wall protein gp1 precursor
  misc_feature (5)..(57): NCBI GI NO: 283032 NR Description: hydroxyproline-rich glycoprotein
  misc_feature (10)..(57): NCBI GI NO: 14253159 NR Description: VMP3 protein [Volvox carteri f. nagariensis]
  misc_feature (5)..(57): NCBI GI NO: 30387315 NR Description: unknown [Choristoneura fumiferana MNPV]
  misc_feature (31)..(57): NCBI GI NO: 15320736 NR Description: unknown
  misc_feature (37)..(57): NCBI GI NO: 6523547 NR Description: hydroxyproline-rich glycoprotein DZ-HRGP
  misc_feature (5)..(57): NCBI GI NO: 188864 NR Description: mucin
  misc_feature (4)..(57): NCBI GI NO: 186396 NR Description: mucin
  misc_feature (4)..(57): NCBI GI NO: 12018149 NR Description: gamete-specific hydroxyproline-rich glyco protein a2
  misc_feature (43)..(57): NCBI GI NO: 283045 NR Description: hydroxyproline-rich glycoprotein - maize
LGELPSYCSAPPSRPHHTAVESNSLTHRQTHTSNSFPSRMSDYPLRPLPPLPPPLPP

SEQ ID NO: 21837 - DNA, 1533 bp, Zea mays subsp. mays
  misc_feature (1)..(1533): Ceres Seq. ID no. 15180420
atacgcactgacacgaatctcacaattctcagctgaacaagtccacgtcgaagagtctaacgcgttcgttgcgcttgcgcacttgcgccggccaatcatgttgcggccgccgtctcccgtcctctacgtccaggaaaagaagaccgccgtcgccggaatcttcggcgaccgccacttcttcgacgccgcctccttctctgacatccgtgccgcccgtgtcgccgtcgcggtcccgaacccgcaggcccagccacccgcctcccgccgcgctctcctcctccgttaccatcgcctcctctcctccgcccgtaatgacacctgcgccttcgacgagacgttgtacatcacctggcacgacgccttccgcccccacctgaagcacacagccgcctccctccgcttggagaaggccgccatcgtgttcaacgtcggcgcggccgcctcgaggatcgcggcgaccgtgagccgcgccacggaggaaggggtaagggcggcgtgcggggagtttcagcgcgccgcgggggcgttccgtgcggttggggagatgatggaagaggaagaggcgacgacggtggatatgagttctcatgcctcggcgatgctggagcggctcatgctcgcgcaggcgcaggagtgctgtttcgagcgcgctctcgacgcagggaaatcacagacagtgtgctcgaaagtggctaggcaggctgccctgtactatgaagaagcttatgctgcacttgttgctcctccgctgcagaaccactttgaaagatcatggatatcccatatccaattgaaggctgctctgttcaatgccgaagcttgttacaggtacactattgaactccatgggaagacagaaattggtgaggagatatctcgattgcaggtcggaattaaggcacttgtggatgcaaagcgaactgcaagaggagctcctggacccctgtatgattatgctttcagactagaacaagatatgaacaagaacatggagacagcgaaagaggagaattttcgtgtatacctttttcgcattccagctgccgaatcattggcctctctaccatcagcttcactcgtccgttctgcatccttgagtgagatcttaaatccaaagacagaaaataccactcaatctccataaatggatgcatttggtatggtaaaattatggaacggtacacgaatagttgcacttgcatgtaaagatttccctttatagcagaaattttagggttgataatgtttattgtcattcttattttgttgctttgccggagcctaaataggtgcacaattcagatgataatatttgcagaggtgcaactaatatttgtgttgacacgtttgtgatatgttatgaacttatgatgccctcgcataggaagcttttttgctgctaggtagtttctatttatttggtgcttttcaacttgaagtcatcatcagttctaccatcctatcctgttggggttttaagcaaaatgagctatgagaactctattatctgtgcataaatatccttttcttgtt

SEQ ID NO: 21838 - protein, 380 aa, Zea mays subsp. mays
  peptide (1)..(380): Ceres Seq. ID no. 15180421
  misc_feature (50)..(176): Pfam Name: Pfam Description:  BRO1-like domain
  misc_feature (50)..(379): NCBI GI NO: 37535674 NR Description: putative signal tranduction protein
  misc_feature (85)..(374): NCBI GI NO: 15218061 NR Description: proline-rich protein family [Arabidopsis thaliana]
  misc_feature (85)..(374): NCBI GI NO: 23297205 NR Description: At1g15130/F9L1_7 [Arabidopsis thaliana]
  misc_feature (85)..(241): NCBI GI NO: 25518358 NR Description: hypothetical protein F9L1.7
  misc_feature (263)..(374): NCBI GI NO: 25518358 NR Description: hypothetical protein F9L1.7
  misc_feature (56)..(368): NCBI GI NO: 19880054 NR Description: ALG-2 interacting protein X
  misc_feature (115)..(361): NCBI GI NO: 20521926 NR Description: KIAA1471 protein [Homo sapiens]
  misc_feature (115)..(361): NCBI GI NO: 24308073 NR Description: protein tyrosine phosphatase, non-receptor type 23
  misc_feature (91)..(372): NCBI GI NO: 32766357 NR Description: Unknown (protein for MGC:63638) [Danio rerio]
  misc_feature (117)..(368): NCBI GI NO: 32436411 NR Description: PalA protein [Emericella nidulans]
YALTRISQFSAEQVHVEESNAFVALAHLRRPIMLRPPSPVLYVQEKKTAVAGIFGDRHFFDAASFSDIRAARVAVAVPNPQAQPPASRRALLLRYHRLLSSARNDTCAFDETLYITWHDAFRPHLKHTAASLRLEKAAIVFNVGAAASRIAATVSRATEEGVRAACGEFQRAAGAFRAVGEMMEEEEATTVDMSSHASAMLERLMLAQAQECCFERALDAGKSQTVCSKVARQAALYYEEAYAALVAPPLQNHFERSWISHIQLKAALFNAEACYRYTIELHGKTEIGEEISRLQVGIKALVDAKRTARGAPGPLYDYAFRLEQDMNKNMETAKEENFRVYLFRIPAAESLASLPSASLVRSASLSEILNPKTENTTQSP

SEQ ID NO: 21839 - protein, 348 aa, Zea mays subsp. mays
  peptide (1)..(348): Ceres Seq. ID no. 15180422
  misc_feature (18)..(144): Pfam Name: Pfam Description:  BRO1-like domain
  misc_feature (18)..(347): NCBI GI NO: 37535674 NR Description: putative signal tranduction protein
  misc_feature (53)..(342): NCBI GI NO: 15218061 NR Description: proline-rich protein family [Arabidopsis thaliana]
  misc_feature (53)..(342): NCBI GI NO: 23297205 NR Description: At1g15130/F9L1_7 [Arabidopsis thaliana]
  misc_feature (53)..(209): NCBI GI NO: 25518358 NR Description: hypothetical protein F9L1.7
  misc_feature (231)..(342): NCBI GI NO: 25518358 NR Description: hypothetical protein F9L1.7
  misc_feature (24)..(336): NCBI GI NO: 19880054 NR Description: ALG-2 interacting protein X
  misc_feature (83)..(329): NCBI GI NO: 20521926 NR Description: KIAA1471 protein [Homo sapiens]
  misc_feature (83)..(329): NCBI GI NO: 24308073 NR Description: protein tyrosine phosphatase, non-receptor type 23
  misc_feature (59)..(340): NCBI GI NO: 32766357 NR Description: Unknown (protein for MGC:63638) [Danio rerio]
  misc_feature (85)..(336): NCBI GI NO: 32436411 NR Description: PalA protein [Emericella nidulans]
MLRPPSPVLYVQEKKTAVAGIFGDRHFFDAASFSDIRAARVAVAVPNPQAQPPASRRALLLRYHRLLSSARNDTCAFDETLYITWHDAFRPHLKHTAASLRLEKAAIVFNVGAAASRIAATVSRATEEGVRAACGEFQRAAGAFRAVGEMMEEEEATTVDMSSHASAMLERLMLAQAQECCFERALDAGKSQTVCSKVARQAALYYEEAYAALVAPPLQNHFERSWISHIQLKAALFNAEACYRYTIELHGKTEIGEEISRLQVGIKALVDAKRTARGAPGPLYDYAFRLEQDMNKNMETAKEENFRVYLFRIPAAESLASLPSASLVRSASLSEILNPKTENTTQSP

SEQ ID NO: 21840 - protein, 199 aa, Zea mays subsp. mays
  peptide (1)..(199): Ceres Seq. ID no. 15180423
  misc_feature (1)..(198): NCBI GI NO: 37535674 NR Description: putative signal tranduction protein
  misc_feature (1)..(193): NCBI GI NO: 15218061 NR Description: proline-rich protein family [Arabidopsis thaliana]
  misc_feature (1)..(193): NCBI GI NO: 23297205 NR Description: At1g15130/F9L1_7 [Arabidopsis thaliana]
  misc_feature (1)..(60): NCBI GI NO: 25518358 NR Description: hypothetical protein F9L1.7
  misc_feature (82)..(193): NCBI GI NO: 25518358 NR Description: hypothetical protein F9L1.7
  misc_feature (1)..(187): NCBI GI NO: 19880054 NR Description: ALG-2 interacting protein X
  misc_feature (1)..(180): NCBI GI NO: 20521926 NR Description: KIAA1471 protein [Homo sapiens]
  misc_feature (1)..(180): NCBI GI NO: 24308073 NR Description: protein tyrosine phosphatase, non-receptor type 23
  misc_feature (1)..(191): NCBI GI NO: 32766357 NR Description: Unknown (protein for MGC:63638) [Danio rerio]
  misc_feature (1)..(187): NCBI GI NO: 32436411 NR Description: PalA protein [Emericella nidulans]
MMEEEEATTVDMSSHASAMLERLMLAQAQECCFERALDAGKSQTVCSKVARQAALYYEEAYAALVAPPLQNHFERSWISHIQLKAALFNAEACYRYTIELHGKTEIGEEISRLQVGIKALVDAKRTARGAPGPLYDYAFRLEQDMNKNMETAKEENFRVYLFRIPAAESLASLPSASLVRSASLSEILNPKTENTTQSP

SEQ ID NO: 21841 - DNA, 1440 bp, Zea mays subsp. mays
  misc_feature (1)..(1440): Ceres Seq. ID no. 15180204
atttccaccacctcgcaccaggctccactcctctccttcccttccctccccctttcgctcccctcctcgctcgcctcgcttctcgccgagccacccgaccaattcccccgccccccgcgcgcccagatcgccgccattcccttccccgccctgccgcgacgatcccgctgccaccgcaccttctccctcccgtcgtcctcccctccccgcagctggcggtcggtcggtcggacggaggaagccacagccggcggccagagagcgccgcagcgtgcccgcggatgggctggtaggaggcggcggcggcggtgactgtgttagcggcggcggcggcagccatgtatttcgccaaactcgatgactcgcccatgttccggacgcagatacaatcacttgaggagagtgctgaattgctgagagagagatgtttgaagttccataaaggttgccgtaagtatactgaaggactaggggaagcatacgatggagatattgcatttgccagctcacttgaaacatttggaggaggccacaatgatccaatgagtgtcgcttttggtgggcctgtaatgaccaaatttacaattgccttaagagaaattggaacatacaaggaagtcctgcgctcccaggttgagcacatgttaaatgacagattactgaattttgttgacattgatttgcatgatgtgaaggatgctcataagcgctttgacaaggctagcctctcatatgaccagattcgtgaaaagtacctatcattgaagaaaggtacccgaccggacataacaacagcaattgaagatgagcttcacagtgctagatcttcatttgagcaagctcgtttcaacctggtcacttcactttcccatgtcgaggcaaagaagagatttgaatttttggaggctgttagtgcgacaatggattcacatcttcgttattttaaacaaggatatgaactattgcatcaaatggagccatatattaatcagattcttgcttatgcacagcaatcacgagaaagagcaaacaaggaacaagcttctcttgtagagaggatgcatgagtacaaaaggcagatagatcgggaaagtcggtcttctataaatggtttgaatgattcttataatggtgatcgaatgcagacaattggcagaagttcacataaacagatcgaggcagttatgcagtcaacttcaaaaggaaaggtcgagaccattcgtcaaggttatctttcgaaaagatcttcaaacttgagagctgactggaaaagaaggttcttcgtacttgatagtcgaggaatgctgtactactatcggaaacaaattactcggccacctgtaggtctccgatgtaacattcgttgttgaaatgctcattaagttggcataatattttgttccatgatgcatgatatattttaattcagatattttcctc

SEQ ID NO: 21842 - protein, 343 aa, Zea mays subsp. mays
  peptide (1)..(343): Ceres Seq. ID no. 15180205
  misc_feature (1)..(290): NCBI GI NO: 30684352 NR Description: ARF GTPase-activating domain-containing protein
  misc_feature (19)..(290): NCBI GI NO: 11358303 NR Description: hypothetical protein T31B5
  misc_feature (3)..(327): NCBI GI NO: 30681946 NR Description: ARF GTPase-activating domain-containing protein
  misc_feature (3)..(327): NCBI GI NO: 15219822 NR Description: ARF GTPase-activating domain-containing protein
  misc_feature (1)..(204): NCBI GI NO: 15240398 NR Description: ARF GTPase-activating domain-containing protein
  misc_feature (1)..(228): NCBI GI NO: 38175545 NR Description: putative ARF GTPase-activating domain-containingprotein
  misc_feature (3)..(203): NCBI GI NO: 12323336 NR Description: putative GCN4-complementing protein, 3'partial
  misc_feature (155)..(290): NCBI GI NO: 38175545 NR Description: putative ARF GTPase-activating domain-containingprotein
  misc_feature (3)..(173): NCBI GI NO: 26452519 NR Description: putative GCN4-complementing protein
  misc_feature (125)..(328): NCBI GI NO: 15240398 NR Description: ARF GTPase-activating domain-containing protein
MYFAKLDDSPMFRTQIQSLEESAELLRERCLKFHKGCRKYTEGLGEAYDGDIAFASSLETFGGGHNDPMSVAFGGPVMTKFTIALREIGTYKEVLRSQVEHMLNDRLLNFVDIDLHDVKDAHKRFDKASLSYDQIREKYLSLKKGTRPDITTAIEDELHSARSSFEQARFNLVTSLSHVEAKKRFEFLEAVSATMDSHLRYFKQGYELLHQMEPYINQILAYAQQSRERANKEQASLVERMHEYKRQIDRESRSSINGLNDSYNGDRMQTIGRSSHKQIEAVMQSTSKGKVETIRQGYLSKRSSNLRADWKRRFFVLDSRGMLYYYRKQITRPPVGLRCNIRC

SEQ ID NO: 21843 - protein, 333 aa, Zea mays subsp. mays
  peptide (1)..(333): Ceres Seq. ID no. 15180206
  misc_feature (1)..(280): NCBI GI NO: 30684352 NR Description: ARF GTPase-activating domain-containing protein
  misc_feature (9)..(280): NCBI GI NO: 11358303 NR Description: hypothetical protein T31B5
  misc_feature (1)..(317): NCBI GI NO: 30681946 NR Description: ARF GTPase-activating domain-containing protein
  misc_feature (1)..(317): NCBI GI NO: 15219822 NR Description: ARF GTPase-activating domain-containing protein
  misc_feature (1)..(194): NCBI GI NO: 15240398 NR Description: ARF GTPase-activating domain-containing protein
  misc_feature (1)..(218): NCBI GI NO: 38175545 NR Description: putative ARF GTPase-activating domain-containingprotein
  misc_feature (1)..(193): NCBI GI NO: 12323336 NR Description: putative GCN4-complementing protein, 3'partial
  misc_feature (145)..(280): NCBI GI NO: 38175545 NR Description: putative ARF GTPase-activating domain-containingprotein
  misc_feature (1)..(163): NCBI GI NO: 26452519 NR Description: putative GCN4-complementing protein
  misc_feature (115)..(318): NCBI GI NO: 15240398 NR Description: ARF GTPase-activating domain-containing protein
MFRTQIQSLEESAELLRERCLKFHKGCRKYTEGLGEAYDGDIAFASSLETFGGGHNDPMSVAFGGPVMTKFTIALREIGTYKEVLRSQVEHMLNDRLLNFVDIDLHDVKDAHKRFDKASLSYDQIREKYLSLKKGTRPDITTAIEDELHSARSSFEQARFNLVTSLSHVEAKKRFEFLEAVSATMDSHLRYFKQGYELLHQMEPYINQILAYAQQSRERANKEQASLVERMHEYKRQIDRESRSSINGLNDSYNGDRMQTIGRSSHKQIEAVMQSTSKGKVETIRQGYLSKRSSNLRADWKRRFFVLDSRGMLYYYRKQITRPPVGLRCNIRC

SEQ ID NO: 21844 - protein, 275 aa, Zea mays subsp. mays
  peptide (1)..(275): Ceres Seq. ID no. 15180207
  misc_feature (1)..(222): NCBI GI NO: 30684352 NR Description: ARF GTPase-activating domain-containing protein
  misc_feature (1)..(222): NCBI GI NO: 11358303 NR Description: hypothetical protein T31B5
  misc_feature (1)..(259): NCBI GI NO: 30681946 NR Description: ARF GTPase-activating domain-containing protein
  misc_feature (1)..(259): NCBI GI NO: 15219822 NR Description: ARF GTPase-activating domain-containing protein
  misc_feature (1)..(136): NCBI GI NO: 15240398 NR Description: ARF GTPase-activating domain-containing protein
  misc_feature (1)..(160): NCBI GI NO: 38175545 NR Description: putative ARF GTPase-activating domain-containingprotein
  misc_feature (1)..(135): NCBI GI NO: 12323336 NR Description: putative GCN4-complementing protein, 3'partial
  misc_feature (87)..(222): NCBI GI NO: 38175545 NR Description: putative ARF GTPase-activating domain-containingprotein
  misc_feature (1)..(105): NCBI GI NO: 26452519 NR Description: putative GCN4-complementing protein
  misc_feature (57)..(260): NCBI GI NO: 15240398 NR Description: ARF GTPase-activating domain-containing protein
MSVAFGGPVMTKFTIALREIGTYKEVLRSQVEHMLNDRLLNFVDIDLHDVKDAHKRFDKASLSYDQIREKYLSLKKGTRPDITTAIEDELHSARSSFEQARFNLVTSLSHVEAKKRFEFLEAVSATMDSHLRYFKQGYELLHQMEPYINQILAYAQQSRERANKEQASLVERMHEYKRQIDRESRSSINGLNDSYNGDRMQTIGRSSHKQIEAVMQSTSKGKVETIRQGYLSKRSSNLRADWKRRFFVLDSRGMLYYYRKQITRPPVGLRCNIRC

SEQ ID NO: 21845 - DNA, 1120 bp, Zea mays subsp. mays
  misc_feature (1)..(1120): Ceres Seq. ID no. 14305739
aaaccctcaacctacagcagcgcgccagcgccgctccgcccgcccatgggctcctcatcccactctctcgccgtctcacggcgcggccgcagcgcgcggcagtcccccttctttcgagacctcgccaccccgatcccgtcccatcgtggcgtgtcccgctttgcctcgggggcttccccctcctccaccccaccacccccgccgcccatcttcaccctcgatgaccgctatgcctccgcagacttctccccggaccccaccgcctccgaccttctccccgtcgcgtcgtctccctccccccgcaccgctgccagccgctcgccgccatgggacctgtcccggggcaaggtggcgctctcggcaccaggatcccccatggctggggtcgtcgagccgacccggaaagagatgctcgctttgccggcccctgcgagccctggcaccccacctcctgccgcgacagcggaggcgcagtcaccggtgtcccccgcgcaggcacctaggacggagccggtggcgaacgcaggggaggtcgaacgggaggagtgggtcactgtatttggattctcttttggtgataccaaccttattcttcgggaattcgagaaatgtggagtaatattgagacatcactctggtccaagagatggaaattggatccacatattgtaccagcgttcttatgatgctcgaaaggcccttcagaaaaatgttatccaactaagcagcagtctgatagttggagtaaagcctattgatgcagtgcaccggcagcagctggacaagagtttcgctccaagcaatccaggtggatttatggtttccttgccttcgaagtcacttggcttgaagagcacaggcgcatcgaaccagttaggaggctttaaccggctgtatgacctcaaagctaacacaaatgttagccgagatgcaggccgtcgggcaactggcagtgttgctgcaccagcaaaatcaattgtaaccaatgtaatggatttggtatttggcatttgatttggcaatgagattgaggaccaatgcatccggaaccttctctgtttcttccgtttacttgttcgagaatgccaccattccaaagattcaacagcaaattttgctg

SEQ ID NO: 21846 - protein, 337 aa, Zea mays subsp. mays
  peptide (1)..(337): Ceres Seq. ID no. 14305740
  misc_feature (175)..(262): Pfam Name: rrm-like Pfam Description: MPPN
  misc_feature (83)..(337): NCBI GI NO: 34903646 NR Description: B1015E06.6
  misc_feature (66)..(337): NCBI GI NO: 18401087 NR Description: expressed protein [Arabidopsis thaliana]
  misc_feature (66)..(336): NCBI GI NO: 17979410 NR Description: unknown protein [Arabidopsis thaliana]
  misc_feature (11)..(336): NCBI GI NO: 34856476 NR Description: similar to CG6540-PA [Rattus norvegicus]
  misc_feature (8)..(336): NCBI GI NO: 19223939 NR Description: mitotic phosphoprotein 44 [Homo sapiens]
  misc_feature (8)..(336): NCBI GI NO: 31982904 NR Description: mitotic phosphoprotein 44 [Homo sapiens]
  misc_feature (11)..(336): NCBI GI NO: 19223941 NR Description: mitotic phosphoprotein 44 [Mus musculus]
  misc_feature (54)..(336): NCBI GI NO: 15987768 NR Description: mitotic phosphoprotein 44 [Xenopus laevis]
  misc_feature (54)..(336): NCBI GI NO: 4584796 NR Description: mitotic phosphoprotein 44 [Xenopus laevis]
  misc_feature (54)..(281): NCBI GI NO: 32450351 NR Description: Unknown (protein for MGC:64281) [Xenopus laevis]
KPSTYSSAPAPLRPPMGSSSHSLAVSRRGRSARQSPFFRDLATPIPSHRGVSRFASGASPSSTPPPPPPIFTLDDRYASADFSPDPTASDLLPVASSPSPRTAASRSPPWDLSRGKVALSAPGSPMAGVVEPTRKEMLALPAPASPGTPPPAATAEAQSPVSPAQAPRTEPVANAGEVEREEWVTVFGFSFGDTNLILREFEKCGVILRHHSGPRDGNWIHILYQRSYDARKALQKNVIQLSSSLIVGVKPIDAVHRQQLDKSFAPSNPGGFMVSLPSKSLGLKSTGASNQLGGFNRLYDLKANTNVSRDAGRRATGSVAAPAKSIVTNVMDLVFGI

SEQ ID NO: 21847 - protein, 322 aa, Zea mays subsp. mays
  peptide (1)..(322): Ceres Seq. ID no. 14305741
  misc_feature (160)..(247): Pfam Name: rrm-like Pfam Description: MPPN
  misc_feature (68)..(322): NCBI GI NO: 34903646 NR Description: B1015E06.6
  misc_feature (51)..(322): NCBI GI NO: 18401087 NR Description: expressed protein [Arabidopsis thaliana]
  misc_feature (51)..(321): NCBI GI NO: 17979410 NR Description: unknown protein [Arabidopsis thaliana]
  misc_feature (1)..(321): NCBI GI NO: 34856476 NR Description: similar to CG6540-PA [Rattus norvegicus]
  misc_feature (1)..(321): NCBI GI NO: 19223939 NR Description: mitotic phosphoprotein 44 [Homo sapiens]
  misc_feature (1)..(321): NCBI GI NO: 31982904 NR Description: mitotic phosphoprotein 44 [Homo sapiens]
  misc_feature (1)..(321): NCBI GI NO: 19223941 NR Description: mitotic phosphoprotein 44 [Mus musculus]
  misc_feature (39)..(321): NCBI GI NO: 15987768 NR Description: mitotic phosphoprotein 44 [Xenopus laevis]
  misc_feature (39)..(321): NCBI GI NO: 4584796 NR Description: mitotic phosphoprotein 44 [Xenopus laevis]
  misc_feature (39)..(266): NCBI GI NO: 32450351 NR Description: Unknown (protein for MGC:64281) [Xenopus laevis]
MGSSSHSLAVSRRGRSARQSPFFRDLATPIPSHRGVSRFASGASPSSTPPPPPPIFTLDDRYASADFSPDPTASDLLPVASSPSPRTAASRSPPWDLSRGKVALSAPGSPMAGVVEPTRKEMLALPAPASPGTPPPAATAEAQSPVSPAQAPRTEPVANAGEVEREEWVTVFGFSFGDTNLILREFEKCGVILRHHSGPRDGNWIHILYQRSYDARKALQKNVIQLSSSLIVGVKPIDAVHRQQLDKSFAPSNPGGFMVSLPSKSLGLKSTGASNQLGGFNRLYDLKANTNVSRDAGRRATGSVAAPAKSIVTNVMDLVFGI

SEQ ID NO: 21848 - protein, 212 aa, Zea mays subsp. mays
  peptide (1)..(212): Ceres Seq. ID no. 14305742
  misc_feature (50)..(137): Pfam Name: rrm-like Pfam Description: MPPN
  misc_feature (1)..(212): NCBI GI NO: 34903646 NR Description: B1015E06.6
  misc_feature (1)..(212): NCBI GI NO: 18401087 NR Description: expressed protein [Arabidopsis thaliana]
  misc_feature (1)..(211): NCBI GI NO: 17979410 NR Description: unknown protein [Arabidopsis thaliana]
  misc_feature (1)..(211): NCBI GI NO: 34856476 NR Description: similar to CG6540-PA [Rattus norvegicus]
  misc_feature (1)..(211): NCBI GI NO: 19223939 NR Description: mitotic phosphoprotein 44 [Homo sapiens]
  misc_feature (1)..(211): NCBI GI NO: 31982904 NR Description: mitotic phosphoprotein 44 [Homo sapiens]
  misc_feature (1)..(211): NCBI GI NO: 19223941 NR Description: mitotic phosphoprotein 44 [Mus musculus]
  misc_feature (1)..(211): NCBI GI NO: 15987768 NR Description: mitotic phosphoprotein 44 [Xenopus laevis]
  misc_feature (1)..(211): NCBI GI NO: 4584796 NR Description: mitotic phosphoprotein 44 [Xenopus laevis]
  misc_feature (1)..(156): NCBI GI NO: 32450351 NR Description: Unknown (protein for MGC:64281) [Xenopus laevis]
MAGVVEPTRKEMLALPAPASPGTPPPAATAEAQSPVSPAQAPRTEPVANAGEVEREEWVTVFGFSFGDTNLILREFEKCGVILRHHSGPRDGNWIHILYQRSYDARKALQKNVIQLSSSLIVGVKPIDAVHRQQLDKSFAPSNPGGFMVSLPSKSLGLKSTGASNQLGGFNRLYDLKANTNVSRDAGRRATGSVAAPAKSIVTNVMDLVFGI

SEQ ID NO: 21849 - DNA, 1026 bp, Zea mays subsp. mays
  misc_feature (1)..(1026): Ceres Seq. ID no. 15180470
cggcattctcttgtttgtccattgcacatgcacgcgctcaatggcaacggaggagcggcgattaatggatctggcacggactgtgccggcgatcctcctgctcgtcggcacctcgggaaaggccgtcgcgagcatcaagtgcgcccgcgagctgttcgccgggaagcagtggggcttcgatgactccgacgaccccgagtctccgccctccaacaccgaccgaggcggaaactgcagcgtcggcgaacctatggagacgtccaccggaggagacggcgatcacaacggcagcggcgtaccctggaagaccacccgcggcagccagtcccagacgaggcttccatcttgggccgtggtgcaccacggcggctactgggccaacatcctcgccttagcgctggcccccgtagagggccacctccccgccgcctaccgtgagatcacgcgcctcgtctcgctccacgccgaggccggccacgtcttcgtcaactgcgccgagggcctcggcctcaagccccaccccgccgcgccgtgggagcggtggatggacctccgggaggcggccgtctgccacgcccacgacgcgctgctggcgctgagctccgccgcggcggcagccacggcggccgaggacttcctccggtggcagttccccgagtccccgcgcgggaaagggtgatggtcggcggcgcggcagctcgtggaagacgcctggcgcagcctcggcgaggccaagaacgcggcgaggctcatggacaacgccgtgctctgcgagttcttcaccacctggatgattctgacgcgcgcttaactgaaggcgcattgctgatggcgacgcccctgcctgcttttgcaacttgttattactccagtacttgtgctccaatttcattcgatttctgtgtgcacatttcaataagtggttctttgctggtataaatggaaatggcctgatccgcctgggtcaataagattgtaataagtggttctttgctccaatttcattctttgccggttgttcttctg

SEQ ID NO: 21850 - protein, 225 aa, Zea mays subsp. mays
  peptide (1)..(225): Ceres Seq. ID no. 15180471
  misc_feature (81)..(225): NCBI GI NO: 34895982 NR Description: P0011G08.33
  misc_feature (139)..(225): NCBI GI NO: 34895978 NR Description: P0011G08.31
  misc_feature (12)..(56): NCBI GI NO: 34895978 NR Description: P0011G08.31
GILLFVHCTCTRSMATEERRLMDLARTVPAILLLVGTSGKAVASIKCARELFAGKQWGFDDSDDPESPPSNTDRGGNCSVGEPMETSTGGDGDHNGSGVPWKTTRGSQSQTRLPSWAVVHHGGYWANILALALAPVEGHLPAAYREITRLVSLHAEAGHVFVNCAEGLGLKPHPAAPWERWMDLREAAVCHAHDALLALSSAAAAATAAEDFLRWQFPESPRGKG

SEQ ID NO: 21851 - protein, 212 aa, Zea mays subsp. mays
  peptide (1)..(212): Ceres Seq. ID no. 15180472
  misc_feature (68)..(212): NCBI GI NO: 34895982 NR Description: P0011G08.33
  misc_feature (126)..(212): NCBI GI NO: 34895978 NR Description: P0011G08.31
  misc_feature (1)..(43): NCBI GI NO: 34895978 NR Description: P0011G08.31
MATEERRLMDLARTVPAILLLVGTSGKAVASIKCARELFAGKQWGFDDSDDPESPPSNTDRGGNCSVGEPMETSTGGDGDHNGSGVPWKTTRGSQSQTRLPSWAVVHHGGYWANILALALAPVEGHLPAAYREITRLVSLHAEAGHVFVNCAEGLGLKPHPAAPWERWMDLREAAVCHAHDALLALSSAAAAATAAEDFLRWQFPESPRGKG

SEQ ID NO: 21852 - protein, 204 aa, Zea mays subsp. mays
  peptide (1)..(204): Ceres Seq. ID no. 15180473
  misc_feature (60)..(204): NCBI GI NO: 34895982 NR Description: P0011G08.33
  misc_feature (118)..(204): NCBI GI NO: 34895978 NR Description: P0011G08.31
  misc_feature (1)..(35): NCBI GI NO: 34895978 NR Description: P0011G08.31
MDLARTVPAILLLVGTSGKAVASIKCARELFAGKQWGFDDSDDPESPPSNTDRGGNCSVGEPMETSTGGDGDHNGSGVPWKTTRGSQSQTRLPSWAVVHHGGYWANILALALAPVEGHLPAAYREITRLVSLHAEAGHVFVNCAEGLGLKPHPAAPWERWMDLREAAVCHAHDALLALSSAAAAATAAEDFLRWQFPESPRGKG

SEQ ID NO: 21853 - DNA, 1444 bp, Zea mays subsp. mays
  misc_feature (1)..(1444): Ceres Seq. ID no. 15180145
aactgtcattagcatatttcccatgccggtcctgcccctggctccgttcgttgtcttctatctcccctgggcgtcatcttctacctctcgctctctgtgttcattcgagtttgtttccccaacagcctttccttcccttctctcgccgcagatcttgcccgtgaaggtgaaggtaggagattggagatctcgccagagtgggtgccctgcgccgcagacgccattggacactgttctcctcggttctcaaggggtcgacaccagtgtccagatctcgttgaaccctacctgttgcacatttggctgccaggagccgagccctccccacatttagctgttggtttgtgcactttagtttgaataatagtatgaacgatgaggtggttccccatggatgaaacgaatgcatgcattgtcgaagagcaagagtgggcattgacttgtattggatatgatgatcttgagacacacactacactggggagtgcacatgctatacatgatattgattgggattcaataatagtagaagaaatgactagtgaagaaggaagaaatgatgttactagtgaacaaggactctactttcaacttggactagctactgaagatgacaaaagggaagatgattgtagtgctccccgttttggaaatagcattccatgtgaagatgaattgggagcagtcattccatgttcagatttagtgcttgatgagactaggaccatatatggtatgaacaatccagtaatggagcctagtagcttgtgtgcaaaaatgcaccactttagactcgcaatcagacaatacgccataaataaagaatttgagcttggaattgaggctaccaacaagactagatttagagggtattgtaaagggcctgattgcccctggagcattcatgctagaccggagaccaaaggggctataacaattcaagtgatcgtcttgaatggcaaacatacttgtacctccagtggtagacgaaagacggctacacctacaggagcttgggttgcggcacgtgcgcttccattactaatgaagaagcctcatatgggtgctaaggagctacaaactacattgcatgacacttttggttgtaccattgcatatgacacagtttggcacggtaaagagaaagctttgaaggaattatttggcagttgggaagagagctttcagcttttgtggccttggagagaagcagttatgcaaaagtcgccggatagtgtcattgagcttgatgtaaaaatggatgagggtcgtcctttcttcagttgattcttttgtgcacttggtccatgcatttatggattcaagggtggttgctgaccataccttagtgttgacttgatgaaagtcgcctaaagggggtgaataggcaagtctgaaatttataaactttaagacaactacaagccgggttagcgttagaaac

SEQ ID NO: 21854 - protein, 303 aa, Zea mays subsp. mays
  peptide (1)..(303): Ceres Seq. ID no. 15180146
  misc_feature (106)..(259): Pfam Name: Pfam Description:  MuDR family transposase
  misc_feature (44)..(303): NCBI GI NO: 2130141 NR Description: mudrA protein - maize transposon MuDR
  misc_feature (44)..(303): NCBI GI NO: 1857256 NR Description: MURAZC [Zea mays]
  misc_feature (123)..(303): NCBI GI NO: 22375 NR Description: unnamed protein product [Zea mays]
  misc_feature (224)..(303): NCBI GI NO: 23928448 NR Description: putative MURAZC [Zea mays]
  misc_feature (99)..(303): NCBI GI NO: 37531668 NR Description: putative transposable element
  misc_feature (44)..(96): NCBI GI NO: 37531668 NR Description: putative transposable element
  misc_feature (6)..(303): NCBI GI NO: 37535470 NR Description: putative mutator protein
  misc_feature (30)..(303): NCBI GI NO: 32489130 NR Description: OSJNBb0018J12.10
  misc_feature (30)..(303): NCBI GI NO: 22758277 NR Description: Putative Mutator protein
  misc_feature (196)..(299): NCBI GI NO: 34903312 NR Description: unnamed protein product
MRWFPMDETNACIVEEQEWALTCIGYDDLETHTTLGSAHAIHDIDWDSIIVEEMTSEEGRNDVTSEQGLYFQLGLATEDDKREDDCSAPRFGNSIPCEDELGAVIPCSDLVLDETRTIYGMNNPVMEPSSLCAKMHHFRLAIRQYAINKEFELGIEATNKTRFRGYCKGPDCPWSIHARPETKGAITIQVIVLNGKHTCTSSGRRKTATPTGAWVAARALPLLMKKPHMGAKELQTTLHDTFGCTIAYDTVWHGKEKALKELFGSWEESFQLLWPWREAVMQKSPDSVIELDVKMDEGRPFFS

SEQ ID NO: 21855 - protein, 298 aa, Zea mays subsp. mays
  peptide (1)..(298): Ceres Seq. ID no. 15180147
  misc_feature (101)..(254): Pfam Name: Pfam Description:  MuDR family transposase
  misc_feature (39)..(298): NCBI GI NO: 2130141 NR Description: mudrA protein - maize transposon MuDR
  misc_feature (39)..(298): NCBI GI NO: 1857256 NR Description: MURAZC [Zea mays]
  misc_feature (118)..(298): NCBI GI NO: 22375 NR Description: unnamed protein product [Zea mays]
  misc_feature (219)..(298): NCBI GI NO: 23928448 NR Description: putative MURAZC [Zea mays]
  misc_feature (94)..(298): NCBI GI NO: 37531668 NR Description: putative transposable element
  misc_feature (39)..(91): NCBI GI NO: 37531668 NR Description: putative transposable element
  misc_feature (1)..(298): NCBI GI NO: 37535470 NR Description: putative mutator protein
  misc_feature (25)..(298): NCBI GI NO: 32489130 NR Description: OSJNBb0018J12.10
  misc_feature (25)..(298): NCBI GI NO: 22758277 NR Description: Putative Mutator protein
  misc_feature (191)..(294): NCBI GI NO: 34903312 NR Description: unnamed protein product
MDETNACIVEEQEWALTCIGYDDLETHTTLGSAHAIHDIDWDSIIVEEMTSEEGRNDVTSEQGLYFQLGLATEDDKREDDCSAPRFGNSIPCEDELGAVIPCSDLVLDETRTIYGMNNPVMEPSSLCAKMHHFRLAIRQYAINKEFELGIEATNKTRFRGYCKGPDCPWSIHARPETKGAITIQVIVLNGKHTCTSSGRRKTATPTGAWVAARALPLLMKKPHMGAKELQTTLHDTFGCTIAYDTVWHGKEKALKELFGSWEESFQLLWPWREAVMQKSPDSVIELDVKMDEGRPFFS

SEQ ID NO: 21856 - protein, 250 aa, Zea mays subsp. mays
  peptide (1)..(250): Ceres Seq. ID no. 15180148
  misc_feature (53)..(206): Pfam Name: Pfam Description:  MuDR family transposase
  misc_feature (1)..(250): NCBI GI NO: 2130141 NR Description: mudrA protein - maize transposon MuDR
  misc_feature (1)..(250): NCBI GI NO: 1857256 NR Description: MURAZC [Zea mays]
  misc_feature (70)..(250): NCBI GI NO: 22375 NR Description: unnamed protein product [Zea mays]
  misc_feature (171)..(250): NCBI GI NO: 23928448 NR Description: putative MURAZC [Zea mays]
  misc_feature (46)..(250): NCBI GI NO: 37531668 NR Description: putative transposable element
  misc_feature (1)..(43): NCBI GI NO: 37531668 NR Description: putative transposable element
  misc_feature (1)..(250): NCBI GI NO: 37535470 NR Description: putative mutator protein
  misc_feature (1)..(250): NCBI GI NO: 32489130 NR Description: OSJNBb0018J12.10
  misc_feature (1)..(250): NCBI GI NO: 22758277 NR Description: Putative Mutator protein
  misc_feature (143)..(246): NCBI GI NO: 34903312 NR Description: unnamed protein product
MTSEEGRNDVTSEQGLYFQLGLATEDDKREDDCSAPRFGNSIPCEDELGAVIPCSDLVLDETRTIYGMNNPVMEPSSLCAKMHHFRLAIRQYAINKEFELGIEATNKTRFRGYCKGPDCPWSIHARPETKGAITIQVIVLNGKHTCTSSGRRKTATPTGAWVAARALPLLMKKPHMGAKELQTTLHDTFGCTIAYDTVWHGKEKALKELFGSWEESFQLLWPWREAVMQKSPDSVIELDVKMDEGRPFFS

SEQ ID NO: 21857 - DNA, 1625 bp, Zea mays subsp. mays
  misc_feature (1)..(1625): Ceres Seq. ID no. 14302146
gaaacaatcggtctctatctttctcatgaatctcagcctagcttaccatcttgacctgccccacacgtcccaccggccaccaccgggtttcgtcgctgccgccgcccgcacctgcagccgccatgtggaggggcggctctacagccgcctccgccgcgagggctctccgctcgcgcctcctcctcgaccccatccaccacccggccacgtcgctcgctccaatcgcttcggcgcgtacctcctcctcttccaccccgtccaccgccgcggcgaacaccatcgtggaagaagcggcggcagcggtatccgtttctcagcataccggatccatctccgactcgctgcggcactacgggaagtgctactgggagctctcgaaagcccgcctcagtgctcttgttgtggcaacttcgggggctggctatgtgcttggtagtggcaacatcgtggacattgccggcctttgttgcacatgtgccggtacaatgatggttacagcatctgcaaataccctcaaccaggtgtttgagataaaaaatgatgctaaaatgaaaaggacaatgcgacggcccctgccatctggtcgcattagtcctgcacatgctgcgatgtgggctacaagtgttggagttgcaggaacagctttgctggcctggaaggctaatggcttggcagctgggcttgcagcttctaatcttgttctgtatgcatttgtgtatacgccgttgaagcaaatacaccctgttaatacatgggttggggcagtcgttggtgccatcccaccacttctggggtgggcagcagcttcaactgaactgtcactaaacgcgatgatactccctgccgcattgtacttttggcaaatacctcattttatggctctcgcgtacttatgtcgaaatgattaccttgctggagggtatcgaatgttttcttttgctgaccctaccggtagaagaactgcatgggtgtcgctaagaaattgtctgtacatgctacctttggggttatttgcgtacaactgggggctcacatccgagtggttcagttttgaagcttcactcctaacattaggccttaccatcggagctctatcattcgtcctagaaccaagcccgaagactgcgaggagaatgttctatggtagcctgctgtatctccctgccttcatgtccggacttctgttacatcggctaccaagtgaacaaaaggcgcacaacctggctgagaacaatgagctggacggagttctgtacggggctgatctgcaggacgaagaacgagcaagacagaaacgccaagacacgaaaccttctcgtgtgcaatcactccctccagtttcctatgcttctgtggctccattccctttcctaccggtacccatatacgagtcatgaaaagttgaaaacctcctctggttcttcctgcagccgtggggtagttggagcaatgtattcatgcatttttggcttacatgagttttccgccatcaagaagagtccttggtatggtgcgtctgttgttaaaattatagaatacgtttttgtgtgtgtggattgagccttttgcggctcacctacaaatgtaaaaagtgatgttgatgttcattctgatgattcgatcgc

SEQ ID NO: 21858 - protein, 424 aa, Zea mays subsp. mays
  peptide (1)..(424): Ceres Seq. ID no. 14302147
  misc_feature (91)..(357): Pfam Name: Pfam Description:  UbiA prenyltransferase family
  misc_feature (32)..(424): NCBI GI NO: 34913400 NR Description: putative heme A farnesyltransferase homolog
  misc_feature (30)..(424): NCBI GI NO: 18406556 NR Description: UbiA prenyltransferase family
  misc_feature (30)..(424): NCBI GI NO: 7485006 NR Description: heme A farnesyltransferase homolog F16B22
  misc_feature (30)..(424): NCBI GI NO: 25408912 NR Description: probable heme A farnesyltransferase
  misc_feature (5)..(357): NCBI GI NO: 31237553 NR Description: ENSANGP00000013941 [Anopheles gambiae]
  misc_feature (84)..(372): NCBI GI NO: 30410008 NR Description: RIKEN cDNA 2410004F01 [Mus musculus]
  misc_feature (81)..(350): NCBI GI NO: 19921064 NR Description: CG5037-PA [Drosophila melanogaster]
  misc_feature (1)..(360): NCBI GI NO: 20141419 NR Description: Protoheme IX farnesyltransferase
  misc_feature (1)..(360): NCBI GI NO: 30584237 NR Description: Homo sapiens COX10 homolog
  misc_feature (1)..(360): NCBI GI NO: 17921982 NR Description: heme A:farnesyltransferase; COX10
MWRGGSTAASAARALRSRLLLDPIHHPATSLAPIASARTSSSSTPSTAAANTIVEEAAAAVSVSQHTGSISDSLRHYGKCYWELSKARLSALVVATSGAGYVLGSGNIVDIAGLCCTCAGTMMVTASANTLNQVFEIKNDAKMKRTMRRPLPSGRISPAHAAMWATSVGVAGTALLAWKANGLAAGLAASNLVLYAFVYTPLKQIHPVNTWVGAVVGAIPPLLGWAAASTELSLNAMILPAALYFWQIPHFMALAYLCRNDYLAGGYRMFSFADPTGRRTAWVSLRNCLYMLPLGLFAYNWGLTSEWFSFEASLLTLGLTIGALSFVLEPSPKTARRMFYGSLLYLPAFMSGLLLHRLPSEQKAHNLAENNELDGVLYGADLQDEERARQKRQDTKPSRVQSLPPVSYASVAPFPFLPVPIYES

SEQ ID NO: 21859 - protein, 303 aa, Zea mays subsp. mays
  peptide (1)..(303): Ceres Seq. ID no. 14302148
  misc_feature (1)..(236): Pfam Name: Pfam Description:  UbiA prenyltransferase family
  misc_feature (1)..(303): NCBI GI NO: 34913400 NR Description: putative heme A farnesyltransferase homolog
  misc_feature (1)..(303): NCBI GI NO: 18406556 NR Description: UbiA prenyltransferase family
  misc_feature (1)..(303): NCBI GI NO: 7485006 NR Description: heme A farnesyltransferase homolog F16B22
  misc_feature (1)..(303): NCBI GI NO: 25408912 NR Description: probable heme A farnesyltransferase
  misc_feature (1)..(236): NCBI GI NO: 31237553 NR Description: ENSANGP00000013941 [Anopheles gambiae]
  misc_feature (1)..(251): NCBI GI NO: 30410008 NR Description: RIKEN cDNA 2410004F01 [Mus musculus]
  misc_feature (1)..(229): NCBI GI NO: 19921064 NR Description: CG5037-PA [Drosophila melanogaster]
  misc_feature (1)..(239): NCBI GI NO: 20141419 NR Description: Protoheme IX farnesyltransferase
  misc_feature (1)..(239): NCBI GI NO: 30584237 NR Description: Homo sapiens COX10 homolog
  misc_feature (1)..(239): NCBI GI NO: 17921982 NR Description: heme A:farnesyltransferase; COX10
MMVTASANTLNQVFEIKNDAKMKRTMRRPLPSGRISPAHAAMWATSVGVAGTALLAWKANGLAAGLAASNLVLYAFVYTPLKQIHPVNTWVGAVVGAIPPLLGWAAASTELSLNAMILPAALYFWQIPHFMALAYLCRNDYLAGGYRMFSFADPTGRRTAWVSLRNCLYMLPLGLFAYNWGLTSEWFSFEASLLTLGLTIGALSFVLEPSPKTARRMFYGSLLYLPAFMSGLLLHRLPSEQKAHNLAENNELDGVLYGADLQDEERARQKRQDTKPSRVQSLPPVSYASVAPFPFLPVPIYES

SEQ ID NO: 21860 - protein, 302 aa, Zea mays subsp. mays
  peptide (1)..(302): Ceres Seq. ID no. 14302149
  misc_feature (1)..(235): Pfam Name: Pfam Description:  UbiA prenyltransferase family
  misc_feature (1)..(302): NCBI GI NO: 34913400 NR Description: putative heme A farnesyltransferase homolog
  misc_feature (1)..(302): NCBI GI NO: 18406556 NR Description: UbiA prenyltransferase family
  misc_feature (1)..(302): NCBI GI NO: 7485006 NR Description: heme A farnesyltransferase homolog F16B22
  misc_feature (1)..(302): NCBI GI NO: 25408912 NR Description: probable heme A farnesyltransferase
  misc_feature (1)..(235): NCBI GI NO: 31237553 NR Description: ENSANGP00000013941 [Anopheles gambiae]
  misc_feature (1)..(250): NCBI GI NO: 30410008 NR Description: RIKEN cDNA 2410004F01 [Mus musculus]
  misc_feature (1)..(228): NCBI GI NO: 19921064 NR Description: CG5037-PA [Drosophila melanogaster]
  misc_feature (1)..(238): NCBI GI NO: 20141419 NR Description: Protoheme IX farnesyltransferase
  misc_feature (1)..(238): NCBI GI NO: 30584237 NR Description: Homo sapiens COX10 homolog
  misc_feature (1)..(238): NCBI GI NO: 17921982 NR Description: heme A:farnesyltransferase; COX10
MVTASANTLNQVFEIKNDAKMKRTMRRPLPSGRISPAHAAMWATSVGVAGTALLAWKANGLAAGLAASNLVLYAFVYTPLKQIHPVNTWVGAVVGAIPPLLGWAAASTELSLNAMILPAALYFWQIPHFMALAYLCRNDYLAGGYRMFSFADPTGRRTAWVSLRNCLYMLPLGLFAYNWGLTSEWFSFEASLLTLGLTIGALSFVLEPSPKTARRMFYGSLLYLPAFMSGLLLHRLPSEQKAHNLAENNELDGVLYGADLQDEERARQKRQDTKPSRVQSLPPVSYASVAPFPFLPVPIYES

SEQ ID NO: 21861 - DNA, 681 bp, Zea mays subsp. mays
  misc_feature (1)..(681): Ceres Seq. ID no. 13600496
cwagaacatcctaatcgaaaaaaaaaccggtccccttcgacctcctcctccgccgccagcgtcgaccgcgaccgccacctctcctcgtacgctacagtaggggcaggggcggcgattggtggctcttcctcctcctatgctgtgactcgaggagtatggcggatggggctattgtggtacccatttgccagtacggcggagagttcacttctggccccagtggtaatctgatatacagaggtggagaagcacatgccgttgatgttactcatgattcatcgctggagagcttcaaggatgagctgtccaaggtgttccatgttgatgtcactgacatgtcactcaagtactttcttcccaataatatgaaaacactcatcacaatatcatgtgaccgggatttgcaaaggatggttggttttactgcaaatgctgcgcatgtggatgtttttctgataagtagacaggagaacaggagtaagatgatggtgattgagtttgtggcgacaaatgcatctcttgtatcgctaagagtcttagctgtgaacttagttctcacttctgtgtgactgtgatcaaaggacttgtgtatgatcaaaggagatccatcagttggtaccgaagtgtattttatgtcttgttggttacctggaatttaattggaactggaggggggaaagg

SEQ ID NO: 21862 - protein, 137 aa, Zea mays subsp. mays
  peptide (1)..(137): Ceres Seq. ID no. 15218959
  misc_feature (20)..(103): Pfam Name: Pfam Description:  PB1 domain
  misc_feature (1)..(108): NCBI GI NO: 37530384 NR Description: putative maize transposon MuDR mudrA-like protein
  misc_feature (7)..(121): NCBI GI NO: 10177186 NR Description: mutator-like transposase-like protein
  misc_feature (7)..(121): NCBI GI NO: 22330896 NR Description: mudrA protein -related [Arabidopsis thaliana]
  misc_feature (4)..(104): NCBI GI NO: 15230059 NR Description: expressed protein [Arabidopsis thaliana]
  misc_feature (1)..(112): NCBI GI NO: 22327304 NR Description: mudrA protein -related [Arabidopsis thaliana]
  misc_feature (7)..(113): NCBI GI NO: 5441874 NR Description: Similar to maize transposon MuDR mudrA-likeprotein
MADGAIVVPICQYGGEFTSGPSGNLIYRGGEAHAVDVTHDSSLESFKDELSKVFHVDVTDMSLKYFLPNNMKTLITISCDRDLQRMVGFTANAAHVDVFLISRQENRSKMMVIEFVATNASLVSLRVLAVNLVLTSV

SEQ ID NO: 21863 - protein, 77 aa, Zea mays subsp. mays
  peptide (1)..(77): Ceres Seq. ID no. 15218960
  misc_feature (1)..(48): NCBI GI NO: 37530384 NR Description: putative maize transposon MuDR mudrA-like protein
  misc_feature (1)..(61): NCBI GI NO: 10177186 NR Description: mutator-like transposase-like protein
  misc_feature (1)..(61): NCBI GI NO: 22330896 NR Description: mudrA protein -related [Arabidopsis thaliana]
  misc_feature (1)..(44): NCBI GI NO: 15230059 NR Description: expressed protein [Arabidopsis thaliana]
  misc_feature (1)..(52): NCBI GI NO: 22327304 NR Description: mudrA protein -related [Arabidopsis thaliana]
  misc_feature (1)..(53): NCBI GI NO: 5441874 NR Description: Similar to maize transposon MuDR mudrA-likeprotein
MSLKYFLPNNMKTLITISCDRDLQRMVGFTANAAHVDVFLISRQENRSKMMVIEFVATNASLVSLRVLAVNLVLTSV

SEQ ID NO: 21864 - protein, 76 aa, Zea mays subsp. mays
  peptide (1)..(76): Ceres Seq. ID no. 15218961
  misc_feature (1)..(1): Xaa is any aa, unknown or other
XEHPNRKKNRSPSTSSSAASVDRDRHLSSYATVGAGAAIGGSSSSYAVTRGVWRMGLLWYPFASTAESSLLAPVVI

SEQ ID NO: 21865 - DNA, 1464 bp, Zea mays subsp. mays
  misc_feature (1)..(1464): Ceres Seq. ID no. 15180432
tttttagttccctgccctctctccggcctcgttttcttgcctgtttagtttcctcttgtgttctttgcacatctatagttctatacagtacttttgattttcttttaataggcatcccctgctgtatttattctaaaaaaggtgccaacaatcattgactgttccagtctgctttgcctaatttttgtgacatactccctccgtcccagtatataaggcataaccacctctggatcaaagaccaagaaatgcatttaattctctctatatcactgtatcgatgtatgtgtgcatagagagagcacgccttatattgtgggacaagaacaaaaagtggttacgccttatattctgggacggagggagtactccctctgtactatagaaagtgtaactcctcaaacaccaagaccaaggagataatttaattcatgcacattcccagtagaggcgctctgatcctccacctaatttattgcgagcttgcatgcaagcatgcagaaaccaccgtagttgttgttggccaagcatgctattttttctcgccatgcatgcatagtagtccagcagcccatgtaaattgtgcatgtgttgaactgcaggtaccctctattctaggagtagagaaaaaaactagttatgccctccatcgtgaacgtcatgtagtgtctttcttgtctatggaatgtttggttgcaatttgttctcacatgattctttctgtccagactggctggagggaatggtcacagaatatcttgttgagacatttgctgattacttcggtgacgttaaaatgtatattgaagaaagaccatttcgaagatttgtggaggcttgcatagaagaaacaatcgtggtctatgttgatcatctcctttcccagaaaaactacataaaagaggaaacaatagagaggatgaggttagatgaagagaagcttatggatttctttagggaacacgtcaacgtgacaaaagttgaaagtagagtgcggattctggcagatatgagagatctagcttcagctgggagtttggatagctttactctcattttcacaaatatactggaacatcaacctgattgcccgcctgaggttgttgagaagcttgtggcaatgcgggaagacattccaagaaaggaagccaaggagattgtacaagaatgcaaagagatatacgagaactcgctcgtggatggcaaccctcgcaagtcaggttttgtgttcggcaaattgaagtgcttgacagcaaagaaaggcatatggaggaagcttgggcagtaagtggcgacttgcagcagagtggacgaacttatcaccaaggcaaagattgtacatttcacttctctatgatcattcttttttcgatgctactgttgggtttcacgtttatactatcagtatgtactcagcttgaggagcaaacatgtactttattcaataaaatggttgttatttgc

SEQ ID NO: 21866 - protein, 200 aa, Zea mays subsp. mays
  peptide (1)..(200): Ceres Seq. ID no. 15180433
  misc_feature (15)..(198): NCBI GI NO: 18409922 NR Description: SEC6 protein [Arabidopsis thaliana]
  misc_feature (15)..(198): NCBI GI NO: 19387172 NR Description: SEC6 [Arabidopsis thaliana]
  misc_feature (15)..(198): NCBI GI NO: 25406122 NR Description: hypothetical protein F14O23.20
MFGCNLFSHDSFCPDWLEGMVTEYLVETFADYFGDVKMYIEERPFRRFVEACIEETIVVYVDHLLSQKNYIKEETIERMRLDEEKLMDFFREHVNVTKVESRVRILADMRDLASAGSLDSFTLIFTNILEHQPDCPPEVVEKLVAMREDIPRKEAKEIVQECKEIYENSLVDGNPRKSGFVFGKLKCLTAKKGIWRKLGQ

SEQ ID NO: 21867 - protein, 181 aa, Zea mays subsp. mays
  peptide (1)..(181): Ceres Seq. ID no. 15180434
  misc_feature (1)..(179): NCBI GI NO: 18409922 NR Description: SEC6 protein [Arabidopsis thaliana]
  misc_feature (1)..(179): NCBI GI NO: 19387172 NR Description: SEC6 [Arabidopsis thaliana]
  misc_feature (1)..(179): NCBI GI NO: 25406122 NR Description: hypothetical protein F14O23.20
MVTEYLVETFADYFGDVKMYIEERPFRRFVEACIEETIVVYVDHLLSQKNYIKEETIERMRLDEEKLMDFFREHVNVTKVESRVRILADMRDLASAGSLDSFTLIFTNILEHQPDCPPEVVEKLVAMREDIPRKEAKEIVQECKEIYENSLVDGNPRKSGFVFGKLKCLTAKKGIWRKLGQ

SEQ ID NO: 21868 - protein, 163 aa, Zea mays subsp. mays
  peptide (1)..(163): Ceres Seq. ID no. 15180435
  misc_feature (1)..(161): NCBI GI NO: 18409922 NR Description: SEC6 protein [Arabidopsis thaliana]
  misc_feature (1)..(161): NCBI GI NO: 19387172 NR Description: SEC6 [Arabidopsis thaliana]
  misc_feature (1)..(161): NCBI GI NO: 25406122 NR Description: hypothetical protein F14O23.20
MYIEERPFRRFVEACIEETIVVYVDHLLSQKNYIKEETIERMRLDEEKLMDFFREHVNVTKVESRVRILADMRDLASAGSLDSFTLIFTNILEHQPDCPPEVVEKLVAMREDIPRKEAKEIVQECKEIYENSLVDGNPRKSGFVFGKLKCLTAKKGIWRKLGQ

SEQ ID NO: 21869 - DNA, 1083 bp, Zea mays subsp. mays
  misc_feature (1)..(1083): Ceres Seq. ID no. 14312472
gtaggctcccgaaaatctccccgagtccgacgcgtctccggcggccgcccccctctccctctcggatctctccctctccgctcgccgcgcctccatcggtccactcagccatgtatagtaattacgggaatccttcggggatgcagatgcccccgcagaactctcaacctgtccagtttgataatccattatacggtgcaagctcgggtctaatcagatctgggataggagtatatggggagaagtttttgggttctagttcagaattcatgcaaagcaacatcaatagatacttctccaacccgcagtattacttccatgtgaatgatcaatatgtccgtaacaagttgaaagttatactgttcccgttctttcacagggggcactggactcgaataagtgagccggtcggtggccgcttgtcctacaaacctccaatctatgacataaacgcaccagatctgtacatccctttcatggcatttggaagcttcatcatcctttcagggtttacattgggtttcatgggaaagtttactccagcagctataaatctgcagtttacaagggcgctcatcggctggggcttccagctcatggtcctgaaaggtctgctctactcgatgggtggtggcgaggtgccactgctcgacttggtagcgtacggtggttatttattcgccgggctatcgctcgccgtcgtcgcgaggctcatgtgggcgtactcgtactatgtgatgatgccgtggatgagcctgtgcatgggggtgttcctggtgaggacgatgaagagggtgctcttcacggagatgagaagcagcgagaggcactcgtcgcggcagcactacttccttctcttcatggcaatcgcacagttccccctgttcttctggctcggcagcataggtgcatgatgcagttttgtgtacttttcgcagcattaacgttgcaaaaatgatattgaagtgtttagatgtgttgtaaagaaaaaaacaattggacaatggtctcaacagcttagaggttggcagctctgcttgtgaagttgtatgtgatccacaatcatgttatgctattgacttt

SEQ ID NO: 21870 - protein, 303 aa, Zea mays subsp. mays
  peptide (1)..(303): Ceres Seq. ID no. 14312473
  misc_feature (37)..(303): NCBI GI NO: 38346458 NR Description: OSJNBa0019G23.6
  misc_feature (37)..(301): NCBI GI NO: 18397705 NR Description: expressed protein [Arabidopsis thaliana]
  misc_feature (37)..(301): NCBI GI NO: 30695009 NR Description: expressed protein [Arabidopsis thaliana]
  misc_feature (37)..(301): NCBI GI NO: 9755388 NR Description: F17F8.24 [Arabidopsis thaliana]
  misc_feature (47)..(301): NCBI GI NO: 11282553 NR Description: hypothetical protein T16L24
  misc_feature (47)..(301): NCBI GI NO: 33589682 NR Description: At3g59500 [Arabidopsis thaliana]
  misc_feature (178)..(303): NCBI GI NO: 10241632 NR Description: putative protein
  misc_feature (14)..(298): NCBI GI NO: 39795597 NR Description: Unknown (protein for MGC:76182)
  misc_feature (3)..(298): NCBI GI NO: 12861030 NR Description: unnamed protein product [Mus musculus]
  misc_feature (11)..(298): NCBI GI NO: 28277968 NR Description: Similar to Yip1p-interacting factor [Danio rerio]
RLPKISPSPTRLRRPPPSPSRISPSPLAAPPSVHSAMYSNYGNPSGMQMPPQNSQPVQFDNPLYGASSGLIRSGIGVYGEKFLGSSSEFMQSNINRYFSNPQYYFHVNDQYVRNKLKVILFPFFHRGHWTRISEPVGGRLSYKPPIYDINAPDLYIPFMAFGSFIILSGFTLGFMGKFTPAAINLQFTRALIGWGFQLMVLKGLLYSMGGGEVPLLDLVAYGGYLFAGLSLAVVARLMWAYSYYVMMPWMSLCMGVFLVRTMKRVLFTEMRSSERHSSRQHYFLLFMAIAQFPLFFWLGSIGA

SEQ ID NO: 21871 - protein, 267 aa, Zea mays subsp. mays
  peptide (1)..(267): Ceres Seq. ID no. 14312474
  misc_feature (1)..(267): NCBI GI NO: 38346458 NR Description: OSJNBa0019G23.6
  misc_feature (1)..(265): NCBI GI NO: 18397705 NR Description: expressed protein [Arabidopsis thaliana]
  misc_feature (1)..(265): NCBI GI NO: 30695009 NR Description: expressed protein [Arabidopsis thaliana]
  misc_feature (1)..(265): NCBI GI NO: 9755388 NR Description: F17F8.24 [Arabidopsis thaliana]
  misc_feature (11)..(265): NCBI GI NO: 11282553 NR Description: hypothetical protein T16L24
  misc_feature (11)..(265): NCBI GI NO: 33589682 NR Description: At3g59500 [Arabidopsis thaliana]
  misc_feature (142)..(267): NCBI GI NO: 10241632 NR Description: putative protein
  misc_feature (1)..(262): NCBI GI NO: 39795597 NR Description: Unknown (protein for MGC:76182)
  misc_feature (1)..(262): NCBI GI NO: 12861030 NR Description: unnamed protein product [Mus musculus]
  misc_feature (1)..(262): NCBI GI NO: 28277968 NR Description: Similar to Yip1p-interacting factor [Danio rerio]
MYSNYGNPSGMQMPPQNSQPVQFDNPLYGASSGLIRSGIGVYGEKFLGSSSEFMQSNINRYFSNPQYYFHVNDQYVRNKLKVILFPFFHRGHWTRISEPVGGRLSYKPPIYDINAPDLYIPFMAFGSFIILSGFTLGFMGKFTPAAINLQFTRALIGWGFQLMVLKGLLYSMGGGEVPLLDLVAYGGYLFAGLSLAVVARLMWAYSYYVMMPWMSLCMGVFLVRTMKRVLFTEMRSSERHSSRQHYFLLFMAIAQFPLFFWLGSIGA

SEQ ID NO: 21872 - protein, 257 aa, Zea mays subsp. mays
  peptide (1)..(257): Ceres Seq. ID no. 14312475
  misc_feature (1)..(257): NCBI GI NO: 38346458 NR Description: OSJNBa0019G23.6
  misc_feature (1)..(255): NCBI GI NO: 18397705 NR Description: expressed protein [Arabidopsis thaliana]
  misc_feature (1)..(255): NCBI GI NO: 30695009 NR Description: expressed protein [Arabidopsis thaliana]
  misc_feature (1)..(255): NCBI GI NO: 9755388 NR Description: F17F8.24 [Arabidopsis thaliana]
  misc_feature (1)..(255): NCBI GI NO: 11282553 NR Description: hypothetical protein T16L24
  misc_feature (1)..(255): NCBI GI NO: 33589682 NR Description: At3g59500 [Arabidopsis thaliana]
  misc_feature (132)..(257): NCBI GI NO: 10241632 NR Description: putative protein
  misc_feature (1)..(252): NCBI GI NO: 39795597 NR Description: Unknown (protein for MGC:76182)
  misc_feature (1)..(252): NCBI GI NO: 12861030 NR Description: unnamed protein product [Mus musculus]
  misc_feature (1)..(252): NCBI GI NO: 28277968 NR Description: Similar to Yip1p-interacting factor [Danio rerio]
MQMPPQNSQPVQFDNPLYGASSGLIRSGIGVYGEKFLGSSSEFMQSNINRYFSNPQYYFHVNDQYVRNKLKVILFPFFHRGHWTRISEPVGGRLSYKPPIYDINAPDLYIPFMAFGSFIILSGFTLGFMGKFTPAAINLQFTRALIGWGFQLMVLKGLLYSMGGGEVPLLDLVAYGGYLFAGLSLAVVARLMWAYSYYVMMPWMSLCMGVFLVRTMKRVLFTEMRSSERHSSRQHYFLLFMAIAQFPLFFWLGSIGA

SEQ ID NO: 21873 - DNA, 1253 bp, Zea mays subsp. mays
  misc_feature (1)..(1253): Ceres Seq. ID no. 15180408
gaccatgtcccactcccctctccctcctccagtcttccaaaatatctccctgcgcttttccgagtccttttccctccaaggaacagaaacaaccggagcttttaccccacccgctttcccctccccgccaagaacaacagggctcctcgcaataattcgtgcatccatggcgaagctcgtcaacaagctggtcgattcattcgaccacgacgaggcgccggcgccggacgtcggctgcgtgcgcgccgtgctggccgagctcgtcctcaccttcctcttcgtcttcaccggcgtctccgcctccatggccgccgggtccggcgggaagcccggggaggctatgccgatggcgacgctggcggcggtggctatcgcgcacgcgctggccgctggcgtcctggtgacggccggcttccacgtctccggcggccacctcaaccccgccgtgacggtggggatcttggttcgcggccacatcaccaagctccgggcgctgctgtacgtcgccgcccagctgctggcgtcctccctcgcctgcatcctcctccgctacctcagcggcggcatggtgaccccagtgcacgccctgggcgctggcatcaacccgatgcagggcttggtgatggaggtgatcctcaccttctcgctgctcttcgtcacctacgccatgatcctggacccgcggagccaggtccgcaccatcggcccgctgctgacggggctcatagtcggcgccaacagcctcgccggcggcaacttcaccggcgcgtccatgaacccggcgcggtccttcggtcccgccatggccaccggggtctggaccaaccactgggtctactggatcggcccgctgctcggcgggtccctggccggcttcgtgtacgagtcgctgttcatggtgaacaagacgcacgagccgctgctcaatggagacatctgacgaccgtcggcccccagggcagtgagcacggttcatgcttgttttctgtaaaatagttcgttacctacaagcatgatgcatatattgaccaaggtaattaattagagagggttgctgttaaatagttaccctggtgggattgtgggatgtagaaattgttgctgggctttgcttttcttttttctttttttcttttcctcccaaggaattttttaagagggctgggttctgtaaaggatttgtttaggctattagttagctatatagtagaaaactagagaatgctatacgttggacgtgattttttttcacg

SEQ ID NO: 21874 - protein, 331 aa, Zea mays subsp. mays
  peptide (1)..(331): Ceres Seq. ID no. 15180409
DHVPLPSPSSSLPKYLPALFRVLFPPRNRNNRSFYPTRFPLPAKNNRAPRNNSCIHGEARQQAGRFIRPRRGAGAGRRLRARRAGRARPHLPLRLHRRLRLHGRRVRREARGGYADGDAGGGGYRARAGRWRPGDGRLPRLRRPPQPRRDGGDLGSRPHHQAPGAAVRRRPAAGVLPRLHPPPLPQRRHGDPSARPGRWHQPDAGLGDGGDPHLLAALRHLRHDPGPAEPGPHHRPAADGAHSRRQQPRRRQLHRRVHEPGAVLRSRHGHRGLDQPLGLLDRPAARRVPGRLRVRVAVHGEQDARAAAQWRHLTTVGPQGSEHGSCLFSVK

SEQ ID NO: 21875 - protein, 312 aa, Zea mays subsp. mays
  peptide (1)..(312): Ceres Seq. ID no. 15180410
  misc_feature (71)..(294): Pfam Name: Pfam Description:  Major intrinsic protein
  misc_feature (56)..(312): NCBI GI NO: 13447831 NR Description: tonoplast membrane integral protein ZmTIP4-2
  misc_feature (56)..(312): NCBI GI NO: 13447829 NR Description: tonoplast membrane integral protein ZmTIP4-1
  misc_feature (74)..(311): NCBI GI NO: 13447835 NR Description: tonoplast membrane integral protein ZmTIP4-4
  misc_feature (69)..(311): NCBI GI NO: 34904332 NR Description: unnamed protein product
  misc_feature (71)..(311): NCBI GI NO: 13447833 NR Description: tonoplast membrane integral protein ZmTIP4-3
  misc_feature (62)..(311): NCBI GI NO: 15225195 NR Description: tonoplast intrinsic protein, putative
  misc_feature (71)..(307): NCBI GI NO: 4584429 NR Description: aquaglyceroporin; tonoplast intrinsic protein
  misc_feature (78)..(307): NCBI GI NO: 34904336 NR Description: unnamed protein product
  misc_feature (70)..(312): NCBI GI NO: 7441274 NR Description: tonoplast intrinsic protein - common ice plant
  misc_feature (80)..(310): NCBI GI NO: 38605857 NR Description: OSJNBb0034G17.15
TMSHSPLPPPVFQNISLRFSESFSLQGTETTGAFTPPAFPSPPRTTGLLAIIRASMAKLVNKLVDSFDHDEAPAPDVGCVRAVLAELVLTFLFVFTGVSASMAAGSGGKPGEAMPMATLAAVAIAHALAAGVLVTAGFHVSGGHLNPAVTVGILVRGHITKLRALLYVAAQLLASSLACILLRYLSGGMVTPVHALGAGINPMQGLVMEVILTFSLLFVTYAMILDPRSQVRTIGPLLTGLIVGANSLAGGNFTGASMNPARSFGPAMATGVWTNHWVYWIGPLLGGSLAGFVYESLFMVNKTHEPLLNGDI

SEQ ID NO: 21876 - protein, 311 aa, Zea mays subsp. mays
  peptide (1)..(311): Ceres Seq. ID no. 15180411
  misc_feature (70)..(293): Pfam Name: Pfam Description:  Major intrinsic protein
  misc_feature (55)..(311): NCBI GI NO: 13447831 NR Description: tonoplast membrane integral protein ZmTIP4-2
  misc_feature (55)..(311): NCBI GI NO: 13447829 NR Description: tonoplast membrane integral protein ZmTIP4-1
  misc_feature (73)..(310): NCBI GI NO: 13447835 NR Description: tonoplast membrane integral protein ZmTIP4-4
  misc_feature (68)..(310): NCBI GI NO: 34904332 NR Description: unnamed protein product
  misc_feature (70)..(310): NCBI GI NO: 13447833 NR Description: tonoplast membrane integral protein ZmTIP4-3
  misc_feature (61)..(310): NCBI GI NO: 15225195 NR Description: tonoplast intrinsic protein, putative
  misc_feature (70)..(306): NCBI GI NO: 4584429 NR Description: aquaglyceroporin; tonoplast intrinsic protein
  misc_feature (77)..(306): NCBI GI NO: 34904336 NR Description: unnamed protein product
  misc_feature (69)..(311): NCBI GI NO: 7441274 NR Description: tonoplast intrinsic protein - common ice plant
  misc_feature (79)..(309): NCBI GI NO: 38605857 NR Description: OSJNBb0034G17.15
MSHSPLPPPVFQNISLRFSESFSLQGTETTGAFTPPAFPSPPRTTGLLAIIRASMAKLVNKLVDSFDHDEAPAPDVGCVRAVLAELVLTFLFVFTGVSASMAAGSGGKPGEAMPMATLAAVAIAHALAAGVLVTAGFHVSGGHLNPAVTVGILVRGHITKLRALLYVAAQLLASSLACILLRYLSGGMVTPVHALGAGINPMQGLVMEVILTFSLLFVTYAMILDPRSQVRTIGPLLTGLIVGANSLAGGNFTGASMNPARSFGPAMATGVWTNHWVYWIGPLLGGSLAGFVYESLFMVNKTHEPLLNGDI

SEQ ID NO: 21877 - DNA, 860 bp, Zea mays subsp. mays
  misc_feature (1)..(860): Ceres Seq. ID no. 14302123
attttggactacgtcttgaaaattgtagcgtgccgtcaaattttattttgcccttgcccctcggaaataagtagcaagaaaagatgccagctaagacgacttctgttaagaaaaggtttgtgtctgatggtatgttacgtgcagaactcaacgagttcttaacacgagaacttgctgaagatggttattctggtgttgatgtccgtgctgctccatcgcgcacagaaattgttatttctgcaacacgtacccaaaacgtattgggtgataagggacgccgtattcgtgaacttacatctctcattcaaaaacgttttgacttcaaagacaaggcagttgaacttttcgctgagaaagtagcacaacgtggattgtgtgctgttgcccaagctgagtcattacgttacaagttgattggtggtttagctgtcaggagagcatgttatggtgtgttgagattcatcatggaaagtggagctaagggatgtgaagttgtagtgtctggtaaattaagaggtcaacgtgccaagtcaatgaaatttgttgatggacttatgattcacagtggtgacccatgcaatgattatgttaatgtggctactagacacgttttgttaagacaaggagttttgggtatcaaggtaaaaattatgttgccatgggaccaaacaggtaaacttggcccaaagaagcctttgccagataatgtcagcgttgcagaacccaaggaagaaattctacccatagcaccaaccagtgatattaaatctaaacccgaagtagcagtacctgctgttccagttgtacctgttgttggttgaaatgattgtataaaataaactaaagttttttttaaacac

SEQ ID NO: 21878 - protein, 245 aa, Zea mays subsp. mays
  peptide (1)..(245): Ceres Seq. ID no. 14302124
  misc_feature (105)..(189): Pfam Name: Pfam Description:  Ribosomal protein S3, C-terminal domain
  misc_feature (1)..(243): NCBI GI NO: 16566719 NR Description: ribosomal protein S3 [Spodoptera frugiperda]
  misc_feature (1)..(243): NCBI GI NO: 1350990 NR Description: 40S ribosomal protein S3
  misc_feature (7)..(242): NCBI GI NO: 37595356 NR Description: ribosomal protein S3 [Danio rerio]
  misc_feature (7)..(242): NCBI GI NO: 22001962 NR Description: 40S ribosomal protein S3
  misc_feature (7)..(239): NCBI GI NO: 13097759 NR Description: Unknown (protein for IMAGE:3544292) [Homo sapiens]
  misc_feature (7)..(239): NCBI GI NO: 15718687 NR Description: ribosomal protein S3; 40S ribosomal protein S3
  misc_feature (1)..(230): NCBI GI NO: 31241449 NR Description: ENSANGP00000020844 [Anopheles gambiae]
  misc_feature (7)..(239): NCBI GI NO: 32532 NR Description: unnamed protein product [Homo sapiens]
  misc_feature (7)..(242): NCBI GI NO: 28374213 NR Description: similar to 40S ribosomal protein S3 [Danio rerio]
  misc_feature (7)..(239): NCBI GI NO: 7765076 NR Description: S3 ribosomal protein [Homo sapiens]
MPAKTTSVKKRFVSDGMLRAELNEFLTRELAEDGYSGVDVRAAPSRTEIVISATRTQNVLGDKGRRIRELTSLIQKRFDFKDKAVELFAEKVAQRGLCAVAQAESLRYKLIGGLAVRRACYGVLRFIMESGAKGCEVVVSGKLRGQRAKSMKFVDGLMIHSGDPCNDYVNVATRHVLLRQGVLGIKVKIMLPWDQTGKLGPKKPLPDNVSVAEPKEEILPIAPTSDIKSKPEVAVPAVPVVPVVG

SEQ ID NO: 21879 - protein, 229 aa, Zea mays subsp. mays
  peptide (1)..(229): Ceres Seq. ID no. 14302125
  misc_feature (89)..(173): Pfam Name: Pfam Description:  Ribosomal protein S3, C-terminal domain
  misc_feature (1)..(227): NCBI GI NO: 16566719 NR Description: ribosomal protein S3 [Spodoptera frugiperda]
  misc_feature (1)..(227): NCBI GI NO: 1350990 NR Description: 40S ribosomal protein S3
  misc_feature (1)..(226): NCBI GI NO: 37595356 NR Description: ribosomal protein S3 [Danio rerio]
  misc_feature (1)..(226): NCBI GI NO: 22001962 NR Description: 40S ribosomal protein S3
  misc_feature (1)..(223): NCBI GI NO: 13097759 NR Description: Unknown (protein for IMAGE:3544292) [Homo sapiens]
  misc_feature (1)..(223): NCBI GI NO: 15718687 NR Description: ribosomal protein S3; 40S ribosomal protein S3
  misc_feature (1)..(214): NCBI GI NO: 31241449 NR Description: ENSANGP00000020844 [Anopheles gambiae]
  misc_feature (1)..(223): NCBI GI NO: 32532 NR Description: unnamed protein product [Homo sapiens]
  misc_feature (1)..(226): NCBI GI NO: 28374213 NR Description: similar to 40S ribosomal protein S3 [Danio rerio]
  misc_feature (1)..(223): NCBI GI NO: 7765076 NR Description: S3 ribosomal protein [Homo sapiens]
MLRAELNEFLTRELAEDGYSGVDVRAAPSRTEIVISATRTQNVLGDKGRRIRELTSLIQKRFDFKDKAVELFAEKVAQRGLCAVAQAESLRYKLIGGLAVRRACYGVLRFIMESGAKGCEVVVSGKLRGQRAKSMKFVDGLMIHSGDPCNDYVNVATRHVLLRQGVLGIKVKIMLPWDQTGKLGPKKPLPDNVSVAEPKEEILPIAPTSDIKSKPEVAVPAVPVVPVVG

SEQ ID NO: 21880 - DNA, 1606 bp, Zea mays subsp. mays
  misc_feature (1)..(1606): Ceres Seq. ID no. 15180463
ataccataccacgccacagcagcatatatgccactgcccaggcagccagccatgccgccaccaccccgatcccggcacagaactcagtgccagacgcggacagcgagcgcgaccacatctatctaggacccgtatctctctctctcctcccgaccagcacgtcacgtgccacggacaggggtcaagcgcggtcgccgatgtcggcggcgggcggcagcggcagccgcgcccgcgccacctcgcggcccgcggcggcagcatggctgctgctggcgctggccacagcagcagcagcgtcggcgctggcgctgccagcggccgcgggcggcttcagctgccgtcctgggtcccggccggtgctcttcaacttcggggactccaactccgacacgggcggcatggcggcggccaaggggtggcacctcacgcgcccggagggccgcgccttcttcccacgccccaccggccggttctgcgacggccgcctcgccatcgacttcctctgcgaaagcttgaacatcagctatttgagcccatttctgaaggcgttaggctccaattacagcaacggtgcaaatttcgccattgctggcgcagcaacgcaaccgcgagatgttccatttgcgttgcacatacaagtgcaggagttcttgtacttcagagatagatccttggaactcatcgatcaaggtctaagtggtccaattgatgcacaaggattccaaaacgctctatatatgatagacatagggcagaacgatgtaaacgctcttctgtcaaacttgccctatgatcaagttattgccaaattcccaccaattcttgctgagattaaggacgctgtccagactctatatagcaacggtagcctaaacttctggatacatgggacgggggctctgggttgcttgccgcagaagcttgccatacctaggaaaaacgacagcgatcttgatcagtatggctgtctcaagacctataacagagctgcagttgcgttcaacgcagcgctgggcagcctctgcgacgagctgagtgcgcagatgaaagacgcgacgcttgtgtacacggacctgttccccatcaagtatggtcttgtcgccaaccacactaaatatggctttgacaagccgctgatgacatgctgtgggtacggagggcctccctacaactacgacttcagcaagggttgccagtctaaggatgtggcggcctgcgaagacggctcgaagttcgtcagctgggatggcgtgcacctgacggaggcggccaatgcggttgtggccaaagcgatactgagctcacagtactccaagcccagtctcaagtttgatcagttctgcagagcctgatacttgttagtttaggcagatttactgaacacaacctggcacttcaaagtcaaaatgggtgggcttctgataatttgattaccttatttacccgtcagggatgtgacccatcattgatctgtcagccatagcccataggccataactttggataggtgaaacttccaaatattgtgggccacatgtaccttcaaactacatgtcctatctgatatgttctcatcaaagagagaaatacaccatgggttattaag

SEQ ID NO: 21881 - protein, 449 aa, Zea mays subsp. mays
  peptide (1)..(449): Ceres Seq. ID no. 15180464
  misc_feature (169)..(431): Pfam Name: Pfam Description:  GDSL-like Lipase/Acylhydrolase
  misc_feature (169)..(448): NCBI GI NO: 34894844 NR Description: putative lipase homolog
  misc_feature (83)..(449): NCBI GI NO: 34894866 NR Description: putative lipase homolog
  misc_feature (68)..(443): NCBI GI NO: 34894838 NR Description: putative lipase homolog
  misc_feature (94)..(448): NCBI GI NO: 15223585 NR Description: GDSL-motif lipase/hydrolase protein
  misc_feature (105)..(447): NCBI GI NO: 15217506 NR Description: GDSL-motif lipase/hydrolase protein
  misc_feature (124)..(420): NCBI GI NO: 25336281 NR Description: lipase-like protein Lip-4
  misc_feature (118)..(445): NCBI GI NO: 25405771 NR Description: hypothetical protein T22H22.20
  misc_feature (120)..(449): NCBI GI NO: 15218753 NR Description: lipase, putative [Arabidopsis thaliana]
  misc_feature (144)..(441): NCBI GI NO: 34903996 NR Description: unnamed protein product
  misc_feature (144)..(441): NCBI GI NO: 34903986 NR Description: unnamed protein product
TIPRHSSIYATAQAASHAATTPIPAQNSVPDADSERDHIYLGPVSLSLLPTSTSRATDRGQARSPMSAAGGSGSRARATSRPAAAAWLLLALATAAAASALALPAAAGGFSCRPGSRPVLFNFGDSNSDTGGMAAAKGWHLTRPEGRAFFPRPTGRFCDGRLAIDFLCESLNISYLSPFLKALGSNYSNGANFAIAGAATQPRDVPFALHIQVQEFLYFRDRSLELIDQGLSGPIDAQGFQNALYMIDIGQNDVNALLSNLPYDQVIAKFPPILAEIKDAVQTLYSNGSLNFWIHGTGALGCLPQKLAIPRKNDSDLDQYGCLKTYNRAAVAFNAALGSLCDELSAQMKDATLVYTDLFPIKYGLVANHTKYGFDKPLMTCCGYGGPPYNYDFSKGCQSKDVAACEDGSKFVSWDGVHLTEAANAVVAKAILSSQYSKPSLKFDQFCRA

SEQ ID NO: 21882 - protein, 384 aa, Zea mays subsp. mays
  peptide (1)..(384): Ceres Seq. ID no. 15180465
  misc_feature (104)..(366): Pfam Name: Pfam Description:  GDSL-like Lipase/Acylhydrolase
  misc_feature (104)..(383): NCBI GI NO: 34894844 NR Description: putative lipase homolog
  misc_feature (18)..(384): NCBI GI NO: 34894866 NR Description: putative lipase homolog
  misc_feature (3)..(378): NCBI GI NO: 34894838 NR Description: putative lipase homolog
  misc_feature (29)..(383): NCBI GI NO: 15223585 NR Description: GDSL-motif lipase/hydrolase protein
  misc_feature (40)..(382): NCBI GI NO: 15217506 NR Description: GDSL-motif lipase/hydrolase protein
  misc_feature (59)..(355): NCBI GI NO: 25336281 NR Description: lipase-like protein Lip-4
  misc_feature (53)..(380): NCBI GI NO: 25405771 NR Description: hypothetical protein T22H22.20
  misc_feature (55)..(384): NCBI GI NO: 15218753 NR Description: lipase, putative [Arabidopsis thaliana]
  misc_feature (79)..(376): NCBI GI NO: 34903996 NR Description: unnamed protein product
  misc_feature (79)..(376): NCBI GI NO: 34903986 NR Description: unnamed protein product
MSAAGGSGSRARATSRPAAAAWLLLALATAAAASALALPAAAGGFSCRPGSRPVLFNFGDSNSDTGGMAAAKGWHLTRPEGRAFFPRPTGRFCDGRLAIDFLCESLNISYLSPFLKALGSNYSNGANFAIAGAATQPRDVPFALHIQVQEFLYFRDRSLELIDQGLSGPIDAQGFQNALYMIDIGQNDVNALLSNLPYDQVIAKFPPILAEIKDAVQTLYSNGSLNFWIHGTGALGCLPQKLAIPRKNDSDLDQYGCLKTYNRAAVAFNAALGSLCDELSAQMKDATLVYTDLFPIKYGLVANHTKYGFDKPLMTCCGYGGPPYNYDFSKGCQSKDVAACEDGSKFVSWDGVHLTEAANAVVAKAILSSQYSKPSLKFDQFCRA

SEQ ID NO: 21883 - protein, 317 aa, Zea mays subsp. mays
  peptide (1)..(317): Ceres Seq. ID no. 15180466
  misc_feature (37)..(299): Pfam Name: Pfam Description:  GDSL-like Lipase/Acylhydrolase
  misc_feature (37)..(316): NCBI GI NO: 34894844 NR Description: putative lipase homolog
  misc_feature (1)..(317): NCBI GI NO: 34894866 NR Description: putative lipase homolog
  misc_feature (1)..(311): NCBI GI NO: 34894838 NR Description: putative lipase homolog
  misc_feature (1)..(316): NCBI GI NO: 15223585 NR Description: GDSL-motif lipase/hydrolase protein
  misc_feature (1)..(315): NCBI GI NO: 15217506 NR Description: GDSL-motif lipase/hydrolase protein
  misc_feature (1)..(288): NCBI GI NO: 25336281 NR Description: lipase-like protein Lip-4
  misc_feature (1)..(313): NCBI GI NO: 25405771 NR Description: hypothetical protein T22H22.20
  misc_feature (1)..(317): NCBI GI NO: 15218753 NR Description: lipase, putative [Arabidopsis thaliana]
  misc_feature (12)..(309): NCBI GI NO: 34903996 NR Description: unnamed protein product
  misc_feature (12)..(309): NCBI GI NO: 34903986 NR Description: unnamed protein product
MAAAKGWHLTRPEGRAFFPRPTGRFCDGRLAIDFLCESLNISYLSPFLKALGSNYSNGANFAIAGAATQPRDVPFALHIQVQEFLYFRDRSLELIDQGLSGPIDAQGFQNALYMIDIGQNDVNALLSNLPYDQVIAKFPPILAEIKDAVQTLYSNGSLNFWIHGTGALGCLPQKLAIPRKNDSDLDQYGCLKTYNRAAVAFNAALGSLCDELSAQMKDATLVYTDLFPIKYGLVANHTKYGFDKPLMTCCGYGGPPYNYDFSKGCQSKDVAACEDGSKFVSWDGVHLTEAANAVVAKAILSSQYSKPSLKFDQFCRA

SEQ ID NO: 21884 - DNA, 819 bp, Zea mays subsp. mays
  misc_feature (1)..(819): Ceres Seq. ID no. 12484054
atgattcatgaatcgctcgtgtgctcagccacgctcacgtctcccgggcacgtctgcggcagcaccactccacacccacactccacccatcggctgccatggcgaccagggcggcggcggcagccacgctcacggcggctacgtcctctcttcttaggcgctctacctcgctgcggccgcagggactccgggtcccccaccgcgtgcctccccaaaggtttgtgcgccatattgcttcatcatcaaacgaggaagctgctgccagagcagccgccgccactgctgacgccggaggaccaaccattttcgacaagatcattgcgaaggaaatcccttcgagcatcgtatatgaagatgaaaatgtgctggcatttagagatattaatccacaagcccctgtgcacgttctagtcatcccaaaagcgagagatgggctaaccggattagacaaggctgagccaaggcatacagaaatcctgggccggcttctttacgcagcgaaagtagtggcagagaaggaaggtgtagcgagtgggtaccgtgttgtcatcaacaatggagctgaaggatgccaatctgtctatcatctgcacctgcatgtacttggtggaaggcagatgaagtggccccctggttaaaattactaagggtgacatgtttgatttcttgtacccctctctctgtgagttgagtttgctgcttgtatgactgttgttgcaaagggagaaagagtggttggtgtactagtatctgcccctgtgatgatggcccctttgagcactcatctctggaattactgagcttatgcagcattttgct

SEQ ID NO: 21885 - protein, 179 aa, Zea mays subsp. mays
  peptide (1)..(179): Ceres Seq. ID no. 12484055
  misc_feature (30)..(179): NCBI GI NO: 15221629 NR Description: putative protein kinase C inhibitor
  misc_feature (30)..(160): NCBI GI NO: 25518144 NR Description: F28K20.9 protein - Arabidopsis thaliana
  misc_feature (159)..(179): NCBI GI NO: 25518144 NR Description: F28K20.9 protein - Arabidopsis thaliana
  misc_feature (48)..(179): NCBI GI NO: 629858 NR Description: protein kinase C inhibitor - maize
  misc_feature (44)..(179): NCBI GI NO: 18410510 NR Description: protein kinase C inhibitor-like protein
  misc_feature (48)..(179): NCBI GI NO: 1177047 NR Description: 14 KD ZINC-BINDING PROTEIN
  misc_feature (48)..(179): NCBI GI NO: 11260559 NR Description: protein kinase C inhibitor-like protein -Arabidopsis thaliana
  misc_feature (68)..(179): NCBI GI NO: 1177046 NR Description: 14 KD ZINC-BINDING PROTEIN
  misc_feature (49)..(179): NCBI GI NO: 23612841 NR Description: protein kinase c inhibitor-like protein, putative
  misc_feature (72)..(179): NCBI GI NO: 23480654 NR Description: putative protein kinase C interacting protein 1
MATRAAAAATLTAATSSLLRRSTSLRPQGLRVPHRVPPQRFVRHIASSSNEEAAARAAAATADAGGPTIFDKIIAKEIPSSIVYEDENVLAFRDINPQAPVHVLVIPKARDGLTGLDKAEPRHTEILGRLLYAAKVVAEKEGVASGYRVVINNGAEGCQSVYHLHLHVLGGRQMKWPPG

SEQ ID NO: 21886 - protein, 136 aa, Zea mays subsp. mays
  peptide (1)..(136): Ceres Seq. ID no. 12484056
MIHESLVCSATLTSPGHVCGSTTPHPHSTHRLPWRPGRRRQPRSRRLRPLFLGALPRCGRRDSGSPTACLPKGLCAILLHHQTRKLLPEQPPPLLTPEDQPFSTRSLRRKSLRASYMKMKMCWHLEILIHKPLCTF

SEQ ID NO: 21887 - DNA, 986 bp, Zea mays subsp. mays
  misc_feature (1)..(986): Ceres Seq. ID no. 13622682
attcccgctcgctacggccccagtcgcgctcctcaccggccggcaccaccccgcccgccctcgccttttgcctgcccagatttaggcctggcattctagcaatgcagaagaagtgatcttataatcataaaagataacaatggggatatccaaggtgaccggcattgctgcgacagcttttcttgtcacatctgttggtctgtaccagctcggcatgagaattgttgtgcttcctttcctagccaccagtattgttgcttctgttgtcaccgttgcatcccatgatgccatcaacctaccgtggatcctggggaagaactcagtgggaaggtttcctctttggtcagttatactgtttggtcctttcttgacgcttgctcggacatatgcaatggttaagagatacatgaggaaagagtccgtgtatgacaagattgtggaagacctatatcttggaggatggccctttctcttgaaacatttaccccctggaaacccatctgtcatagactgcacttgtgagcttccaagaagttccttcgttccagcagacgagtatctttgtcttgcaacttgggataccagagctccaacaccataccaaattgaaaaagctgcacgttgggcttgtggaaagagatctgaggggaagccggtttatgtccattgcgcatttggtcatggaagaagtgcttgtgttgtgtgtgcaattctagtagcgctgggcattgctgagaactggaaagatgctgagaacatcatccgtgaaagaagaaagataaaaatgaacgcccttcacaggaaaaccttagatgagtggtccaaacaacgagattttcagaaaaaggataagtagttgactagttgtaagtgtaacattttccttagtgatgaacttgtttgtggtgttaaagcctgtttgaaacatcaatggcatatttacttaagacaagtgtaatgtctgtgaaattattatttaaattttt

SEQ ID NO: 21888 - protein, 238 aa, Zea mays subsp. mays
  peptide (1)..(238): Ceres Seq. ID no. 13622683
  misc_feature (98)..(230): Pfam Name: Pfam Description:  Dual specificity phosphatase, catalytic domain
  misc_feature (2)..(229): NCBI GI NO: 34908470 NR Description: P0489B03.9
  misc_feature (1)..(230): NCBI GI NO: 15801736 NR Description: putative enzymes [Escherichia coli O157:H7 EDL933]
  misc_feature (58)..(230): NCBI GI NO: 3041758 NR Description: unnamed protein product [Escherichia coli]
  misc_feature (58)..(230): NCBI GI NO: 26247698 NR Description: Hypothetical protein ynbD
  misc_feature (58)..(230): NCBI GI NO: 16129372 NR Description: putative enzymes [Escherichia coli K12]
  misc_feature (1)..(224): NCBI GI NO: 28896859 NR Description: hypothetical protein
  misc_feature (12)..(238): NCBI GI NO: 23030039 NR Description: hypothetical protein
MGISKVTGIAATAFLVTSVGLYQLGMRIVVLPFLATSIVASVVTVASHDAINLPWILGKNSVGRFPLWSVILFGPFLTLARTYAMVKRYMRKESVYDKIVEDLYLGGWPFLLKHLPPGNPSVIDCTCELPRSSFVPADEYLCLATWDTRAPTPYQIEKAARWACGKRSEGKPVYVHCAFGHGRSACVVCAILVALGIAENWKDAENIIRERRKIKMNALHRKTLDEWSKQRDFQKKDK

SEQ ID NO: 21889 - protein, 213 aa, Zea mays subsp. mays
  peptide (1)..(213): Ceres Seq. ID no. 13622684
  misc_feature (73)..(205): Pfam Name: Pfam Description:  Dual specificity phosphatase, catalytic domain
  misc_feature (1)..(204): NCBI GI NO: 34908470 NR Description: P0489B03.9
  misc_feature (1)..(205): NCBI GI NO: 15801736 NR Description: putative enzymes [Escherichia coli O157:H7 EDL933]
  misc_feature (33)..(205): NCBI GI NO: 3041758 NR Description: unnamed protein product [Escherichia coli]
  misc_feature (33)..(205): NCBI GI NO: 26247698 NR Description: Hypothetical protein ynbD
  misc_feature (33)..(205): NCBI GI NO: 16129372 NR Description: putative enzymes [Escherichia coli K12]
  misc_feature (1)..(199): NCBI GI NO: 28896859 NR Description: hypothetical protein
  misc_feature (1)..(213): NCBI GI NO: 23030039 NR Description: hypothetical protein
MRIVVLPFLATSIVASVVTVASHDAINLPWILGKNSVGRFPLWSVILFGPFLTLARTYAMVKRYMRKESVYDKIVEDLYLGGWPFLLKHLPPGNPSVIDCTCELPRSSFVPADEYLCLATWDTRAPTPYQIEKAARWACGKRSEGKPVYVHCAFGHGRSACVVCAILVALGIAENWKDAENIIRERRKIKMNALHRKTLDEWSKQRDFQKKDK

SEQ ID NO: 21890 - protein, 154 aa, Zea mays subsp. mays
  peptide (1)..(154): Ceres Seq. ID no. 13622685
  misc_feature (14)..(146): Pfam Name: Pfam Description:  Dual specificity phosphatase, catalytic domain
  misc_feature (1)..(145): NCBI GI NO: 34908470 NR Description: P0489B03.9
  misc_feature (1)..(146): NCBI GI NO: 15801736 NR Description: putative enzymes [Escherichia coli O157:H7 EDL933]
  misc_feature (1)..(146): NCBI GI NO: 3041758 NR Description: unnamed protein product [Escherichia coli]
  misc_feature (1)..(146): NCBI GI NO: 26247698 NR Description: Hypothetical protein ynbD
  misc_feature (1)..(146): NCBI GI NO: 16129372 NR Description: putative enzymes [Escherichia coli K12]
  misc_feature (1)..(140): NCBI GI NO: 28896859 NR Description: hypothetical protein
  misc_feature (1)..(154): NCBI GI NO: 23030039 NR Description: hypothetical protein
MVKRYMRKESVYDKIVEDLYLGGWPFLLKHLPPGNPSVIDCTCELPRSSFVPADEYLCLATWDTRAPTPYQIEKAARWACGKRSEGKPVYVHCAFGHGRSACVVCAILVALGIAENWKDAENIIRERRKIKMNALHRKTLDEWSKQRDFQKKDK

SEQ ID NO: 21891 - DNA, 1510 bp, Zea mays subsp. mays
  misc_feature (1)..(1510): Ceres Seq. ID no. 15180447
aacccccacctgaccttctcttcctccctcccccgaccgcctgtctgtcctccgcgcatccgttctctatcgaaagggaggaggaggagcgcgcgggagtgggctgggggcccaccgatgctgagctcggcgtcctcggccggggcggccatggggatgggcggcgggtaccaacaccagccgctgccactgccgcagcgcggggcggcggccgcggtcttcaccgccgcgcagtgggcggagctggagcagcaggcgctcatctacaagtacctcatggccggcgtccccgtcccgcccgatctcctccgccccgccccccacgccgccgccttctccttcgccagccccgccgcgtcgcccttctaccatcaccaccaccaccacccgtccctgagttactacgcctactacgggaagaagctggacccggagccgtggcggtgccgccgcaccgacggcaagaagtggcggtgctccaaggaggcgcaccccgactccaagtactgcgagcgccacatgcaccgtggccgcaaccgttcaagaaagcctgtggaatccaagaccgcctcctcgccgccccagctgtccaccgtcgtcaccaccaccaccacccgggaggccgccgccgcgacgccccttgagtccctcgcgggggcggggggtaaggctcacggcctgtccctcggcggcggggctggctcgtcgcacctcagcgtcgacgcttcgaacgctcactttcgctatggcagcaagtaccctcttggagctaaatccgatgctggcgagctgagcttcttctcaggagcaccagggaactccaggggcttcaccattgattctccagcagataactcttggcactccctgccatccaacgtgcccccgtttacactgtccaagggcagagactctggcctcctgcccggtgcctactcctactcccacattgaaccaccgcaggtgctcggccaggtcaccatcgcctcgctgtcacaggaccaggagcgccaccagtcgtcgttcagcagcggcggggccggcgctggtggattgctggggagcgtgaagcaggagaaccagccgctgaggcccttcttcgacgagtggcctgggacgcgggactcgtggtcggagatggacgacgcgaggtccagtaggacctccttctcgacgacccagctctccatctccattccgatgcccagatgtaattgagaacgaagctcgtgcgcggccagtaggtggcgttgtcgcatgacgcgcacccagcatcgcgctcgctgctagcgagccaccgtcacccggtgattgatgccctcatcctagctatttgtttcgctgaatcgcattaagaacagaactctatgtaagagcaggatccttcctcatgtatcaatgggggcaatgaactccattctgtttctatggttgtagtaccgaccatgctttgtatttgttgtacccagaccgagaatgaaaaccgcccagtcgtcaggcgttatcgtct

SEQ ID NO: 21892 - protein, 405 aa, Zea mays subsp. mays
  peptide (1)..(405): Ceres Seq. ID no. 15180448
  misc_feature (40)..(404): NCBI GI NO: 34897962 NR Description: putative growth-regulating factor 1
  misc_feature (56)..(401): NCBI GI NO: 38345778 NR Description: OSJNBa0083N12.16
  misc_feature (42)..(385): NCBI GI NO: 32470630 NR Description: putative growth-regulating factor
  misc_feature (42)..(205): NCBI GI NO: 32470646 NR Description: putative growth-regulating factor
  misc_feature (65)..(213): NCBI GI NO: 6573149 NR Description: growth-regulating factor 1 [Oryza sativa]
  misc_feature (64)..(243): NCBI GI NO: 18390099 NR Description: putative growth-regulating factor 1
  misc_feature (74)..(239): NCBI GI NO: 15227652 NR Description: transcription activator (GRL3)
  misc_feature (74)..(239): NCBI GI NO: 26449924 NR Description: unknown protein [Arabidopsis thaliana]
  misc_feature (74)..(250): NCBI GI NO: 11994367 NR Description: gb|AAF17567
  misc_feature (74)..(250): NCBI GI NO: 30682907 NR Description: transcription activator (GRL5)
NPHLTFSSSLPRPPVCPPRIRSLSKGRRRSAREWAGGPPMLSSASSAGAAMGMGGGYQHQPLPLPQRGAAAAVFTAAQWAELEQQALIYKYLMAGVPVPPDLLRPAPHAAAFSFASPAASPFYHHHHHHPSLSYYAYYGKKLDPEPWRCRRTDGKKWRCSKEAHPDSKYCERHMHRGRNRSRKPVESKTASSPPQLSTVVTTTTTREAAAATPLESLAGAGGKAHGLSLGGGAGSSHLSVDASNAHFRYGSKYPLGAKSDAGELSFFSGAPGNSRGFTIDSPADNSWHSLPSNVPPFTLSKGRDSGLLPGAYSYSHIEPPQVLGQVTIASLSQDQERHQSSFSSGGAGAGGLLGSVKQENQPLRPFFDEWPGTRDSWSEMDDARSSRTSFSTTQLSISIPMPRCN

SEQ ID NO: 21893 - protein, 366 aa, Zea mays subsp. mays
  peptide (1)..(366): Ceres Seq. ID no. 15180449
  misc_feature (1)..(365): NCBI GI NO: 34897962 NR Description: putative growth-regulating factor 1
  misc_feature (17)..(362): NCBI GI NO: 38345778 NR Description: OSJNBa0083N12.16
  misc_feature (3)..(346): NCBI GI NO: 32470630 NR Description: putative growth-regulating factor
  misc_feature (3)..(166): NCBI GI NO: 32470646 NR Description: putative growth-regulating factor
  misc_feature (26)..(174): NCBI GI NO: 6573149 NR Description: growth-regulating factor 1 [Oryza sativa]
  misc_feature (25)..(204): NCBI GI NO: 18390099 NR Description: putative growth-regulating factor 1
  misc_feature (35)..(200): NCBI GI NO: 15227652 NR Description: transcription activator (GRL3)
  misc_feature (35)..(200): NCBI GI NO: 26449924 NR Description: unknown protein [Arabidopsis thaliana]
  misc_feature (35)..(211): NCBI GI NO: 11994367 NR Description: gb|AAF17567
  misc_feature (35)..(211): NCBI GI NO: 30682907 NR Description: transcription activator (GRL5)
MLSSASSAGAAMGMGGGYQHQPLPLPQRGAAAAVFTAAQWAELEQQALIYKYLMAGVPVPPDLLRPAPHAAAFSFASPAASPFYHHHHHHPSLSYYAYYGKKLDPEPWRCRRTDGKKWRCSKEAHPDSKYCERHMHRGRNRSRKPVESKTASSPPQLSTVVTTTTTREAAAATPLESLAGAGGKAHGLSLGGGAGSSHLSVDASNAHFRYGSKYPLGAKSDAGELSFFSGAPGNSRGFTIDSPADNSWHSLPSNVPPFTLSKGRDSGLLPGAYSYSHIEPPQVLGQVTIASLSQDQERHQSSFSSGGAGAGGLLGSVKQENQPLRPFFDEWPGTRDSWSEMDDARSSRTSFSTTQLSISIPMPRCN

SEQ ID NO: 21894 - protein, 355 aa, Zea mays subsp. mays
  peptide (1)..(355): Ceres Seq. ID no. 15180450
  misc_feature (1)..(354): NCBI GI NO: 34897962 NR Description: putative growth-regulating factor 1
  misc_feature (6)..(351): NCBI GI NO: 38345778 NR Description: OSJNBa0083N12.16
  misc_feature (1)..(335): NCBI GI NO: 32470630 NR Description: putative growth-regulating factor
  misc_feature (1)..(155): NCBI GI NO: 32470646 NR Description: putative growth-regulating factor
  misc_feature (15)..(163): NCBI GI NO: 6573149 NR Description: growth-regulating factor 1 [Oryza sativa]
  misc_feature (14)..(193): NCBI GI NO: 18390099 NR Description: putative growth-regulating factor 1
  misc_feature (24)..(189): NCBI GI NO: 15227652 NR Description: transcription activator (GRL3)
  misc_feature (24)..(189): NCBI GI NO: 26449924 NR Description: unknown protein [Arabidopsis thaliana]
  misc_feature (24)..(200): NCBI GI NO: 11994367 NR Description: gb|AAF17567
  misc_feature (24)..(200): NCBI GI NO: 30682907 NR Description: transcription activator (GRL5)
MGMGGGYQHQPLPLPQRGAAAAVFTAAQWAELEQQALIYKYLMAGVPVPPDLLRPAPHAAAFSFASPAASPFYHHHHHHPSLSYYAYYGKKLDPEPWRCRRTDGKKWRCSKEAHPDSKYCERHMHRGRNRSRKPVESKTASSPPQLSTVVTTTTTREAAAATPLESLAGAGGKAHGLSLGGGAGSSHLSVDASNAHFRYGSKYPLGAKSDAGELSFFSGAPGNSRGFTIDSPADNSWHSLPSNVPPFTLSKGRDSGLLPGAYSYSHIEPPQVLGQVTIASLSQDQERHQSSFSSGGAGAGGLLGSVKQENQPLRPFFDEWPGTRDSWSEMDDARSSRTSFSTTQLSISIPMPRCN

SEQ ID NO: 21895 - DNA, 1378 bp, Zea mays subsp. mays
  misc_feature (1)..(1378): Ceres Seq. ID no. 13622667
ttacctagaacatcctaatcgaaaaaatataatatcgacggcgactgccgactggcttggttggctcgtggtcgctttgcccatctgatgatctcccgctagcttccttcttgctactcccgcagtccccagtccccacccgctgcgccctcgccatggatccgagctccgaaatcatactggacactccatacttccgcatctacagcgaccgccgcatcgaccgcttgatgggcaccgaaacggtgccggccggctttgatcccagcaccggcgtcacctccaaagatgtcgtcatagacagcgacgccggcctctacgtccgcctctacctcccgctcccggacacggtggctgccgccgcgtcaccaccgcccagcgttaacgacagcaagaccaagctcccggtgctggtctacttccacggcggcggcttcgtcacgcagtcggcagcgtctccgatctaccagcgcctcctcaacgcgctggccgcgagggccggcctgctcatcgtgtccgtgaactaccgcctcgcgccggagcacccgctgccggcaggctacgaggactccttccgcgcgctggagtgggtggcggcctccggcggggacccctggctgtcgcgccatggcgacctgcgccgcgtcttcctggccggcgacagcgccggcggcaacatcgtccacaacgtcgccatgatggccgccgcgtcggggccgcgggtcgagggcgccgtcctcctgcacgccgggttcgggggcaaggagcccgtcgatggcgaggcgccggcgtctgtggcgctgatggagaggctgtggggcgtcgtgtgccccggggcgacggacggcgtggacgacccgcgggtgaatcccttggccgccgcggcgccgcccaggcccagcctgcgggacatgccgtgcgagagggtgctcgtgtgcggggcggagctggactccctgctgccgagggacagggcctactacgaggccctcgcggcaagcgggtggagcggcacggtggagtggttcgagtcccagggccaggaccacgtcttcttcctcttcaaacccgactgcggtgagtccgtggcgctcatggatcgactcgtcgcgttcttcgctgcgaactgaaattcgtcatgtgcactcagtgttttatacatagtagttattgccgaggttttcaaatatgtaaaagtgccctataatttgaaaataggtatattttatataatatagggcaccaataaaatatctcgctgttgaaatgtcaaatctagattacagagcagtatgatgtagtatatttaagagcttgaaaaggtattttatatttttttaccaaattttatgaaacaagttattgttggagttgtttt

SEQ ID NO: 21896 - protein, 324 aa, Zea mays subsp. mays
  peptide (1)..(324): Ceres Seq. ID no. 13622668
  misc_feature (74)..(128): Pfam Name: Pfam Description:  Carboxylesterase
  misc_feature (6)..(323): NCBI GI NO: 38344841 NR Description: OSJNBa0064H22.22
  misc_feature (5)..(320): NCBI GI NO: 18086341 NR Description: AT3g48690/T8P19_200 [Arabidopsis thaliana]
  misc_feature (5)..(320): NCBI GI NO: 15228425 NR Description: expressed protein [Arabidopsis thaliana]
  misc_feature (1)..(320): NCBI GI NO: 21537287 NR Description: putative esterase [Arabidopsis thaliana]
  misc_feature (1)..(320): NCBI GI NO: 18402731 NR Description: expressed protein [Arabidopsis thaliana]
  misc_feature (12)..(321): NCBI GI NO: 18401743 NR Description: expressed protein [Arabidopsis thaliana]
  misc_feature (12)..(321): NCBI GI NO: 21536771 NR Description: unknown [Arabidopsis thaliana]
  misc_feature (5)..(320): NCBI GI NO: 15228426 NR Description: expressed protein [Arabidopsis thaliana]
  misc_feature (12)..(320): NCBI GI NO: 15222791 NR Description: hypothetical protein [Arabidopsis thaliana]
  misc_feature (5)..(320): NCBI GI NO: 15227669 NR Description: expressed protein [Arabidopsis thaliana]
MDPSSEIILDTPYFRIYSDRRIDRLMGTETVPAGFDPSTGVTSKDVVIDSDAGLYVRLYLPLPDTVAAAASPPPSVNDSKTKLPVLVYFHGGGFVTQSAASPIYQRLLNALAARAGLLIVSVNYRLAPEHPLPAGYEDSFRALEWVAASGGDPWLSRHGDLRRVFLAGDSAGGNIVHNVAMMAAASGPRVEGAVLLHAGFGGKEPVDGEAPASVALMERLWGVVCPGATDGVDDPRVNPLAAAAPPRPSLRDMPCERVLVCGAELDSLLPRDRAYYEALAASGWSGTVEWFESQGQDHVFFLFKPDCGESVALMDRLVAFFAAN

SEQ ID NO: 21897 - protein, 299 aa, Zea mays subsp. mays
  peptide (1)..(299): Ceres Seq. ID no. 13622669
  misc_feature (49)..(103): Pfam Name: Pfam Description:  Carboxylesterase
  misc_feature (1)..(298): NCBI GI NO: 38344841 NR Description: OSJNBa0064H22.22
  misc_feature (1)..(295): NCBI GI NO: 18086341 NR Description: AT3g48690/T8P19_200 [Arabidopsis thaliana]
  misc_feature (1)..(295): NCBI GI NO: 15228425 NR Description: expressed protein [Arabidopsis thaliana]
  misc_feature (1)..(295): NCBI GI NO: 21537287 NR Description: putative esterase [Arabidopsis thaliana]
  misc_feature (1)..(295): NCBI GI NO: 18402731 NR Description: expressed protein [Arabidopsis thaliana]
  misc_feature (1)..(296): NCBI GI NO: 18401743 NR Description: expressed protein [Arabidopsis thaliana]
  misc_feature (1)..(296): NCBI GI NO: 21536771 NR Description: unknown [Arabidopsis thaliana]
  misc_feature (1)..(295): NCBI GI NO: 15228426 NR Description: expressed protein [Arabidopsis thaliana]
  misc_feature (1)..(295): NCBI GI NO: 15222791 NR Description: hypothetical protein [Arabidopsis thaliana]
  misc_feature (1)..(295): NCBI GI NO: 15227669 NR Description: expressed protein [Arabidopsis thaliana]
MGTETVPAGFDPSTGVTSKDVVIDSDAGLYVRLYLPLPDTVAAAASPPPSVNDSKTKLPVLVYFHGGGFVTQSAASPIYQRLLNALAARAGLLIVSVNYRLAPEHPLPAGYEDSFRALEWVAASGGDPWLSRHGDLRRVFLAGDSAGGNIVHNVAMMAAASGPRVEGAVLLHAGFGGKEPVDGEAPASVALMERLWGVVCPGATDGVDDPRVNPLAAAAPPRPSLRDMPCERVLVCGAELDSLLPRDRAYYEALAASGWSGTVEWFESQGQDHVFFLFKPDCGESVALMDRLVAFFAAN

SEQ ID NO: 21898 - DNA, 1699 bp, Zea mays subsp. mays
  misc_feature (1)..(1699): Ceres Seq. ID no. 15180382
atgatgcatctcgtacccgagaagtgcaagacaagaacgtggctcctaatgtttcatctactgatttaccactgatccctcaagtgtacgggttcctcctgcagcacatatccgaaggcatgctgggaggctgcttaccattctctctcttctacctaattcaaagaaggaaattatttctgatgctgtatggtgcaaatggctcgaggattgtgctagtgggcgaattccctgcaatgatataaaactaaaaagttactgcaggttaacattattgaatatattatgttctgagagtccaaatacaagaaaagcctctgatgaatatcctgactcagaaagtgagtataaaagaaactgtccccagtttggagatgcactattcttgctaaatccagagttacctcttgaagttcatgtggacaacagtggttttgggattttaagagtttcaagagataattgtaaggaagatggaggtattggaggctctggctctgaaactgtgaactctgtagatgatgctgaagctgcatccaaaagtgtccctttgatggatgttgtgtttgttcatggccttcgtggcggcccattcaactcatggcgaattgctgatgacaaatcatcaactaccaaagctggtttagtggaaagcattgacgaggatgctgggaaagagggtacatgctggccaagagaatggcttgcggcagattttcctcaagcacgtttttttacggtcaaatacaagacaaatttgacccaatggactggagccagcttgcctcttcaggaggtgagctctatgctgctgaggaagttggtggctgctgggattggtagtcggcctgtcattttcgtgacacatagcatgggaggactggtggttaaacagcttttatatcaagcaaagctgaataactatgacaagttcctgaataatactattgggctagttttctatagttgtccgcattttggcagtaaacttgcagacatgccatggcgtatgggtttagtgtttcgtcctgctccttcgattggggagttaagaagtgggtctccaagactagttgaactgaacgattttgtgcgtcaacgacacaacaaaggatttcttgatgttcttagttttagtgagacccaggtcacaccgattgttgaaggatatggcggttgggcacttcgtatggagatagtgccaattgaatctgcatacccaggctttggggagcttgtcgttctaccgtccactgatcatataaattcatgtaagccagttaacaagaacgatccttcttatgcggaaaccttggcatttttggagaagaacttcaaattatgtctggagagagcagagtcctaggtcttgtcattggcgccgtggagttttcagcaatctgaaggcttcattttccatttaccgccagagacttttctcccgttaacgacgaatggtggttgatctgaccaaatgatctgggcgtgctgtggtttatgaagctcgcaccgaactttgtagtaacattgcacatagcggttaggctgtaaatagctgtcatttaccttttagttgacatgagttgcccccatgtaagatcaagctatataccccaatgcctgtatcgtctcaacagttttcagcaacagatttttttacaaaacaatctcataatatataagccattttcataaaatt

SEQ ID NO: 21899 - protein, 270 aa, Zea mays subsp. mays
  peptide (1)..(270): Ceres Seq. ID no. 15180383
  misc_feature (1)..(139): NCBI GI NO: 15235327 NR Description: hypothetical protein [Arabidopsis thaliana]
  misc_feature (1)..(257): NCBI GI NO: 28893415 NR Description: serine active site containing 1 [Mus musculus]
  misc_feature (1)..(266): NCBI GI NO: 14042785 NR Description: unnamed protein product [Homo sapiens]
  misc_feature (1)..(266): NCBI GI NO: 40254995 NR Description: hypothetical protein FLJ14917 [Homo sapiens]
  misc_feature (38)..(259): NCBI GI NO: 31198289 NR Description: ENSANGP00000019766 [Anopheles gambiae]
  misc_feature (1)..(23): NCBI GI NO: 31198289 NR Description: ENSANGP00000019766 [Anopheles gambiae]
  misc_feature (36)..(262): NCBI GI NO: 15291485 NR Description: GH23377p [Drosophila melanogaster]
  misc_feature (1)..(31): NCBI GI NO: 15291485 NR Description: GH23377p [Drosophila melanogaster]
  misc_feature (46)..(257): NCBI GI NO: 37523664 NR Description: hypothetical protein gll4095
  misc_feature (36)..(262): NCBI GI NO: 20129595 NR Description: CG10383-PA [Drosophila melanogaster]
MDVVFVHGLRGGPFNSWRIADDKSSTTKAGLVESIDEDAGKEGTCWPREWLAADFPQARFFTVKYKTNLTQWTGASLPLQEVSSMLLRKLVAAGIGSRPVIFVTHSMGGLVVKQLLYQAKLNNYDKFLNNTIGLVFYSCPHFGSKLADMPWRMGLVFRPAPSIGELRSGSPRLVELNDFVRQRHNKGFLDVLSFSETQVTPIVEGYGGWALRMEIVPIESAYPGFGELVVLPSTDHINSCKPVNKNDPSYAETLAFLEKNFKLCLERAES

SEQ ID NO: 21900 - protein, 186 aa, Zea mays subsp. mays
  peptide (1)..(186): Ceres Seq. ID no. 15180384
  misc_feature (1)..(55): NCBI GI NO: 15235327 NR Description: hypothetical protein [Arabidopsis thaliana]
  misc_feature (1)..(173): NCBI GI NO: 28893415 NR Description: serine active site containing 1 [Mus musculus]
  misc_feature (1)..(182): NCBI GI NO: 14042785 NR Description: unnamed protein product [Homo sapiens]
  misc_feature (1)..(182): NCBI GI NO: 40254995 NR Description: hypothetical protein FLJ14917 [Homo sapiens]
  misc_feature (1)..(175): NCBI GI NO: 31198289 NR Description: ENSANGP00000019766 [Anopheles gambiae]
  misc_feature (1)..(178): NCBI GI NO: 15291485 NR Description: GH23377p [Drosophila melanogaster]
  misc_feature (1)..(173): NCBI GI NO: 37523664 NR Description: hypothetical protein gll4095
  misc_feature (1)..(178): NCBI GI NO: 20129595 NR Description: CG10383-PA [Drosophila melanogaster]
  misc_feature (1)..(174): NCBI GI NO: 17567095 NR Description: serine active site containing 1 like (57
  misc_feature (1)..(179): NCBI GI NO: 23041874 NR Description: hypothetical protein
MLLRKLVAAGIGSRPVIFVTHSMGGLVVKQLLYQAKLNNYDKFLNNTIGLVFYSCPHFGSKLADMPWRMGLVFRPAPSIGELRSGSPRLVELNDFVRQRHNKGFLDVLSFSETQVTPIVEGYGGWALRMEIVPIESAYPGFGELVVLPSTDHINSCKPVNKNDPSYAETLAFLEKNFKLCLERAES

SEQ ID NO: 21901 - protein, 164 aa, Zea mays subsp. mays
  peptide (1)..(164): Ceres Seq. ID no. 15180385
  misc_feature (1)..(33): NCBI GI NO: 15235327 NR Description: hypothetical protein [Arabidopsis thaliana]
  misc_feature (1)..(151): NCBI GI NO: 28893415 NR Description: serine active site containing 1 [Mus musculus]
  misc_feature (1)..(160): NCBI GI NO: 14042785 NR Description: unnamed protein product [Homo sapiens]
  misc_feature (1)..(160): NCBI GI NO: 40254995 NR Description: hypothetical protein FLJ14917 [Homo sapiens]
  misc_feature (1)..(153): NCBI GI NO: 31198289 NR Description: ENSANGP00000019766 [Anopheles gambiae]
  misc_feature (1)..(156): NCBI GI NO: 15291485 NR Description: GH23377p [Drosophila melanogaster]
  misc_feature (1)..(151): NCBI GI NO: 37523664 NR Description: hypothetical protein gll4095
  misc_feature (1)..(156): NCBI GI NO: 20129595 NR Description: CG10383-PA [Drosophila melanogaster]
  misc_feature (1)..(152): NCBI GI NO: 17567095 NR Description: serine active site containing 1 like (57
  misc_feature (1)..(157): NCBI GI NO: 23041874 NR Description: hypothetical protein
MGGLVVKQLLYQAKLNNYDKFLNNTIGLVFYSCPHFGSKLADMPWRMGLVFRPAPSIGELRSGSPRLVELNDFVRQRHNKGFLDVLSFSETQVTPIVEGYGGWALRMEIVPIESAYPGFGELVVLPSTDHINSCKPVNKNDPSYAETLAFLEKNFKLCLERAES

SEQ ID NO: 21902 - DNA, 529 bp, Zea mays subsp. mays
  misc_feature (1)..(529): Ceres Seq. ID no. 13586389
aatagattctacacttctaccgttccactctcgtgcgctcttgttttcttctctccgttgccgccctacgtcaggtgcccaattctccattttcgggcccttctccagcgacgagcacccgccagaggattatggattggctggggcagaaacgcgcggagatgctgatgcaggtgctgctggtggcgtctgcggtggtggcgttcctggtgggctacgtgcgcgcggacttccagctcatgctgctcgtctacgccggcggcgtcgtgctcacggctctggtcaccgtccccaactggcctttctacaaccgtaacccgctcaagtggctcgacgctgccgaggccgagcgccacccgcggccccaggtcagcgccgcccccgcggcagggggtaagaagaggtccgggaagaacaagtagttggtcgatgtgtgtgttcttggtcgacctgactcaacctgtttaagatctattcgcagaactaatcaattataaaaagagatattgagatatttgacagttttcgc

SEQ ID NO: 21903 - protein, 104 aa, Zea mays subsp. mays
  peptide (1)..(104): Ceres Seq. ID no. 13586390
IDSTLLPFHSRALLFSSLRCRPTSGAQFSIFGPFSSDEHPPEDYGLAGAETRGDADAGAAGGVCGGGVPGGLRARGLPAHAARLRRRRRAHGSGHRPQLAFLQP

SEQ ID NO: 21904 - protein, 96 aa, Zea mays subsp. mays
  peptide (1)..(96): Ceres Seq. ID no. 13586391
  misc_feature (1)..(96): NCBI GI NO: 22329270 NR Description: Probable microsomal signal peptidase 12 kDa subunit
  misc_feature (1)..(96): NCBI GI NO: 30102562 NR Description: At4g40042 [Arabidopsis thaliana]
  misc_feature (1)..(94): NCBI GI NO: 18399963 NR Description: expressed protein [Arabidopsis thaliana]
  misc_feature (1)..(72): NCBI GI NO: 7661746 NR Description: signal peptidase 12kDa [Homo sapiens]
  misc_feature (1)..(72): NCBI GI NO: 20140350 NR Description: Microsomal signal peptidase 12 kDa subunit
  misc_feature (1)..(72): NCBI GI NO: 16905460 NR Description: signal peptidase 12kDa subunit [Homo sapiens]
  misc_feature (1)..(72): NCBI GI NO: 27667224 NR Description: similar to Microsomal signal peptidase 12 kDa subunit
  misc_feature (1)..(67): NCBI GI NO: 26350113 NR Description: unnamed protein product [Mus musculus]
  misc_feature (1)..(67): NCBI GI NO: 16975492 NR Description: similar to signal peptidase 12kDa [Mus musculus]
  misc_feature (1)..(72): NCBI GI NO: 12654137 NR Description: Similar to HSPC033 protein [Homo sapiens]
MDWLGQKRAEMLMQVLLVASAVVAFLVGYVRADFQLMLLVYAGGVVLTALVTVPNWPFYNRNPLKWLDAAEAERHPRPQVSAAPAAGGKKRSGKNK

SEQ ID NO: 21905 - protein, 86 aa, Zea mays subsp. mays
  peptide (1)..(86): Ceres Seq. ID no. 13586392
  misc_feature (1)..(86): NCBI GI NO: 22329270 NR Description: Probable microsomal signal peptidase 12 kDa subunit
  misc_feature (1)..(86): NCBI GI NO: 30102562 NR Description: At4g40042 [Arabidopsis thaliana]
  misc_feature (1)..(84): NCBI GI NO: 18399963 NR Description: expressed protein [Arabidopsis thaliana]
  misc_feature (1)..(62): NCBI GI NO: 7661746 NR Description: signal peptidase 12kDa [Homo sapiens]
  misc_feature (1)..(62): NCBI GI NO: 20140350 NR Description: Microsomal signal peptidase 12 kDa subunit
  misc_feature (1)..(62): NCBI GI NO: 16905460 NR Description: signal peptidase 12kDa subunit [Homo sapiens]
  misc_feature (1)..(62): NCBI GI NO: 27667224 NR Description: similar to Microsomal signal peptidase 12 kDa subunit
  misc_feature (1)..(57): NCBI GI NO: 26350113 NR Description: unnamed protein product [Mus musculus]
  misc_feature (1)..(57): NCBI GI NO: 16975492 NR Description: similar to signal peptidase 12kDa [Mus musculus]
  misc_feature (1)..(62): NCBI GI NO: 12654137 NR Description: Similar to HSPC033 protein [Homo sapiens]
MLMQVLLVASAVVAFLVGYVRADFQLMLLVYAGGVVLTALVTVPNWPFYNRNPLKWLDAAEAERHPRPQVSAAPAAGGKKRSGKNK

SEQ ID NO: 21906 - DNA, 1152 bp, Zea mays subsp. mays
  misc_feature (1)..(1152): Ceres Seq. ID no. 14305152
acaagctgtcacaaactcagcacacaatcacactgacacacacaccaccaccacggcaccgctagtgagaagcggagcgggaggacacgcggcgcggactgcgatggctcgtgcgctcggcgcttgcgtgctgctcgccgtcctgctcggtgccctggcgccggcggcggccgcgcgcgcccacgacgaccagggcagcggggccggcatacggcagccgagcggcgagtaccgcgggaggaaggtgggggccaggacggaggtgcgggacgtggagggcgacggcgaggtgcaggagctcggccggttctccgtcgccgagtacaaccggcagctccgagaaggtggcggcggcggcggcaggctcgagttcggcagggtggtggcggcgcagcggcaggtggtgtcggggctcaagtactacctccccacccattcactcgccttgcgcttcctcgccgccccagttccccaccccctgctcacccacccgtcccctcctgctcgcccatggctcccatcgctgtcggcgacgccctccccgacggccagctcgggtggttcgacgagaacgaccagctgcagcaggtctccgtccacgcgctcgccgccggcaagaaggtcatcctcttcggcgtccccggcgccttcaccccgacctgcagcaaccagcatgtgccaggcttcatcacacaggctgagcagctcaaagccaagggtgtagacgagatcctgcttatcagcgttaacgaccccttcgtcatgaaggcgtgggcgaagacctaccccgagaacaagcacgtgaagttcctcgccgacggatctggagcgtacaccaaggcgctcgacctcgagctcgatctcacggacaaaggtctgggcgtgcgctcgaagaggttcgctctcctggccgacgacctcacggtcaccgtcgcaaacatcgaggaaggcgggcagttcacgatctctggcgctgaggagatcctgaaggcgctttagaagccgcagcaacgatcggtctagtttgaactcgcctttgaataacttgtcgttggacaaggtctagttcggtgttgtgtatggaacggtcgtcactgagtcatgcacgatttggtatccgtgtgtttatgttcgccggtttgaggaactctc

SEQ ID NO: 21907 - protein, 240 aa, Zea mays subsp. mays
  peptide (1)..(240): Ceres Seq. ID no. 14305153
  misc_feature (176)..(240): Pfam Name: Pfam Description:  Equine herpesvirus glycoprotein gp2
  misc_feature (173)..(240): NCBI GI NO: 13592175 NR Description: ppg3 [Leishmania major]
  misc_feature (173)..(240): NCBI GI NO: 13592175 NR Description: ppg3 [Leishmania major]
  misc_feature (173)..(240): NCBI GI NO: 13592175 NR Description: ppg3 [Leishmania major]
  misc_feature (173)..(240): NCBI GI NO: 13592175 NR Description: ppg3 [Leishmania major]
  misc_feature (164)..(240): NCBI GI NO: 34809534 NR Description: Epa4p [Candida glabrata]
  misc_feature (165)..(240): NCBI GI NO: 13592175 NR Description: ppg3 [Leishmania major]
QAVTNSAHNHTDTHTTTTAPLVRSGAGGHAARTAMARALGACVLLAVLLGALAPAAAARAHDDQGSGAGIRQPSGEYRGRKVGARTEVRDVEGDGEVQELGRFSVAEYNRQLREGGGGGGRLEFGRVVAAQRQVVSGLKYYLPTHSLALRFLAAPVPHPLLTHPSPPARPWLPSLSATPSPTASSGGSTRTTSCSRSPSTRSPPARRSSSSASPAPSPRPAATSMCQASSHRLSSSKPRV

SEQ ID NO: 21908 - protein, 206 aa, Zea mays subsp. mays
  peptide (1)..(206): Ceres Seq. ID no. 14305154
  misc_feature (142)..(206): Pfam Name: Pfam Description:  Equine herpesvirus glycoprotein gp2
  misc_feature (139)..(206): NCBI GI NO: 13592175 NR Description: ppg3 [Leishmania major]
  misc_feature (139)..(206): NCBI GI NO: 13592175 NR Description: ppg3 [Leishmania major]
  misc_feature (139)..(206): NCBI GI NO: 13592175 NR Description: ppg3 [Leishmania major]
  misc_feature (139)..(206): NCBI GI NO: 13592175 NR Description: ppg3 [Leishmania major]
  misc_feature (130)..(206): NCBI GI NO: 34809534 NR Description: Epa4p [Candida glabrata]
  misc_feature (131)..(206): NCBI GI NO: 13592175 NR Description: ppg3 [Leishmania major]
MARALGACVLLAVLLGALAPAAAARAHDDQGSGAGIRQPSGEYRGRKVGARTEVRDVEGDGEVQELGRFSVAEYNRQLREGGGGGGRLEFGRVVAAQRQVVSGLKYYLPTHSLALRFLAAPVPHPLLTHPSPPARPWLPSLSATPSPTASSGGSTRTTSCSRSPSTRSPPARRSSSSASPAPSPRPAATSMCQASSHRLSSSKPRV

SEQ ID NO: 21909 - protein, 162 aa, Zea mays subsp. mays; identical to SEQ ID NO: 21275
  peptide (1)..(162): Ceres Seq. ID no. 14305155
  misc_feature (6)..(160): Pfam Name: Pfam Description:  AhpC/TSA family
  misc_feature (1)..(162): NCBI GI NO: 34911078 NR Description: peroxiredoxin
  misc_feature (1)..(162): NCBI GI NO: 4928472 NR Description: type 2 peroxiredoxin
  misc_feature (1)..(162): NCBI GI NO: 15218877 NR Description: type 2 peroxiredoxin -related
  misc_feature (1)..(162): NCBI GI NO: 15218876 NR Description: type 2 peroxiredoxin -related
  misc_feature (1)..(162): NCBI GI NO: 18654477 NR Description: thioredoxin peroxidase [Capsicum annuum]
  misc_feature (1)..(162): NCBI GI NO: 18406870 NR Description: peroxiredoxin -related [Arabidopsis thaliana]
  misc_feature (1)..(162): NCBI GI NO: 21593881 NR Description: type 2 peroxiredoxin, putative
  misc_feature (1)..(162): NCBI GI NO: 30841938 NR Description: thioredoxin peroxidase 1 [Lycopersicon esculentum]
  misc_feature (1)..(162): NCBI GI NO: 19548660 NR Description: peroxiredoxin
  misc_feature (1)..(162): NCBI GI NO: 4704732 NR Description: peroxiredoxin TPx2 [Arabidopsis thaliana]

SEQ ID NO: 21910 - DNA, 706 bp, Zea mays subsp. mays
  misc_feature (1)..(706): Ceres Seq. ID no. 13600701
cgcagtagtttttatgtaaacgacttctaaataataatttaaaaataaaatttagaaaaactatggaagattaaatatctaaatttggctagtctctctctggatgctctaattactttattttgttgcaggactcccgcgtgattcccgagggtccctcgaagtcttcaatccagacgcccctgtttcagatcgagcaaccacctccccgtttctcctccctcctgcggccgcgtcccatcccagcctcctcgccgccggagatggcggcgatgctgacgtgggtcgggcgacacagagggccgccgagtggggcctcgtcctccagaccgacgagcacaccggccgcccccagggtgtcgtcgcccgtccctccggttccaaccgcaccagcgagagtggcaactccatcgacgagagggccgccgccgccggtgctggtagagctctcccccgggtgtcggaggagcttcgcgccgcgctctcagcgttccagcagaccttcgtcgtgtccgatgccacccgccctgaccaccccatcctctacgccagcgctggattcttcaacatgacgggctactcctccaatgaggtcgtcggaaggaactggtgagtcaatggtttcaattcaatatattcctattctattccatgccaatcgaatcgaataacacttcaactaatacgcactgcacttacgcctcgc

SEQ ID NO: 21911 - protein, 102 aa, Zea mays subsp. mays
  peptide (1)..(102): Ceres Seq. ID no. 13600702
  misc_feature (1)..(102): Pfam Name: Pfam Description:  Formin Homology 2 Domain
  misc_feature (1)..(94): NCBI GI NO: 13447449 NR Description: receptor protein kinase PERK1 [Brassica napus]
  misc_feature (1)..(102): NCBI GI NO: 27375632 NR Description: blr0521 [Bradyrhizobium japonicum]
  misc_feature (1)..(102): NCBI GI NO: 1076802 NR Description: extensin-like protein - maize
  misc_feature (1)..(102): NCBI GI NO: 15226024 NR Description: arabinogalactan-protein (AGP9)
  misc_feature (1)..(102): NCBI GI NO: 25056007 NR Description: extensin-like protein [Zea mays]
  misc_feature (1)..(101): NCBI GI NO: 20138131 NR Description: Vegetative cell wall protein gp1 precursor
  misc_feature (1)..(102): NCBI GI NO: 39580549 NR Description: Hypothetical protein CBG22491
  misc_feature (1)..(102): NCBI GI NO: 1076802 NR Description: extensin-like protein - maize
  misc_feature (1)..(102): NCBI GI NO: 2429362 NR Description: proline rich protein [Santalum album]
  misc_feature (1)..(102): NCBI GI NO: 1076802 NR Description: extensin-like protein - maize
MAAMLTWVGRHRGPPSGASSSRPTSTPAAPRVSSPVPPVPTAPARVATPSTRGPPPPVLVELSPGCRRSFAPRSQRSSRPSSCPMPPALTTPSSTPALDSST

SEQ ID NO: 21912 - protein, 99 aa, Zea mays subsp. mays
  peptide (1)..(99): Ceres Seq. ID no. 13600703
  misc_feature (1)..(99): Pfam Name: Pfam Description:  Formin Homology 2 Domain
  misc_feature (1)..(91): NCBI GI NO: 13447449 NR Description: receptor protein kinase PERK1 [Brassica napus]
  misc_feature (1)..(99): NCBI GI NO: 27375632 NR Description: blr0521 [Bradyrhizobium japonicum]
  misc_feature (1)..(99): NCBI GI NO: 1076802 NR Description: extensin-like protein - maize
  misc_feature (1)..(99): NCBI GI NO: 15226024 NR Description: arabinogalactan-protein (AGP9)
  misc_feature (1)..(99): NCBI GI NO: 25056007 NR Description: extensin-like protein [Zea mays]
  misc_feature (1)..(98): NCBI GI NO: 20138131 NR Description: Vegetative cell wall protein gp1 precursor
  misc_feature (1)..(99): NCBI GI NO: 39580549 NR Description: Hypothetical protein CBG22491
  misc_feature (1)..(99): NCBI GI NO: 1076802 NR Description: extensin-like protein - maize
  misc_feature (1)..(99): NCBI GI NO: 2429362 NR Description: proline rich protein [Santalum album]
  misc_feature (1)..(99): NCBI GI NO: 1076802 NR Description: extensin-like protein - maize
MLTWVGRHRGPPSGASSSRPTSTPAAPRVSSPVPPVPTAPARVATPSTRGPPPPVLVELSPGCRRSFAPRSQRSSRPSSCPMPPALTTPSSTPALDSST

SEQ ID NO: 21913 - DNA, 1547 bp, Zea mays subsp. mays
  misc_feature (1)..(1547): Ceres Seq. ID no. 15180400
caagacaatacaatgctgaaaatggagggcgacatggcactgcaaaacaagcaattcctagtcctgctgatacttttagtccagctaggaaggacaatacttcaactgcgtatgctctcaaagaagcccgtgatttaaagcataaggctaatcgtttgaaggaagaaggaaaagagcttgaaagtacaagactctactttgactccgccttaaaatttttgcatgttgcatcacttttggaacctcctagttttgatggtttgaaacaaggcgatgcagcccagagcatgtattcagatactgcaaaactttgcaactttgttggtcacgcgtatgaaaaatgcaagaagatggctgctgctgctttagcatacaagtgtgttgaagttgcttatctgaaggctgcatactgcaagcacccaactgcaagcaaggatagacaagtgttacaggcagttgtacagactgcaccaggtgaatcaccatcatcttcagcctcagacattgataatttaaataacaatggattatccaagggcccttcaagcaaggatgccaattcaccacaagtggttggaaatcatttgttgctggccactcgaaatcaaccacacttgatgcggttacttgcttatacaaatgatgtcaatagtgcctttgaggctactcggaagtctcacatggcaattgcttctgcttctggcaatcatgaaaatggagttgatggtctttcttcagtaaaaacagtactggattttaacttccgaagtgtgaatgatctactaaggtttgtgcggatttcaatggagtctatcagctgctgatgtgtgcagaatctgagaaagtgccatctgatggaagttcctgttggatgtttaatctaattaactttgttttttatgaagtagcatgaagctgaatatagtccaacagtgcaaaagcataggtctttcatttgagcttgctggtcaacttgtacagagagtgatcatattccttctttttttacgttgattacacccaattagtatatatagttgcatacccacttggatgatttagttagtgaggaacacaagtgaagatgagctttgcactgttcaatgcttgtgcttggaagaaggatgctcttgcgcccgcagttcattgttatctggaaagtggcttgctactgagcattctcttactacatgatgtaaattgtgaatctccatcaaggctggcttatggctgaagagtcagtatcatagtttcctttgatgggagaggacagcaaagccagctaatctcgctaaccaagaaatcggctagtagttttttcccttttgaaccttgtcatgatgccttgtcttctggataaagttcacgcaggtttcaaataagaaatcacatggacgactatcagacttgtatggaatatggatgctgtacaaaggtttctaatgtacattagtctaactttttttttcatgatccccgaaatgccgactatcaccagcgcatgtacatgtatatatacatacactaaaggttggggcatttttatc

SEQ ID NO: 21914 - protein, 273 aa, Zea mays subsp. mays
  peptide (1)..(273): Ceres Seq. ID no. 15180401
  misc_feature (4)..(273): NCBI GI NO: 34899330 NR Description: contains ESTsAU082379
  misc_feature (6)..(272): NCBI GI NO: 25518543 NR Description: hypothetical protein F22D16
  misc_feature (15)..(270): NCBI GI NO: 15229341 NR Description: hypothetical protein [Arabidopsis thaliana]
  misc_feature (16)..(272): NCBI GI NO: 30683379 NR Description: expressed protein [Arabidopsis thaliana]
  misc_feature (109)..(272): NCBI GI NO: 7452411 NR Description: hypothetical protein dl3905c - Arabidopsis thaliana
  misc_feature (6)..(105): NCBI GI NO: 22329307 NR Description: expressed protein [Arabidopsis thaliana]
RQYNAENGGRHGTAKQAIPSPADTFSPARKDNTSTAYALKEARDLKHKANRLKEEGKELESTRLYFDSALKFLHVASLLEPPSFDGLKQGDAAQSMYSDTAKLCNFVGHAYEKCKKMAAAALAYKCVEVAYLKAAYCKHPTASKDRQVLQAVVQTAPGESPSSSASDIDNLNNNGLSKGPSSKDANSPQVVGNHLLLATRNQPHLMRLLAYTNDVNSAFEATRKSHMAIASASGNHENGVDGLSSVKTVLDFNFRSVNDLLRFVRISMESISC

SEQ ID NO: 21915 - protein, 178 aa, Zea mays subsp. mays
  peptide (1)..(178): Ceres Seq. ID no. 15180402
  misc_feature (1)..(178): NCBI GI NO: 34899330 NR Description: contains ESTsAU082379
  misc_feature (1)..(177): NCBI GI NO: 25518543 NR Description: hypothetical protein F22D16
  misc_feature (1)..(175): NCBI GI NO: 15229341 NR Description: hypothetical protein [Arabidopsis thaliana]
  misc_feature (1)..(177): NCBI GI NO: 30683379 NR Description: expressed protein [Arabidopsis thaliana]
  misc_feature (14)..(177): NCBI GI NO: 7452411 NR Description: hypothetical protein dl3905c - Arabidopsis thaliana
MYSDTAKLCNFVGHAYEKCKKMAAAALAYKCVEVAYLKAAYCKHPTASKDRQVLQAVVQTAPGESPSSSASDIDNLNNNGLSKGPSSKDANSPQVVGNHLLLATRNQPHLMRLLAYTNDVNSAFEATRKSHMAIASASGNHENGVDGLSSVKTVLDFNFRSVNDLLRFVRISMESISC

SEQ ID NO: 21916 - protein, 157 aa, Zea mays subsp. mays
  peptide (1)..(157): Ceres Seq. ID no. 15180403
  misc_feature (1)..(157): NCBI GI NO: 34899330 NR Description: contains ESTsAU082379
  misc_feature (1)..(156): NCBI GI NO: 25518543 NR Description: hypothetical protein F22D16
  misc_feature (1)..(154): NCBI GI NO: 15229341 NR Description: hypothetical protein [Arabidopsis thaliana]
  misc_feature (1)..(156): NCBI GI NO: 30683379 NR Description: expressed protein [Arabidopsis thaliana]
  misc_feature (1)..(156): NCBI GI NO: 7452411 NR Description: hypothetical protein dl3905c - Arabidopsis thaliana
MAAAALAYKCVEVAYLKAAYCKHPTASKDRQVLQAVVQTAPGESPSSSASDIDNLNNNGLSKGPSSKDANSPQVVGNHLLLATRNQPHLMRLLAYTNDVNSAFEATRKSHMAIASASGNHENGVDGLSSVKTVLDFNFRSVNDLLRFVRISMESISC

SEQ ID NO: 21917 - DNA, 1103 bp, Zea mays subsp. mays
  misc_feature (1)..(1103): Ceres Seq. ID no. 15180424
attcatccaacactactccaagtttaatttcccacaccaaacctcagctcccaccgatcggttccatcaacctaacaatccctcgcttgttagcccgcgcgcgtgtgtcgtgtgcgctgcgtgcgtcccatggctcagcctcgcgtgcacccaaacgcggcggcggcggcgggtgacctggagatgggcggcaacggcggcgtgttcccgccgctgccagttcgcgggcagcccgcctccgtgaaccagcagcagctcggcggcggcccccacacctgggtgggcaacgacgccaacacgctgctggtggtggccacgctgatcaccacgctcacctaccagttcggcaccagcatccccggcggctactggcagcaggacacgacggcggcgtcgagggacggcaaggagcaggtcacgtaccgcgccggcgaccccatcatgcgcgacctgcaccggccaaggtactgggtgttcatgggcgcgagctgggtggggttcgcgagctccatgatgatgacgctgagcctgctggtgcggatgcccgttgactcgcgccacgtgcgctggtccttcgtggtggcctactccagcctggtgctcaccttcgtggtgtcgcagcccaagacgcacctgtcgctggacctcctcatctgggccgccgtcctcgtcttcctctggatcatcgtcagcctccacccggaccgccgcgcgcgcgtcatccaggagctctgctgcggtggccgcgagacctgaagcagagcaaaccccgaccgacgtaccacgaatgattagttgttgctttttttcttttctttttttggtgacgatggggtaattgactgtcttttctcttctagtcgaccaagatgtaaacaaaatatcccgctgcacaaggtagccagagcctatgtccttgattgagcgctatagtgctctacattcgtatcaagtagaatctagataggcagatgaacacgctggcatgatttagcgtaatcttttcggcacccgcctgcaatttaaaaaactagactagatatttccatgtcaacgtgtaaagaaaaaaaagaaaaatcaatggccattcgctagttttcttt

SEQ ID NO: 21918 - protein, 208 aa, Zea mays subsp. mays
  peptide (1)..(208): Ceres Seq. ID no. 15180425
  misc_feature (40)..(185): NCBI GI NO: 34902868 NR Description: unnamed protein product
  misc_feature (73)..(183): NCBI GI NO: 34902874 NR Description: unnamed protein product
MAQPRVHPNAAAAAGDLEMGGNGGVFPPLPVRGQPASVNQQQLGGGPHTWVGNDANTLLVVATLITTLTYQFGTSIPGGYWQQDTTAASRDGKEQVTYRAGDPIMRDLHRPRYWVFMGASWVGFASSMMMTLSLLVRMPVDSRHVRWSFVVAYSSLVLTFVVSQPKTHLSLDLLIWAAVLVFLWIIVSLHPDRRARVIQELCCGGRET

SEQ ID NO: 21919 - protein, 190 aa, Zea mays subsp. mays
  peptide (1)..(190): Ceres Seq. ID no. 15180426
  misc_feature (22)..(167): NCBI GI NO: 34902868 NR Description: unnamed protein product
  misc_feature (55)..(165): NCBI GI NO: 34902874 NR Description: unnamed protein product
MGGNGGVFPPLPVRGQPASVNQQQLGGGPHTWVGNDANTLLVVATLITTLTYQFGTSIPGGYWQQDTTAASRDGKEQVTYRAGDPIMRDLHRPRYWVFMGASWVGFASSMMMTLSLLVRMPVDSRHVRWSFVVAYSSLVLTFVVSQPKTHLSLDLLIWAAVLVFLWIIVSLHPDRRARVIQELCCGGRET

SEQ ID NO: 21920 - protein, 104 aa, Zea mays subsp. mays
  peptide (1)..(104): Ceres Seq. ID no. 15180427
  misc_feature (1)..(81): NCBI GI NO: 34902868 NR Description: unnamed protein product
  misc_feature (1)..(79): NCBI GI NO: 34902874 NR Description: unnamed protein product
MRDLHRPRYWVFMGASWVGFASSMMMTLSLLVRMPVDSRHVRWSFVVAYSSLVLTFVVSQPKTHLSLDLLIWAAVLVFLWIIVSLHPDRRARVIQELCCGGRET

SEQ ID NO: 21921 - DNA, 520 bp, Zea mays subsp. mays
  misc_feature (1)..(520): Ceres Seq. ID no. 13586393
actttccccgcctccatcaccaattcacgatctcctttcccgcaccgcgccccggatcgccggctcgcaattccggagttaaattcccctccaccgcaaccgtcatgggcggctcccacagccgcgaggacgtcgatctcacctcctccgacgaagaggaggaattcgaggacgactatgacgcccgatcccatcgcggaggccgcagcgagcgcggggcagcgcgacgacgacctcctccgcaccgccacaccttcctcgcttgaggccatcgacgccaagctcaggtcgctggatctcaagtaccagagacctaccgccgccaagctctacctccacgtcggcggggcctcgccttccgcgcgctgggtgcccgccgagcgccgcgcgacctacgcattcgtcgaccagtcgagcgacgacgcctyctcccccaggtggttcctagaggttgggccggggccgcgggtctccgcgcccgtggactcggcgctccagctgaagacgatccccgcgcagc

SEQ ID NO: 21922 - protein, 173 aa, Zea mays subsp. mays
  peptide (1)..(173): Ceres Seq. ID no. 13586394
  misc_feature (78)..(172): NCBI GI NO: 7488984 NR Description: dem protein - tomato
  misc_feature (143)..(143): Xaa is any aa, unknown or other
TFPASITNSRSPFPHRAPDRRLAIPELNSPPPQPSWAAPTAARTSISPPPTKRRNSRTTMTPDPIAEAAASAGQRDDDLLRTATPSSLEAIDAKLRSLDLKYQRPTAAKLYLHVGGASPSARWVPAERRATYAFVDQSSDDAXSPRWFLEVGPGPRVSAPVDSALQLKTIPAQ

SEQ ID NO: 21923 - protein, 114 aa, Zea mays subsp. mays
  peptide (1)..(114): Ceres Seq. ID no. 13586395
  misc_feature (19)..(113): NCBI GI NO: 7488984 NR Description: dem protein - tomato
  misc_feature (84)..(84): Xaa is any aa, unknown or other
MTPDPIAEAAASAGQRDDDLLRTATPSSLEAIDAKLRSLDLKYQRPTAAKLYLHVGGASPSARWVPAERRATYAFVDQSSDDAXSPRWFLEVGPGPRVSAPVDSALQLKTIPAQ

SEQ ID NO: 21924 - protein, 87 aa, Zea mays subsp. mays
  peptide (1)..(87): Ceres Seq. ID no. 13586396
  misc_feature (35)..(78): NCBI GI NO: 7488984 NR Description: dem protein - tomato
FPRLHHQFTISFPAPRPGSPARNSGVKFPSTATVMGGSHSREDVDLTSSDEEEEFEDDYDARSHRGGRSERGAARRRPPPHRHTFLA

SEQ ID NO: 21925 - DNA, 728 bp, Zea mays subsp. mays
  misc_feature (1)..(728): Ceres Seq. ID no. 14305101
agaacaaggggggaaaaagttgacatacgcttgcagctatggcccttgccgcccgcgccgcgctcgtgcgcgtcctccctccgcgaccatcgccgacctcccaacagaagcagctcaagcaaggtctaggcggccgcagtgggtcctcgctcgccgttcgggcgaaggactccgatgacttcggggcccttctgtcggagaagctcgatgcgcaggcgcctgagaagcgggatgggcgggagggttttgggagggaggcgagtagcgtggaggaggagaaggaggtggtggaggtgcagggcgagccggcttcgtggggtgtgctcaaccaaatcggcttcgagttggactctgacaaatcatattctgctctcatatatggcacatctgctcttgttgcaatttggatatcatcaattgtggtttctgcacttgattcagtccctttggttcctcaggtgatggaagttgttggtcttggcttcacaatttggttcacatcgagatacctgatatttaaggagaaccgtgatgaacttttcacgagagtcagctccatcaagaagcaaattttggggtctcatgagaactgagcgtctctcttacgttctgttctgttaactggtactgtgttttattgaagatgttttttttggaataaacagtacatttttttgtttttcgcctgcatttttttactaatcgaaaggtaagtgcactgtactctc

SEQ ID NO: 21926 - protein, 184 aa, Zea mays subsp. mays
  peptide (1)..(184): Ceres Seq. ID no. 14305102
  misc_feature (62)..(181): NCBI GI NO: 7485852 NR Description: hypothetical protein F20D10
  misc_feature (62)..(181): NCBI GI NO: 18420175 NR Description: expressed protein [Arabidopsis thaliana]
  misc_feature (73)..(183): NCBI GI NO: 38175474 NR Description: unknown protein
  misc_feature (106)..(181): NCBI GI NO: 687677 NR Description: unknown
  misc_feature (106)..(181): NCBI GI NO: 18411555 NR Description: expressed protein [Arabidopsis thaliana]
  misc_feature (73)..(181): NCBI GI NO: 18407178 NR Description: expressed protein [Arabidopsis thaliana]
  misc_feature (73)..(181): NCBI GI NO: 21555057 NR Description: unknown [Arabidopsis thaliana]
  misc_feature (72)..(181): NCBI GI NO: 34393236 NR Description: unknown protein
  misc_feature (96)..(179): NCBI GI NO: 37536446 NR Description: hypothetical protein
  misc_feature (104)..(180): NCBI GI NO: 18403896 NR Description: expressed protein [Arabidopsis thaliana]
MALAARAALVRVLPPRPSPTSQQKQLKQGLGGRSGSSLAVRAKDSDDFGALLSEKLDAQAPEKRDGREGFGREASSVEEEKEVVEVQGEPASWGVLNQIGFELDSDKSYSALIYGTSALVAIWISSIVVSALDSVPLVPQVMEVVGLGFTIWFTSRYLIFKENRDELFTRVSSIKKQILGSHEN

SEQ ID NO: 21927 - protein, 95 aa, Zea mays subsp. mays
  peptide (1)..(95): Ceres Seq. ID no. 14305103
MTSGPFCRRSSMRRRLRSGMGGRVLGGRRVAWRRRRRWWRCRASRLRGVCSTKSASSWTLTNHILLSYMAHLLLLQFGYHQLWFLHLIQSLWFLR

SEQ ID NO: 21928 - DNA, 841 bp, Zea mays subsp. mays
  misc_feature (1)..(841): Ceres Seq. ID no. 15180292
gttttttcgtcttcctcgcagcgccgccgctccatcttccgctgatccgctcgctcccgcctctcgccacgcaggcggcggcgctcaggcccgtgatttcagcgacggcgtcagcggcttcccctcccgtctcttcccagtcgcctcgcgccctcgcctccggtcctccgcacaccggccggtgaccctgcatccaccatgactggtgtcagcactgggagaccggcgggtcggaggccccgcaggaggcggaggcggagcccgcgacgccgacgtccgtggggagccagctgcggcggccggccgagtgcccgccggcgccgcggaagccggcgtgggcgcctccgccgccgtccacgcccgcctacaagcgcagcaggccgtccccgccctcctccgcggcgccggcgccggcgcgccgggccttcttccccgtcgcgcgcgacctcaccaccgtgttccgcgccctggcgccgcccaagaagcggatccgcgcgggctgacgacgggggcggtggcgttctccctggcgcgcagcacgggacgggaccggcgtggcgtggatctggtgcccagtccgccattggccgtggcgacgccgtcagtcatcagtaggtgcgcggtcatggcatggtacagagctctcgtacaaataagttctgttttttttatttggggggagggggagtgtagaattgggaaagaggctgttgtttacgtatgggggaggatgaatggggcattgaaagcttgtaaagagaattcctacagatttgttcattgtatttgttaaactatacttgctgacagtttgagaaaaatagtgaactttcacctgaat

SEQ ID NO: 21929 - protein, 138 aa, Zea mays subsp. mays
  peptide (1)..(138): Ceres Seq. ID no. 15180293
  misc_feature (1)..(76): Pfam Name: Pfam Description:  Cupin
  misc_feature (1)..(98): NCBI GI NO: 39592411 NR Description: Hypothetical protein CBG07956
  misc_feature (1)..(98): NCBI GI NO: 25143299 NR Description: pre-mRNA splicing SR protein related (68
  misc_feature (1)..(104): NCBI GI NO: 25408026 NR Description: probable proline-rich protein
  misc_feature (1)..(104): NCBI GI NO: 30684163 NR Description: proline-rich protein -related
  misc_feature (1)..(104): NCBI GI NO: 9843651 NR Description: SRM102 [Arabidopsis thaliana]
  misc_feature (1)..(132): NCBI GI NO: 23019271 NR Description: hypothetical protein [Thermobifida fusca]
  misc_feature (1)..(99): NCBI GI NO: 34905768 NR Description: P0401G10.10
  misc_feature (1)..(119): NCBI GI NO: 39592411 NR Description: Hypothetical protein CBG07956
  misc_feature (1)..(95): NCBI GI NO: 15027957 NR Description: putative arginine/serine-rich protein
  misc_feature (1)..(132): NCBI GI NO: 38346512 NR Description: OSJNBa0027H09.7
MTGVSTGRPAGRRPRRRRRRSPRRRRPWGASCGGRPSARRRRGSRRGRLRRRPRPPTSAAGRPRPPPRRRRRRAGPSSPSRATSPPCSAPWRRPRSGSARADDGGGGVLPGAQHGTGPAWRGSGAQSAIGRGDAVSHQ

SEQ ID NO: 21930 - DNA, 772 bp, Zea mays subsp. mays
  misc_feature (1)..(772): Ceres Seq. ID no. 14312444
atattcatcagggtactctacccggtcccggttggacacttggacagcccagcagccaatggcgttggtataaaacacaggtcgcatcgccgctacgagtcgcgcgcacacgataccattatattccatggaccacgacgcgtcacggcaagaagcggcggcggccgtgtggcgcggcacggtgcgcgcggtggcgtcggggccgacgcccgacgaggcgtgggcgctgctgggcgacttctgctcgctgcaccggtgggtgtccacggtgcgggcgtgccggcgcgtggaggtggagggcgcggcggcggcggagccggagccggaggggcgccccgcccccggctgcgtgcgctactgcgagggccccgtgaacatggccgcgccgggggagctcgtgggctggtccaaggagcggctcctggagatggaccacgcggggcggtggtacagctacgagctgctggagagcaacaagggcttcggcaggtaccgggccaccgtgcgggtggagcatgacccggcgggatgcgctgtcaggtggtcgttcgaggccgacccggtgaagggctggacgctcgacgggttcctggggttcctggagaaactcgcgcgtggcgtcgcccagcggctccaagaggagatcatggtgaagccgtgaagtcgcctaggattggtttgtggccgcgcgttcgtttacacttattttcaatccatatggatatggattgaagtgaattgatacagattgaaagatattttgatttactat

SEQ ID NO: 21931 - protein, 177 aa, Zea mays subsp. mays
  peptide (1)..(177): Ceres Seq. ID no. 14312445
  misc_feature (1)..(174): NCBI GI NO: 34903618 NR Description: B1046G12.16
  misc_feature (15)..(177): NCBI GI NO: 34903624 NR Description: transport protein-like
  misc_feature (15)..(174): NCBI GI NO: 15225189 NR Description: hypothetical protein [Arabidopsis thaliana]
  misc_feature (9)..(170): NCBI GI NO: 15233966 NR Description: expressed protein [Arabidopsis thaliana]
  misc_feature (12)..(171): NCBI GI NO: 24460070 NR Description: lachrymatory factor synthase [Allium fistulosum]
  misc_feature (12)..(171): NCBI GI NO: 24460068 NR Description: lachrymatory factor synthase [Allium fistulosum]
  misc_feature (12)..(171): NCBI GI NO: 24460072 NR Description: lachrymatory factor synthase [Allium chinense]
  misc_feature (12)..(171): NCBI GI NO: 25008713 NR Description: Lachrymatory-factor synthase precursor
  misc_feature (15)..(171): NCBI GI NO: 24460078 NR Description: lachrymatory factor synthase [Allium porrum]
  misc_feature (12)..(171): NCBI GI NO: 24460080 NR Description: lachrymatory factor synthase [Allium ampeloprasum]
MDHDASRQEAAAAVWRGTVRAVASGPTPDEAWALLGDFCSLHRWVSTVRACRRVEVEGAAAAEPEPEGRPAPGCVRYCEGPVNMAAPGELVGWSKERLLEMDHAGRWYSYELLESNKGFGRYRATVRVEHDPAGCAVRWSFEADPVKGWTLDGFLGFLEKLARGVAQRLQEEIMVKP

SEQ ID NO: 21932 - protein, 172 aa, Zea mays subsp. mays
  peptide (1)..(172): Ceres Seq. ID no. 14312446
  misc_feature (12)..(172): NCBI GI NO: 9625624 NR Description: nuclear antigen EBNA1 [Human herpesvirus 4]
  misc_feature (53)..(172): NCBI GI NO: 24652652 NR Description: CG13214-PA [Drosophila melanogaster]
  misc_feature (52)..(172): NCBI GI NO: 9625624 NR Description: nuclear antigen EBNA1 [Human herpesvirus 4]
  misc_feature (50)..(172): NCBI GI NO: 9625624 NR Description: nuclear antigen EBNA1 [Human herpesvirus 4]
  misc_feature (43)..(172): NCBI GI NO: 421936 NR Description: glycine-rich protein - common tobacco
  misc_feature (44)..(172): NCBI GI NO: 13561998 NR Description: major ampullate spidroin 1
  misc_feature (25)..(172): NCBI GI NO: 17540706 NR Description: COLlagen structural gene (33.8 kD) (col-103)
  misc_feature (50)..(172): NCBI GI NO: 9625624 NR Description: nuclear antigen EBNA1 [Human herpesvirus 4]
  misc_feature (51)..(172): NCBI GI NO: 15609263 NR Description: PE_PGRS [Mycobacterium tuberculosis H37Rv]
  misc_feature (51)..(172): NCBI GI NO: 13561976 NR Description: major ampullate spidroin 1 [Argiope aurantia]
IFIRVLYPVPVGHLDSPAANGVGIKHRSHRRYESRAHDTIIFHGPRRVTARSGGGRVARHGARGGVGADARRGVGAAGRLLLAAPVGVHGAGVPARGGGGRGGGGAGAGGAPRPRLRALLRGPREHGRAGGARGLVQGAAPGDGPRGAVVQLRAAGEQQGLRQVPGHRAGGA

SEQ ID NO: 21933 - protein, 123 aa, Zea mays subsp. mays
  peptide (1)..(123): Ceres Seq. ID no. 14312447
IHQGTLPGPGWTLGQPSSQWRWYKTQVASPLRVARTRYHYIPWTTTRHGKKRRRPCGAARCARWRRGRRPTRRGRCWATSARCTGGCPRCGRAGAWRWRARRRRSRSRRGAPPPAACATARAP

SEQ ID NO: 21934 - DNA, 1216 bp, Zea mays subsp. mays
  misc_feature (1)..(1216): Ceres Seq. ID no. 13622721
gaacaaataaaaatatataattaatttagtgcacacggagtggggaaacgaaaaggaaagctctctcattgccaaattgcccccgactcaagccccccgcgccgccggcgttggtggaatcgatcgacccggcctcgccggacaatccaccagcgttggtttcacctcaggtttttgtgcatggaagatgacaatgaggtcactggagagtcacctgtggctgatgaatgggatatgttgtccctgacttcatcaatatatgctagcccattattccgaagaggatttgatccaattaatttgcctggatatgggaatgtgattaatattcaggaaggcacacaaactggattagtcatgtcagatggcttcgtgttccctccaagtgagcatgaaaatttgccaatagaaccagagcatgaggatttgccaatagaaccagggcatgatgaatcaaatacaaacagcgttgaaaaggaaagtagttgtgctggaaataacgatgatgactggtgtcatgtttcacctgaagaaatcgatgacgtaagtaatgaaaatctagctgacaacagtgacttgcctactgccagtgaagctacggtaccagattcccagcctacagaaataaatgctaagcgagagaaagatcataggacatgcaaggctgatcatacttgtgaaagatggtggaaaaagaaaaccacgtatctatttcatcatataaaaggagtgactacactctgctcagttgtggcagctggtgctgttgttggttttgttgtaatgggtcagaggtggcagcaggaccattggcaccttcatcaatttaagttcagtgtcagcggtgagagcatgaatcgagtcattggagcattcagtcgtttgaaggatgggcttcctgggagtgagcaactaagatctatgctgccgactcgcgtactcccacaacagccgctgagcgcttgagtacatgcaccaaattttggtgggctgcttctagtgtcaatttttgttgcttatatgatcttgagaaagttcattctttttcttgtgctacttgattttatgttactgtaaattagtggtcgagacttctcacggtgctgttctttaaaacatagcaaccgtgaagggacatggtggaaacacagagggcactataacaatatgtatccaaaaaaaaaaaaaaaaaaattcgataccgtcgacctcgagg

SEQ ID NO: 21935 - protein, 261 aa, Zea mays subsp. mays
  peptide (1)..(261): Ceres Seq. ID no. 13622722
  misc_feature (1)..(261): NCBI GI NO: 22324443 NR Description: contains ESTsAU101162
  misc_feature (12)..(249): NCBI GI NO: 18406940 NR Description: expressed protein [Arabidopsis thaliana]
  misc_feature (12)..(249): NCBI GI NO: 21553358 NR Description: unknown [Arabidopsis thaliana]
  misc_feature (12)..(223): NCBI GI NO: 7486469 NR Description: hypothetical protein At2g45980
  misc_feature (2)..(225): NCBI GI NO: 38346457 NR Description: OSJNBa0019G23.5
  misc_feature (15)..(249): NCBI GI NO: 18411306 NR Description: expressed protein [Arabidopsis thaliana]
  misc_feature (15)..(221): NCBI GI NO: 30678620 NR Description: expressed protein [Arabidopsis thaliana]
  misc_feature (2)..(106): NCBI GI NO: 10241633 NR Description: hypothetical protein
MEDDNEVTGESPVADEWDMLSLTSSIYASPLFRRGFDPINLPGYGNVINIQEGTQTGLVMSDGFVFPPSEHENLPIEPEHEDLPIEPGHDESNTNSVEKESSCAGNNDDDWCHVSPEEIDDVSNENLADNSDLPTASEATVPDSQPTEINAKREKDHRTCKADHTCERWWKKKTTYLFHHIKGVTTLCSVVAAGAVVGFVVMGQRWQQDHWHLHQFKFSVSGESMNRVIGAFSRLKDGLPGSEQLRSMLPTRVLPQQPLSA

SEQ ID NO: 21936 - protein, 243 aa, Zea mays subsp. mays
  peptide (1)..(243): Ceres Seq. ID no. 13622723
  misc_feature (1)..(243): NCBI GI NO: 22324443 NR Description: contains ESTsAU101162
  misc_feature (1)..(231): NCBI GI NO: 18406940 NR Description: expressed protein [Arabidopsis thaliana]
  misc_feature (1)..(231): NCBI GI NO: 21553358 NR Description: unknown [Arabidopsis thaliana]
  misc_feature (1)..(205): NCBI GI NO: 7486469 NR Description: hypothetical protein At2g45980
  misc_feature (1)..(207): NCBI GI NO: 38346457 NR Description: OSJNBa0019G23.5
  misc_feature (1)..(231): NCBI GI NO: 18411306 NR Description: expressed protein [Arabidopsis thaliana]
  misc_feature (1)..(203): NCBI GI NO: 30678620 NR Description: expressed protein [Arabidopsis thaliana]
  misc_feature (1)..(88): NCBI GI NO: 10241633 NR Description: hypothetical protein
MLSLTSSIYASPLFRRGFDPINLPGYGNVINIQEGTQTGLVMSDGFVFPPSEHENLPIEPEHEDLPIEPGHDESNTNSVEKESSCAGNNDDDWCHVSPEEIDDVSNENLADNSDLPTASEATVPDSQPTEINAKREKDHRTCKADHTCERWWKKKTTYLFHHIKGVTTLCSVVAAGAVVGFVVMGQRWQQDHWHLHQFKFSVSGESMNRVIGAFSRLKDGLPGSEQLRSMLPTRVLPQQPLSA

SEQ ID NO: 21937 - protein, 202 aa, Zea mays subsp. mays
  peptide (1)..(202): Ceres Seq. ID no. 13622724
  misc_feature (1)..(202): NCBI GI NO: 22324443 NR Description: contains ESTsAU101162
  misc_feature (1)..(190): NCBI GI NO: 18406940 NR Description: expressed protein [Arabidopsis thaliana]
  misc_feature (1)..(190): NCBI GI NO: 21553358 NR Description: unknown [Arabidopsis thaliana]
  misc_feature (1)..(164): NCBI GI NO: 7486469 NR Description: hypothetical protein At2g45980
  misc_feature (1)..(166): NCBI GI NO: 38346457 NR Description: OSJNBa0019G23.5
  misc_feature (1)..(190): NCBI GI NO: 18411306 NR Description: expressed protein [Arabidopsis thaliana]
  misc_feature (1)..(162): NCBI GI NO: 30678620 NR Description: expressed protein [Arabidopsis thaliana]
  misc_feature (1)..(47): NCBI GI NO: 10241633 NR Description: hypothetical protein
MSDGFVFPPSEHENLPIEPEHEDLPIEPGHDESNTNSVEKESSCAGNNDDDWCHVSPEEIDDVSNENLADNSDLPTASEATVPDSQPTEINAKREKDHRTCKADHTCERWWKKKTTYLFHHIKGVTTLCSVVAAGAVVGFVVMGQRWQQDHWHLHQFKFSVSGESMNRVIGAFSRLKDGLPGSEQLRSMLPTRVLPQQPLSA

SEQ ID NO: 21938 - DNA, 2616 bp, Zea mays subsp. mays
  misc_feature (1)..(2616): Ceres Seq. ID no. 13565116
acctagaacatcctaatcgaaaaaaactcaaatttcgcagcagctgagccgagttccatgccttctcgggaaacaaagcagtagatggatgaggcacatcgcgtcagcggcaaccgcctgcggtacgcgccataaataataattaggggatcctgataagtgttggcacaagtagcttgccagcacccaactccaagcaagccataactgcaagaaagcaacggcagcaagaaaccttgtaaacatcggagcatagatcgcggcggtgatggcggccaaggggaggacggagctggacgtgggcgccgacggcgtggccgtaatcaccatctacaatccgcccgtcaactcgctctccatcgacgtcttacatagcttaaaagaaagctatgaagaagcacttcggagaaacgatgttaaagctattgtcgttacagggaaaggagggaaattttctggaggatttgatattagttcctttggtggtgttcaaggaggccaaacaatgcaaccaaaggttggctacatagcaatagatattctcacagatactgtagaagctgcgacaaagccatcagtggcagcaattgatggtcttgctcttggtggaggtttagaagttgccatggcatgccatgcacggattgcaactccaacagctcaattaggtcttccagaacttcagttaggaattattccaggatttggaggaacacagcgactcccacgactggttggtctgacaaaatctttggaaatgatgctgttatctaagccaatcaagggcggtgaggcacaccaactgggcctggttgatgccttagtttctcctaatgatttggtgaatactgctcgtcaatgggctttggatatatatgaatgtaggaggccctggatcaaaagcctttataagactgacaagctagaacctcttggggaggctagggaaattctgaagtttgcaagagctcaagctcaaaagcaggcagctaatcttcatcacccacttgtttgtattgatgtcattgaagaaggtatagttgcaggaccacgggctggactctggaaggaagcaacttctttccaggaactgcttttctcagatacttgtaaaagcttagttcatgtgttcttttctcagcgggcaacgtctaagattccaggtgctacagacttggggttgatgcctaggaaaataactaaagttgccattctaggtggtgggcttatgggttcaggaattgcaactgcgatggtattaagtaactatcctgtgctacttaaagaagtaaatgagaagttcctaactgctggaatcaacagaatccaagccaatttgcagagtcgagtaaggaaaggaaaaatgaccgatgagcgatatgagaaggctatgtctctcgttactggtgtccttgattatgaacgtttcaaagatgtagacctcgttatagaggcagttattgagaatgtgaagttgaagcagcaaatattttctgacttagagaagtactgtccttcacattgcatccttgctactaacacatctacaattgatcttaatctgattggggagaaaacaaaggctcaagatcgtattgctggtgcacacttctttagtcctgcgcatgtgatgccacttctggaaatagttcgtactcagcacacttcaccacaagttgttgttgacttgctggatgttgggaagaagattaaaaagacaccaatagtcgtcgggaactgtactggctttgcagttaataggatgttctttccatacactcaatcagcactcttttatgttgatcttggtatggatgtttataagattgatcgtgcttgtaccaaatttggaatgcctatgggtcctttcagactggcagatctggttggttttggtgtggctgtggccactggtatgcaataccttgaaaatttcccagagagggtctacaaatcaatgctacttcctctgatgatggaggacaatagggcaggtgaagccacccaaaaaggattttacaagtatgagggcaagaggaaagcgactcctgatcctgaaattatgaaatatattgaaaaatctaggagcatggcaggagttacaccagatcctgagctgatgaagctaagtgagaaagacatagtcgagatggtgtttttcccggtgataaatgaagcctgccgagtccttgatgagggtatcgccgtcaaggcttctgacctagacatcgcttcgatcttcggcatggggttcccaccttataggggaggtgtcatgcactgggcagattccatcggcgcaaagtacatccatggaaagttggaggagtggacaaagcggtatgggggcttcttcaagccctgctcttacctcgctgaaagagctgcaaaagggattcctctgagtgcaccaacaaagaaagttcaggctcggctataagatgatttccttgtggacggaggagactacgttgaataatggattccggtgaagcatttggaatgcgtagagctgtaggctaccactatcacatgcatgtaacgcaatatactactgtgaaaataaagtgcactgcacggcggtttttttatatataaatacaaggatttttttct

SEQ ID NO: 21939 - protein, 723 aa, Zea mays subsp. mays
  peptide (1)..(723): Ceres Seq. ID no. 15222580
  misc_feature (307)..(491): Pfam Name: Pfam Description:  3-hydroxyacyl-CoA dehydrogenase
  misc_feature (9)..(723): NCBI GI NO: 34897626 NR Description: putative tetrafunctional protein for glyoxysomalfatty acid beta-oxidation
  misc_feature (4)..(723): NCBI GI NO: 34922417 NR Description: Glyoxysomal fatty acid beta-oxidationmultifunctional protein MFP-a
  misc_feature (4)..(723): NCBI GI NO: 15231317 NR Description: fatty acid multifunctional protein (AtMFP2)
  misc_feature (3)..(723): NCBI GI NO: 34922495 NR Description: Glyoxysomal fatty acid beta-oxidationmultifunctional protein MFP-a
  misc_feature (91)..(723): NCBI GI NO: 551444 NR Description: protein MFP-b [Cucumis sativus]
  misc_feature (1)..(721): NCBI GI NO: 39931684 NR Description: Peroxisomal fatty acid beta-oxidationmultifunctional
  misc_feature (1)..(723): NCBI GI NO: 15235527 NR Description: abnormal inflorescence meristem 1
  misc_feature (4)..(395): NCBI GI NO: 17065148 NR Description: fatty acid multifunctional protein (AtMFP2)
  misc_feature (14)..(721): NCBI GI NO: 22960932 NR Description: hypothetical protein [Rhodopseudomonas palustris]
  misc_feature (46)..(709): NCBI GI NO: 15641060 NR Description: fatty oxidation complex, alpha subunit
MAAKGRTELDVGADGVAVITIYNPPVNSLSIDVLHSLKESYEEALRRNDVKAIVVTGKGGKFSGGFDISSFGGVQGGQTMQPKVGYIAIDILTDTVEAATKPSVAAIDGLALGGGLEVAMACHARIATPTAQLGLPELQLGIIPGFGGTQRLPRLVGLTKSLEMMLLSKPIKGGEAHQLGLVDALVSPNDLVNTARQWALDIYECRRPWIKSLYKTDKLEPLGEAREILKFARAQAQKQAANLHHPLVCIDVIEEGIVAGPRAGLWKEATSFQELLFSDTCKSLVHVFFSQRATSKIPGATDLGLMPRKITKVAILGGGLMGSGIATAMVLSNYPVLLKEVNEKFLTAGINRIQANLQSRVRKGKMTDERYEKAMSLVTGVLDYERFKDVDLVIEAVIENVKLKQQIFSDLEKYCPSHCILATNTSTIDLNLIGEKTKAQDRIAGAHFFSPAHVMPLLEIVRTQHTSPQVVVDLLDVGKKIKKTPIVVGNCTGFAVNRMFFPYTQSALFYVDLGMDVYKIDRACTKFGMPMGPFRLADLVGFGVAVATGMQYLENFPERVYKSMLLPLMMEDNRAGEATQKGFYKYEGKRKATPDPEIMKYIEKSRSMAGVTPDPELMKLSEKDIVEMVFFPVINEACRVLDEGIAVKASDLDIASIFGMGFPPYRGGVMHWADSIGAKYIHGKLEEWTKRYGGFFKPCSYLAERAAKGIPLSAPTKKVQARL

SEQ ID NO: 21940 - protein, 644 aa, Zea mays subsp. mays
  peptide (1)..(644): Ceres Seq. ID no. 15222581
  misc_feature (228)..(412): Pfam Name: Pfam Description:  3-hydroxyacyl-CoA dehydrogenase
  misc_feature (1)..(644): NCBI GI NO: 34897626 NR Description: putative tetrafunctional protein for glyoxysomalfatty acid beta-oxidation
  misc_feature (1)..(644): NCBI GI NO: 34922417 NR Description: Glyoxysomal fatty acid beta-oxidationmultifunctional protein MFP-a
  misc_feature (1)..(644): NCBI GI NO: 15231317 NR Description: fatty acid multifunctional protein (AtMFP2)
  misc_feature (1)..(644): NCBI GI NO: 34922495 NR Description: Glyoxysomal fatty acid beta-oxidationmultifunctional protein MFP-a
  misc_feature (12)..(644): NCBI GI NO: 551444 NR Description: protein MFP-b [Cucumis sativus]
  misc_feature (1)..(642): NCBI GI NO: 39931684 NR Description: Peroxisomal fatty acid beta-oxidationmultifunctional
  misc_feature (1)..(644): NCBI GI NO: 15235527 NR Description: abnormal inflorescence meristem 1
  misc_feature (1)..(316): NCBI GI NO: 17065148 NR Description: fatty acid multifunctional protein (AtMFP2)
  misc_feature (1)..(642): NCBI GI NO: 22960932 NR Description: hypothetical protein [Rhodopseudomonas palustris]
  misc_feature (1)..(630): NCBI GI NO: 15641060 NR Description: fatty oxidation complex, alpha subunit
MQPKVGYIAIDILTDTVEAATKPSVAAIDGLALGGGLEVAMACHARIATPTAQLGLPELQLGIIPGFGGTQRLPRLVGLTKSLEMMLLSKPIKGGEAHQLGLVDALVSPNDLVNTARQWALDIYECRRPWIKSLYKTDKLEPLGEAREILKFARAQAQKQAANLHHPLVCIDVIEEGIVAGPRAGLWKEATSFQELLFSDTCKSLVHVFFSQRATSKIPGATDLGLMPRKITKVAILGGGLMGSGIATAMVLSNYPVLLKEVNEKFLTAGINRIQANLQSRVRKGKMTDERYEKAMSLVTGVLDYERFKDVDLVIEAVIENVKLKQQIFSDLEKYCPSHCILATNTSTIDLNLIGEKTKAQDRIAGAHFFSPAHVMPLLEIVRTQHTSPQVVVDLLDVGKKIKKTPIVVGNCTGFAVNRMFFPYTQSALFYVDLGMDVYKIDRACTKFGMPMGPFRLADLVGFGVAVATGMQYLENFPERVYKSMLLPLMMEDNRAGEATQKGFYKYEGKRKATPDPEIMKYIEKSRSMAGVTPDPELMKLSEKDIVEMVFFPVINEACRVLDEGIAVKASDLDIASIFGMGFPPYRGGVMHWADSIGAKYIHGKLEEWTKRYGGFFKPCSYLAERAAKGIPLSAPTKKVQARL

SEQ ID NO: 21941 - protein, 604 aa, Zea mays subsp. mays
  peptide (1)..(604): Ceres Seq. ID no. 15222582
  misc_feature (188)..(372): Pfam Name: Pfam Description:  3-hydroxyacyl-CoA dehydrogenase
  misc_feature (1)..(604): NCBI GI NO: 34897626 NR Description: putative tetrafunctional protein for glyoxysomalfatty acid beta-oxidation
  misc_feature (1)..(604): NCBI GI NO: 34922417 NR Description: Glyoxysomal fatty acid beta-oxidationmultifunctional protein MFP-a
  misc_feature (1)..(604): NCBI GI NO: 15231317 NR Description: fatty acid multifunctional protein (AtMFP2)
  misc_feature (1)..(604): NCBI GI NO: 34922495 NR Description: Glyoxysomal fatty acid beta-oxidationmultifunctional protein MFP-a
  misc_feature (1)..(604): NCBI GI NO: 551444 NR Description: protein MFP-b [Cucumis sativus]
  misc_feature (1)..(602): NCBI GI NO: 39931684 NR Description: Peroxisomal fatty acid beta-oxidationmultifunctional
  misc_feature (1)..(604): NCBI GI NO: 15235527 NR Description: abnormal inflorescence meristem 1
  misc_feature (1)..(276): NCBI GI NO: 17065148 NR Description: fatty acid multifunctional protein (AtMFP2)
  misc_feature (1)..(602): NCBI GI NO: 22960932 NR Description: hypothetical protein [Rhodopseudomonas palustris]
  misc_feature (1)..(590): NCBI GI NO: 15641060 NR Description: fatty oxidation complex, alpha subunit
MACHARIATPTAQLGLPELQLGIIPGFGGTQRLPRLVGLTKSLEMMLLSKPIKGGEAHQLGLVDALVSPNDLVNTARQWALDIYECRRPWIKSLYKTDKLEPLGEAREILKFARAQAQKQAANLHHPLVCIDVIEEGIVAGPRAGLWKEATSFQELLFSDTCKSLVHVFFSQRATSKIPGATDLGLMPRKITKVAILGGGLMGSGIATAMVLSNYPVLLKEVNEKFLTAGINRIQANLQSRVRKGKMTDERYEKAMSLVTGVLDYERFKDVDLVIEAVIENVKLKQQIFSDLEKYCPSHCILATNTSTIDLNLIGEKTKAQDRIAGAHFFSPAHVMPLLEIVRTQHTSPQVVVDLLDVGKKIKKTPIVVGNCTGFAVNRMFFPYTQSALFYVDLGMDVYKIDRACTKFGMPMGPFRLADLVGFGVAVATGMQYLENFPERVYKSMLLPLMMEDNRAGEATQKGFYKYEGKRKATPDPEIMKYIEKSRSMAGVTPDPELMKLSEKDIVEMVFFPVINEACRVLDEGIAVKASDLDIASIFGMGFPPYRGGVMHWADSIGAKYIHGKLEEWTKRYGGFFKPCSYLAERAAKGIPLSAPTKKVQARL

SEQ ID NO: 21942 - DNA, 1599 bp, Zea mays subsp. mays
  misc_feature (1)..(1599): Ceres Seq. ID no. 12589137
catcctaatcgaaaactctgcgcgctgcttcctgttcggccgtgcctgcgtgccgctcgccccagctcccagctatggcgtctggccgagagagcttctctcatctcctccctgctcaatctccagccacgcgccctccagttctgagctcctctgcgcgcgcgaagtcctctgcgccgcaccctgaagccccctgctcggcgcccgagatccctcccatggccggtgttcggtccctgcgctcgtccgaccgaactccctggccatcgcgcttgccgtttccccacgcgcaggaattcaccagtgttcggtccgcgcgcagcctccctcccagctcagccgcccatctccatggccagagctccttcatctccctcctctcagcgtcttctccgtgctcccgctcggctccacccatggccggaatccccttcctgccgagctcccatggcggcgcccatcccctgctccctccagttctccctaccacgcccaccgccggtctatgcgcgcgcgctctgctcccatgccgcgcgcctagaccggcggtggtggaggtcgggcccgaggtggccaagtacggcgtcggcgacgtggtaggcgtcggggtgatcgttgggtgctgccgcgagtgcagcccctgcaaggccaacgttgagcagtactgcaacaagaagatctggtcatacaacgacgtctacactgatggacggcccacgcagggtggattcgcctccaccatggtcgtcgaccagaagtttgtggtgaagatcccggcgggtctggctccggagcaagcggcgccgctgctgtgcgctggcgtgacggtgtacagcccgctgaagcactttgggctgacgaccccgggcctccgtggcggcatcctgggcctcggcggcgtgggccacatgggcgtgaaggtagccaaggccatgggccaccacgtgacggtgatcagctcgtcgtccaagaagcgcgcggaggcaatggaccacctcggcgcggacgcgtacctagtgagctcggacgccgcggccatggcggcggccgccgactcgctggactacatcatcgacacggtgcccgtgcaccacccgctggagccgtacctggcgctgctgaagctggacggcaagctcgtgctgctgggcgtcatcggcgagcccctgagcttcgtgtcgcccatggtgatgctggggcggaaggccatcacggggagcttcatcggcagcatcgacgagaccgctgaggtgcttcagttctgcgtcgacaaggggctcacctcccagatcgaggtggtcaagatggggtacgtgaacgaggcgctggagcggctggagcgcaacgacgtccgctaccgcttcgtcgtcgacgtcgccggtagcaacgtcgaggcggaggcggcggcggcggatgcggccagcaactgatggcaccgcgtcgtcgagtcgaaccacgtctgtgcgccgcgtgcaacgttcgttcgggtcgagtctgcgtgcaacgttctgcttcctttactagttgttgtctttccgccttcttgccgttctgttctgggctttgagatgagacgatggatggtcagtttttaatgtc

SEQ ID NO: 21943 - protein, 451 aa, Zea mays subsp. mays
  peptide (1)..(451): Ceres Seq. ID no. 12589138
  misc_feature (159)..(451): NCBI GI NO: 3913182 NR Description: Cinnamyl-alcohol dehydrogenase
  misc_feature (159)..(451): NCBI GI NO: 7430938 NR Description: cinnamyl-alcohol dehydrogenase (EC 1
  misc_feature (159)..(451): NCBI GI NO: 10719916 NR Description: Cinnamyl-alcohol dehydrogenase (CAD)
  misc_feature (159)..(444): NCBI GI NO: 15428278 NR Description: cinnamyl alcohol dehydrogenase 1b
  misc_feature (159)..(444): NCBI GI NO: 3913181 NR Description: Cinnamyl-alcohol dehydrogenase (CAD)
  misc_feature (159)..(444): NCBI GI NO: 15428276 NR Description: cinnamyl alcohol dehydrogenase 1a
  misc_feature (159)..(443): NCBI GI NO: 15428280 NR Description: cinnamyl alcohol dehydrogenase 2a
  misc_feature (159)..(443): NCBI GI NO: 15428282 NR Description: cinnamyl alcohol dehydrogenase 2b
  misc_feature (159)..(442): NCBI GI NO: 1168727 NR Description: Cinnamyl-alcohol dehydrogenase 1 (CAD)
  misc_feature (159)..(439): NCBI GI NO: 9998899 NR Description: cinnamyl alcohol dehydrogenase
MASGRESFSHLLPAQSPATRPPVLSSSARAKSSAPHPEAPCSAPEIPPMAGVRSLRSSDRTPWPSRLPFPHAQEFTSVRSARSLPPSSAAHLHGQSSFISLLSASSPCSRSAPPMAGIPFLPSSHGGAHPLLPPVLPTTPTAGLCARALLPCRAPRPAVVEVGPEVAKYGVGDVVGVGVIVGCCRECSPCKANVEQYCNKKIWSYNDVYTDGRPTQGGFASTMVVDQKFVVKIPAGLAPEQAAPLLCAGVTVYSPLKHFGLTTPGLRGGILGLGGVGHMGVKVAKAMGHHVTVISSSSKKRAEAMDHLGADAYLVSSDAAAMAAAADSLDYIIDTVPVHHPLEPYLALLKLDGKLVLLGVIGEPLSFVSPMVMLGRKAITGSFIGSIDETAEVLQFCVDKGLTSQIEVVKMGYVNEALERLERNDVRYRFVVDVAGSNVEAEAAAADAASN

SEQ ID NO: 21944 - protein, 403 aa, Zea mays subsp. mays
  peptide (1)..(403): Ceres Seq. ID no. 12589139
  misc_feature (111)..(403): NCBI GI NO: 3913182 NR Description: Cinnamyl-alcohol dehydrogenase
  misc_feature (111)..(403): NCBI GI NO: 7430938 NR Description: cinnamyl-alcohol dehydrogenase (EC 1
  misc_feature (111)..(403): NCBI GI NO: 10719916 NR Description: Cinnamyl-alcohol dehydrogenase (CAD)
  misc_feature (111)..(396): NCBI GI NO: 15428278 NR Description: cinnamyl alcohol dehydrogenase 1b
  misc_feature (111)..(396): NCBI GI NO: 3913181 NR Description: Cinnamyl-alcohol dehydrogenase (CAD)
  misc_feature (111)..(396): NCBI GI NO: 15428276 NR Description: cinnamyl alcohol dehydrogenase 1a
  misc_feature (111)..(395): NCBI GI NO: 15428280 NR Description: cinnamyl alcohol dehydrogenase 2a
  misc_feature (111)..(395): NCBI GI NO: 15428282 NR Description: cinnamyl alcohol dehydrogenase 2b
  misc_feature (111)..(394): NCBI GI NO: 1168727 NR Description: Cinnamyl-alcohol dehydrogenase 1 (CAD)
  misc_feature (111)..(391): NCBI GI NO: 9998899 NR Description: cinnamyl alcohol dehydrogenase
MAGVRSLRSSDRTPWPSRLPFPHAQEFTSVRSARSLPPSSAAHLHGQSSFISLLSASSPCSRSAPPMAGIPFLPSSHGGAHPLLPPVLPTTPTAGLCARALLPCRAPRPAVVEVGPEVAKYGVGDVVGVGVIVGCCRECSPCKANVEQYCNKKIWSYNDVYTDGRPTQGGFASTMVVDQKFVVKIPAGLAPEQAAPLLCAGVTVYSPLKHFGLTTPGLRGGILGLGGVGHMGVKVAKAMGHHVTVISSSSKKRAEAMDHLGADAYLVSSDAAAMAAAADSLDYIIDTVPVHHPLEPYLALLKLDGKLVLLGVIGEPLSFVSPMVMLGRKAITGSFIGSIDETAEVLQFCVDKGLTSQIEVVKMGYVNEALERLERNDVRYRFVVDVAGSNVEAEAAAADAASN

SEQ ID NO: 21945 - protein, 337 aa, Zea mays subsp. mays
  peptide (1)..(337): Ceres Seq. ID no. 12589140
  misc_feature (45)..(337): NCBI GI NO: 3913182 NR Description: Cinnamyl-alcohol dehydrogenase
  misc_feature (45)..(337): NCBI GI NO: 7430938 NR Description: cinnamyl-alcohol dehydrogenase (EC 1
  misc_feature (45)..(337): NCBI GI NO: 10719916 NR Description: Cinnamyl-alcohol dehydrogenase (CAD)
  misc_feature (45)..(330): NCBI GI NO: 15428278 NR Description: cinnamyl alcohol dehydrogenase 1b
  misc_feature (45)..(330): NCBI GI NO: 3913181 NR Description: Cinnamyl-alcohol dehydrogenase (CAD)
  misc_feature (45)..(330): NCBI GI NO: 15428276 NR Description: cinnamyl alcohol dehydrogenase 1a
  misc_feature (45)..(329): NCBI GI NO: 15428280 NR Description: cinnamyl alcohol dehydrogenase 2a
  misc_feature (45)..(329): NCBI GI NO: 15428282 NR Description: cinnamyl alcohol dehydrogenase 2b
  misc_feature (45)..(328): NCBI GI NO: 1168727 NR Description: Cinnamyl-alcohol dehydrogenase 1 (CAD)
  misc_feature (45)..(325): NCBI GI NO: 9998899 NR Description: cinnamyl alcohol dehydrogenase
MAGIPFLPSSHGGAHPLLPPVLPTTPTAGLCARALLPCRAPRPAVVEVGPEVAKYGVGDVVGVGVIVGCCRECSPCKANVEQYCNKKIWSYNDVYTDGRPTQGGFASTMVVDQKFVVKIPAGLAPEQAAPLLCAGVTVYSPLKHFGLTTPGLRGGILGLGGVGHMGVKVAKAMGHHVTVISSSSKKRAEAMDHLGADAYLVSSDAAAMAAAADSLDYIIDTVPVHHPLEPYLALLKLDGKLVLLGVIGEPLSFVSPMVMLGRKAITGSFIGSIDETAEVLQFCVDKGLTSQIEVVKMGYVNEALERLERNDVRYRFVVDVAGSNVEAEAAAADAASN

SEQ ID NO: 21946 - DNA, 1610 bp, Zea mays subsp. mays
  misc_feature (1)..(1610): Ceres Seq. ID no. 15180226
agatcagatgagctcgtgcacagggtcctcggccgcagaagatacggcgaacgcattcaaaatccatctccttccaaaagcgtcgagtcgagccgatccaccttcccgaacaacgccgcccgccgcccttcgaatccgaaggaagccgcaacaacgaccccatccgaatctctcgcaacgatcaccaccgccaacttatcttcctcgttcgggtcgcccccaccctcgcccgccgtccagcagcgaaaccttcacccttcctcgtcccgccaccccccgcacgccatggtgcagaggaagcccgcgcgcaagcgcaaggagcccaaatgccccgacgccgtgccggcctggggcggcggccgtggcccgggaagcagggctggcgatggcggcatagccccggcgcaactccccaactacatgagggcgacgagctgctccggcgccaaggccggcgccgcacaagcccactccgcgccgcagccggggagggcgagcgtggcgcgggcggctgccgcggcgccgcgggcgggcagggccacgtgctcctccgccatgaaggggcccggggcgcgcgcgtgcccgtacgcgttctgctccgtcaagggccacgcccacgcgccgcccctgcgcagcttcgtggcggcgcggaggcgggggcagcagagcatgaagctcaagggcgcctcgccgttccgcaagcccacggtgggttgggacgcgagccgcggcgacgtctccgcggagggcctgggcgcggcttccgtgggcggttcgtgcgcgtccagcggcgtggtctcggttgagcggtcgacgacgaccaggcatcgcgggcgtgaagagaagaaggccttggtggtggaggtggcggatcatgaatgcgacgacgacttgggcgccggcgagtctgacatctccgaggagctgggtgcgaaccatggaggaaacagtactgaaggtggcatatcgtcggtcgacagcatttccagctcgctcagtgggataagctaccaagacgttagctctgcctgtgcctacggagcatcctctcatcatcaccatcagaggaggaggacatccgaagaaaagggtgcccagcaactgcgtccttccaaacccggtccaaaggcggagaaggtcggtctcagacatgaggcggtggacggtcggagggccgctgaggagtggatggtcgactacgctctccggaaggaagtcaagaggctggctcgtgctcagaagaggaaagttgagatgcttgtccaggccttcgaatctgttctgcccacggtagcaatagcaagcgagaagaagcccgggcaacacgatggccttcgaaagcatgcatgtagctgacagatagatagatagaatcatagatagccgacactcatcttgagtcaggtagtagtaggacgtgacaatttgagtcaggtagatgaaacgtttcaattcagtcaaacactagtcacaacggatacaaggtttgatgctccaccaaccactgatccgttgtgaacttgtagtagaagcaggccaccgctggcaatgtggcatgccatgccatcaacctaacatggaccattctgaatgtcggctcaaaacgtgac

SEQ ID NO: 21947 - protein, 451 aa, Zea mays subsp. mays
  peptide (1)..(451): Ceres Seq. ID no. 15180227
  misc_feature (355)..(431): NCBI GI NO: 24637279 NR Description: pathogen-induced calmodulin-binding protein
  misc_feature (370)..(427): NCBI GI NO: 24637243 NR Description: pathogen-induced calmodulin-binding protein
  misc_feature (370)..(427): NCBI GI NO: 15237600 NR Description: Calmodulin-binding protein [Arabidopsis thaliana]
  misc_feature (373)..(429): NCBI GI NO: 17933110 NR Description: PNCBP [Solanum tuberosum]
  misc_feature (370)..(429): NCBI GI NO: 15224955 NR Description: Calmodulin-binding protein [Arabidopsis thaliana]
  misc_feature (370)..(428): NCBI GI NO: 25956269 NR Description: unnamed protein product
  misc_feature (365)..(429): NCBI GI NO: 17933110 NR Description: PNCBP [Solanum tuberosum]
RSDELVHRVLGRRRYGERIQNPSPSKSVESSRSTFPNNAARRPSNPKEAATTTPSESLATITTANLSSSFGSPPPSPAVQQRNLHPSSSRHPPHAMVQRKPARKRKEPKCPDAVPAWGGGRGPGSRAGDGGIAPAQLPNYMRATSCSGAKAGAAQAHSAPQPGRASVARAAAAAPRAGRATCSSAMKGPGARACPYAFCSVKGHAHAPPLRSFVAARRRGQQSMKLKGASPFRKPTVGWDASRGDVSAEGLGAASVGGSCASSGVVSVERSTTTRHRGREEKKALVVEVADHECDDDLGAGESDISEELGANHGGNSTEGGISSVDSISSSLSGISYQDVSSACAYGASSHHHHQRRRTSEEKGAQQLRPSKPGPKAEKVGLRHEAVDGRRAAEEWMVDYALRKEVKRLARAQKRKVEMLVQAFESVLPTVAIASEKKPGQHDGLRKHACS

SEQ ID NO: 21948 - protein, 356 aa, Zea mays subsp. mays
  peptide (1)..(356): Ceres Seq. ID no. 15180228
  misc_feature (260)..(336): NCBI GI NO: 24637279 NR Description: pathogen-induced calmodulin-binding protein
  misc_feature (275)..(332): NCBI GI NO: 24637243 NR Description: pathogen-induced calmodulin-binding protein
  misc_feature (275)..(332): NCBI GI NO: 15237600 NR Description: Calmodulin-binding protein [Arabidopsis thaliana]
  misc_feature (278)..(334): NCBI GI NO: 17933110 NR Description: PNCBP [Solanum tuberosum]
  misc_feature (275)..(334): NCBI GI NO: 15224955 NR Description: Calmodulin-binding protein [Arabidopsis thaliana]
  misc_feature (275)..(333): NCBI GI NO: 25956269 NR Description: unnamed protein product
  misc_feature (270)..(334): NCBI GI NO: 17933110 NR Description: PNCBP [Solanum tuberosum]
MVQRKPARKRKEPKCPDAVPAWGGGRGPGSRAGDGGIAPAQLPNYMRATSCSGAKAGAAQAHSAPQPGRASVARAAAAAPRAGRATCSSAMKGPGARACPYAFCSVKGHAHAPPLRSFVAARRRGQQSMKLKGASPFRKPTVGWDASRGDVSAEGLGAASVGGSCASSGVVSVERSTTTRHRGREEKKALVVEVADHECDDDLGAGESDISEELGANHGGNSTEGGISSVDSISSSLSGISYQDVSSACAYGASSHHHHQRRRTSEEKGAQQLRPSKPGPKAEKVGLRHEAVDGRRAAEEWMVDYALRKEVKRLARAQKRKVEMLVQAFESVLPTVAIASEKKPGQHDGLRKHACS

SEQ ID NO: 21949 - protein, 311 aa, Zea mays subsp. mays
  peptide (1)..(311): Ceres Seq. ID no. 15180229
  misc_feature (215)..(291): NCBI GI NO: 24637279 NR Description: pathogen-induced calmodulin-binding protein
  misc_feature (230)..(287): NCBI GI NO: 24637243 NR Description: pathogen-induced calmodulin-binding protein
  misc_feature (230)..(287): NCBI GI NO: 15237600 NR Description: Calmodulin-binding protein [Arabidopsis thaliana]
  misc_feature (233)..(289): NCBI GI NO: 17933110 NR Description: PNCBP [Solanum tuberosum]
  misc_feature (230)..(289): NCBI GI NO: 15224955 NR Description: Calmodulin-binding protein [Arabidopsis thaliana]
  misc_feature (230)..(288): NCBI GI NO: 25956269 NR Description: unnamed protein product
  misc_feature (225)..(289): NCBI GI NO: 17933110 NR Description: PNCBP [Solanum tuberosum]
MRATSCSGAKAGAAQAHSAPQPGRASVARAAAAAPRAGRATCSSAMKGPGARACPYAFCSVKGHAHAPPLRSFVAARRRGQQSMKLKGASPFRKPTVGWDASRGDVSAEGLGAASVGGSCASSGVVSVERSTTTRHRGREEKKALVVEVADHECDDDLGAGESDISEELGANHGGNSTEGGISSVDSISSSLSGISYQDVSSACAYGASSHHHHQRRRTSEEKGAQQLRPSKPGPKAEKVGLRHEAVDGRRAAEEWMVDYALRKEVKRLARAQKRKVEMLVQAFESVLPTVAIASEKKPGQHDGLRKHACS

SEQ ID NO: 21950 - DNA, 900 bp, Zea mays subsp. mays
  misc_feature (1)..(900): Ceres Seq. ID no. 13622703
aaacgaaatccagcagaccgacgcgaaccgagaaaaatcccacgaaatctcgtggccgcggcgaccggaagaagaggacgacgacggacggagcggcgatggcgtgccgcgcacttgccctccgctccctgctcctccccgacccgctacaccgcctcccggccgcggcgccacctgtttggagagcgtcccgcggtggccgccgtccgcacctccgctgctgctccggcggcgggggcggggagcccgggcagccgccgcaagaagctgtgctcgaggccatatccaagatagcaaggtctaaaggaagggttgcactcacaacaaatatggtcatgggtggtactgtgactgacgatgcaagtgatgaatggcttgttctggatcagaaggtaaattcctaccccacagatagaggatttacagcaattggcactggaggtgatgattttgtccagtcaatggtagttgctgttgaatctgttcttcaagaatcaattcccaagggccgggtatctcagaaattatcttcaagagggaaatatgtttctgtaaacattgggccaattcgtgttgtttctagtgagcaggtccaagctgtgtatcgtgccatgagaagagataacaggatgaaatacttcttatgaagtgcaatttcatgtcctggatgttccctagtccattccatgttgtatcctacgatgcattttcgccatatttgctggacctccggtgaattccaatgacttttatgtgccattcaagcccaaattgaagcttctctactacaaaacaatatgttgggtccagctacgttatttagtgcagggggcgtatatagctactatgtattccctttcttctataatgaataagattcaaaggttcacagtttgtcct

SEQ ID NO: 21951 - protein, 214 aa, Zea mays subsp. mays
  peptide (1)..(214): Ceres Seq. ID no. 15219364
  misc_feature (123)..(214): Pfam Name: DUF493 Pfam Description: Protein of unknown function
  misc_feature (35)..(171): NCBI GI NO: 38347226 NR Description: OSJNBa0044M19.8
  misc_feature (48)..(214): NCBI GI NO: 18396311 NR Description: expressed protein [Arabidopsis thaliana]
TKSSRPTRTEKNPTKSRGRGDRKKRTTTDGAAMACRALALRSLLLPDPLHRLPAAAPPVWRASRGGRRPHLRCCSGGGGGEPGQPPQEAVLEAISKIARSKGRVALTTNMVMGGTVTDDASDEWLVLDQKVNSYPTDRGFTAIGTGGDDFVQSMVVAVESVLQESIPKGRVSQKLSSRGKYVSVNIGPIRVVSSEQVQAVYRAMRRDNRMKYFL

SEQ ID NO: 21952 - protein, 182 aa, Zea mays subsp. mays
  peptide (1)..(182): Ceres Seq. ID no. 15219365
  misc_feature (91)..(182): Pfam Name: DUF493 Pfam Description: Protein of unknown function
  misc_feature (3)..(139): NCBI GI NO: 38347226 NR Description: OSJNBa0044M19.8
  misc_feature (16)..(182): NCBI GI NO: 18396311 NR Description: expressed protein [Arabidopsis thaliana]
MACRALALRSLLLPDPLHRLPAAAPPVWRASRGGRRPHLRCCSGGGGGEPGQPPQEAVLEAISKIARSKGRVALTTNMVMGGTVTDDASDEWLVLDQKVNSYPTDRGFTAIGTGGDDFVQSMVVAVESVLQESIPKGRVSQKLSSRGKYVSVNIGPIRVVSSEQVQAVYRAMRRDNRMKYFL

SEQ ID NO: 21953 - DNA, 849 bp, Zea mays subsp. mays
  misc_feature (1)..(849): Ceres Seq. ID no. 14303259
atgtcgctgagccgcttctcccagtggatatggccggggagcagaactagaaatcctagaggccgcgagccaccggcggggagcacggccttgacggaaggcctcttcccggactccccgtcggggttccgggatccagaccctggttctggcgcggcacagcggcgtaagggcaagagccgccgtcgcggtggccgcgtggaggcgaaggtcgatggcgagcacggcatggttatcgtgcagtccgacggtgacggctgcctgtctgactcggactccgacggctccgactggtccatcggctggctcgagccgctcgcgccggacctccagagtgacgttgactccgagggaagcttcgccgtcctcgtgcggtgctatcgccgcggccgcgctgaccggcctgaccgtcctgatggcaagttccctgctcctggtggtgtcgctcacggtcacggtggtgtttctggtaacaagaattttgtggagcaatgagtgtcttcccttcagaactgatttctccatttccattcttagttggcttcaatgtgtatacagcatttttacatgacctgtcaaatttctcatgtgcgaaacatatatatgaaggaagagaggaaacccaaaatggggaagaaagaggaaagaatcacagaacaaaacactaccagtggatttttattaaaaaaatgcaatggatggggggggggggggggggtgcatccttcttcctgaggttccaggctacggtattattgcagaataaaacatgttttgtgattggattcaaatgttattgacatttctgacaatgagcaatgaattgatggcctcatcccattttcttgt

SEQ ID NO: 21954 - protein, 164 aa, Zea mays subsp. mays
  peptide (1)..(164): Ceres Seq. ID no. 14303260
  misc_feature (1)..(163): NCBI GI NO: 15144509 NR Description: unknown [Lycopersicon esculentum]
  misc_feature (1)..(147): NCBI GI NO: 15238477 NR Description: expressed protein [Arabidopsis thaliana]
  misc_feature (82)..(164): NCBI GI NO: 15809848 NR Description: AT4g38060/F20D10_180 [Arabidopsis thaliana]
MSLSRFSQWIWPGSRTRNPRGREPPAGSTALTEGLFPDSPSGFRDPDPGSGAAQRRKGKSRRRGGRVEAKVDGEHGMVIVQSDGDGCLSDSDSDGSDWSIGWLEPLAPDLQSDVDSEGSFAVLVRCYRRGRADRPDRPDGKFPAPGGVAHGHGGVSGNKNFVEQ

SEQ ID NO: 21955 - protein, 118 aa, Zea mays subsp. mays
  peptide (1)..(118): Ceres Seq. ID no. 14303261
MASTAWLSCSPTVTAACLTRTPTAPTGPSAGSSRSRRTSRVTLTPREASPSSCGAIAAAALTGLTVLMASSLLLVVSLTVTVVFLVTRILWSNECLPFRTDFSISILSWLQCVYSIFT

SEQ ID NO: 21956 - protein, 102 aa, Zea mays subsp. mays
  peptide (1)..(102): Ceres Seq. ID no. 14303262
MSVFPSELISPFPFLVGFNVYTAFLHDLSNFSCAKHIYEGREETQNGEERGKNHRTKHYQWIFIKKMQWMGGGGGGASFFLRFQATVLLQNKTCFVIGFKCY

SEQ ID NO: 21957 - DNA, 901 bp, Zea mays subsp. mays
  misc_feature (1)..(901): Ceres Seq. ID no. 14305052
atcgcccgtgccctgcggtgttctactcactcccagctgcgacaatccccctcatcgcccgccccccctggtctcgtctctccttcgcgcatctcaccgccatctcactcccgaaccccccttcctttgcttcccgcgtctaatttagcgccagaacatttgaattccccgcaacttccgcttccagcggcttctcgaaccttccggaggcgccgccgatcgaccccggctccatccccttgcccccctagggtttcgcgttcccctcggggatgggggacgccgccaccgccgcagcggcggcggcagcgtcgcccgcttgcgccgcgcggaagcggcggcgcggcgacgacagcgcggggctgaggcgggtggcggagatcgtgatggtcctggccgcggccggggaggtacgcggcgggaggcagcccacggccgcggagcgcgcgctggcggccgaggcgcgggagactctcgccaccgccgtcgccgagagggccgtgcggcccgaggatctgttcccgggggaagcggtgcgcgcggtcgtcgaggatctcgggctcaaccgctccaaggacccagctgccatggggtttcgcccgcccaaggcctccatcgccgataggctcatgcttactaagcgcaaggttttgccaactctctcgtttgcacccattcccgcacagtttactagccattgtggtggctttgaaattcttaactggggtgataaatgtgatgtgagaacgcttgtgtgactattggactgtattagtttgtatggtatgacactgctgtttgcatggcacaaggtattgcttctgaatgatacattagcgaataatgattcccagggattcttgtatcacactgcttgtatatggatatgctctgttcttcc

SEQ ID NO: 21958 - protein, 161 aa, Zea mays subsp. mays
  peptide (1)..(161): Ceres Seq. ID no. 14305053
  misc_feature (13)..(126): NCBI GI NO: 30685716 NR Description: expressed protein [Arabidopsis thaliana]
  misc_feature (13)..(126): NCBI GI NO: 9294545 NR Description: contains similarity to bactericidal permeability-increasing protein~gene_id:MQC12
  misc_feature (20)..(126): NCBI GI NO: 15223606 NR Description: expressed protein [Arabidopsis thaliana]
MGDAATAAAAAAASPACAARKRRRGDDSAGLRRVAEIVMVLAAAGEVRGGRQPTAAERALAAEARETLATAVAERAVRPEDLFPGEAVRAVVEDLGLNRSKDPAAMGFRPPKASIADRLMLTKRKVLPTLSFAPIPAQFTSHCGGFEILNWGDKCDVRTLV

SEQ ID NO: 21959 - protein, 123 aa, Zea mays subsp. mays
  peptide (1)..(123): Ceres Seq. ID no. 14305054
  misc_feature (1)..(88): NCBI GI NO: 30685716 NR Description: expressed protein [Arabidopsis thaliana]
  misc_feature (1)..(88): NCBI GI NO: 9294545 NR Description: contains similarity to bactericidal permeability-increasing protein~gene_id:MQC12
  misc_feature (1)..(88): NCBI GI NO: 15223606 NR Description: expressed protein [Arabidopsis thaliana]
MVLAAAGEVRGGRQPTAAERALAAEARETLATAVAERAVRPEDLFPGEAVRAVVEDLGLNRSKDPAAMGFRPPKASIADRLMLTKRKVLPTLSFAPIPAQFTSHCGGFEILNWGDKCDVRTLV

SEQ ID NO: 21960 - protein, 121 aa, Zea mays subsp. mays
  peptide (1)..(121): Ceres Seq. ID no. 14305055
IARALRCSTHSQLRQSPSSPAPPGLVSPSRISPPSHSRTPLPLLPASNLAPEHLNSPQLPLPAASRTFRRRRRSTPAPSPCPPRVSRSPRGWGTPPPPQRRRQRRPLAPRGSGGAATTARG

SEQ ID NO: 21961 - DNA, 1300 bp, Zea mays subsp. mays
  misc_feature (1)..(1300): Ceres Seq. ID no. 15180671
cacagcacgccagcttcctcctttctcttcagccattcttgttcttggctatctatcttctcccctcttcccttctccttatctctcttactcttaatttggtgcttcttaatttctcagaagagactttgcaagcttgtgacttgttctcccaattctattgcaaacttgatcaacatcttgttcttggaaggaaggtattagcttctaagaaagcgcaattgttgtggtttatgcacaccattggcagcgagtctctgctgtttgggttgtccaaaaccaagccatgtccacgcgcgggagcggtagtcttagccctgctgccggtgcgtctgcggcggcgccggaggtggaaggccactgggccccgcacggcgcggtgctgacggcctgcgtcgtgggctccaacgtgctcgtgatcctgctcgtcttcggtttcttctggcggttcttctctgggaaaggggggccgtccacgtcacacggcgccgacgacgacgacgacgaggactcactgcccgtggcgtccccatgggcgtcccgctaccggttcgagggccacggcgcacggtcgacgccgatggaagacgtggtgtcgtccctgcccgtgtccgtgtactccagcgccggcgccgaggaaggaaggaaggcccggcccgagtgcgccgtgtgcatcgtggagctgcgcgacggcgactcggtgcgcgtcctcccgcggtgcgggcaccggttccacgccgactgcgtgggcgcgtggctgcggcgccgcaccacgtgcccgctctgccgcggcagagtcgtgccacccgccgccgcggccctcactgacaagtccagggacgccaaggacgacgtcgccgtcgccgtcgccgcggattgtcccgtgtgatgcggcggcgctccggccgactccgaggacagtatcgctcgctccaactgtaagtctgtaactggcagtgatgctgcatggtgagcaagcaagcggtggaccacgacacgacaccacgcacacatggcggatggtgacagccatcttcttccagggtcggcgtccgtactccgtagccatgtcgcatagctatagctccagcctccagatgaccagctagaaaaggttggtgagacgattgattccttcgtcctgttatttatatttcttgcttcttttctggttttgggattagatatattgcgagtcgtggtatatatatgtgtgtcttgaattgatcgagtcttccgtcatgtgtagtatgcatgtgagatctgcatgattaattactcgtgctacttttagtcgtag

SEQ ID NO: 21962 - protein, 200 aa, Zea mays subsp. mays
  peptide (1)..(200): Ceres Seq. ID no. 15180672
  misc_feature (126)..(167): Pfam Name: RING finger Pfam Description: Zinc finger, C3HC4 type
  misc_feature (1)..(200): NCBI GI NO: 34894518 NR Description: P0551A11.23
  misc_feature (11)..(200): NCBI GI NO: 34894514 NR Description: P0551A11.21
  misc_feature (90)..(196): NCBI GI NO: 34907826 NR Description: P0485B12.26
  misc_feature (91)..(181): NCBI GI NO: 34907968 NR Description: P0446G04.15
  misc_feature (100)..(175): NCBI GI NO: 30017522 NR Description: putative ring-H2 zinc finger protein
  misc_feature (102)..(183): NCBI GI NO: 15226628 NR Description: hypothetical protein [Arabidopsis thaliana]
  misc_feature (103)..(183): NCBI GI NO: 34903920 NR Description: OSJNBa0038J17.5
  misc_feature (103)..(194): NCBI GI NO: 34903936 NR Description: OSJNBa0038J17.13
  misc_feature (91)..(174): NCBI GI NO: 8698833 NR Description: EL5 [Oryza sativa (japonica cultivar-group)]
  misc_feature (76)..(197): NCBI GI NO: 7487705 NR Description: hypothetical protein T5J17
MSTRGSGSLSPAAGASAAAPEVEGHWAPHGAVLTACVVGSNVLVILLVFGFFWRFFSGKGGPSTSHGADDDDDEDSLPVASPWASRYRFEGHGARSTPMEDVVSSLPVSVYSSAGAEEGRKARPECAVCIVELRDGDSVRVLPRCGHRFHADCVGAWLRRRTTCPLCRGRVVPPAAAALTDKSRDAKDDVAVAVAADCPV

SEQ ID NO: 21963 - protein, 127 aa, Zea mays subsp. mays
  peptide (1)..(127): Ceres Seq. ID no. 15180673
QHASFLLSLQPFLFLAIYLLPSSLLLISLTLNLVLLNFSEETLQACDLFSQFYCKLDQHLVLGRKVLASKKAQLLWFMHTIGSESLLFGLSKTKPCPRAGAVVLALLPVRLRRRRRWKATGPRTARC

SEQ ID NO: 21964 - protein, 102 aa, Zea mays subsp. mays
  peptide (1)..(102): Ceres Seq. ID no. 15180674
  misc_feature (28)..(69): Pfam Name: RING finger Pfam Description: Zinc finger, C3HC4 type
  misc_feature (1)..(102): NCBI GI NO: 34894518 NR Description: P0551A11.23
  misc_feature (1)..(102): NCBI GI NO: 34894514 NR Description: P0551A11.21
  misc_feature (1)..(98): NCBI GI NO: 34907826 NR Description: P0485B12.26
  misc_feature (1)..(83): NCBI GI NO: 34907968 NR Description: P0446G04.15
  misc_feature (2)..(77): NCBI GI NO: 30017522 NR Description: putative ring-H2 zinc finger protein
  misc_feature (4)..(85): NCBI GI NO: 15226628 NR Description: hypothetical protein [Arabidopsis thaliana]
  misc_feature (5)..(85): NCBI GI NO: 34903920 NR Description: OSJNBa0038J17.5
  misc_feature (5)..(96): NCBI GI NO: 34903936 NR Description: OSJNBa0038J17.13
  misc_feature (1)..(76): NCBI GI NO: 8698833 NR Description: EL5 [Oryza sativa (japonica cultivar-group)]
  misc_feature (1)..(99): NCBI GI NO: 7487705 NR Description: hypothetical protein T5J17
MEDVVSSLPVSVYSSAGAEEGRKARPECAVCIVELRDGDSVRVLPRCGHRFHADCVGAWLRRRTTCPLCRGRVVPPAAAALTDKSRDAKDDVAVAVAADCPV

SEQ ID NO: 21965 - DNA, 2310 bp, Zea mays subsp. mays
  misc_feature (1)..(2310): Ceres Seq. ID no. 15180650
tcgccgaaaccaaccgccgcagccgccgccgccatggggggttcgcacagccgcgaggacctcgacctatccgactctgactccgaggacgccgagtccccccgggcttccgacaactcctccgactacggcacgcctcccccggcctccgtctcctccaagttagccagcggcgcaggggcggctacccccgcctccatcgacgccatcgaccgccacctccgccagctccacctcaagtacaacgagcccatctccccgaaccctagctccgggcccacccccagcgctaaccccgccgcgctcaacgccgtcaagctctacctccacatcggcggctcctctccctccgccaagtggatcgtctccgaccgcctcgccgccgcctccttcgtgcgcgccggcgccggcgccggcgacggcgacgacgaggatgacgacgcccccgccgccggcgggccgtggtccctcgtcgtgggctcgaagatccgggccagggtcgggcccgagctgcagctcaaggccttccccgcgcagcgccgggtggatttcgtcgccgacggcgtatgggccctcaagttcctgcactccgacggcttcggcgacttctgcgcgaagcaccacagctgtatgtttgagaacagctacggcgtcgccgccacggacgagggccgcgccaaggtattcgggaaggacttcgcggcgtgggcgcgcccggaggacggcgacgagtcgatatgggaggacgccaccgacggcttctccccgggccccaagggcagcccgatgcccccgcggacaccgctactgaaggccgtgctggaggatctgcgggagtttgaggagcccgtcgaggaaggaagtggaatcaagagccttgcgcttggcgcgctggacaacagtttccttgttggagacaagggcattgaggtcgtgaggaatttcgagcatgggatacatggaaagggcatgtccgtgaagttttctggagggagcacaaacttctcgacaccgaaaaaggctcttcttatgcgggccgagaccaacatgcttctgatgagcccagccactgatggaaagccacacgccaagggggtgcatcagttggacattgagacggggaaggtggtttcagaatggaagtttgagaaggatggagcagatattaacatgagggatatcaccaatgatagcaaaggtgctcagctggattcgtctgagtccaccttcttgggactggatgacaaccagttgtgccggtgggatatgagagatcgcaggggcattgtacagaagttggcaagtgcgactgaatcgccagtgttgcagtggactcaggggcatcagttctcccgggggacaaactttcagtgctttgcttcaactggtgatggttcaattgttgttggatcattagatgggaaaattcgcttgtattctaagagctctatgaggatggcaaagacagcctttcctgggttgggttcgcccattacccatgtcgacgtgacatatgatgggaagtggattcttgggacaacagatgcgtacctgattcttgtatgcaccatcttcatcgacaaagatggaaaggagaagactgggtttagtggtagaatggggaaccgtattgctgctccaaggctgctgaagctcaacccactggactctcatctagcaggagcaaacaacaggttcagggagggaagattctcttgggtgacggagaacgggaagcaggagcggcatctagtggcgacggtggggaagtacagcgtggtgtggaacttcctgcaggtgaagaacagccaccacgagtgctaccagtaccaggaggggctgaagagctgctattgctacaaggtgatccccaaggacgagtccatcgtggccagccgcttcatgcacgacaagtactcggtcagcgactccccggaggctccactggtggtggccacgcccatgaaggtcacctccttcagcatatccagcaggcactaactagcctccttgctccgccccgcaacttcgctgccggccgacgcgttccccttggctcctcggcctccggtgatctggtaacattttgttaagcaattgtttgtgcgacggttgcctgttccattgccttctaagttggttcaaattaattagtgatttgctgtgttgagtcgatacgcaacgttgaagaggggatggtagtgtctgttgggttagctacatattgctgaacaatctgatttagctgtgaggaagtggctaatggttgtaagaaagctgaaagttgtttgattaaaataattgttaact

SEQ ID NO: 21966 - protein, 666 aa, Zea mays subsp. mays
  peptide (1)..(666): Ceres Seq. ID no. 15180651
  misc_feature (12)..(665): NCBI GI NO: 7488984 NR Description: dem protein - tomato
  misc_feature (66)..(665): NCBI GI NO: 37223342 NR Description: DEM2 [Lycopersicon esculentum]
  misc_feature (66)..(665): NCBI GI NO: 37223344 NR Description: DEM2 [Lycopersicon esculentum]
  misc_feature (12)..(665): NCBI GI NO: 15230321 NR Description: dem-related protein [Arabidopsis thaliana]
  misc_feature (12)..(665): NCBI GI NO: 15234174 NR Description: Dem -related protein [Arabidopsis thaliana]
  misc_feature (176)..(663): NCBI GI NO: 729273 NR Description: CYPRO4 PROTEIN
  misc_feature (275)..(632): NCBI GI NO: 28829296 NR Description: similar to hypothetical protein
  misc_feature (388)..(608): NCBI GI NO: 40744400 NR Description: hypothetical protein AN3005.2
SPKPTAAAAAAMGGSHSREDLDLSDSDSEDAESPRASDNSSDYGTPPPASVSSKLASGAGAATPASIDAIDRHLRQLHLKYNEPISPNPSSGPTPSANPAALNAVKLYLHIGGSSPSAKWIVSDRLAAASFVRAGAGAGDGDDEDDDAPAAGGPWSLVVGSKIRARVGPELQLKAFPAQRRVDFVADGVWALKFLHSDGFGDFCAKHHSCMFENSYGVAATDEGRAKVFGKDFAAWARPEDGDESIWEDATDGFSPGPKGSPMPPRTPLLKAVLEDLREFEEPVEEGSGIKSLALGALDNSFLVGDKGIEVVRNFEHGIHGKGMSVKFSGGSTNFSTPKKALLMRAETNMLLMSPATDGKPHAKGVHQLDIETGKVVSEWKFEKDGADINMRDITNDSKGAQLDSSESTFLGLDDNQLCRWDMRDRRGIVQKLASATESPVLQWTQGHQFSRGTNFQCFASTGDGSIVVGSLDGKIRLYSKSSMRMAKTAFPGLGSPITHVDVTYDGKWILGTTDAYLILVCTIFIDKDGKEKTGFSGRMGNRIAAPRLLKLNPLDSHLAGANNRFREGRFSWVTENGKQERHLVATVGKYSVVWNFLQVKNSHHECYQYQEGLKSCYCYKVIPKDESIVASRFMHDKYSVSDSPEAPLVVATPMKVTSFSISSRH

SEQ ID NO: 21967 - protein, 655 aa, Zea mays subsp. mays
  peptide (1)..(655): Ceres Seq. ID no. 15180652
  misc_feature (1)..(654): NCBI GI NO: 7488984 NR Description: dem protein - tomato
  misc_feature (55)..(654): NCBI GI NO: 37223342 NR Description: DEM2 [Lycopersicon esculentum]
  misc_feature (55)..(654): NCBI GI NO: 37223344 NR Description: DEM2 [Lycopersicon esculentum]
  misc_feature (1)..(654): NCBI GI NO: 15230321 NR Description: dem-related protein [Arabidopsis thaliana]
  misc_feature (1)..(654): NCBI GI NO: 15234174 NR Description: Dem -related protein [Arabidopsis thaliana]
  misc_feature (165)..(652): NCBI GI NO: 729273 NR Description: CYPRO4 PROTEIN
  misc_feature (264)..(621): NCBI GI NO: 28829296 NR Description: similar to hypothetical protein
  misc_feature (377)..(597): NCBI GI NO: 40744400 NR Description: hypothetical protein AN3005.2
MGGSHSREDLDLSDSDSEDAESPRASDNSSDYGTPPPASVSSKLASGAGAATPASIDAIDRHLRQLHLKYNEPISPNPSSGPTPSANPAALNAVKLYLHIGGSSPSAKWIVSDRLAAASFVRAGAGAGDGDDEDDDAPAAGGPWSLVVGSKIRARVGPELQLKAFPAQRRVDFVADGVWALKFLHSDGFGDFCAKHHSCMFENSYGVAATDEGRAKVFGKDFAAWARPEDGDESIWEDATDGFSPGPKGSPMPPRTPLLKAVLEDLREFEEPVEEGSGIKSLALGALDNSFLVGDKGIEVVRNFEHGIHGKGMSVKFSGGSTNFSTPKKALLMRAETNMLLMSPATDGKPHAKGVHQLDIETGKVVSEWKFEKDGADINMRDITNDSKGAQLDSSESTFLGLDDNQLCRWDMRDRRGIVQKLASATESPVLQWTQGHQFSRGTNFQCFASTGDGSIVVGSLDGKIRLYSKSSMRMAKTAFPGLGSPITHVDVTYDGKWILGTTDAYLILVCTIFIDKDGKEKTGFSGRMGNRIAAPRLLKLNPLDSHLAGANNRFREGRFSWVTENGKQERHLVATVGKYSVVWNFLQVKNSHHECYQYQEGLKSCYCYKVIPKDESIVASRFMHDKYSVSDSPEAPLVVATPMKVTSFSISSRH

SEQ ID NO: 21968 - protein, 456 aa, Zea mays subsp. mays
  peptide (1)..(456): Ceres Seq. ID no. 15180653
  misc_feature (1)..(455): NCBI GI NO: 7488984 NR Description: dem protein - tomato
  misc_feature (1)..(455): NCBI GI NO: 37223342 NR Description: DEM2 [Lycopersicon esculentum]
  misc_feature (1)..(455): NCBI GI NO: 37223344 NR Description: DEM2 [Lycopersicon esculentum]
  misc_feature (1)..(455): NCBI GI NO: 15230321 NR Description: dem-related protein [Arabidopsis thaliana]
  misc_feature (1)..(455): NCBI GI NO: 15234174 NR Description: Dem -related protein [Arabidopsis thaliana]
  misc_feature (1)..(453): NCBI GI NO: 729273 NR Description: CYPRO4 PROTEIN
  misc_feature (65)..(422): NCBI GI NO: 28829296 NR Description: similar to hypothetical protein
  misc_feature (178)..(398): NCBI GI NO: 40744400 NR Description: hypothetical protein AN3005.2
MFENSYGVAATDEGRAKVFGKDFAAWARPEDGDESIWEDATDGFSPGPKGSPMPPRTPLLKAVLEDLREFEEPVEEGSGIKSLALGALDNSFLVGDKGIEVVRNFEHGIHGKGMSVKFSGGSTNFSTPKKALLMRAETNMLLMSPATDGKPHAKGVHQLDIETGKVVSEWKFEKDGADINMRDITNDSKGAQLDSSESTFLGLDDNQLCRWDMRDRRGIVQKLASATESPVLQWTQGHQFSRGTNFQCFASTGDGSIVVGSLDGKIRLYSKSSMRMAKTAFPGLGSPITHVDVTYDGKWILGTTDAYLILVCTIFIDKDGKEKTGFSGRMGNRIAAPRLLKLNPLDSHLAGANNRFREGRFSWVTENGKQERHLVATVGKYSVVWNFLQVKNSHHECYQYQEGLKSCYCYKVIPKDESIVASRFMHDKYSVSDSPEAPLVVATPMKVTSFSISSRH

SEQ ID NO: 21969 - DNA, 1686 bp, Zea mays subsp. mays
  misc_feature (1)..(1686): Ceres Seq. ID no. 15180657
aaagtggtccttttccatccccaaacctcggctgccatggatttcggcttcggcgccggcgaccggaggccgctctgctcttccccggaccgacacttcgcaccaccgcgagccgagcttttccatggcggtccgccgccctcgctgttcgagtgtgaggccgcggcgtggcgcgagaggatcatccgcgaggaggtggagcggcggctcatcgagaaggaggtccgccgcgatctctcccttgcgcgcgcccgcggcggtttcggccccgtcccgttcgtcggacccaatggccacatcgtgcggtcaccacgccaaggcacgttcttcaggccggacggcccattcacgtcgccaatgccgctgaccccgatgccggtcggcatgcatccgaactggccaccgctgccttcgttcgggtcgtgggaggggtttggttctcggcggctcgcgggatttgggcagccgatgctcctcaacgagacgagaacgaggtccctgccgccgccaaagccgatgcatcagctccagctgcgcatggtcacgcccagcgagagctccgaggttttttcatcagaaacaaaggattctggtgtgaaaaggaaggcacatgcgatttctgcaactactgaatcaacaaaaatacaaaatgctgcaagggactggagctgtgcactctgtcaagtgagcgcaaccagtgagtctggtctgaatcagcatcttcaagggaaaaagcataaggcgaagctggttcaatgtggagcgatcaaggtgatggatactaataaaagtggtttacatgtaactactggaaataacaatggcgcaggcccaagtgacgcgcctaagaaaatccacatcctggtcgatggagaaatgcaccaggtcgtccaaaaaagcaagcgtgtatggtgtgagcgttgcagggtcagctgtaccaatgccggtgccatggctgaccatctgcggggcaagaagcacagtttattgaataaagtctgggcgtcaataaaagccgtgagaaggaacaatggaattaaggaagattcagctactgctacatgtgagagaaaggtaaatgaaagcggccctgctggaattccagaggaagaggaacatgaggaggagggagacacatacatggctagcgaattcagcggagatgcttcttccgaaattcctagatggtggatctggtactactggatttgcccattggcatggacagtgtatgggctcatcgtgacacaatacggagacctgcaagaccccatcacagtccctggcgaaagcaaccagacgattagctactatataacacatcattttggataccatagggattttatgccagtcgttgcgccagttctcgtgctctttgcagtattcttcgctttcatgtacgcagtctgcatcaagaagttgaactttcagcaacgataggaacaagatatggcagaaaagctcttgagagtattttttctttttttggaaaatacttccttttctcctttcatttttgagtccctttaatatattgcaatgtatatagggtgtagcttcggtattccacacatcgtcaaatgtggcgaggtcttatacagatttctagccgtttaactgtggaacattgtaatttgtaagagcacatctatgagaaagttttgttcatgcccaattcatttc

SEQ ID NO: 21970 - protein, 480 aa, Zea mays subsp. mays
  peptide (1)..(480): Ceres Seq. ID no. 15180658
  misc_feature (393)..(480): NCBI GI NO: 27368815 NR Description: PDR-like ABC transporter
  misc_feature (393)..(480): NCBI GI NO: 15215837 NR Description: AT3g16340/MYA6_15 [Arabidopsis thaliana]
  misc_feature (392)..(480): NCBI GI NO: 34910744 NR Description: putative ABC transporter
  misc_feature (393)..(480): NCBI GI NO: 18401096 NR Description: ABC transporter family protein
  misc_feature (392)..(480): NCBI GI NO: 18377973 NR Description: putative ABC transporter protein
  misc_feature (392)..(480): NCBI GI NO: 15218936 NR Description: ABC transporter family protein
  misc_feature (392)..(480): NCBI GI NO: 15218084 NR Description: ABC transporter family protein
  misc_feature (392)..(480): NCBI GI NO: 25384958 NR Description: F9L1.15 protein - Arabidopsis thaliana
  misc_feature (393)..(480): NCBI GI NO: 14331118 NR Description: ABC1 protein [Nicotiana plumbaginifolia]
  misc_feature (392)..(480): NCBI GI NO: 34912544 NR Description: putative ABC transporter protein
KVVLFHPQTSAAMDFGFGAGDRRPLCSSPDRHFAPPRAELFHGGPPPSLFECEAAAWRERIIREEVERRLIEKEVRRDLSLARARGGFGPVPFVGPNGHIVRSPRQGTFFRPDGPFTSPMPLTPMPVGMHPNWPPLPSFGSWEGFGSRRLAGFGQPMLLNETRTRSLPPPKPMHQLQLRMVTPSESSEVFSSETKDSGVKRKAHAISATTESTKIQNAARDWSCALCQVSATSESGLNQHLQGKKHKAKLVQCGAIKVMDTNKSGLHVTTGNNNGAGPSDAPKKIHILVDGEMHQVVQKSKRVWCERCRVSCTNAGAMADHLRGKKHSLLNKVWASIKAVRRNNGIKEDSATATCERKVNESGPAGIPEEEEHEEEGDTYMASEFSGDASSEIPRWWIWYYWICPLAWTVYGLIVTQYGDLQDPITVPGESNQTISYYITHHFGYHRDFMPVVAPVLVLFAVFFAFMYAVCIKKLNFQQR

SEQ ID NO: 21971 - protein, 468 aa, Zea mays subsp. mays
  peptide (1)..(468): Ceres Seq. ID no. 15180659
  misc_feature (381)..(468): NCBI GI NO: 27368815 NR Description: PDR-like ABC transporter
  misc_feature (381)..(468): NCBI GI NO: 15215837 NR Description: AT3g16340/MYA6_15 [Arabidopsis thaliana]
  misc_feature (380)..(468): NCBI GI NO: 34910744 NR Description: putative ABC transporter
  misc_feature (381)..(468): NCBI GI NO: 18401096 NR Description: ABC transporter family protein
  misc_feature (380)..(468): NCBI GI NO: 18377973 NR Description: putative ABC transporter protein
  misc_feature (380)..(468): NCBI GI NO: 15218936 NR Description: ABC transporter family protein
  misc_feature (380)..(468): NCBI GI NO: 15218084 NR Description: ABC transporter family protein
  misc_feature (380)..(468): NCBI GI NO: 25384958 NR Description: F9L1.15 protein - Arabidopsis thaliana
  misc_feature (381)..(468): NCBI GI NO: 14331118 NR Description: ABC1 protein [Nicotiana plumbaginifolia]
  misc_feature (380)..(468): NCBI GI NO: 34912544 NR Description: putative ABC transporter protein
MDFGFGAGDRRPLCSSPDRHFAPPRAELFHGGPPPSLFECEAAAWRERIIREEVERRLIEKEVRRDLSLARARGGFGPVPFVGPNGHIVRSPRQGTFFRPDGPFTSPMPLTPMPVGMHPNWPPLPSFGSWEGFGSRRLAGFGQPMLLNETRTRSLPPPKPMHQLQLRMVTPSESSEVFSSETKDSGVKRKAHAISATTESTKIQNAARDWSCALCQVSATSESGLNQHLQGKKHKAKLVQCGAIKVMDTNKSGLHVTTGNNNGAGPSDAPKKIHILVDGEMHQVVQKSKRVWCERCRVSCTNAGAMADHLRGKKHSLLNKVWASIKAVRRNNGIKEDSATATCERKVNESGPAGIPEEEEHEEEGDTYMASEFSGDASSEIPRWWIWYYWICPLAWTVYGLIVTQYGDLQDPITVPGESNQTISYYITHHFGYHRDFMPVVAPVLVLFAVFFAFMYAVCIKKLNFQQR

SEQ ID NO: 21972 - protein, 361 aa, Zea mays subsp. mays
  peptide (1)..(361): Ceres Seq. ID no. 15180660
  misc_feature (274)..(361): NCBI GI NO: 27368815 NR Description: PDR-like ABC transporter
  misc_feature (274)..(361): NCBI GI NO: 15215837 NR Description: AT3g16340/MYA6_15 [Arabidopsis thaliana]
  misc_feature (273)..(361): NCBI GI NO: 34910744 NR Description: putative ABC transporter
  misc_feature (274)..(361): NCBI GI NO: 18401096 NR Description: ABC transporter family protein
  misc_feature (273)..(361): NCBI GI NO: 18377973 NR Description: putative ABC transporter protein
  misc_feature (273)..(361): NCBI GI NO: 15218936 NR Description: ABC transporter family protein
  misc_feature (273)..(361): NCBI GI NO: 15218084 NR Description: ABC transporter family protein
  misc_feature (273)..(361): NCBI GI NO: 25384958 NR Description: F9L1.15 protein - Arabidopsis thaliana
  misc_feature (274)..(361): NCBI GI NO: 14331118 NR Description: ABC1 protein [Nicotiana plumbaginifolia]
  misc_feature (273)..(361): NCBI GI NO: 34912544 NR Description: putative ABC transporter protein
MPLTPMPVGMHPNWPPLPSFGSWEGFGSRRLAGFGQPMLLNETRTRSLPPPKPMHQLQLRMVTPSESSEVFSSETKDSGVKRKAHAISATTESTKIQNAARDWSCALCQVSATSESGLNQHLQGKKHKAKLVQCGAIKVMDTNKSGLHVTTGNNNGAGPSDAPKKIHILVDGEMHQVVQKSKRVWCERCRVSCTNAGAMADHLRGKKHSLLNKVWASIKAVRRNNGIKEDSATATCERKVNESGPAGIPEEEEHEEEGDTYMASEFSGDASSEIPRWWIWYYWICPLAWTVYGLIVTQYGDLQDPITVPGESNQTISYYITHHFGYHRDFMPVVAPVLVLFAVFFAFMYAVCIKKLNFQQR

SEQ ID NO: 21973 - DNA, 1056 bp, Zea mays subsp. mays
  misc_feature (1)..(1056): Ceres Seq. ID no. 14305124
atctccgcggggatccccaggctagctaggccagagatgggcaactcgagcggtcgggcggaagacctcgcggacgccgacatggacgacggtaacaacgtgcgtcgtgcctcttcctcctctgcgggctacgtccggggcggtgggtcgtcatcatccccaccggtgagcccgccgcggccgcattcaccacggatgttcgtgccccagagtcctgtaactccgttgcaaagagctgcagaagtgcctcctccggtgttcaaccaaatattgatgaatcaacaacaggaagattctgatggcccgcctcaaaagaaaattcccacgttgctcatgtggactcttggagggaggaatatctacgttgaaggatcatgggacaactggacatcaaagaaactcgttgagaaatccggaaaagatcacaccattcttttgatgctttcatctggagttcaccgttatagattcattgtagatggagaaagaagatttatacccgaccttccctgcgaaactgacaacatgggtcagattgtgaacctagtagatgttcatgacttcgttcctgacagcgtggaaagtgtatctgagctgatggctcctccctccccggactccagctacggtttccatgttcccggcgagaaggagttctccaaggagcctcctcagctgccgtcccagctctacctcggcgtgctgaattcccggagcaccgaagaaggctgcgcgaggccgaggcacgtcgtcctcgaccatctctacatcgagaagggctggggcgcacagccgctggtggccctcggctacacccacaggttccgctccaagtacgtcacctgcgtcctgtacaaggccatcgagcggtagcctagctaaccattgctgtgctgttgtgggccggcaactatagctagccgtggtggacttggcagttcattcaggtttagaagtctctcctgcataatttgttcatctgctaaactaaagaggtgggtgcaaatccatgtgaatcttgttttttttagctgccagagcttacatattcttatc

SEQ ID NO: 21974 - protein, 290 aa, Zea mays subsp. mays
  peptide (1)..(290): Ceres Seq. ID no. 14305125
  misc_feature (202)..(288): Pfam Name: Pfam Description:  5'-AMP-activated protein kinase
  misc_feature (36)..(290): NCBI GI NO: 22324436 NR Description: AKIN beta1-like protein
  misc_feature (13)..(56): NCBI GI NO: 22324436 NR Description: AKIN beta1-like protein
  misc_feature (13)..(290): NCBI GI NO: 15242175 NR Description: AMPKBI
  misc_feature (13)..(290): NCBI GI NO: 6686782 NR Description: AKIN gamma [Arabidopsis thaliana]
  misc_feature (13)..(290): NCBI GI NO: 32364486 NR Description: AKIN beta1 [Medicago truncatula]
  misc_feature (13)..(290): NCBI GI NO: 5702015 NR Description: GAL83 protein [Solanum tuberosum]
  misc_feature (9)..(290): NCBI GI NO: 6686784 NR Description: AKIN beta2 [Arabidopsis thaliana]
  misc_feature (53)..(290): NCBI GI NO: 15234895 NR Description: kinase like protein [Arabidopsis thaliana]
  misc_feature (13)..(290): NCBI GI NO: 32364488 NR Description: AKIN beta2 [Medicago truncatula]
  misc_feature (14)..(248): NCBI GI NO: 29725558 NR Description: SNF1 kinase complex anchoring protein
ISAGIPRLARPEMGNSSGRAEDLADADMDDGNNVRRASSSSAGYVRGGGSSSSPPVSPPRPHSPRMFVPQSPVTPLQRAAEVPPPVFNQILMNQQQEDSDGPPQKKIPTLLMWTLGGRNIYVEGSWDNWTSKKLVEKSGKDHTILLMLSSGVHRYRFIVDGERRFIPDLPCETDNMGQIVNLVDVHDFVPDSVESVSELMAPPSPDSSYGFHVPGEKEFSKEPPQLPSQLYLGVLNSRSTEEGCARPRHVVLDHLYIEKGWGAQPLVALGYTHRFRSKYVTCVLYKAIER

SEQ ID NO: 21975 - protein, 278 aa, Zea mays subsp. mays
  peptide (1)..(278): Ceres Seq. ID no. 14305126
  misc_feature (190)..(276): Pfam Name: Pfam Description:  5'-AMP-activated protein kinase
  misc_feature (24)..(278): NCBI GI NO: 22324436 NR Description: AKIN beta1-like protein
  misc_feature (1)..(44): NCBI GI NO: 22324436 NR Description: AKIN beta1-like protein
  misc_feature (1)..(278): NCBI GI NO: 15242175 NR Description: AMPKBI
  misc_feature (1)..(278): NCBI GI NO: 6686782 NR Description: AKIN gamma [Arabidopsis thaliana]
  misc_feature (1)..(278): NCBI GI NO: 32364486 NR Description: AKIN beta1 [Medicago truncatula]
  misc_feature (1)..(278): NCBI GI NO: 5702015 NR Description: GAL83 protein [Solanum tuberosum]
  misc_feature (1)..(278): NCBI GI NO: 6686784 NR Description: AKIN beta2 [Arabidopsis thaliana]
  misc_feature (41)..(278): NCBI GI NO: 15234895 NR Description: kinase like protein [Arabidopsis thaliana]
  misc_feature (1)..(278): NCBI GI NO: 32364488 NR Description: AKIN beta2 [Medicago truncatula]
  misc_feature (2)..(236): NCBI GI NO: 29725558 NR Description: SNF1 kinase complex anchoring protein
MGNSSGRAEDLADADMDDGNNVRRASSSSAGYVRGGGSSSSPPVSPPRPHSPRMFVPQSPVTPLQRAAEVPPPVFNQILMNQQQEDSDGPPQKKIPTLLMWTLGGRNIYVEGSWDNWTSKKLVEKSGKDHTILLMLSSGVHRYRFIVDGERRFIPDLPCETDNMGQIVNLVDVHDFVPDSVESVSELMAPPSPDSSYGFHVPGEKEFSKEPPQLPSQLYLGVLNSRSTEEGCARPRHVVLDHLYIEKGWGAQPLVALGYTHRFRSKYVTCVLYKAIER

SEQ ID NO: 21976 - protein, 263 aa, Zea mays subsp. mays
  peptide (1)..(263): Ceres Seq. ID no. 14305127
  misc_feature (175)..(261): Pfam Name: Pfam Description:  5'-AMP-activated protein kinase
  misc_feature (9)..(263): NCBI GI NO: 22324436 NR Description: AKIN beta1-like protein
  misc_feature (1)..(29): NCBI GI NO: 22324436 NR Description: AKIN beta1-like protein
  misc_feature (1)..(263): NCBI GI NO: 15242175 NR Description: AMPKBI
  misc_feature (1)..(263): NCBI GI NO: 6686782 NR Description: AKIN gamma [Arabidopsis thaliana]
  misc_feature (1)..(263): NCBI GI NO: 32364486 NR Description: AKIN beta1 [Medicago truncatula]
  misc_feature (1)..(263): NCBI GI NO: 5702015 NR Description: GAL83 protein [Solanum tuberosum]
  misc_feature (1)..(263): NCBI GI NO: 6686784 NR Description: AKIN beta2 [Arabidopsis thaliana]
  misc_feature (26)..(263): NCBI GI NO: 15234895 NR Description: kinase like protein [Arabidopsis thaliana]
  misc_feature (1)..(263): NCBI GI NO: 32364488 NR Description: AKIN beta2 [Medicago truncatula]
  misc_feature (1)..(221): NCBI GI NO: 29725558 NR Description: SNF1 kinase complex anchoring protein
MDDGNNVRRASSSSAGYVRGGGSSSSPPVSPPRPHSPRMFVPQSPVTPLQRAAEVPPPVFNQILMNQQQEDSDGPPQKKIPTLLMWTLGGRNIYVEGSWDNWTSKKLVEKSGKDHTILLMLSSGVHRYRFIVDGERRFIPDLPCETDNMGQIVNLVDVHDFVPDSVESVSELMAPPSPDSSYGFHVPGEKEFSKEPPQLPSQLYLGVLNSRSTEEGCARPRHVVLDHLYIEKGWGAQPLVALGYTHRFRSKYVTCVLYKAIER

SEQ ID NO: 21977 - DNA, 952 bp, Zea mays subsp. mays
  misc_feature (1)..(952): Ceres Seq. ID no. 12634256
atcttctcccccatgccggaagctcaacaaaaacaggcaatgggcaacgcataggcatagcttggctcgcacggtgtcgctggctcccctccccttccctccccactgttacatccagcgagctgttcacggccgtgccgagctcagtgaggcagcgtttgcgagtccgggacgaggggagcggcgggcgacatggggaggggccgcagcgagataaagcggatcgagaaccccacgcagcggcagtccaccttctacaagcgcagggacggcctcttcaagaaggctagggagctctccgttctgtgcgacgtggacctgctgctgctcctcttctccacctccggcaagctctaccactacctctcgcccaccgtcccctccgtcaaggacctggtcgagaggtacgaggccacgacgcacaccaaggtctggaccgacatccgccaggagcggcgcgcggagctggagaaggcggagcagatgtgcgagctgatggagaaggagctgcgggtcatgacggtggacgacggggagcagtacacggtgccgtcgctggagctgctggagcacagcctggaggcggccgtgcgcaaggtgcgctccgagaaggaccgcaagatcggcggcgagatcaactacctcgagaacattatcagaggacgccacgaggagcgctacgggttgtgcaacaagcttgcgcactctcaggcctcgaacaacgagggaggaggtgggtcgaccccaccaagcagcggcctggaactcaaactgggtctcaactgacgggctgggctggatggaaagctcgtggactatgctctgttccttgggtactgtactctgtaggttttggttgagtggtcgttgtcagcagttgtcctttgctgcttcgattggtggtgttaatgtactccattattcaggtgggatcaagtacctttgctgcttc

SEQ ID NO: 21978 - protein, 197 aa, Zea mays subsp. mays
  peptide (1)..(197): Ceres Seq. ID no. 12634257
  misc_feature (72)..(171): Pfam Name: Pfam Description:  K-box region
  misc_feature (1)..(197): NCBI GI NO: 34910770 NR Description: P0042A10.14
  misc_feature (4)..(180): NCBI GI NO: 40644782 NR Description: putative transcription factor MADS32
  misc_feature (1)..(175): NCBI GI NO: 27151621 NR Description: MADS box protein GGM13
  misc_feature (1)..(192): NCBI GI NO: 29372756 NR Description: m23 [Zea mays]
  misc_feature (1)..(165): NCBI GI NO: 3170502 NR Description: APETALA3 homolog PnAP3-2 [Papaver nudicaule]
  misc_feature (1)..(178): NCBI GI NO: 4887235 NR Description: AGAMOUS homolog transcription factor
  misc_feature (1)..(179): NCBI GI NO: 23304678 NR Description: MADS-box protein FUL-d
  misc_feature (1)..(184): NCBI GI NO: 20513264 NR Description: MADS-box transcription factor [Lilium regale]
  misc_feature (1)..(189): NCBI GI NO: 15667638 NR Description: putative MADS-box family transcription factor
  misc_feature (1)..(174): NCBI GI NO: 21396795 NR Description: MADS-box gene 2 protein [Lycopodium annotinum]
MGRGRSEIKRIENPTQRQSTFYKRRDGLFKKARELSVLCDVDLLLLLFSTSGKLYHYLSPTVPSVKDLVERYEATTHTKVWTDIRQERRAELEKAEQMCELMEKELRVMTVDDGEQYTVPSLELLEHSLEAAVRKVRSEKDRKIGGEINYLENIIRGRHEERYGLCNKLAHSQASNNEGGGGSTPPSSGLELKLGLN

SEQ ID NO: 21979 - protein, 100 aa, Zea mays subsp. mays
  peptide (1)..(100): Ceres Seq. ID no. 12634258
  misc_feature (1)..(74): Pfam Name: Pfam Description:  K-box region
  misc_feature (1)..(100): NCBI GI NO: 34910770 NR Description: P0042A10.14
  misc_feature (1)..(83): NCBI GI NO: 40644782 NR Description: putative transcription factor MADS32
  misc_feature (1)..(78): NCBI GI NO: 27151621 NR Description: MADS box protein GGM13
  misc_feature (1)..(95): NCBI GI NO: 29372756 NR Description: m23 [Zea mays]
  misc_feature (1)..(68): NCBI GI NO: 3170502 NR Description: APETALA3 homolog PnAP3-2 [Papaver nudicaule]
  misc_feature (1)..(81): NCBI GI NO: 4887235 NR Description: AGAMOUS homolog transcription factor
  misc_feature (1)..(82): NCBI GI NO: 23304678 NR Description: MADS-box protein FUL-d
  misc_feature (1)..(87): NCBI GI NO: 20513264 NR Description: MADS-box transcription factor [Lilium regale]
  misc_feature (1)..(92): NCBI GI NO: 15667638 NR Description: putative MADS-box family transcription factor
  misc_feature (1)..(77): NCBI GI NO: 21396795 NR Description: MADS-box gene 2 protein [Lycopodium annotinum]
MCELMEKELRVMTVDDGEQYTVPSLELLEHSLEAAVRKVRSEKDRKIGGEINYLENIIRGRHEERYGLCNKLAHSQASNNEGGGGSTPPSSGLELKLGLN

SEQ ID NO: 21980 - DNA, 1120 bp, Zea mays subsp. mays
  misc_feature (1)..(1120): Ceres Seq. ID no. 12634262
  misc_feature (1104)..(1104): n is a, c, t, g, unknown, or other
  misc_feature (1102)..(1102): n is a, c, t, g, unknown, or other
  misc_feature (1103)..(1103): n is a, c, t, g, unknown, or other
  misc_feature (1106)..(1106): n is a, c, t, g, unknown, or other
aaggaacctatgtatgcttgctttgcagtatcgcattactattttccctttagtttttcggaaatcttaaatgaacttaatcctcggttgactagattcacatctgtatcctataattatgacctgattgctctatttctaaatattttcatgcgagttctttttttcatagttaaaaggaactaggtagcatttcattagaaataggcacccaaattcgcctggatggtctgggtatacatccacacccttgaccaactgagctagctcagcttcctttttttcgtagttaaattctgtaagattccaaagttatcttagggaaagccgtaaaagaacagaagttcaccatcttatgagtcagacctttgatgcagggtgttacacttggaggtacaggcaaggaacatggagataggcaccccaagattggtcagggagctctaattggagccagtgctactatcctcggcaatattaatgtaggcgaaggtgccatgattgctgctggctcccttgttttaaaggacgtacctccccacagtatggctgtaggtaatcctgcaaaggtagttggttatacagagaaagaagatccttctttaactatgaaacatgatgcaaggagagattattttgagcatgctgccatcagattgagatgattgatacacctaatgacgagtcttctttctattcgtctgtggaatactgtggagtaaaaaaagttccaaatcgccttattggcaagaagttttgtggagttaaaaaaaggtttcgtcgtcttactcgcaggaaaccttgtgaagttaaaaaaaaaatgtttgacgaaacgcatacggatgccattccggacatttcgtcacaggcacaaggctggatagtcgatgagctctgtgtttccctttctgcccagacaaccaaatgaagatggaaaagggtcacccagggctccaaaatctagagtgtagacaagcatgtccttaatgcgccttaaattggtctggatggcacttttttgtgataaactatctatctaaaccattgactaatgtctactctactctcaacaagatcaattaattgtatatttgatattaannntngaatgtttagtatg

SEQ ID NO: 21981 - protein, 97 aa, Zea mays subsp. mays
  peptide (1)..(97): Ceres Seq. ID no. 12634263
  misc_feature (1)..(94): NCBI GI NO: 22758278 NR Description: Putative serine acetyltransferase
  misc_feature (1)..(97): NCBI GI NO: 30690434 NR Description: acetyltransferase family [Arabidopsis thaliana]
  misc_feature (1)..(97): NCBI GI NO: 17225592 NR Description: serine acetyltransferase [Arabidopsis thaliana]
  misc_feature (1)..(93): NCBI GI NO: 5597011 NR Description: serine acetyltranferase 2 [Arabidopsis thaliana]
  misc_feature (1)..(93): NCBI GI NO: 18398491 NR Description: expressed protein; protein id: At2g17640
  misc_feature (1)..(82): NCBI GI NO: 7433700 NR Description: serine O-acetyltransferase (EC 2
  misc_feature (1)..(82): NCBI GI NO: 7433701 NR Description: serine O-acetyltransferase (EC 2
  misc_feature (1)..(89): NCBI GI NO: 20198259 NR Description: serine acetyltransferase (GB:AF112303)
  misc_feature (1)..(89): NCBI GI NO: 25286519 NR Description: probable serine acetyltransferase
  misc_feature (1)..(87): NCBI GI NO: 23028301 NR Description: hypothetical protein
MQGVTLGGTGKEHGDRHPKIGQGALIGASATILGNINVGEGAMIAAGSLVLKDVPPHSMAVGNPAKVVGYTEKEDPSLTMKHDARRDYFEHAAIRLR

SEQ ID NO: 21982 - protein, 88 aa, Zea mays subsp. mays
  peptide (1)..(88): Ceres Seq. ID no. 12634264
MIDTPNDESSFYSSVEYCGVKKVPNRLIGKKFCGVKKRFRRLTRRKPCEVKKKMFDETHTDAIPDISSQAQGWIVDELCVSLSAQTTK

SEQ ID NO: 21983 - protein, 61 aa, Zea mays subsp. mays
  peptide (1)..(61): Ceres Seq. ID no. 12634265
KEPMYACFAVSHYYFPFSFSEILNELNPRLTRFTSVSYNYDLIALFLNIFMRVLFFIVKRN

SEQ ID NO: 21984 - DNA, 1157 bp, Zea mays subsp. mays
  misc_feature (1)..(1157): Ceres Seq. ID no. 15180844
cctctccgctcgtctccgctagctagctgcaccatcgtgcatgcgttcccggccgccgcgccgcccgcctgcaggacccgcgctgccgatcgacgtcggtgcacaatgtggaactgctcgtcgctcctgctgcagtacggcgacgactacgcagccaggtgcgagagctctagttcaccggcaggagctgtgggcctggacaggatactagcggcggagtatggccggttcgattctctggacctgtcgccgccgccgccgcttcacggtcttcaggcgcagacgctttttgctattcacggttcttcagagaactgcctaggaataggcgcgaatccaatctacagcaccgaggcccggcccgcgttctcgcagctcagcttcacccagccagctgctgataccgctgcccactactcgatgaaatggacggcagcgggggagacggcgaccggtggcgggggaagccgtctcaggggatcgaagaggctcaagacaaagacgccagccacagcacaaggtccacagcaccacggccagcggtgcagtccgaaaccaacaacaagtcagtctatcaaggcaccaccatgtaagaggagccagaagctgggggacaagatcacgacgcttcagcagctagtctccccttatggcaagacggatacggcatcagtgctccacgaggcagccacctgcatcaagcacctccacgagcagatccagattctgacgccctcctaccctgaactcagttctccagcgtcacagcaggacacgggcgacgaagagggcggcgcgacgggtctgcgccggcgaggcctgtgcgtggcgtcgctgtccccggccgtcgtgcagctcgtgtcggccgaggccgcgctcggcaaccgcgacacggaagaccactggcgctggctcggcactctgtaagtctgtagccggggcggagaacgatgctgtgctgccatgcttcagttcgtagacggtaggagcacgagacatggccgcaggggttggtgtcatcaggccttcagatacagcgttagacctcaatttcactggggaaaaaataaatattactcacctgcttcgagaggttattagttagtacaatggatatattatatactacattaatacgtcaccttctgttttatccg

SEQ ID NO: 21985 - protein, 308 aa, Zea mays subsp. mays
  peptide (1)..(308): Ceres Seq. ID no. 15180845
  misc_feature (199)..(236): Pfam Name: Pfam Description:  Helix-loop-helix DNA-binding domain
  misc_feature (148)..(280): NCBI GI NO: 22093671 NR Description: bHLH transcription factor-like protein
  misc_feature (166)..(302): NCBI GI NO: 14488370 NR Description: putative ethylene-responsive protein
  misc_feature (166)..(292): NCBI GI NO: 21740790 NR Description: OSJNBb0091E11.4
  misc_feature (169)..(280): NCBI GI NO: 15217667 NR Description: hypothetical protein [Arabidopsis thaliana]
  misc_feature (169)..(280): NCBI GI NO: 25403326 NR Description: protein T22C5.11 [imported] - Arabidopsis thaliana
  misc_feature (161)..(302): NCBI GI NO: 18407276 NR Description: expressed protein [Arabidopsis thaliana]
  misc_feature (161)..(302): NCBI GI NO: 21553730 NR Description: unknown [Arabidopsis thaliana]
  misc_feature (198)..(283): NCBI GI NO: 18390560 NR Description: expressed protein [Arabidopsis thaliana]
  misc_feature (160)..(280): NCBI GI NO: 38345410 NR Description: OSJNBa0017B10.16
  misc_feature (199)..(283): NCBI GI NO: 18402256 NR Description: expressed protein [Arabidopsis thaliana]
PLRSSPLASCTIVHAFPAAAPPACRTRAADRRRCTMWNCSSLLLQYGDDYAARCESSSSPAGAVGLDRILAAEYGRFDSLDLSPPPPLHGLQAQTLFAIHGSSENCLGIGANPIYSTEARPAFSQLSFTQPAADTAAHYSMKWTAAGETATGGGGSRLRGSKRLKTKTPATAQGPQHHGQRCSPKPTTSQSIKAPPCKRSQKLGDKITTLQQLVSPYGKTDTASVLHEAATCIKHLHEQIQILTPSYPELSSPASQQDTGDEEGGATGLRRRGLCVASLSPAVVQLVSAEAALGNRDTEDHWRWLGTL

SEQ ID NO: 21986 - protein, 273 aa, Zea mays subsp. mays
  peptide (1)..(273): Ceres Seq. ID no. 15180846
  misc_feature (164)..(201): Pfam Name: Pfam Description:  Helix-loop-helix DNA-binding domain
  misc_feature (113)..(245): NCBI GI NO: 22093671 NR Description: bHLH transcription factor-like protein
  misc_feature (131)..(267): NCBI GI NO: 14488370 NR Description: putative ethylene-responsive protein
  misc_feature (131)..(257): NCBI GI NO: 21740790 NR Description: OSJNBb0091E11.4
  misc_feature (134)..(245): NCBI GI NO: 15217667 NR Description: hypothetical protein [Arabidopsis thaliana]
  misc_feature (134)..(245): NCBI GI NO: 25403326 NR Description: protein T22C5.11 [imported] - Arabidopsis thaliana
  misc_feature (126)..(267): NCBI GI NO: 18407276 NR Description: expressed protein [Arabidopsis thaliana]
  misc_feature (126)..(267): NCBI GI NO: 21553730 NR Description: unknown [Arabidopsis thaliana]
  misc_feature (163)..(248): NCBI GI NO: 18390560 NR Description: expressed protein [Arabidopsis thaliana]
  misc_feature (125)..(245): NCBI GI NO: 38345410 NR Description: OSJNBa0017B10.16
  misc_feature (164)..(248): NCBI GI NO: 18402256 NR Description: expressed protein [Arabidopsis thaliana]
MWNCSSLLLQYGDDYAARCESSSSPAGAVGLDRILAAEYGRFDSLDLSPPPPLHGLQAQTLFAIHGSSENCLGIGANPIYSTEARPAFSQLSFTQPAADTAAHYSMKWTAAGETATGGGGSRLRGSKRLKTKTPATAQGPQHHGQRCSPKPTTSQSIKAPPCKRSQKLGDKITTLQQLVSPYGKTDTASVLHEAATCIKHLHEQIQILTPSYPELSSPASQQDTGDEEGGATGLRRRGLCVASLSPAVVQLVSAEAALGNRDTEDHWRWLGTL

SEQ ID NO: 21987 - protein, 168 aa, Zea mays subsp. mays
  peptide (1)..(168): Ceres Seq. ID no. 15180847
  misc_feature (59)..(96): Pfam Name: Pfam Description:  Helix-loop-helix DNA-binding domain
  misc_feature (8)..(140): NCBI GI NO: 22093671 NR Description: bHLH transcription factor-like protein
  misc_feature (26)..(162): NCBI GI NO: 14488370 NR Description: putative ethylene-responsive protein
  misc_feature (26)..(152): NCBI GI NO: 21740790 NR Description: OSJNBb0091E11.4
  misc_feature (29)..(140): NCBI GI NO: 15217667 NR Description: hypothetical protein [Arabidopsis thaliana]
  misc_feature (29)..(140): NCBI GI NO: 25403326 NR Description: protein T22C5.11 [imported] - Arabidopsis thaliana
  misc_feature (21)..(162): NCBI GI NO: 18407276 NR Description: expressed protein [Arabidopsis thaliana]
  misc_feature (21)..(162): NCBI GI NO: 21553730 NR Description: unknown [Arabidopsis thaliana]
  misc_feature (58)..(143): NCBI GI NO: 18390560 NR Description: expressed protein [Arabidopsis thaliana]
  misc_feature (20)..(140): NCBI GI NO: 38345410 NR Description: OSJNBa0017B10.16
  misc_feature (59)..(143): NCBI GI NO: 18402256 NR Description: expressed protein [Arabidopsis thaliana]
MKWTAAGETATGGGGSRLRGSKRLKTKTPATAQGPQHHGQRCSPKPTTSQSIKAPPCKRSQKLGDKITTLQQLVSPYGKTDTASVLHEAATCIKHLHEQIQILTPSYPELSSPASQQDTGDEEGGATGLRRRGLCVASLSPAVVQLVSAEAALGNRDTEDHWRWLGTL

SEQ ID NO: 21988 - DNA, 1374 bp, Zea mays subsp. mays
  misc_feature (1)..(1374): Ceres Seq. ID no. 15180643
aacccacctcgccgaatcactccaccaaccacgaacctgaaaccctagccacgcccatgagcgacgacgcgaccgccgccgcgccctcttcgccgtcgacctccccttccccatcctctgcttcctcatcaggcgcctccccgtcgccttcctccccgcgcgccaagcgccgccgcaccgaccggtacgctctcggtttcgagttcgccccgcgactcgcgccctacgaactccctgaggaaccgctcctcgacaagcacaagcgcgcctggcccaactggacggagcgctccaccttggctctcctcgacgcctggggcgacagcttcgtccgcgcggggcgcagcatcatccgcgccgacgagtggctcgaggtcgcccgcctcgtgtgcgccgccgtgggccgtcccgcggggtatttctctgatgcgcagtgccgcaaccgagtggacacgcttaggaagaagtttaagaaggagagggagagagagcgccgtgccgcgcgccgctccggtccctccccttccaaatgggtttattacgacaagatggtggcaattctgtgcccgaccccgcctccgcctccgctgccgaccctgcctccgcctgcccgtccccctccgctgcctctccagttgctgcctctggtcgcaaagcgccgccgcgacaggcagccagcgcggcgctttcagtgggggatgaaagctcctgagcgtcttcttggtggtgccggagacgtcgtaggtcccagggtttcagggtcaggtgcgaagttgggtgaacttggaccgcagaaaaatagtgctgttcaagggaagcagaatggtttcatggccctcacagagtcaattcagaagtttgaggaggcttttgcgaggatggagagtagcaagaggcagcacatggtggaggtggagcaaatgaggagggatttgcaaagggacctagatgcaaagtggagggagatattggagaaggcgcaagcggagattggtcgccttagtaatgaggatggggatgaacatgatgtggacgaagatggggatgttggcgatggtaagagattggagggtggtgatgagcaaaacaatggtgctatggatgcttctccttagcatatagcctagatgcttacaaaatgaggaacaaaattggggttatcatgtcgatagatgaatccacatgatagacatgtggttatgattaactccgtagctgctgatattagtattattgtataattctcatatgtgtttcttttttttactccgcaatgctaagcaaaagattactgctattttggttactgtacatagctatttgcttaccgacgtgtgttttcaagataataatatcatttggtagctcttagtc

SEQ ID NO: 21989 - protein, 370 aa, Zea mays subsp. mays
  peptide (1)..(370): Ceres Seq. ID no. 15180644
  misc_feature (11)..(353): NCBI GI NO: 34910652 NR Description: P0480C01.17
  misc_feature (55)..(191): NCBI GI NO: 15230124 NR Description: expressed protein [Arabidopsis thaliana]
  misc_feature (276)..(362): NCBI GI NO: 15230124 NR Description: expressed protein [Arabidopsis thaliana]
  misc_feature (19)..(333): NCBI GI NO: 18149189 NR Description: 6b-interacting protein 1 [Nicotiana tabacum]
  misc_feature (21)..(335): NCBI GI NO: 38344545 NR Description: OSJNBa0027P08.13
  misc_feature (19)..(255): NCBI GI NO: 15231799 NR Description: expressed protein [Arabidopsis thaliana]
  misc_feature (243)..(338): NCBI GI NO: 15231799 NR Description: expressed protein [Arabidopsis thaliana]
  misc_feature (93)..(227): NCBI GI NO: 34911060 NR Description: putative 6b-interacting protein 1
  misc_feature (251)..(332): NCBI GI NO: 34911060 NR Description: putative 6b-interacting protein 1
  misc_feature (93)..(189): NCBI GI NO: 18399118 NR Description: expressed protein [Arabidopsis thaliana]
PTSPNHSTNHEPETLATPMSDDATAAAPSSPSTSPSPSSASSSGASPSPSSPRAKRRRTDRYALGFEFAPRLAPYELPEEPLLDKHKRAWPNWTERSTLALLDAWGDSFVRAGRSIIRADEWLEVARLVCAAVGRPAGYFSDAQCRNRVDTLRKKFKKERERERRAARRSGPSPSKWVYYDKMVAILCPTPPPPPLPTLPPPARPPPLPLQLLPLVAKRRRDRQPARRFQWGMKAPERLLGGAGDVVGPRVSGSGAKLGELGPQKNSAVQGKQNGFMALTESIQKFEEAFARMESSKRQHMVEVEQMRRDLQRDLDAKWREILEKAQAEIGRLSNEDGDEHDVDEDGDVGDGKRLEGGDEQNNGAMDASP

SEQ ID NO: 21990 - protein, 352 aa, Zea mays subsp. mays
  peptide (1)..(352): Ceres Seq. ID no. 15180645
  misc_feature (1)..(335): NCBI GI NO: 34910652 NR Description: P0480C01.17
  misc_feature (37)..(173): NCBI GI NO: 15230124 NR Description: expressed protein [Arabidopsis thaliana]
  misc_feature (258)..(344): NCBI GI NO: 15230124 NR Description: expressed protein [Arabidopsis thaliana]
  misc_feature (1)..(315): NCBI GI NO: 18149189 NR Description: 6b-interacting protein 1 [Nicotiana tabacum]
  misc_feature (3)..(317): NCBI GI NO: 38344545 NR Description: OSJNBa0027P08.13
  misc_feature (1)..(237): NCBI GI NO: 15231799 NR Description: expressed protein [Arabidopsis thaliana]
  misc_feature (225)..(320): NCBI GI NO: 15231799 NR Description: expressed protein [Arabidopsis thaliana]
  misc_feature (75)..(209): NCBI GI NO: 34911060 NR Description: putative 6b-interacting protein 1
  misc_feature (233)..(314): NCBI GI NO: 34911060 NR Description: putative 6b-interacting protein 1
  misc_feature (75)..(171): NCBI GI NO: 18399118 NR Description: expressed protein [Arabidopsis thaliana]
MSDDATAAAPSSPSTSPSPSSASSSGASPSPSSPRAKRRRTDRYALGFEFAPRLAPYELPEEPLLDKHKRAWPNWTERSTLALLDAWGDSFVRAGRSIIRADEWLEVARLVCAAVGRPAGYFSDAQCRNRVDTLRKKFKKERERERRAARRSGPSPSKWVYYDKMVAILCPTPPPPPLPTLPPPARPPPLPLQLLPLVAKRRRDRQPARRFQWGMKAPERLLGGAGDVVGPRVSGSGAKLGELGPQKNSAVQGKQNGFMALTESIQKFEEAFARMESSKRQHMVEVEQMRRDLQRDLDAKWREILEKAQAEIGRLSNEDGDEHDVDEDGDVGDGKRLEGGDEQNNGAMDASP

SEQ ID NO: 21991 - protein, 188 aa, Zea mays subsp. mays
  peptide (1)..(188): Ceres Seq. ID no. 15180646
  misc_feature (1)..(171): NCBI GI NO: 34910652 NR Description: P0480C01.17
  misc_feature (94)..(180): NCBI GI NO: 15230124 NR Description: expressed protein [Arabidopsis thaliana]
  misc_feature (1)..(151): NCBI GI NO: 18149189 NR Description: 6b-interacting protein 1 [Nicotiana tabacum]
  misc_feature (1)..(153): NCBI GI NO: 38344545 NR Description: OSJNBa0027P08.13
  misc_feature (1)..(73): NCBI GI NO: 15231799 NR Description: expressed protein [Arabidopsis thaliana]
  misc_feature (61)..(156): NCBI GI NO: 15231799 NR Description: expressed protein [Arabidopsis thaliana]
  misc_feature (1)..(45): NCBI GI NO: 34911060 NR Description: putative 6b-interacting protein 1
  misc_feature (69)..(150): NCBI GI NO: 34911060 NR Description: putative 6b-interacting protein 1
  misc_feature (92)..(148): NCBI GI NO: 18399118 NR Description: expressed protein [Arabidopsis thaliana]
  misc_feature (92)..(172): NCBI GI NO: 12321891 NR Description: hypothetical protein; 14486-13072
MVAILCPTPPPPPLPTLPPPARPPPLPLQLLPLVAKRRRDRQPARRFQWGMKAPERLLGGAGDVVGPRVSGSGAKLGELGPQKNSAVQGKQNGFMALTESIQKFEEAFARMESSKRQHMVEVEQMRRDLQRDLDAKWREILEKAQAEIGRLSNEDGDEHDVDEDGDVGDGKRLEGGDEQNNGAMDASP

SEQ ID NO: 21992 - DNA, 1274 bp, Zea mays subsp. mays
  misc_feature (1)..(1274): Ceres Seq. ID no. 13624654
aggctagcccagcgctcggccctcggctccttaaggcttcatcttctcaagttccggccgtccatcgccgccgccggcctcggccggctcagttcctgcctgccagccaaaaattccacaccacccacccagagactgaggcgcgcggtggtgaagacgtgatcgaaagtcgaaaccaaaacgatatatagatggggcgcgggcgcggcaaggtggaggtgcgtcgcatcgagaacagcgtgagccggcaggtgaccttctcgaagcggcggcgcgggctggcgaagaaggcgcgggagctggccgtgctctgcgacgccgacgtcgcgctgctcgtcttctccgacaagggcagtctccacgacttcgccgcgcacggcagcatggagcgaatccttggccgatacgagaggtacttgctatgtgaagatagggacgatgtaacccaagactaccctgaagaatcgcaggggaacatgagctatgaccacatcaagttgaggtccaaactcgaagctataaagaagagccaaaggaatctcatgggggagcagctcgagtccctgacgttcagagaggtacagcagcttgagcaccggatagacagcgctctgaggaacgtcagatccaggaaggaccacatcttgctcaactcgatccaggagctccggaacaaggaaacttttctgatggaacaaaatggcattctagagaaggagaaggctgcagtgggggcatcatcatccctgcacaccaccaccagcaccgcagcagcttcttccacggcagcggcggcggcggcccttccaaacctgaacatctgtcccgacgactccgacgagccaggaatggcggcggcggcggggatcaggttgccgtggtggatgctccagccatctgccgtcagccaacggcaggaacagcactgaactgcttgtcttctcagatgatccacgctgcttgttccagctcgattctagtttctattagaactcgattcagctaaggcgggaatttgtgatctttctattgatctgccgttcttattggttgctagatcgattttatccttgtccttcttagtatctgaacctctgctgtgtcgtttgtcgtagttcttggtcgcaaaagctccggtttgcgtctctagtttggtttggttcctgtaaaatctgctgttgtccttcaatgagctgtgcaggccagttagatgattacttccaaaaaaaaaaaaaaaaaatatcgataccgtcgacctcgagggggggcccggt

SEQ ID NO: 21993 - protein, 245 aa, Zea mays subsp. mays
  peptide (1)..(245): Ceres Seq. ID no. 13624655
  misc_feature (91)..(176): Pfam Name: Pfam Description:  K-box region
  misc_feature (4)..(237): NCBI GI NO: 29825728 NR Description: MADS20 [Oryza sativa (japonica cultivar-group)]
  misc_feature (4)..(234): NCBI GI NO: 29372774 NR Description: putative MADS-domain transcription factor
  misc_feature (4)..(236): NCBI GI NO: 6006607 NR Description: MADS box protein, MADS28
  misc_feature (4)..(233): NCBI GI NO: 21070923 NR Description: AP1-like MADS-box protein
  misc_feature (4)..(236): NCBI GI NO: 6175371 NR Description: MADS box transcription factor MADS18
  misc_feature (4)..(233): NCBI GI NO: 12019658 NR Description: FDRMADS6 [Oryza sativa]
  misc_feature (4)..(233): NCBI GI NO: 7592642 NR Description: AP1-like MADS box protein [Oryza sativa]
  misc_feature (4)..(210): NCBI GI NO: 11120557 NR Description: MADS box protein AP2L [Eucalyptus globulus]
  misc_feature (4)..(233): NCBI GI NO: 6606070 NR Description: MADS14 protein [Oryza sativa]
  misc_feature (4)..(233): NCBI GI NO: 29372748 NR Description: putative MADS-domain transcription factor
MGRGRGKVEVRRIENSVSRQVTFSKRRRGLAKKARELAVLCDADVALLVFSDKGSLHDFAAHGSMERILGRYERYLLCEDRDDVTQDYPEESQGNMSYDHIKLRSKLEAIKKSQRNLMGEQLESLTFREVQQLEHRIDSALRNVRSRKDHILLNSIQELRNKETFLMEQNGILEKEKAAVGASSSLHTTTSTAAASSTAAAAAALPNLNICPDDSDEPGMAAAAGIRLPWWMLQPSAVSQRQEQH

SEQ ID NO: 21994 - protein, 181 aa, Zea mays subsp. mays
  peptide (1)..(181): Ceres Seq. ID no. 13624656
  misc_feature (27)..(112): Pfam Name: Pfam Description:  K-box region
  misc_feature (1)..(173): NCBI GI NO: 29825728 NR Description: MADS20 [Oryza sativa (japonica cultivar-group)]
  misc_feature (1)..(170): NCBI GI NO: 29372774 NR Description: putative MADS-domain transcription factor
  misc_feature (1)..(172): NCBI GI NO: 6006607 NR Description: MADS box protein, MADS28
  misc_feature (1)..(169): NCBI GI NO: 21070923 NR Description: AP1-like MADS-box protein
  misc_feature (1)..(172): NCBI GI NO: 6175371 NR Description: MADS box transcription factor MADS18
  misc_feature (1)..(169): NCBI GI NO: 12019658 NR Description: FDRMADS6 [Oryza sativa]
  misc_feature (1)..(169): NCBI GI NO: 7592642 NR Description: AP1-like MADS box protein [Oryza sativa]
  misc_feature (1)..(146): NCBI GI NO: 11120557 NR Description: MADS box protein AP2L [Eucalyptus globulus]
  misc_feature (1)..(169): NCBI GI NO: 6606070 NR Description: MADS14 protein [Oryza sativa]
  misc_feature (1)..(169): NCBI GI NO: 29372748 NR Description: putative MADS-domain transcription factor
MERILGRYERYLLCEDRDDVTQDYPEESQGNMSYDHIKLRSKLEAIKKSQRNLMGEQLESLTFREVQQLEHRIDSALRNVRSRKDHILLNSIQELRNKETFLMEQNGILEKEKAAVGASSSLHTTTSTAAASSTAAAAAALPNLNICPDDSDEPGMAAAAGIRLPWWMLQPSAVSQRQEQH

SEQ ID NO: 21995 - protein, 150 aa, Zea mays subsp. mays
  peptide (1)..(150): Ceres Seq. ID no. 13624657
  misc_feature (1)..(81): Pfam Name: Pfam Description:  K-box region
  misc_feature (1)..(142): NCBI GI NO: 29825728 NR Description: MADS20 [Oryza sativa (japonica cultivar-group)]
  misc_feature (1)..(139): NCBI GI NO: 29372774 NR Description: putative MADS-domain transcription factor
  misc_feature (1)..(141): NCBI GI NO: 6006607 NR Description: MADS box protein, MADS28
  misc_feature (1)..(138): NCBI GI NO: 21070923 NR Description: AP1-like MADS-box protein
  misc_feature (1)..(141): NCBI GI NO: 6175371 NR Description: MADS box transcription factor MADS18
  misc_feature (1)..(138): NCBI GI NO: 12019658 NR Description: FDRMADS6 [Oryza sativa]
  misc_feature (1)..(138): NCBI GI NO: 7592642 NR Description: AP1-like MADS box protein [Oryza sativa]
  misc_feature (1)..(115): NCBI GI NO: 11120557 NR Description: MADS box protein AP2L [Eucalyptus globulus]
  misc_feature (1)..(138): NCBI GI NO: 6606070 NR Description: MADS14 protein [Oryza sativa]
  misc_feature (1)..(138): NCBI GI NO: 29372748 NR Description: putative MADS-domain transcription factor
MSYDHIKLRSKLEAIKKSQRNLMGEQLESLTFREVQQLEHRIDSALRNVRSRKDHILLNSIQELRNKETFLMEQNGILEKEKAAVGASSSLHTTTSTAAASSTAAAAAALPNLNICPDDSDEPGMAAAAGIRLPWWMLQPSAVSQRQEQH

SEQ ID NO: 21996 - DNA, 513 bp, Zea mays subsp. mays
  misc_feature (1)..(513): Ceres Seq. ID no. 13622704
catttttcctccgttccattcttctcttctctcctcgcctcccctcttgaaccctccgccgctccgaggaaaatccgatttgaattgaaaatcatccggagacagagatcttttcttcctcgaagctatcttctctctcgactcgatccatagctgctcgcgtccctgttcctcgccggctggcaagtggcggcgacgggacgaggtcttcatcgcctcctcgcgagcgacgatcacccactagtttggtcggtctgaggcacatgatgatggccaacgcgaagctccacaagcaggccctgctgccgccgcggagccccttcccgacggcggcgccgtacgccgaccgcggcccaatcgcgcggccgcaggttggcgccacgcaccaccgccacggccaccaccagcgcacgtcgtccgagagcttcatcgaggagcagccgccgtcgtggctcgacgacctgctcaacgagccagagacgcccgcggcgcggcagagcggccgggctgggc

SEQ ID NO: 21997 - protein, 83 aa, Zea mays subsp. mays
  peptide (1)..(83): Ceres Seq. ID no. 13622705
  misc_feature (10)..(80): NCBI GI NO: 27311723 NR Description: Unknown protein [Arabidopsis thaliana]
  misc_feature (10)..(80): NCBI GI NO: 30680232 NR Description: bZIP transcriptional activator protein -related
  misc_feature (10)..(80): NCBI GI NO: 28393180 NR Description: putative bZIP family transcription factor
  misc_feature (10)..(80): NCBI GI NO: 30696210 NR Description: bZIP family transcription factor
  misc_feature (10)..(80): NCBI GI NO: 25404190 NR Description: hypothetical protein T18I24.3
MMMANAKLHKQALLPPRSPFPTAAPYADRGPIARPQVGATHHRHGHHQRTSSESFIEEQPPSWLDDLLNEPETPAARQSGRAG

SEQ ID NO: 21998 - protein, 82 aa, Zea mays subsp. mays
  peptide (1)..(82): Ceres Seq. ID no. 13622706
  misc_feature (9)..(79): NCBI GI NO: 27311723 NR Description: Unknown protein [Arabidopsis thaliana]
  misc_feature (9)..(79): NCBI GI NO: 30680232 NR Description: bZIP transcriptional activator protein -related
  misc_feature (9)..(79): NCBI GI NO: 28393180 NR Description: putative bZIP family transcription factor
  misc_feature (9)..(79): NCBI GI NO: 30696210 NR Description: bZIP family transcription factor
  misc_feature (9)..(79): NCBI GI NO: 25404190 NR Description: hypothetical protein T18I24.3
MMANAKLHKQALLPPRSPFPTAAPYADRGPIARPQVGATHHRHGHHQRTSSESFIEEQPPSWLDDLLNEPETPAARQSGRAG

SEQ ID NO: 21999 - protein, 81 aa, Zea mays subsp. mays
  peptide (1)..(81): Ceres Seq. ID no. 13622707
  misc_feature (8)..(78): NCBI GI NO: 27311723 NR Description: Unknown protein [Arabidopsis thaliana]
  misc_feature (8)..(78): NCBI GI NO: 30680232 NR Description: bZIP transcriptional activator protein -related
  misc_feature (8)..(78): NCBI GI NO: 28393180 NR Description: putative bZIP family transcription factor
  misc_feature (8)..(78): NCBI GI NO: 30696210 NR Description: bZIP family transcription factor
  misc_feature (8)..(78): NCBI GI NO: 25404190 NR Description: hypothetical protein T18I24.3
MANAKLHKQALLPPRSPFPTAAPYADRGPIARPQVGATHHRHGHHQRTSSESFIEEQPPSWLDDLLNEPETPAARQSGRAG

SEQ ID NO: 22000 - DNA, 2209 bp, Zea mays subsp. mays
  misc_feature (1)..(2209): Ceres Seq. ID no. 15180683
aatcttcgggtcaacggtttcgatggaaacccagtgagacactgcggccttcgcccttccatcttcatccagctggggaagataaccctccgatccggcgcaggcatgcttaatctgtccaggtataaagcacaaaaaagtgatcctctcatctaattgagactgttgagtatctcacatattcttgtgcttgcttgctgggatcggctttggctcaggagcatgagcgaaaagatatgattcttcatttctccttctggctataagttttagtttctttatgatgggaaataaaactggtaagcctgtcttcagtgagctcaaatccacagagtttagtttattggagagcactctagtacaggatcattgtgcaatcccgacttgtgtaccattggattttctgaaggccatcacgagtgatttctctaaggagcaagagctaggaagaggtgggtttggagttgtttataagggccttcttaaaaatgggaaggcgatagctgtgaagaagctttctgaaatgaacctagatgacgatcagttccataatgaagttacttatcttttcgggttgaagcacaaaaatattgtccagctaaaagcttattgtgctgaatcacggtgggaagcaatcgaattgcgcagaaaatatgtcatggctgaatctcggaaaaggctgctgtgctttgagtgtataaataataagagccttgataagcacctttctgctgaatctcatggggttgagtggcatatcagatatgagataatcaaaggaatttgccatggtttgcattaccttcacacagattgccaaattgtccatttggacctaaagcctgagaatatattgctagatgacaacatggagccaaaaattacagattttggtatgtccaggctctttggtctacaacaatccaaaatcatcaccaaaacttgtggaggaacacttggatacatggcaccagaatacttactaaaagggttgatttcagtgaaggccgacatattcagtttgggcgttataatcatagaggtgatgaccggaggccggaattatcccacttgtgaaaaatcttgcgagcaattcgctgttgatgtggttggacgttggaggaagaggttattggaggaggcaggaaggtacacacccttggaaaaatacgttgagcaagtagagacatgcatcttgataggattgatgtgtgtcgatgatgatcctaacaaaaggcccacgacattggacattatcgaaaggcttaccaaagtagatgtcacgaacacggacagagggccacccaaaactctggaggccgcgacagggcttacaggccaccccaacctcgcaactagatcatttcttgacaggttccgccgaaccatcgtgatagggatgctgaagaaggccctgaaaatccaggacgtatcgcagttggagcagctcctggccaaggaggtgctgctggagctccacaaaatcggcacgaatgcaactggaaacagatcgttcctggagaggctccacgcaagcatcaccatggctacgctggttcaggcgctgcattccttggacttggatccatcggcggcgctgcgtatggaggtgctgttcttggcgctggagaatatgcgtggaaaaaacaactcaaggcgaagaagcgaggacgtccttgagctggaggagcggccagagcagatccggtcggtgctggaggctggcaccagggccaggctcagtgatgaggaacacatgccgtcggtgtctgtgcaggctgaagaccaggcctttcccaaaccgaagttggccaaagtacgcgccaccgccccggtgtgcgtgtcagcagtgtggttggcggccggcataggattcctgtgtggattcaccctaggagagatgaggggattaaggtggacgagggtccacgaacgcacgtgatgccaatgtgcccacatgacatggccagaaaatgtcactgcggtggaccatgcatgcacgaattaaggagcaccagttagaatacgtattctagattcattttacaaattctgtatttaaaaggaacttgtgcattgtgacagaggcggcggactggatcaggttgtattgtttctgctggtgtcctggcgtatgtataagccacggagtgtatcggatgaaattgaacagagaaatgtgcaatatagaaccgtgttgagggcagtc

SEQ ID NO: 22001 - protein, 553 aa, Zea mays subsp. mays
  peptide (1)..(553): Ceres Seq. ID no. 15180684
  misc_feature (23)..(333): NCBI GI NO: 38344521 NR Description: OSJNBa0016N04.14
  misc_feature (142)..(329): NCBI GI NO: 37532178 NR Description: putative receptor-like protein kinase
  misc_feature (39)..(113): NCBI GI NO: 37532178 NR Description: putative receptor-like protein kinase
  misc_feature (4)..(341): NCBI GI NO: 21728344 NR Description: stem rust resistance protein Rpg1
  misc_feature (4)..(341): NCBI GI NO: 21929723 NR Description: barley stem rust resistance protein
  misc_feature (4)..(341): NCBI GI NO: 21929729 NR Description: barley stem rust resistance protein
  misc_feature (41)..(392): NCBI GI NO: 21929723 NR Description: barley stem rust resistance protein
  misc_feature (41)..(392): NCBI GI NO: 21929729 NR Description: barley stem rust resistance protein
  misc_feature (41)..(392): NCBI GI NO: 21728344 NR Description: stem rust resistance protein Rpg1
  misc_feature (165)..(334): NCBI GI NO: 38344522 NR Description: OSJNBa0016N04.15
MMGNKTGKPVFSELKSTEFSLLESTLVQDHCAIPTCVPLDFLKAITSDFSKEQELGRGGFGVVYKGLLKNGKAIAVKKLSEMNLDDDQFHNEVTYLFGLKHKNIVQLKAYCAESRWEAIELRRKYVMAESRKRLLCFECINNKSLDKHLSAESHGVEWHIRYEIIKGICHGLHYLHTDCQIVHLDLKPENILLDDNMEPKITDFGMSRLFGLQQSKIITKTCGGTLGYMAPEYLLKGLISVKADIFSLGVIIIEVMTGGRNYPTCEKSCEQFAVDVVGRWRKRLLEEAGRYTPLEKYVEQVETCILIGLMCVDDDPNKRPTTLDIIERLTKVDVTNTDRGPPKTLEAATGLTGHPNLATRSFLDRFRRTIVIGMLKKALKIQDVSQLEQLLAKEVLLELHKIGTNATGNRSFLERLHASITMATLVQALHSLDLDPSAALRMEVLFLALENMRGKNNSRRRSEDVLELEERPEQIRSVLEAGTRARLSDEEHMPSVSVQAEDQAFPKPKLAKVRATAPVCVSAVWLAAGIGFLCGFTLGEMRGLRWTRVHERT

SEQ ID NO: 22002 - protein, 552 aa, Zea mays subsp. mays
  peptide (1)..(552): Ceres Seq. ID no. 15180685
  misc_feature (22)..(332): NCBI GI NO: 38344521 NR Description: OSJNBa0016N04.14
  misc_feature (141)..(328): NCBI GI NO: 37532178 NR Description: putative receptor-like protein kinase
  misc_feature (38)..(112): NCBI GI NO: 37532178 NR Description: putative receptor-like protein kinase
  misc_feature (3)..(340): NCBI GI NO: 21728344 NR Description: stem rust resistance protein Rpg1
  misc_feature (3)..(340): NCBI GI NO: 21929723 NR Description: barley stem rust resistance protein
  misc_feature (3)..(340): NCBI GI NO: 21929729 NR Description: barley stem rust resistance protein
  misc_feature (40)..(391): NCBI GI NO: 21929723 NR Description: barley stem rust resistance protein
  misc_feature (40)..(391): NCBI GI NO: 21929729 NR Description: barley stem rust resistance protein
  misc_feature (40)..(391): NCBI GI NO: 21728344 NR Description: stem rust resistance protein Rpg1
  misc_feature (164)..(333): NCBI GI NO: 38344522 NR Description: OSJNBa0016N04.15
MGNKTGKPVFSELKSTEFSLLESTLVQDHCAIPTCVPLDFLKAITSDFSKEQELGRGGFGVVYKGLLKNGKAIAVKKLSEMNLDDDQFHNEVTYLFGLKHKNIVQLKAYCAESRWEAIELRRKYVMAESRKRLLCFECINNKSLDKHLSAESHGVEWHIRYEIIKGICHGLHYLHTDCQIVHLDLKPENILLDDNMEPKITDFGMSRLFGLQQSKIITKTCGGTLGYMAPEYLLKGLISVKADIFSLGVIIIEVMTGGRNYPTCEKSCEQFAVDVVGRWRKRLLEEAGRYTPLEKYVEQVETCILIGLMCVDDDPNKRPTTLDIIERLTKVDVTNTDRGPPKTLEAATGLTGHPNLATRSFLDRFRRTIVIGMLKKALKIQDVSQLEQLLAKEVLLELHKIGTNATGNRSFLERLHASITMATLVQALHSLDLDPSAALRMEVLFLALENMRGKNNSRRRSEDVLELEERPEQIRSVLEAGTRARLSDEEHMPSVSVQAEDQAFPKPKLAKVRATAPVCVSAVWLAAGIGFLCGFTLGEMRGLRWTRVHERT

SEQ ID NO: 22003 - protein, 472 aa, Zea mays subsp. mays
  peptide (1)..(472): Ceres Seq. ID no. 15180686
  misc_feature (1)..(252): NCBI GI NO: 38344521 NR Description: OSJNBa0016N04.14
  misc_feature (61)..(248): NCBI GI NO: 37532178 NR Description: putative receptor-like protein kinase
  misc_feature (1)..(32): NCBI GI NO: 37532178 NR Description: putative receptor-like protein kinase
  misc_feature (1)..(260): NCBI GI NO: 21728344 NR Description: stem rust resistance protein Rpg1
  misc_feature (1)..(260): NCBI GI NO: 21929729 NR Description: barley stem rust resistance protein
  misc_feature (1)..(260): NCBI GI NO: 21929723 NR Description: barley stem rust resistance protein
  misc_feature (1)..(311): NCBI GI NO: 21929723 NR Description: barley stem rust resistance protein
  misc_feature (1)..(311): NCBI GI NO: 21929729 NR Description: barley stem rust resistance protein
  misc_feature (1)..(311): NCBI GI NO: 21728344 NR Description: stem rust resistance protein Rpg1
  misc_feature (84)..(253): NCBI GI NO: 38344522 NR Description: OSJNBa0016N04.15
MNLDDDQFHNEVTYLFGLKHKNIVQLKAYCAESRWEAIELRRKYVMAESRKRLLCFECINNKSLDKHLSAESHGVEWHIRYEIIKGICHGLHYLHTDCQIVHLDLKPENILLDDNMEPKITDFGMSRLFGLQQSKIITKTCGGTLGYMAPEYLLKGLISVKADIFSLGVIIIEVMTGGRNYPTCEKSCEQFAVDVVGRWRKRLLEEAGRYTPLEKYVEQVETCILIGLMCVDDDPNKRPTTLDIIERLTKVDVTNTDRGPPKTLEAATGLTGHPNLATRSFLDRFRRTIVIGMLKKALKIQDVSQLEQLLAKEVLLELHKIGTNATGNRSFLERLHASITMATLVQALHSLDLDPSAALRMEVLFLALENMRGKNNSRRRSEDVLELEERPEQIRSVLEAGTRARLSDEEHMPSVSVQAEDQAFPKPKLAKVRATAPVCVSAVWLAAGIGFLCGFTLGEMRGLRWTRVHERT

SEQ ID NO: 22004 - DNA, 1017 bp, Zea mays subsp. mays
  misc_feature (1)..(1017): Ceres Seq. ID no. 14305069
accccttcacttgcttggtcttccactcacccctctctcgttattcacccggtctcctctcctgcaaagaggaagatgagctcgctacacgccacacgagcggagcttggcctggttgtcctgtacctgaacaaagccgaggcccgggacaagatctgcagggcgatccagtacggctccaagttcgtaagcaacgggcagcctggcactgcgcaggaggtcgacagatcgaccaccttggctcgcaaagtcttccggctcctcaagtgggtcaatgatctgcatgctcttatcagcccgccggccaaagggactccgctcaccctcgttctgcttggcaaatccaaaaacgcgctgctttcgacgttcttgttcttggatcagtttgtgtggctcggacgaacggggatcgtcaagaacaaggaggcgacggaccgcgttgccaggttatccctgtactgctggatggcttcttctgcctgtgcaggtctagttgagcttggagagcttaaaaggctatcgagatcgatgaggaagcttgcaagagagctgagggacacagataaatatgagaacgagcagtaccaggacaaaatgaggcagtcagatgaacggctcctggccctggtcaaggcggccatggacgtggtcgtggccgtcgggcttcttcagctggcgcccaagaaggtcactccgagagtgacaggagcctttgggttcgtcacctcgcttatctcctgctatcagcaacttccttcccgcgctcctgttgccaaagtcaaagtttgagaggtgtcgccgtcctagtaaaaaaaaaagaggcgacgctggaaatcgatctctgcttcaacaatggatcgtaatataattttattatgcgaatataaggcaggctagctatgtattttttttattaaaaaaatagtacaacaaaatagaacaccagtgattgcacgtatgggcttatcactatcttctctttttgcctagcaatggacaagtaatgttcacgtgatc

SEQ ID NO: 22005 - protein, 262 aa, Zea mays subsp. mays
  peptide (1)..(262): Ceres Seq. ID no. 14305070
  misc_feature (36)..(251): Pfam Name: PEX11 Pfam Description: Peroxisomal biogenesis factor 11
  misc_feature (26)..(260): NCBI GI NO: 18378887 NR Description: expressed protein [Arabidopsis thaliana]
  misc_feature (26)..(253): NCBI GI NO: 8489788 NR Description: unknown [Lycopersicon esculentum]
  misc_feature (27)..(257): NCBI GI NO: 18406877 NR Description: expressed protein [Arabidopsis thaliana]
  misc_feature (26)..(255): NCBI GI NO: 25553559 NR Description: OSJNBa0038F22.7
  misc_feature (26)..(256): NCBI GI NO: 34898026 NR Description: ESTs AU064537
  misc_feature (27)..(249): NCBI GI NO: 7486466 NR Description: hypothetical protein At2g45740
  misc_feature (26)..(254): NCBI GI NO: 30695340 NR Description: expressed protein [Arabidopsis thaliana]
  misc_feature (26)..(254): NCBI GI NO: 11358250 NR Description: hypothetical protein T27I15_160 - Arabidopsisthaliana
  misc_feature (156)..(257): NCBI GI NO: 14335058 NR Description: At2g45740/F4I18.28 [Arabidopsis thaliana]
TPSLAWSSTHPSLVIHPVSSPAKRKMSSLHATRAELGLVVLYLNKAEARDKICRAIQYGSKFVSNGQPGTAQEVDRSTTLARKVFRLLKWVNDLHALISPPAKGTPLTLVLLGKSKNALLSTFLFLDQFVWLGRTGIVKNKEATDRVARLSLYCWMASSACAGLVELGELKRLSRSMRKLARELRDTDKYENEQYQDKMRQSDERLLALVKAAMDVVVAVGLLQLAPKKVTPRVTGAFGFVTSLISCYQQLPSRAPVAKVKV

SEQ ID NO: 22006 - protein, 237 aa, Zea mays subsp. mays
  peptide (1)..(237): Ceres Seq. ID no. 14305071
  misc_feature (11)..(226): Pfam Name: PEX11 Pfam Description: Peroxisomal biogenesis factor 11
  misc_feature (1)..(235): NCBI GI NO: 18378887 NR Description: expressed protein [Arabidopsis thaliana]
  misc_feature (1)..(228): NCBI GI NO: 8489788 NR Description: unknown [Lycopersicon esculentum]
  misc_feature (2)..(232): NCBI GI NO: 18406877 NR Description: expressed protein [Arabidopsis thaliana]
  misc_feature (1)..(230): NCBI GI NO: 25553559 NR Description: OSJNBa0038F22.7
  misc_feature (1)..(231): NCBI GI NO: 34898026 NR Description: ESTs AU064537
  misc_feature (2)..(224): NCBI GI NO: 7486466 NR Description: hypothetical protein At2g45740
  misc_feature (1)..(229): NCBI GI NO: 30695340 NR Description: expressed protein [Arabidopsis thaliana]
  misc_feature (1)..(229): NCBI GI NO: 11358250 NR Description: hypothetical protein T27I15_160 - Arabidopsisthaliana
  misc_feature (131)..(232): NCBI GI NO: 14335058 NR Description: At2g45740/F4I18.28 [Arabidopsis thaliana]
MSSLHATRAELGLVVLYLNKAEARDKICRAIQYGSKFVSNGQPGTAQEVDRSTTLARKVFRLLKWVNDLHALISPPAKGTPLTLVLLGKSKNALLSTFLFLDQFVWLGRTGIVKNKEATDRVARLSLYCWMASSACAGLVELGELKRLSRSMRKLARELRDTDKYENEQYQDKMRQSDERLLALVKAAMDVVVAVGLLQLAPKKVTPRVTGAFGFVTSLISCYQQLPSRAPVAKVKV

SEQ ID NO: 22007 - DNA, 1690 bp, Zea mays subsp. mays
  misc_feature (1)..(1690): Ceres Seq. ID no. 15180288
acagaatcacatcttcctggccgccatccgccggacggagcaccggacccgccgtacgcctccgtgctctcgctcgccgaggcctctccgcgggccgcagcgcggttccgcctcggtggccgccggagctgctgcctggccacaagaagccgtcgctctcccagctttgaaccggttccgatccgcaccacggagaagcccccgcctcgggagtctcgcgtcgccccgatgaaggtggagctcgccgcgcacctcccagacgagcacgcccctgccgccgtcccctgaagccgcttctgcgtcgcccctggcggaggatgcgctgctccttcccgacgcgggcgtgcggcgccgggcggcgtgcgggcggttcgcgcagcgcagcggctccttccgccgcgaagtcggccgggccgccgccgagaccttcctcctcacgaggctcaccctgatcctcctccgctacctcgggctacagatggattcggcagttcctagccctctgctgttataccctcttgctgatgccaggttttattcaagttgtatattattatttcttctctagccaagttcatagaagtgttgtatatggagatcagccaagaaacagattggacctgtatatgcccactagtacaacagggttaaagccggtcgttgcgtttgtgactggtggagcgtggatcataggttacaaagggtggggagcccttttaggcagacgcttagcagaaaggggcatcatagttgcatgcattgattacagaaactttcctcaagggactattggtgacatggtagaagatgcttctcaaggaatagcttttgtctgcaagaatataacaagttatggaggtgatcctagcaggatatatcttgttggacaatcagctggtgcacatattgctgcttgtgctctcttaaatcaggccattagagaatccggtgaaggagatacttcctcttggagtgtatcacagctaaaagcttactttggtatttctggcgggtacaacctccttaacttggttgatcattttcatagacgtggcctttaccggtctatctttctcaggttcactgttagtatttgttcatgtcttgtaataaaatcgtgatcatgtgagtgtattgtgacttcattttgatcatatacttgcagtatcatggaaggtgaagtatcactccagaaattctctccacaaatgatgattatggagtcatctgctaggtctgcagtttctttattgcctcgcatcatccttttccacggaacaagtgattattcaatacctccagctgaaagccaagcatttgctgatgctttacaacagcaaggcgcaagggcagatctatttctgtacgaagggaagacgcatactgatttgttccttcaggatcctcttcggggcggcagagataaaatgctggaagagatcgcccgtgtgatacacagtgaggatccagacgctgctgcccagcacctcgtcgttgtgcctgttgcaaggcaccttgtacccgagttcatgctgaagcttgctgggagagtaagccctttctgaaggtgcttctaagtttgattgcgaccacgactgactagtatttgtgaattttctttttttatcttaagacaaacatggatgtacatgtacttgtgatcggagaaagtactcataattttctagac

SEQ ID NO: 22008 - protein, 198 aa, Zea mays subsp. mays
  peptide (1)..(198): Ceres Seq. ID no. 15180289
  misc_feature (1)..(184): NCBI GI NO: 22326830 NR Description: Carboxylesterase-related protein
  misc_feature (1)..(184): NCBI GI NO: 22329792 NR Description: expressed protein [Arabidopsis thaliana]
  misc_feature (1)..(184): NCBI GI NO: 25518434 NR Description: hypothetical protein F28B23.20
  misc_feature (31)..(184): NCBI GI NO: 15232904 NR Description: hypothetical protein [Arabidopsis thaliana]
  misc_feature (55)..(184): NCBI GI NO: 11357218 NR Description: Carboxylesterase-like protein
  misc_feature (21)..(167): NCBI GI NO: 28871958 NR Description: esterase/lipase/thioesterase family protein
  misc_feature (20)..(167): NCBI GI NO: 23470769 NR Description: hypothetical protein
  misc_feature (23)..(169): NCBI GI NO: 16126537 NR Description: carboxylesterase family protein
  misc_feature (18)..(156): NCBI GI NO: 22981708 NR Description: hypothetical protein [Ralstonia metallidurans]
  misc_feature (18)..(171): NCBI GI NO: 21231723 NR Description: carboxylesterase
MPGFIQVVYYYFFSSQVHRSVVYGDQPRNRLDLYMPTSTTGLKPVVAFVTGGAWIIGYKGWGALLGRRLAERGIIVACIDYRNFPQGTIGDMVEDASQGIAFVCKNITSYGGDPSRIYLVGQSAGAHIAACALLNQAIRESGEGDTSSWSVSQLKAYFGISGGYNLLNLVDHFHRRGLYRSIFLRFTVSICSCLVIKS

SEQ ID NO: 22009 - protein, 164 aa, Zea mays subsp. mays
  peptide (1)..(164): Ceres Seq. ID no. 15180290
  misc_feature (1)..(150): NCBI GI NO: 22326830 NR Description: Carboxylesterase-related protein
  misc_feature (1)..(150): NCBI GI NO: 22329792 NR Description: expressed protein [Arabidopsis thaliana]
  misc_feature (1)..(150): NCBI GI NO: 25518434 NR Description: hypothetical protein F28B23.20
  misc_feature (1)..(150): NCBI GI NO: 15232904 NR Description: hypothetical protein [Arabidopsis thaliana]
  misc_feature (21)..(150): NCBI GI NO: 11357218 NR Description: Carboxylesterase-like protein
  misc_feature (1)..(133): NCBI GI NO: 28871958 NR Description: esterase/lipase/thioesterase family protein
  misc_feature (1)..(133): NCBI GI NO: 23470769 NR Description: hypothetical protein
  misc_feature (1)..(135): NCBI GI NO: 16126537 NR Description: carboxylesterase family protein
  misc_feature (1)..(122): NCBI GI NO: 22981708 NR Description: hypothetical protein [Ralstonia metallidurans]
  misc_feature (1)..(137): NCBI GI NO: 21231723 NR Description: carboxylesterase
MPTSTTGLKPVVAFVTGGAWIIGYKGWGALLGRRLAERGIIVACIDYRNFPQGTIGDMVEDASQGIAFVCKNITSYGGDPSRIYLVGQSAGAHIAACALLNQAIRESGEGDTSSWSVSQLKAYFGISGGYNLLNLVDHFHRRGLYRSIFLRFTVSICSCLVIKS

SEQ ID NO: 22010 - protein, 131 aa, Zea mays subsp. mays
  peptide (1)..(131): Ceres Seq. ID no. 15180291
  misc_feature (1)..(131): NCBI GI NO: 22326830 NR Description: Carboxylesterase-related protein
  misc_feature (1)..(131): NCBI GI NO: 22329792 NR Description: expressed protein [Arabidopsis thaliana]
  misc_feature (1)..(131): NCBI GI NO: 25518434 NR Description: hypothetical protein F28B23.20
  misc_feature (1)..(131): NCBI GI NO: 15232904 NR Description: hypothetical protein [Arabidopsis thaliana]
  misc_feature (1)..(131): NCBI GI NO: 11357218 NR Description: Carboxylesterase-like protein
  misc_feature (29)..(79): NCBI GI NO: 32472501 NR Description: probable lipase/esterase [Pirellula sp.]
  misc_feature (29)..(92): NCBI GI NO: 32471842 NR Description: probable lipase/esterase [Pirellula sp.]
  misc_feature (29)..(79): NCBI GI NO: 27356634 NR Description: unknown [Zymomonas mobilis]
  misc_feature (29)..(83): NCBI GI NO: 32477901 NR Description: probable lipase/esterase [Pirellula sp.]
MEGEVSLQKFSPQMMIMESSARSAVSLLPRIILFHGTSDYSIPPAESQAFADALQQQGARADLFLYEGKTHTDLFLQDPLRGGRDKMLEEIARVIHSEDPDAAAQHLVVVPVARHLVPEFMLKLAGRVSPF

SEQ ID NO: 22011 - DNA, 1643 bp, Zea mays subsp. mays
  misc_feature (1)..(1643): Ceres Seq. ID no. 14302621
aagtttgaggaggggtgttaaggcccattaggcccaggcctacagcctatatatattatatagtccttagggactcatcattattgattaatctcaaggttagtaacagctagaagggcaagcctggtgcagtggcgagagctattttactgagtcagcaagtcaggggtttgaagcagcttctccagatttgcgggggaaaggcttgccttggtttatcactttctcagattccactcatgtgggagccttcgatcgggttagctcttgatgtagttgaccgcatgtgtaaatccagttctgatgtgccaattgaatcatttcacccaatcatacatgcttgtgaacaaagatgtgaacttcacatggcccgccccatatatgatttgatccgccaccacaatttgaaatttaaaagcaaaacattcagaagcataataagtttatttgtaaaattgaaggattttgaaggtgcttacaatatactcacagacgctgaagaatctggggagatatcaaccgtaagcctgtataatgctataatgctagggtattatagggagaaaaactacaatggagcacaaatggtcatgtctcaaatgcagattgctggagtaaaaccagattctgagacattcagttatttgatagcgaattgtgagtctgaagagaacatttctaagtactgtgaccaattacggcaagatttaattccaatgaccagaaatatatatgttgcactcattgttgcatacgcaagacttggtaattttgatatggccaagcaggttctactcgataaagaaataccatgtaagttcctcagtgacatcaagagcgcacttgtaggagcgctggcattaaatgggcaagtgtcggatgcacttcgcttgcatgatgagataatgcaatccggcggctccctggaaccaaaagctgccattgccttgattgagcatattcgaacagaaggtgaactggatagaatgcatcaacttctcgatgggctgaatgactcaaacagctggtttgatggctgtggcagagtacttttatactgtgtccagcacaactatcctgatgctgcaattgatctacttaagcagatcagggagaaagatgaaatgagtacatatatggttgttgatcaggttttttgccaaatatgggacatggagaccacaaatttggattttggaatggtgtttcttgatgctgtcaaagagcttggacttaatgtttctcggacaagccttgactttcttctcagcgcatgtgtaaaagcaaaggatttgcgacgtgcccaacagatctggacagaatacgaatctgctggtcttccacacaacgtgctgagttccttgaggatgtatcaagcttttctttcatctgggggacgtaaggcggctaagaagttgttgaaaaagatacaaaaggaagatgctcacgtgcgctacataacatatgcttgtcgtgcgacatactgcagtaaagacttcaagccttctgctacagttaggttaagttccaaaggaagagctagatcaaaacctactaatgaggggtaagaggtctatttacttttaccacttccgttgcagtgaaatactgaaacgggatgaaatcaattcttttgttctggg

SEQ ID NO: 22012 - protein, 442 aa, Zea mays subsp. mays
  peptide (1)..(442): Ceres Seq. ID no. 14302622
  misc_feature (96)..(130): Pfam Name: Pfam Description:  PPR repeat
  misc_feature (9)..(407): NCBI GI NO: 34849885 NR Description: At4g04790 [Arabidopsis thaliana]
  misc_feature (27)..(407): NCBI GI NO: 25407292 NR Description: hypothetical protein AT4g04790
  misc_feature (27)..(407): NCBI GI NO: 30679877 NR Description: pentatricopeptide (PPR) repeat-containing protein
  misc_feature (76)..(382): NCBI GI NO: 30685606 NR Description: pentatricopeptide (PPR) repeat-containing protein
  misc_feature (76)..(382): NCBI GI NO: 7487835 NR Description: hypothetical protein T8O5
  misc_feature (9)..(407): NCBI GI NO: 4115946 NR Description: contains similarity to Ipomoea nil leaf protein
  misc_feature (1)..(400): NCBI GI NO: 15240891 NR Description: pentatricopeptide (PPR) repeat-containing protein
  misc_feature (65)..(409): NCBI GI NO: 15233142 NR Description: pentatricopeptide (PPR) repeat-containing protein
  misc_feature (5)..(421): NCBI GI NO: 15242446 NR Description: pentatricopeptide (PPR) repeat-containing protein
  misc_feature (17)..(408): NCBI GI NO: 15221081 NR Description: pentatricopeptide (PPR) repeat-containing protein
MWEPSIGLALDVVDRMCKSSSDVPIESFHPIIHACEQRCELHMARPIYDLIRHHNLKFKSKTFRSIISLFVKLKDFEGAYNILTDAEESGEISTVSLYNAIMLGYYREKNYNGAQMVMSQMQIAGVKPDSETFSYLIANCESEENISKYCDQLRQDLIPMTRNIYVALIVAYARLGNFDMAKQVLLDKEIPCKFLSDIKSALVGALALNGQVSDALRLHDEIMQSGGSLEPKAAIALIEHIRTEGELDRMHQLLDGLNDSNSWFDGCGRVLLYCVQHNYPDAAIDLLKQIREKDEMSTYMVVDQVFCQIWDMETTNLDFGMVFLDAVKELGLNVSRTSLDFLLSACVKAKDLRRAQQIWTEYESAGLPHNVLSSLRMYQAFLSSGGRKAAKKLLKKIQKEDAHVRYITYACRATYCSKDFKPSATVRLSSKGRARSKPTNEG

SEQ ID NO: 22013 - protein, 427 aa, Zea mays subsp. mays
  peptide (1)..(427): Ceres Seq. ID no. 14302623
  misc_feature (81)..(115): Pfam Name: Pfam Description:  PPR repeat
  misc_feature (1)..(392): NCBI GI NO: 34849885 NR Description: At4g04790 [Arabidopsis thaliana]
  misc_feature (12)..(392): NCBI GI NO: 25407292 NR Description: hypothetical protein AT4g04790
  misc_feature (12)..(392): NCBI GI NO: 30679877 NR Description: pentatricopeptide (PPR) repeat-containing protein
  misc_feature (61)..(367): NCBI GI NO: 30685606 NR Description: pentatricopeptide (PPR) repeat-containing protein
  misc_feature (61)..(367): NCBI GI NO: 7487835 NR Description: hypothetical protein T8O5
  misc_feature (1)..(392): NCBI GI NO: 4115946 NR Description: contains similarity to Ipomoea nil leaf protein
  misc_feature (1)..(385): NCBI GI NO: 15240891 NR Description: pentatricopeptide (PPR) repeat-containing protein
  misc_feature (50)..(394): NCBI GI NO: 15233142 NR Description: pentatricopeptide (PPR) repeat-containing protein
  misc_feature (1)..(406): NCBI GI NO: 15242446 NR Description: pentatricopeptide (PPR) repeat-containing protein
  misc_feature (2)..(393): NCBI GI NO: 15221081 NR Description: pentatricopeptide (PPR) repeat-containing protein
MCKSSSDVPIESFHPIIHACEQRCELHMARPIYDLIRHHNLKFKSKTFRSIISLFVKLKDFEGAYNILTDAEESGEISTVSLYNAIMLGYYREKNYNGAQMVMSQMQIAGVKPDSETFSYLIANCESEENISKYCDQLRQDLIPMTRNIYVALIVAYARLGNFDMAKQVLLDKEIPCKFLSDIKSALVGALALNGQVSDALRLHDEIMQSGGSLEPKAAIALIEHIRTEGELDRMHQLLDGLNDSNSWFDGCGRVLLYCVQHNYPDAAIDLLKQIREKDEMSTYMVVDQVFCQIWDMETTNLDFGMVFLDAVKELGLNVSRTSLDFLLSACVKAKDLRRAQQIWTEYESAGLPHNVLSSLRMYQAFLSSGGRKAAKKLLKKIQKEDAHVRYITYACRATYCSKDFKPSATVRLSSKGRARSKPTNEG

SEQ ID NO: 22014 - protein, 400 aa, Zea mays subsp. mays
  peptide (1)..(400): Ceres Seq. ID no. 14302624
  misc_feature (54)..(88): Pfam Name: Pfam Description:  PPR repeat
  misc_feature (1)..(365): NCBI GI NO: 34849885 NR Description: At4g04790 [Arabidopsis thaliana]
  misc_feature (1)..(365): NCBI GI NO: 25407292 NR Description: hypothetical protein AT4g04790
  misc_feature (1)..(365): NCBI GI NO: 30679877 NR Description: pentatricopeptide (PPR) repeat-containing protein
  misc_feature (34)..(340): NCBI GI NO: 30685606 NR Description: pentatricopeptide (PPR) repeat-containing protein
  misc_feature (34)..(340): NCBI GI NO: 7487835 NR Description: hypothetical protein T8O5
  misc_feature (1)..(365): NCBI GI NO: 4115946 NR Description: contains similarity to Ipomoea nil leaf protein
  misc_feature (1)..(358): NCBI GI NO: 15240891 NR Description: pentatricopeptide (PPR) repeat-containing protein
  misc_feature (23)..(367): NCBI GI NO: 15233142 NR Description: pentatricopeptide (PPR) repeat-containing protein
  misc_feature (1)..(379): NCBI GI NO: 15242446 NR Description: pentatricopeptide (PPR) repeat-containing protein
  misc_feature (1)..(366): NCBI GI NO: 15221081 NR Description: pentatricopeptide (PPR) repeat-containing protein
MARPIYDLIRHHNLKFKSKTFRSIISLFVKLKDFEGAYNILTDAEESGEISTVSLYNAIMLGYYREKNYNGAQMVMSQMQIAGVKPDSETFSYLIANCESEENISKYCDQLRQDLIPMTRNIYVALIVAYARLGNFDMAKQVLLDKEIPCKFLSDIKSALVGALALNGQVSDALRLHDEIMQSGGSLEPKAAIALIEHIRTEGELDRMHQLLDGLNDSNSWFDGCGRVLLYCVQHNYPDAAIDLLKQIREKDEMSTYMVVDQVFCQIWDMETTNLDFGMVFLDAVKELGLNVSRTSLDFLLSACVKAKDLRRAQQIWTEYESAGLPHNVLSSLRMYQAFLSSGGRKAAKKLLKKIQKEDAHVRYITYACRATYCSKDFKPSATVRLSSKGRARSKPTNEG

SEQ ID NO: 22015 - DNA, 911 bp, Zea mays subsp. mays
  misc_feature (1)..(911): Ceres Seq. ID no. 12589186
acattctctctgaccgatcttgggctctcctataaatatataggaacgtacgtaaagtttctccaagcagatagcagcaagctaagcaagtgccaaccaacgagtagcaggaaacatgtctccgcccgtcaagatcctcggccactacgcgagcccgtactcgcaccgcgtcgaggccgctctgcggctcaagggcgtgccgtacgagctggtccaggaagacctgggcaacaagagcgagctgctgctcgccaagaaccctgtccacaagaaggtgcccgtgctcctccatggcgacatggccgtctgcgagtccctcctcatcgtcgagtacgtcgacgaggccttcgacgggccgtccatcctgccggccgacccccacgaccgtgccgtcgcccgtttctgggcgaacttcttggacaccaagttctcccagccgttctggctggcgtactgggcggagggcgaggcgcagaaggccgtggtgaaggaggccaaggagaacctggcgctcctggaggcgcagctcggcgggaagagcttcttcggcggcgacacgcccgggtacctcgacatagccgcgtgcgcgttgggtccttggatcggcgtgctcgaggaggtgactggagtggccttgctggacgccgacgagttccccgctctatgccagtgggccagggactacagctccagtgaagcgctcaggccatgcctgccggacagggaccgactcgttgcctacttcaccgagaacaaggagaagtacaagacatttgccaaggcaacgttgcatcagtatctgctagttgggtgcaaaccgcttgtttatctctgtgtggaataatgtatacgtacgtgctccctcgatatcaaataaatcagctaccggagttgactgtagtcaaattgct

SEQ ID NO: 22016 - protein, 242 aa, Zea mays subsp. mays
  peptide (1)..(242): Ceres Seq. ID no. 12589187
  misc_feature (84)..(194): Pfam Name: Pfam Description:  Glutathione S-transferase, C-terminal domain
  misc_feature (1)..(227): NCBI GI NO: 4468798 NR Description: GST7 protein [Zea mays]
  misc_feature (3)..(227): NCBI GI NO: 11385493 NR Description: glutathione S-transferase GST 21 [Zea mays]
  misc_feature (1)..(227): NCBI GI NO: 34896730 NR Description: putative glutathione transferase
  misc_feature (2)..(228): NCBI GI NO: 13699857 NR Description: glutathione S-transferase GST 24 [Zea mays]
  misc_feature (5)..(224): NCBI GI NO: 11385507 NR Description: glutathione S-transferase GST 28 [Zea mays]
  misc_feature (1)..(227): NCBI GI NO: 19386819 NR Description: putative glutathione S-transferase GST 24
  misc_feature (5)..(223): NCBI GI NO: 11385509 NR Description: glutathione S-transferase GST 29 [Zea mays]
  misc_feature (1)..(218): NCBI GI NO: 19386817 NR Description: putative glutathione S-transferase GST 24
  misc_feature (4)..(223): NCBI GI NO: 19386822 NR Description: putative glutathione S-transferase GST 24
  misc_feature (1)..(231): NCBI GI NO: 19386816 NR Description: putative glutathione S-transferase GST 24
MSPPVKILGHYASPYSHRVEAALRLKGVPYELVQEDLGNKSELLLAKNPVHKKVPVLLHGDMAVCESLLIVEYVDEAFDGPSILPADPHDRAVARFWANFLDTKFSQPFWLAYWAEGEAQKAVVKEAKENLALLEAQLGGKSFFGGDTPGYLDIAACALGPWIGVLEEVTGVALLDADEFPALCQWARDYSSSEALRPCLPDRDRLVAYFTENKEKYKTFAKATLHQYLLVGCKPLVYLCVE

SEQ ID NO: 22017 - protein, 231 aa, Zea mays subsp. mays
  peptide (1)..(231): Ceres Seq. ID no. 12589188
TFSLTDLGLSYKYIGTYVKFLQADSSKLSKCQPTSSRKHVSARQDPRPLREPVLAPRRGRSAAQGRAVRAGPGRPGQQERAAARQEPCPQEGARAPPWRHGRLRVPPHRRVRRRGLRRAVHPAGRPPRPCRRPFLGELLGHQVLPAVLAGVLGGGRGAEGRGEGGQGEPGAPGGAARREELLRRRHARVPRHSRVRVGSLDRRARGGDWSGLAGRRRVPRSMPVGQGLQLQ

SEQ ID NO: 22018 - protein, 181 aa, Zea mays subsp. mays
  peptide (1)..(181): Ceres Seq. ID no. 12589189
  misc_feature (23)..(133): Pfam Name: Pfam Description:  Glutathione S-transferase, C-terminal domain
  misc_feature (1)..(166): NCBI GI NO: 4468798 NR Description: GST7 protein [Zea mays]
  misc_feature (1)..(166): NCBI GI NO: 11385493 NR Description: glutathione S-transferase GST 21 [Zea mays]
  misc_feature (1)..(166): NCBI GI NO: 34896730 NR Description: putative glutathione transferase
  misc_feature (1)..(167): NCBI GI NO: 13699857 NR Description: glutathione S-transferase GST 24 [Zea mays]
  misc_feature (1)..(163): NCBI GI NO: 11385507 NR Description: glutathione S-transferase GST 28 [Zea mays]
  misc_feature (1)..(166): NCBI GI NO: 19386819 NR Description: putative glutathione S-transferase GST 24
  misc_feature (1)..(162): NCBI GI NO: 11385509 NR Description: glutathione S-transferase GST 29 [Zea mays]
  misc_feature (1)..(157): NCBI GI NO: 19386817 NR Description: putative glutathione S-transferase GST 24
  misc_feature (1)..(162): NCBI GI NO: 19386822 NR Description: putative glutathione S-transferase GST 24
  misc_feature (1)..(170): NCBI GI NO: 19386816 NR Description: putative glutathione S-transferase GST 24
MAVCESLLIVEYVDEAFDGPSILPADPHDRAVARFWANFLDTKFSQPFWLAYWAEGEAQKAVVKEAKENLALLEAQLGGKSFFGGDTPGYLDIAACALGPWIGVLEEVTGVALLDADEFPALCQWARDYSSSEALRPCLPDRDRLVAYFTENKEKYKTFAKATLHQYLLVGCKPLVYLCVE

SEQ ID NO: 22019 - DNA, 1182 bp, Zea mays subsp. mays
  misc_feature (1)..(1182): Ceres Seq. ID no. 13599003
cccccctccagwwcmtccthtrckgcggcggtatactcggttccctgccccccccacgaccacgccgccgcctcctccccacgcccgcccggcgctcccggaaccgccgcattcacatgatgtatcatgcgaagaatttttctgtgccctttgctccgcagagggcacaggataatgagcatgcaggtaatattggaggtattggtggacccaacataagcaaccctgctaatcctgtaggaagtgggaaacaacgtctacggtggacatcggatcttcataatcgctttgtggatgccatcgcccagcttggtggaccagacagagctacacctaaaggggttctcactgtgatgggtgtaccagggatcacaatttatcatgtgaagagccatctgcagaagtatcgccttgcaaagtatatacccgactctcctgctgaaggttccaaggacgaaaagaaagattcgagtgattccctctcgaacacggattctgcaccaggattgcaaatcaatgaggcactaaagatgcaaatggaggttcagaagcgactacatgagcaactcgaggttcaaagacaactgcaactaagaattgaagcacaaggaagatacttgcagatgatcattgaggagcaacaaaagcttggtggatcaattaaagcttctgaggatcagaagctttctgattcacctccaagcttagatgactacccagagagcatgcaaccttctcccaagaaaccaaggatagatgcattatcaccagattcagagcgcgatacaacacaacctgaattcgaatcccatttgatcggtccgtgggatcacggcattgcattcccagtggaggagttcaaagcagaccctgctatgagcaagtcataaggcaaacttcaccttgacagaaaattttcagagttgacctctccacgagatgatcattctcatgtgaatatatattatcttaacaacagaatgttgtacgggtttttgaccctgcacctgatcccttcagccacgtccagttattcttatcactgtagtatccatcaacaagtcctgtaattatgaggatggtgttacagagtttctagcaagcatttccatcgagggaatggccctgagttgatccatgtagcaagaaagagaacatgcttacaagcaatatatttgctgc

SEQ ID NO: 22020 - protein, 295 aa, Zea mays subsp. mays
  peptide (1)..(295): Ceres Seq. ID no. 15222483
  misc_feature (85)..(136): Pfam Name: Pfam Description:  Myb-like DNA-binding domain
  misc_feature (68)..(257): NCBI GI NO: 15226170 NR Description: transfactor-related protein [Arabidopsis thaliana]
  misc_feature (70)..(271): NCBI GI NO: 29647445 NR Description: putative transfactor
  misc_feature (73)..(252): NCBI GI NO: 22329004 NR Description: expressed protein [Arabidopsis thaliana]
  misc_feature (75)..(261): NCBI GI NO: 4519671 NR Description: transfactor [Nicotiana tabacum]
  misc_feature (74)..(225): NCBI GI NO: 21537366 NR Description: transfactor, putative [Arabidopsis thaliana]
  misc_feature (74)..(225): NCBI GI NO: 21954075 NR Description: unknown protein [Arabidopsis thaliana]
  misc_feature (74)..(225): NCBI GI NO: 30692110 NR Description: expressed protein [Arabidopsis thaliana]
  misc_feature (74)..(225): NCBI GI NO: 30692105 NR Description: expressed protein [Arabidopsis thaliana]
  misc_feature (73)..(264): NCBI GI NO: 15229298 NR Description: transfactor -related [Arabidopsis thaliana]
  misc_feature (73)..(248): NCBI GI NO: 6942190 NR Description: CDPK substrate protein 1; CSP1
  misc_feature (4)..(4): Xaa is any aa, unknown or other
  misc_feature (5)..(5): Xaa is any aa, unknown or other
  misc_feature (6)..(6): Xaa is any aa, unknown or other
  misc_feature (7)..(7): Xaa is any aa, unknown or other
  misc_feature (8)..(8): Xaa is any aa, unknown or other
PLQXXXXXGGILGSLPPPRPRRRLLPTPARRSRNRRIHMMYHAKNFSVPFAPQRAQDNEHAGNIGGIGGPNISNPANPVGSGKQRLRWTSDLHNRFVDAIAQLGGPDRATPKGVLTVMGVPGITIYHVKSHLQKYRLAKYIPDSPAEGSKDEKKDSSDSLSNTDSAPGLQINEALKMQMEVQKRLHEQLEVQRQLQLRIEAQGRYLQMIIEEQQKLGGSIKASEDQKLSDSPPSLDDYPESMQPSPKKPRIDALSPDSERDTTQPEFESHLIGPWDHGIAFPVEEFKADPAMSKS

SEQ ID NO: 22021 - protein, 257 aa, Zea mays subsp. mays
  peptide (1)..(257): Ceres Seq. ID no. 15222484
  misc_feature (47)..(98): Pfam Name: Pfam Description:  Myb-like DNA-binding domain
  misc_feature (30)..(219): NCBI GI NO: 15226170 NR Description: transfactor-related protein [Arabidopsis thaliana]
  misc_feature (32)..(233): NCBI GI NO: 29647445 NR Description: putative transfactor
  misc_feature (35)..(214): NCBI GI NO: 22329004 NR Description: expressed protein [Arabidopsis thaliana]
  misc_feature (37)..(223): NCBI GI NO: 4519671 NR Description: transfactor [Nicotiana tabacum]
  misc_feature (36)..(187): NCBI GI NO: 21537366 NR Description: transfactor, putative [Arabidopsis thaliana]
  misc_feature (36)..(187): NCBI GI NO: 21954075 NR Description: unknown protein [Arabidopsis thaliana]
  misc_feature (36)..(187): NCBI GI NO: 30692105 NR Description: expressed protein [Arabidopsis thaliana]
  misc_feature (36)..(187): NCBI GI NO: 30692110 NR Description: expressed protein [Arabidopsis thaliana]
  misc_feature (35)..(226): NCBI GI NO: 15229298 NR Description: transfactor -related [Arabidopsis thaliana]
  misc_feature (35)..(210): NCBI GI NO: 6942190 NR Description: CDPK substrate protein 1; CSP1
MMYHAKNFSVPFAPQRAQDNEHAGNIGGIGGPNISNPANPVGSGKQRLRWTSDLHNRFVDAIAQLGGPDRATPKGVLTVMGVPGITIYHVKSHLQKYRLAKYIPDSPAEGSKDEKKDSSDSLSNTDSAPGLQINEALKMQMEVQKRLHEQLEVQRQLQLRIEAQGRYLQMIIEEQQKLGGSIKASEDQKLSDSPPSLDDYPESMQPSPKKPRIDALSPDSERDTTQPEFESHLIGPWDHGIAFPVEEFKADPAMSKS

SEQ ID NO: 22022 - protein, 256 aa, Zea mays subsp. mays
  peptide (1)..(256): Ceres Seq. ID no. 15222485
  misc_feature (46)..(97): Pfam Name: Pfam Description:  Myb-like DNA-binding domain
  misc_feature (29)..(218): NCBI GI NO: 15226170 NR Description: transfactor-related protein [Arabidopsis thaliana]
  misc_feature (31)..(232): NCBI GI NO: 29647445 NR Description: putative transfactor
  misc_feature (34)..(213): NCBI GI NO: 22329004 NR Description: expressed protein [Arabidopsis thaliana]
  misc_feature (36)..(222): NCBI GI NO: 4519671 NR Description: transfactor [Nicotiana tabacum]
  misc_feature (35)..(186): NCBI GI NO: 21537366 NR Description: transfactor, putative [Arabidopsis thaliana]
  misc_feature (35)..(186): NCBI GI NO: 21954075 NR Description: unknown protein [Arabidopsis thaliana]
  misc_feature (35)..(186): NCBI GI NO: 30692105 NR Description: expressed protein [Arabidopsis thaliana]
  misc_feature (35)..(186): NCBI GI NO: 30692110 NR Description: expressed protein [Arabidopsis thaliana]
  misc_feature (34)..(225): NCBI GI NO: 15229298 NR Description: transfactor -related [Arabidopsis thaliana]
  misc_feature (34)..(209): NCBI GI NO: 6942190 NR Description: CDPK substrate protein 1; CSP1
MYHAKNFSVPFAPQRAQDNEHAGNIGGIGGPNISNPANPVGSGKQRLRWTSDLHNRFVDAIAQLGGPDRATPKGVLTVMGVPGITIYHVKSHLQKYRLAKYIPDSPAEGSKDEKKDSSDSLSNTDSAPGLQINEALKMQMEVQKRLHEQLEVQRQLQLRIEAQGRYLQMIIEEQQKLGGSIKASEDQKLSDSPPSLDDYPESMQPSPKKPRIDALSPDSERDTTQPEFESHLIGPWDHGIAFPVEEFKADPAMSKS

SEQ ID NO: 22023 - DNA, 777 bp, Zea mays subsp. mays
  misc_feature (1)..(777): Ceres Seq. ID no. 12637935
gagagcagggtgtactcgagacagacaggactgacggccacatccgccatattcaggcatggaagcaccggctgcgaagcgcgtcctccgcgtggcctccatcagcggctccattcgcaaggcctcctggcacagcggactcatccgcgccgccgcggaggtgtgcgaggactgcatcccggggctgcgcgtcgaccacctcgacgtcgccgacctgccgatgctcaacaccgacctcgagacgaacggcggcacgggcttcccgcccgccgtcgaggcgttccgcgccaaggtccgccacgccgactgcttcctcttcgcctcgcccgaatacaactactccatcaccagcccactgaagaacgcgcttgactgggcttctagaggagtgaactgctgggcagacaagccggccgccatcgtcagcgcgggaggcaacttcggcggcggcaggtccagctaccatctgcgccaggtcggggtgttcttggacatccatttcatcaacaagccggaactgttcgtcttcgccttcttcgagccggccaagtttttcgacagcgacgggaacctcatcgacgccgacaccagggagcgcctcaagcaggtgctcctgtcccttgaggccttcacgcgcaggctccagaacaacaaggactgaagcagcagctcccgggatcgtcgtgctaataataatagggacatttacatttcacccactagtttggatgcgctgctcaaatctatccccgtctaaattctctacttagtttttcc

SEQ ID NO: 22024 - protein, 200 aa, Zea mays subsp. mays
  peptide (1)..(200): Ceres Seq. ID no. 12637936
  misc_feature (10)..(183): Pfam Name: Pfam Description:  NADPH-dependent FMN reductase
  misc_feature (1)..(200): NCBI GI NO: 34906648 NR Description: putative NADPH:quinone oxidoreductase
  misc_feature (1)..(196): NCBI GI NO: 34906652 NR Description: putative NADPH:quinone oxidoreductase
  misc_feature (1)..(196): NCBI GI NO: 15232856 NR Description: NADPH:quinone oxidoreductase
  misc_feature (1)..(196): NCBI GI NO: 5002232 NR Description: NADPH:quinone oxidoreductase
  misc_feature (5)..(196): NCBI GI NO: 24745889 NR Description: NAD(P)H:quinone oxidoreductase [Solanum tuberosum]
  misc_feature (10)..(196): NCBI GI NO: 15596401 NR Description: conserved hypothetical protein
  misc_feature (10)..(196): NCBI GI NO: 22406524 NR Description: hypothetical protein [Ferroplasma acidarmanus]
  misc_feature (12)..(194): NCBI GI NO: 22977744 NR Description: hypothetical protein [Ralstonia metallidurans]
  misc_feature (10)..(197): NCBI GI NO: 40549313 NR Description: YieF [Salmonella enterica]
  misc_feature (10)..(196): NCBI GI NO: 16767134 NR Description: putative oxidoreductase
MEAPAAKRVLRVASISGSIRKASWHSGLIRAAAEVCEDCIPGLRVDHLDVADLPMLNTDLETNGGTGFPPAVEAFRAKVRHADCFLFASPEYNYSITSPLKNALDWASRGVNCWADKPAAIVSAGGNFGGGRSSYHLRQVGVFLDIHFINKPELFVFAFFEPAKFFDSDGNLIDADTRERLKQVLLSLEAFTRRLQNNKD

SEQ ID NO: 22025 - protein, 146 aa, Zea mays subsp. mays
  peptide (1)..(146): Ceres Seq. ID no. 12637937
  misc_feature (1)..(129): Pfam Name: Pfam Description:  NADPH-dependent FMN reductase
  misc_feature (1)..(146): NCBI GI NO: 34906648 NR Description: putative NADPH:quinone oxidoreductase
  misc_feature (1)..(142): NCBI GI NO: 34906652 NR Description: putative NADPH:quinone oxidoreductase
  misc_feature (1)..(142): NCBI GI NO: 15232856 NR Description: NADPH:quinone oxidoreductase
  misc_feature (1)..(142): NCBI GI NO: 5002232 NR Description: NADPH:quinone oxidoreductase
  misc_feature (1)..(142): NCBI GI NO: 24745889 NR Description: NAD(P)H:quinone oxidoreductase [Solanum tuberosum]
  misc_feature (1)..(142): NCBI GI NO: 15596401 NR Description: conserved hypothetical protein
  misc_feature (1)..(142): NCBI GI NO: 22406524 NR Description: hypothetical protein [Ferroplasma acidarmanus]
  misc_feature (1)..(140): NCBI GI NO: 22977744 NR Description: hypothetical protein [Ralstonia metallidurans]
  misc_feature (1)..(143): NCBI GI NO: 40549313 NR Description: YieF [Salmonella enterica]
  misc_feature (1)..(142): NCBI GI NO: 16767134 NR Description: putative oxidoreductase
MLNTDLETNGGTGFPPAVEAFRAKVRHADCFLFASPEYNYSITSPLKNALDWASRGVNCWADKPAAIVSAGGNFGGGRSSYHLRQVGVFLDIHFINKPELFVFAFFEPAKFFDSDGNLIDADTRERLKQVLLSLEAFTRRLQNNKD

SEQ ID NO: 22026 - protein, 123 aa, Zea mays subsp. mays
  peptide (1)..(123): Ceres Seq. ID no. 12637938
ESRVYSRQTGLTATSAIFRHGSTGCEARPPRGLHQRLHSQGLLAQRTHPRRRGGVRGLHPGAARRPPRRRRPADAQHRPRDERRHGLPARRRGVPRQGPPRRLLPLRLARIQLLHHQPTEERA

SEQ ID NO: 22027 - DNA, 1042 bp, Zea mays subsp. mays
  misc_feature (1)..(1042): Ceres Seq. ID no. 14312507
caactcagttattctacagctttaattttgcagagcgaccaccagtccaggtccagcgcgggacgcatcacatacacgcggtaccttcgttcgttctcaagcttatagcgcccgatcgaccctgcgcggagctagttcgttcgttccggcaggcggcggcagcgaagcagtgcgacgacgacgacgaggtacgtagagagcgagaggatagatgtcgagccgaaggtcgtcgtcgcacggcaacatctccgaggacgagatgaacgagctcgtctccaagctccaggccctgctccccagctcccgccgccgccgcggctccggccaggcgtcgacggcgaagctgctgaaggagacctgcagctacatcaagagcctccagcgggaggtggacgacctcagcgaccggctgtcggacctcttgtccaccatggaccacaacagccccgcggcggagatcatccgaagcatcctccgctcctgatcgcgcgcaagggcgaggtcaacgaacgccggcctccgatcgatcgccgacagcgcgcgctctccggccggctggtcacgtgcgggagctgagctcaattaggtagctagggtatatatacatataatatatatatctacatgtacgtgtatctaccttttcctttaccagtctccctagatctgagatcatgtggctagctccgtataaaaatgtactagccacacgctgacacgcacacgtatgcatgatggtctctgcgctaagcttcactgggtagtagggtatagcactagagcctaagcaagcttatcctcctcactttagtatagctcgcagcagcagcagtctctcgattcctcggcgatcttcggtggcttaattggatcgagctggctagtgcgctctctctctctctctcatctctagcaggcaggaaaagagacaaccgaccgaccactactagcctagcctagagcaaattgactgtcgttatgatgatgatgatgtactgctaaagcttttattaacgacttcaataacatgtacgtcctgcgg

SEQ ID NO: 22028 - protein, 90 aa, Zea mays subsp. mays
  peptide (1)..(90): Ceres Seq. ID no. 14312508
  misc_feature (8)..(56): Pfam Name: Pfam Description:  Helix-loop-helix DNA-binding domain
  misc_feature (1)..(89): NCBI GI NO: 37534170 NR Description: hypothetical protein similar to putative DNAbinding proteins
  misc_feature (1)..(88): NCBI GI NO: 30689711 NR Description: expressed protein [Arabidopsis thaliana]
  misc_feature (3)..(88): NCBI GI NO: 15242499 NR Description: bHLH protein [Arabidopsis thaliana]
  misc_feature (1)..(88): NCBI GI NO: 10241623 NR Description: putative DNA binding protein
  misc_feature (3)..(88): NCBI GI NO: 9294226 NR Description: DNA-binding protein-like [Arabidopsis thaliana]
  misc_feature (3)..(88): NCBI GI NO: 15242227 NR Description: bHLH protein family [Arabidopsis thaliana]
  misc_feature (3)..(88): NCBI GI NO: 21617952 NR Description: DNA-binding protein-like [Arabidopsis thaliana]
  misc_feature (3)..(88): NCBI GI NO: 15221264 NR Description: bHLH protein family [Arabidopsis thaliana]
  misc_feature (1)..(88): NCBI GI NO: 22331645 NR Description: bHLH protein family [Arabidopsis thaliana]
  misc_feature (12)..(88): NCBI GI NO: 7487374 NR Description: hypothetical protein T23J7
MSSRRSSSHGNISEDEMNELVSKLQALLPSSRRRRGSGQASTAKLLKETCSYIKSLQREVDDLSDRLSDLLSTMDHNSPAAEIIRSILRS

SEQ ID NO: 22029 - protein, 86 aa, Zea mays subsp. mays
  peptide (1)..(86): Ceres Seq. ID no. 14312509
TQLFYSFNFAERPPVQVQRGTHHIHAVPSFVLKLIAPDRPCAELVRSFRQAAAAKQCDDDDEVRREREDRCRAEGRRRTATSPRTR

SEQ ID NO: 22030 - protein, 74 aa, Zea mays subsp. mays
  peptide (1)..(74): Ceres Seq. ID no. 14312510
  misc_feature (1)..(40): Pfam Name: Pfam Description:  Helix-loop-helix DNA-binding domain
  misc_feature (1)..(73): NCBI GI NO: 37534170 NR Description: hypothetical protein similar to putative DNAbinding proteins
  misc_feature (1)..(72): NCBI GI NO: 30689711 NR Description: expressed protein [Arabidopsis thaliana]
  misc_feature (1)..(72): NCBI GI NO: 15242499 NR Description: bHLH protein [Arabidopsis thaliana]
  misc_feature (1)..(72): NCBI GI NO: 10241623 NR Description: putative DNA binding protein
  misc_feature (1)..(72): NCBI GI NO: 9294226 NR Description: DNA-binding protein-like [Arabidopsis thaliana]
  misc_feature (1)..(72): NCBI GI NO: 15242227 NR Description: bHLH protein family [Arabidopsis thaliana]
  misc_feature (1)..(72): NCBI GI NO: 21617952 NR Description: DNA-binding protein-like [Arabidopsis thaliana]
  misc_feature (1)..(72): NCBI GI NO: 15221264 NR Description: bHLH protein family [Arabidopsis thaliana]
  misc_feature (1)..(72): NCBI GI NO: 22331645 NR Description: bHLH protein family [Arabidopsis thaliana]
  misc_feature (1)..(72): NCBI GI NO: 7487374 NR Description: hypothetical protein T23J7
MNELVSKLQALLPSSRRRRGSGQASTAKLLKETCSYIKSLQREVDDLSDRLSDLLSTMDHNSPAAEIIRSILRS

SEQ ID NO: 22031 - DNA, 1172 bp, Zea mays subsp. mays
  misc_feature (1)..(1172): Ceres Seq. ID no. 14309653
actgccaaatcccccagaaaatcaactcctccccaattccacgctgccaccaactcgccgtcctccgcgccaagcaccaaagctccgatggcccgcacgaagcagacggcgcgcaagtcgacgggctgagccaggaggagatcgaccgcatggtgcgggaggcggaggagttcgcggaggaggacaagaaggtgaaggagcggatcgacgcccgcaaccagctggagacgtacgtgtacaacatgaagaatacggtgggcgacaaggacaagctcgcggacaagctggaggcggaggagaaggagaaggtggaggaggccctcaaggaggcgctggagtggctggacgacaaccagtcggccgagaaggaggactacgaggagaagctcaaggaggtggaggccgtgtgcaaccccatcgtgtcggccgtgtaccagcggtcgggcggcgcccctggcgctagccctcactcaaccagacaaccagtacaccaccgccaccaagcccgggccgaataactctgccgggcaaccgccgcccttcgccggcaaagaacgcccaccagatccaccccggcctgctatggagtccgcggtgaacccgaaggcgtacccgctggctgatgcgcagctgacgatgggtatcctcgatatcatccagcaggccgccaactacaagcagctcaagaagggagcgaacgaagcgacgaaaaccctgaatagggggatatcggagttcgttgtgatggcggcggacacggagcctctcgagatcctgctccacctccccttgttagccgaggataagaacgtcccatatgtatttgttccatcgaaacaagctcttggccgtgcttgtggtgtgacaagacccgtcattgcttgctcagtgaccagcaatgagggtagccagctgaaacaacagatacagggtctcaaggactcgattgagaagcttctcatctgatttacctaagatctttcagtgtgatgggcctcggcgacacatttttcagaggcttggactggtgatggtgtcttgtttacattacgctttccaaactatatttgaacactgctaagtcaatcatatttgaattgtgcttcactttatatttgtgattgtcatgtatcctcaagatgcctctgtatcgtggtggctggtttctgtcc

SEQ ID NO: 22032 - protein, 171 aa, Zea mays subsp. mays
  peptide (1)..(171): Ceres Seq. ID no. 14309654
  misc_feature (42)..(145): Pfam Name: Pfam Description:  Hsp70 protein
  misc_feature (42)..(152): NCBI GI NO: 168424 NR Description: polypeptide chain-binding protein
  misc_feature (42)..(152): NCBI GI NO: 484510 NR Description: dnaK-type molecular chaperone - maize (fragment)
  misc_feature (42)..(152): NCBI GI NO: 6016151 NR Description: Luminal binding protein 3 precursor (BiP3)
  misc_feature (42)..(152): NCBI GI NO: 6016150 NR Description: Luminal binding protein 2 precursor
  misc_feature (42)..(152): NCBI GI NO: 7441868 NR Description: dnaK-type molecular chaperone BiP - rice
  misc_feature (42)..(163): NCBI GI NO: 729617 NR Description: Luminal binding protein 1
  misc_feature (42)..(152): NCBI GI NO: 729618 NR Description: Luminal binding protein 2
  misc_feature (42)..(152): NCBI GI NO: 6911549 NR Description: heat shock protein 70 [Cucumis sativus]
  misc_feature (42)..(164): NCBI GI NO: 729623 NR Description: Luminal binding protein 5 precursor
  misc_feature (42)..(163): NCBI GI NO: 1346172 NR Description: Luminal binding protein precursor
CQIPQKINSSPIPRCHQLAVLRAKHQSSDGPHEADGAQVDGLSQEEIDRMVREAEEFAEEDKKVKERIDARNQLETYVYNMKNTVGDKDKLADKLEAEEKEKVEEALKEALEWLDDNQSAEKEDYEEKLKEVEAVCNPIVSAVYQRSGGAPGASPHSTRQPVHHRHQARAE

SEQ ID NO: 22033 - protein, 153 aa, Zea mays subsp. mays
  peptide (1)..(153): Ceres Seq. ID no. 14309655
  misc_feature (2)..(108): NCBI GI NO: 38503350 NR Description: Twist related protein 1
LPNPPENQLLPNSTLPPTRRPPRQAPKLRWPARSRRRASRRAEPGGDRPHGAGGGGVRGGGQEGEGADRRPQPAGDVRVQHEEYGGRQGQARGQAGGGGEGEGGGGPQGGAGVAGRQPVGREGGLRGEAQGGGGRVQPHRVGRVPAVGRRPWR

SEQ ID NO: 22034 - protein, 127 aa, Zea mays subsp. mays
  peptide (1)..(127): Ceres Seq. ID no. 14309656
  misc_feature (21)..(112): Pfam Name: Pfam Description:  Ribosomal protein L7Ae/L30e/S12e/Gadd45 family
  misc_feature (5)..(127): NCBI GI NO: 21592866 NR Description: Ribosomal protein L7Ae-like [Arabidopsis thaliana]
  misc_feature (5)..(127): NCBI GI NO: 15241276 NR Description: ribosomal protein L7Ae family
  misc_feature (5)..(127): NCBI GI NO: 15236127 NR Description: Ribosomal protein L7Ae family
  misc_feature (5)..(127): NCBI GI NO: 15235416 NR Description: ribosomal protein L7Ae family
  misc_feature (41)..(127): NCBI GI NO: 30687670 NR Description: ribosomal protein L7Ae family
  misc_feature (5)..(45): NCBI GI NO: 30687670 NR Description: ribosomal protein L7Ae family
  misc_feature (2)..(122): NCBI GI NO: 34881726 NR Description: similar to NHP2-like protein 1
  misc_feature (1)..(105): NCBI GI NO: 34861669 NR Description: similar to NHP2-like protein 1
  misc_feature (1)..(127): NCBI GI NO: 34869608 NR Description: similar to NHP2-like protein 1
  misc_feature (8)..(94): NCBI GI NO: 34857297 NR Description: similar to NHP2-like protein 1
MESAVNPKAYPLADAQLTMGILDIIQQAANYKQLKKGANEATKTLNRGISEFVVMAADTEPLEILLHLPLLAEDKNVPYVFVPSKQALGRACGVTRPVIACSVTSNEGSQLKQQIQGLKDSIEKLLI

SEQ ID NO: 22035 - protein, 122 aa, Zea mays subsp. mays
  peptide (1)..(122): Ceres Seq. ID no. 14309657
  misc_feature (1)..(96): Pfam Name: Pfam Description:  Hsp70 protein
  misc_feature (1)..(103): NCBI GI NO: 168424 NR Description: polypeptide chain-binding protein
  misc_feature (1)..(103): NCBI GI NO: 6016151 NR Description: Luminal binding protein 3 precursor (BiP3)
  misc_feature (1)..(103): NCBI GI NO: 6016150 NR Description: Luminal binding protein 2 precursor
  misc_feature (1)..(103): NCBI GI NO: 484510 NR Description: dnaK-type molecular chaperone - maize (fragment)
  misc_feature (1)..(103): NCBI GI NO: 7441868 NR Description: dnaK-type molecular chaperone BiP - rice
  misc_feature (1)..(114): NCBI GI NO: 729617 NR Description: Luminal binding protein 1
  misc_feature (1)..(103): NCBI GI NO: 729618 NR Description: Luminal binding protein 2
  misc_feature (1)..(103): NCBI GI NO: 6911549 NR Description: heat shock protein 70 [Cucumis sativus]
  misc_feature (1)..(115): NCBI GI NO: 729623 NR Description: Luminal binding protein 5 precursor
  misc_feature (1)..(114): NCBI GI NO: 1346172 NR Description: Luminal binding protein precursor
MVREAEEFAEEDKKVKERIDARNQLETYVYNMKNTVGDKDKLADKLEAEEKEKVEEALKEALEWLDDNQSAEKEDYEEKLKEVEAVCNPIVSAVYQRSGGAPGASPHSTRQPVHHRHQARAE

SEQ ID NO: 22036 - DNA, 936 bp, Zea mays subsp. mays
  misc_feature (1)..(936): Ceres Seq. ID no. 12634366
ctataactgaataaccgatcgaggagcgcaacgcacaccaccgaccagcgcgcgagaggacgtacggacgaacagctataggcggaggcgatggacggccaacgacgacggcaatggccgaggtcgcgctcgggagcggccgccgcgcgtctcctcctcctgctgctgctcctggcggtgtccttgggggccgggcatggtgatcacggcgcggcggctgcgggcgtcgccccggcagccggcaacggcatgacggagctgcagaagcacgtggcgttcttcgaccgcaaccacgacggcgtcatcaccttcgacgagacctaccaaggtctgcaggacgtcggagttggcgctgtcacggccaaagccagcgccgcgtacattaacggcgccctcgggcccaagaccagacctgataattcaaactcctcaacattggatatctacgtagagaacattcagaagggcaaacatggaagcgacacgggcgcctacgacgctcaaggaaggttcgttcccgcgaagctggacgagatgttcaccaagcacgccaagaccgtaccgaacgctctgacgaaagacgagctcgacgagatgctcaaggataaccgggagaagatggacgtcgcaggatggctgggagccaagtcggagtgggagatgctgtacaagctggccaaggacaaggacgggcgcctgcccaaggacaccgtcagggccgtgtacgacggatccctcttttaccagctggcggcgcaggggaagaagggctgattcggttacgttaatttcagtaatcaataacaagcgacgttttttttttgtcgtttctgaatgcttgcctgtgtggctgtgtaagaaagcgagtgggtcggactcaatggcaggcaacggttttgttttttttattattattttaacggatcggttctacct

SEQ ID NO: 22037 - protein, 227 aa, Zea mays subsp. mays
  peptide (1)..(227): Ceres Seq. ID no. 12634367
  misc_feature (53)..(220): Pfam Name: Pfam Description:  Caleosin related protein
  misc_feature (28)..(220): NCBI GI NO: 34902470 NR Description: Putative abscisic acid-induced protein - rice
  misc_feature (57)..(223): NCBI GI NO: 18409649 NR Description: Ca2+-binding EF-hand common family protein
  misc_feature (57)..(223): NCBI GI NO: 21593851 NR Description: unknown [Arabidopsis thaliana]
  misc_feature (41)..(223): NCBI GI NO: 18409651 NR Description: Ca2+-binding EF-hand common family protein
  misc_feature (41)..(223): NCBI GI NO: 21617961 NR Description: unknown [Arabidopsis thaliana]
  misc_feature (54)..(220): NCBI GI NO: 15220687 NR Description: pollen coat EF-hand protein; protein id:At1g23240
  misc_feature (10)..(220): NCBI GI NO: 6900308 NR Description: putative calcium binding EF-hand protein
  misc_feature (57)..(199): NCBI GI NO: 37652831 NR Description: calcium binding protein [Fagus sylvatica]
  misc_feature (52)..(227): NCBI GI NO: 6478218 NR Description: caleosin [Sesamum indicum]
  misc_feature (45)..(217): NCBI GI NO: 7459611 NR Description: Ca+2-binding EF hand protein homolog PM13
MDGQRRRQWPRSRSGAAAARLLLLLLLLAVSLGAGHGDHGAAAAGVAPAAGNGMTELQKHVAFFDRNHDGVITFDETYQGLQDVGVGAVTAKASAAYINGALGPKTRPDNSNSSTLDIYVENIQKGKHGSDTGAYDAQGRFVPAKLDEMFTKHAKTVPNALTKDELDEMLKDNREKMDVAGWLGAKSEWEMLYKLAKDKDGRLPKDTVRAVYDGSLFYQLAAQGKKG

SEQ ID NO: 22038 - protein, 174 aa, Zea mays subsp. mays
  peptide (1)..(174): Ceres Seq. ID no. 12634368
  misc_feature (1)..(167): Pfam Name: Pfam Description:  Caleosin related protein
  misc_feature (1)..(167): NCBI GI NO: 34902470 NR Description: Putative abscisic acid-induced protein - rice
  misc_feature (4)..(170): NCBI GI NO: 18409649 NR Description: Ca2+-binding EF-hand common family protein
  misc_feature (4)..(170): NCBI GI NO: 21593851 NR Description: unknown [Arabidopsis thaliana]
  misc_feature (1)..(170): NCBI GI NO: 18409651 NR Description: Ca2+-binding EF-hand common family protein
  misc_feature (1)..(170): NCBI GI NO: 21617961 NR Description: unknown [Arabidopsis thaliana]
  misc_feature (1)..(167): NCBI GI NO: 15220687 NR Description: pollen coat EF-hand protein; protein id:At1g23240
  misc_feature (1)..(167): NCBI GI NO: 6900308 NR Description: putative calcium binding EF-hand protein
  misc_feature (4)..(146): NCBI GI NO: 37652831 NR Description: calcium binding protein [Fagus sylvatica]
  misc_feature (1)..(174): NCBI GI NO: 6478218 NR Description: caleosin [Sesamum indicum]
  misc_feature (1)..(164): NCBI GI NO: 7459611 NR Description: Ca+2-binding EF hand protein homolog PM13
MTELQKHVAFFDRNHDGVITFDETYQGLQDVGVGAVTAKASAAYINGALGPKTRPDNSNSSTLDIYVENIQKGKHGSDTGAYDAQGRFVPAKLDEMFTKHAKTVPNALTKDELDEMLKDNREKMDVAGWLGAKSEWEMLYKLAKDKDGRLPKDTVRAVYDGSLFYQLAAQGKKG

SEQ ID NO: 22039 - DNA, 1085 bp, Zea mays subsp. mays
  misc_feature (1)..(1085): Ceres Seq. ID no. 14305128
acaccctcgttttctcccgctctagctctctgctcacagccgcaagctccatcttcctccctgctgcagctcccgagcgccctgccctttgctccagcttgccgcgtgctctagcgtctgtgccgtggagcccctggcgcgggttcttctgcgcccggccatcctctctctccatcaccatggagcttcttttctccagccgcgccctgctcggttccatggccaacgttccccaagctcctccctccagtccagccgcggtgctccctgcgcgcctgctcccgcgcgcgttcctctgctcgtcgcgcccagcgagtctccatggtcaagcacgcgcggatctcctctgagctcgcccccggcctctactccttccagccggtcgagtctcgactgcgctcggcctccagctctgttgtcgcgcagctcgtcggcgttgcccctgtttccatggctgaccgggcggctcctctgcgtcgtcgttctctgggcccgggcatggggcttcctcgccgtcgcgcgcgctccttcctttgctctgctcggccatggacgccatgcagcagctccctgctcgtgcccaactccctgcgtacgcctgcgcccgagctgaacttcctcgccgcgccctgcgctctgctcacctcggctcctagttcggcgcgtgattttggagctctgcgcgaatggcgtgcgatttggtgctctgcggcaagcgcttcgtgtgggtggtgtggttcccaaaccgcgtgatgcactggctcgatgcccagaccccggcctccatcgtgctcgtctgcctcggcagcaagtacttcatgtcggagcagcggcagcaacaccctcctttgcgtcgtgctcactagatcgggcctcgcgcgtccatctgtgcaattcctgttcaattcatgttcggctatcggtttcgctggttgtcgatttcctattcgccatggtcagcctagctcgccaaccgtcgcgtcctctttacctgttgagttgtgtgttgccgcgttcacctcattgtgtcatcatggacttgtcggcgtactgcgctcgtctcaactcgaacgagttgaattgcc

SEQ ID NO: 22040 - protein, 143 aa, Zea mays subsp. mays
  peptide (1)..(143): Ceres Seq. ID no. 14305129
  misc_feature (1)..(143): NCBI GI NO: 13592175 NR Description: ppg3 [Leishmania major]
MVKHARISSELAPGLYSFQPVESRLRSASSSVVAQLVGVAPVSMADRAAPLRRRSLGPGMGLPRRRARSFLCSARPWTPCSSSLLVPNSLRTPAPELNFLAAPCALLTSAPSSARDFGALREWRAIWCSAASASCGWCGSQTA

SEQ ID NO: 22041 - protein, 115 aa, Zea mays subsp. mays
  peptide (1)..(115): Ceres Seq. ID no. 14305130
TLVFSRSSSLLTAASSIFLPAAAPERPALCSSLPRALASVPWSPWRGFFCARPSSLSITMELLFSSRALLGSMANVPQAPPSSPAAVLPARLLPRAFLCSSRPASLHGQARADLL

SEQ ID NO: 22042 - protein, 106 aa, Zea mays subsp. mays
  peptide (1)..(106): Ceres Seq. ID no. 14305131
  misc_feature (1)..(26): NCBI GI NO: 13592175 NR Description: ppg3 [Leishmania major]
MPRPRPPSCSSASAASTSCRSSGSNTLLCVVLTRSGLARPSVQFLFNSCSAIGFAGCRFPIRHGQPSSPTVASSLPVELCVAAFTSLCHHGLVGVLRSSQLERVEL

SEQ ID NO: 22043 - DNA, 2013 bp, Zea mays subsp. mays
  misc_feature (1)..(2013): Ceres Seq. ID no. 14302588
gcccactgctcagtccactgcccagcacggatctcatctcaccagctgcccgcgcatccaattcctctcgctggacggctgcagcacatcatcaggtgagaccgtgagagggaatgggatcaacaacaatgtcccctccatcttttcccgtcgtcctcctgctcctcctcctcgccaccatagccgcagccgccggaagcaacatggatgaggaggtggtggacgacctccagtatcttattgacaactccgacgacatccccaccaacgatcccgacgggtggcctgagggagactacgacgacgacgaccttctcttccaagatcaggaccaggacctcacaggccaccagccggagatcgacgagacccacgtcgtggtcctcgccgccgcaaacttttcctccttcctcgcctccagccaccatgttatggttgagttctacgcaccttggtgtggccactgccaggagctcgccccggattacgccgccgccgccgcgcatctcgccgctcaccaccaccaggcccacctcgcccttgccaaggtcgacgccaccgaggaaaccgacctcgcccagaagtacgacgtccagggcttccccaccatcctcttcttcatcgatggcgtccccagaggctataacggagccaggaccaaggaagccatcgtcgactggatcaacaagaagctcggcccagccgtgcaaaatgtcaccagcgtcgacgaggcccagagcatactcaccggagatgacaaagccgtccttgccttcctcgacacactatccggtgctcacagtgatgagcttgctgctgcttcgaggctggaagatagcatcaacttttatcagacttcgactcctgatgttgctaagcttttccatatcgatgcagcagcgaagcgtccatccgtagtgctgctgaagaaagaggaggagaagttgaccttctatgatggggagtttaaagcatcagccattgctggttttgtgtctgctaacaagcttcctttggtgaccacactaactcaagaaacttccccttctatttttggcaatccaatcaagaagcagattttactatttgctgttgcaagcgagtccaccaaatttctgcccatctttaaggaagcagcaaaaccatttaagggaaagttattatttgtctttgtggaacgagacagtgaggaagttggtgaaccagttgccgactactttggtattactggacaagagaccacagttcttgcttacactggtaatgaagatgctaggaaattttttcttgatggtgaggtgtcacttgaagctataaaggacttcgctgaaggtttcttggaagacaagcttacaccattctacaaatcggaaccagtgcctgaatctaatgatggggatgtgaaaattgttgttgggaagaatctggatctaatagtttttgatgaaacaaaagatgtacttcttgagatatatgcaccatggtgtggtcattgtcaatcgctggaacctacttacaacaatctagccaagcatctacgtagtgttgactcccttgtggtagccaaaatggatggtactaccaatgagcatccacgtgcaaagtctgacggatacccgacgattctcttctatccagctgggaagaaaagctttgagccaatcacttttgagggggagcggacagtggtagatctgtacaagttcatcaagaaacatgctagcatccctttcaagttgaagcgccaggagtcgagaaccgagagcactcgggcggagggtgtgaagagctctggtacgaactcaaaggacgaactgtaaagagctcagggttggatgtgtgttggagtggatcagggtgaaagtttccatctcaatacaagtagatcgatcttggtggatgcgagtgcagtgttggcctgagggaggagcagcagagatgagtgcttactgcttagagagaggaatgaaatcagcaactaatcaaataaaatcaaattccattattcctttt

SEQ ID NO: 22044 - protein, 568 aa, Zea mays subsp. mays
  peptide (1)..(568): Ceres Seq. ID no. 14302589
  misc_feature (429)..(537): Pfam Name: Pfam Description:  Thioredoxin
  misc_feature (11)..(566): NCBI GI NO: 30697404 NR Description: protein disulfide isomerase family
  misc_feature (11)..(566): NCBI GI NO: 21593313 NR Description: protein disulfide isomerase precursor-like
  misc_feature (124)..(568): NCBI GI NO: 28140231 NR Description: protein disulphide isomerase [Elaeis guineensis]
  misc_feature (3)..(568): NCBI GI NO: 22331799 NR Description: protein disulfide isomerase family
  misc_feature (11)..(518): NCBI GI NO: 30697408 NR Description: protein disulfide isomerase family
  misc_feature (3)..(568): NCBI GI NO: 7437396 NR Description: protein disulfide-isomerase homolog F28P10
  misc_feature (82)..(567): NCBI GI NO: 20805285 NR Description: protein disulfide isomerase-like PDI-H
  misc_feature (76)..(568): NCBI GI NO: 20805287 NR Description: protein disulfide isomerase-like PDI-M
  misc_feature (57)..(568): NCBI GI NO: 5902592 NR Description: protein disulfide isomerase precursor
  misc_feature (69)..(568): NCBI GI NO: 7437394 NR Description: protein disulfide-isomerase (EC 5
MGSTTMSPPSFPVVLLLLLLATIAAAAGSNMDEEVVDDLQYLIDNSDDIPTNDPDGWPEGDYDDDDLLFQDQDQDLTGHQPEIDETHVVVLAAANFSSFLASSHHVMVEFYAPWCGHCQELAPDYAAAAAHLAAHHHQAHLALAKVDATEETDLAQKYDVQGFPTILFFIDGVPRGYNGARTKEAIVDWINKKLGPAVQNVTSVDEAQSILTGDDKAVLAFLDTLSGAHSDELAAASRLEDSINFYQTSTPDVAKLFHIDAAAKRPSVVLLKKEEEKLTFYDGEFKASAIAGFVSANKLPLVTTLTQETSPSIFGNPIKKQILLFAVASESTKFLPIFKEAAKPFKGKLLFVFVERDSEEVGEPVADYFGITGQETTVLAYTGNEDARKFFLDGEVSLEAIKDFAEGFLEDKLTPFYKSEPVPESNDGDVKIVVGKNLDLIVFDETKDVLLEIYAPWCGHCQSLEPTYNNLAKHLRSVDSLVVAKMDGTTNEHPRAKSDGYPTILFYPAGKKSFEPITFEGERTVVDLYKFIKKHASIPFKLKRQESRTESTRAEGVKSSGTNSKDEL

SEQ ID NO: 22045 - protein, 563 aa, Zea mays subsp. mays
  peptide (1)..(563): Ceres Seq. ID no. 14302590
  misc_feature (424)..(532): Pfam Name: Pfam Description:  Thioredoxin
  misc_feature (6)..(561): NCBI GI NO: 30697404 NR Description: protein disulfide isomerase family
  misc_feature (6)..(561): NCBI GI NO: 21593313 NR Description: protein disulfide isomerase precursor-like
  misc_feature (119)..(563): NCBI GI NO: 28140231 NR Description: protein disulphide isomerase [Elaeis guineensis]
  misc_feature (1)..(563): NCBI GI NO: 22331799 NR Description: protein disulfide isomerase family
  misc_feature (6)..(513): NCBI GI NO: 30697408 NR Description: protein disulfide isomerase family
  misc_feature (1)..(563): NCBI GI NO: 7437396 NR Description: protein disulfide-isomerase homolog F28P10
  misc_feature (77)..(562): NCBI GI NO: 20805285 NR Description: protein disulfide isomerase-like PDI-H
  misc_feature (71)..(563): NCBI GI NO: 20805287 NR Description: protein disulfide isomerase-like PDI-M
  misc_feature (52)..(563): NCBI GI NO: 5902592 NR Description: protein disulfide isomerase precursor
  misc_feature (64)..(563): NCBI GI NO: 7437394 NR Description: protein disulfide-isomerase (EC 5
MSPPSFPVVLLLLLLATIAAAAGSNMDEEVVDDLQYLIDNSDDIPTNDPDGWPEGDYDDDDLLFQDQDQDLTGHQPEIDETHVVVLAAANFSSFLASSHHVMVEFYAPWCGHCQELAPDYAAAAAHLAAHHHQAHLALAKVDATEETDLAQKYDVQGFPTILFFIDGVPRGYNGARTKEAIVDWINKKLGPAVQNVTSVDEAQSILTGDDKAVLAFLDTLSGAHSDELAAASRLEDSINFYQTSTPDVAKLFHIDAAAKRPSVVLLKKEEEKLTFYDGEFKASAIAGFVSANKLPLVTTLTQETSPSIFGNPIKKQILLFAVASESTKFLPIFKEAAKPFKGKLLFVFVERDSEEVGEPVADYFGITGQETTVLAYTGNEDARKFFLDGEVSLEAIKDFAEGFLEDKLTPFYKSEPVPESNDGDVKIVVGKNLDLIVFDETKDVLLEIYAPWCGHCQSLEPTYNNLAKHLRSVDSLVVAKMDGTTNEHPRAKSDGYPTILFYPAGKKSFEPITFEGERTVVDLYKFIKKHASIPFKLKRQESRTESTRAEGVKSSGTNSKDEL

SEQ ID NO: 22046 - protein, 538 aa, Zea mays subsp. mays
  peptide (1)..(538): Ceres Seq. ID no. 14302591
  misc_feature (399)..(507): Pfam Name: Pfam Description:  Thioredoxin
  misc_feature (1)..(536): NCBI GI NO: 30697404 NR Description: protein disulfide isomerase family
  misc_feature (1)..(536): NCBI GI NO: 21593313 NR Description: protein disulfide isomerase precursor-like
  misc_feature (94)..(538): NCBI GI NO: 28140231 NR Description: protein disulphide isomerase [Elaeis guineensis]
  misc_feature (1)..(538): NCBI GI NO: 22331799 NR Description: protein disulfide isomerase family
  misc_feature (1)..(488): NCBI GI NO: 30697408 NR Description: protein disulfide isomerase family
  misc_feature (1)..(538): NCBI GI NO: 7437396 NR Description: protein disulfide-isomerase homolog F28P10
  misc_feature (52)..(537): NCBI GI NO: 20805285 NR Description: protein disulfide isomerase-like PDI-H
  misc_feature (46)..(538): NCBI GI NO: 20805287 NR Description: protein disulfide isomerase-like PDI-M
  misc_feature (27)..(538): NCBI GI NO: 5902592 NR Description: protein disulfide isomerase precursor
  misc_feature (39)..(538): NCBI GI NO: 7437394 NR Description: protein disulfide-isomerase (EC 5
MDEEVVDDLQYLIDNSDDIPTNDPDGWPEGDYDDDDLLFQDQDQDLTGHQPEIDETHVVVLAAANFSSFLASSHHVMVEFYAPWCGHCQELAPDYAAAAAHLAAHHHQAHLALAKVDATEETDLAQKYDVQGFPTILFFIDGVPRGYNGARTKEAIVDWINKKLGPAVQNVTSVDEAQSILTGDDKAVLAFLDTLSGAHSDELAAASRLEDSINFYQTSTPDVAKLFHIDAAAKRPSVVLLKKEEEKLTFYDGEFKASAIAGFVSANKLPLVTTLTQETSPSIFGNPIKKQILLFAVASESTKFLPIFKEAAKPFKGKLLFVFVERDSEEVGEPVADYFGITGQETTVLAYTGNEDARKFFLDGEVSLEAIKDFAEGFLEDKLTPFYKSEPVPESNDGDVKIVVGKNLDLIVFDETKDVLLEIYAPWCGHCQSLEPTYNNLAKHLRSVDSLVVAKMDGTTNEHPRAKSDGYPTILFYPAGKKSFEPITFEGERTVVDLYKFIKKHASIPFKLKRQESRTESTRAEGVKSSGTNSKDEL

SEQ ID NO: 22047 - DNA, 1094 bp, Zea mays subsp. mays
  misc_feature (1)..(1094): Ceres Seq. ID no. 13587495
ctttctctcctctcttctcttctctcctctccccgtggccacaccacagccgccggaagctcctcctcctcctccatgagagagatctagcaaagcatagcctccttcctgctggcgggatctccttttgattcgtaacttataacagaagaggaggaggcacagcaccttgtcaaatgatgaactctcagaagctgcagctgcccgttcaggatctgatgagtctgagagggagatcattcatcatcagcaaggtgatgatgcaccagtgcactgcagctgcttcgtcgtcgtcttcacctgctcctgctgctagaggcctgcaggttgctgcccatcccagtcccagcaggaggcggcgtcctcgtggcctcgttgccgcggccggcagtgacgacgacgaatgcgcttcagatggtggtgagtccgagtcgtcgtcgtcgggcgggaaagacgacggcggcggattgtcccgagaggatctggaacgcctggtcgggagtgacgacgatgccaagttcaatgggttggatcttgcaaacctcatcaggaagaagtacggtagatcgtacgatgtgacgctgataaagaaagagttcatggggaggaatctgctggccatgaatgtgatgtggaagtacagggagcaaagatcgttcccgctgagcgaggaggagtacctgctgcggctggacgatgtcgccaacacgctcaagtgctggggagccgtggcgcacgtgcgcaacacgctggagaagctcaaggagaggccgcgcatcggcaaggccgtcagcatcttcatcgacatggaccagaccggaggccgctccaacgaatggatttacaagtagcttcccactccatcgatcatgtatatgcatccatcgcccatgaacaaacacattcatcaggtgtatggagaatgaatgtgggtaccaatttcatctccaacaatcaagcacatcgcaaagatcataccatcacatgatcttattgattcttagatcgcacctaagcatgtctcttgatattctcacatatgacaccatgcatgtatacaacgagctccttcatcaatactagttaagtattgc

SEQ ID NO: 22048 - protein, 224 aa, Zea mays subsp. mays
  peptide (1)..(224): Ceres Seq. ID no. 13587496
  misc_feature (79)..(224): NCBI GI NO: 11994202 NR Description: dbj|BAA18864
  misc_feature (79)..(224): NCBI GI NO: 18402409 NR Description: expressed protein [Arabidopsis thaliana]
  misc_feature (117)..(222): NCBI GI NO: 23041855 NR Description: hypothetical protein
  misc_feature (117)..(222): NCBI GI NO: 17229946 NR Description: hypothetical protein [Nostoc sp. PCC 7120]
  misc_feature (117)..(222): NCBI GI NO: 23130142 NR Description: hypothetical protein [Nostoc punctiforme]
  misc_feature (117)..(221): NCBI GI NO: 16332324 NR Description: unknown protein [Synechocystis sp. PCC 6803]
  misc_feature (117)..(222): NCBI GI NO: 22298501 NR Description: ORF_ID:tll0958~hypothetical protein
  misc_feature (117)..(213): NCBI GI NO: 37521175 NR Description: hypothetical protein gsr1606
  misc_feature (119)..(207): NCBI GI NO: 33866372 NR Description: conserved hypothetical protein
  misc_feature (119)..(213): NCBI GI NO: 33861020 NR Description: conserved hypothetical protein
MMNSQKLQLPVQDLMSLRGRSFIISKVMMHQCTAAASSSSSPAPAARGLQVAAHPSPSRRRRPRGLVAAAGSDDDECASDGGESESSSSGGKDDGGGLSREDLERLVGSDDDAKFNGLDLANLIRKKYGRSYDVTLIKKEFMGRNLLAMNVMWKYREQRSFPLSEEEYLLRLDDVANTLKCWGAVAHVRNTLEKLKERPRIGKAVSIFIDMDQTGGRSNEWIYK

SEQ ID NO: 22049 - protein, 223 aa, Zea mays subsp. mays
  peptide (1)..(223): Ceres Seq. ID no. 13587497
  misc_feature (78)..(223): NCBI GI NO: 11994202 NR Description: dbj|BAA18864
  misc_feature (78)..(223): NCBI GI NO: 18402409 NR Description: expressed protein [Arabidopsis thaliana]
  misc_feature (116)..(221): NCBI GI NO: 23041855 NR Description: hypothetical protein
  misc_feature (116)..(221): NCBI GI NO: 17229946 NR Description: hypothetical protein [Nostoc sp. PCC 7120]
  misc_feature (116)..(221): NCBI GI NO: 23130142 NR Description: hypothetical protein [Nostoc punctiforme]
  misc_feature (116)..(220): NCBI GI NO: 16332324 NR Description: unknown protein [Synechocystis sp. PCC 6803]
  misc_feature (116)..(221): NCBI GI NO: 22298501 NR Description: ORF_ID:tll0958~hypothetical protein
  misc_feature (116)..(212): NCBI GI NO: 37521175 NR Description: hypothetical protein gsr1606
  misc_feature (118)..(206): NCBI GI NO: 33866372 NR Description: conserved hypothetical protein
  misc_feature (118)..(212): NCBI GI NO: 33861020 NR Description: conserved hypothetical protein
MNSQKLQLPVQDLMSLRGRSFIISKVMMHQCTAAASSSSSPAPAARGLQVAAHPSPSRRRRPRGLVAAAGSDDDECASDGGESESSSSGGKDDGGGLSREDLERLVGSDDDAKFNGLDLANLIRKKYGRSYDVTLIKKEFMGRNLLAMNVMWKYREQRSFPLSEEEYLLRLDDVANTLKCWGAVAHVRNTLEKLKERPRIGKAVSIFIDMDQTGGRSNEWIYK

SEQ ID NO: 22050 - protein, 210 aa, Zea mays subsp. mays
  peptide (1)..(210): Ceres Seq. ID no. 13587498
  misc_feature (65)..(210): NCBI GI NO: 11994202 NR Description: dbj|BAA18864
  misc_feature (65)..(210): NCBI GI NO: 18402409 NR Description: expressed protein [Arabidopsis thaliana]
  misc_feature (103)..(208): NCBI GI NO: 23041855 NR Description: hypothetical protein
  misc_feature (103)..(208): NCBI GI NO: 17229946 NR Description: hypothetical protein [Nostoc sp. PCC 7120]
  misc_feature (103)..(208): NCBI GI NO: 23130142 NR Description: hypothetical protein [Nostoc punctiforme]
  misc_feature (103)..(207): NCBI GI NO: 16332324 NR Description: unknown protein [Synechocystis sp. PCC 6803]
  misc_feature (103)..(208): NCBI GI NO: 22298501 NR Description: ORF_ID:tll0958~hypothetical protein
  misc_feature (103)..(199): NCBI GI NO: 37521175 NR Description: hypothetical protein gsr1606
  misc_feature (105)..(193): NCBI GI NO: 33866372 NR Description: conserved hypothetical protein
  misc_feature (105)..(199): NCBI GI NO: 33861020 NR Description: conserved hypothetical protein
MSLRGRSFIISKVMMHQCTAAASSSSSPAPAARGLQVAAHPSPSRRRRPRGLVAAAGSDDDECASDGGESESSSSGGKDDGGGLSREDLERLVGSDDDAKFNGLDLANLIRKKYGRSYDVTLIKKEFMGRNLLAMNVMWKYREQRSFPLSEEEYLLRLDDVANTLKCWGAVAHVRNTLEKLKERPRIGKAVSIFIDMDQTGGRSNEWIYK

SEQ ID NO: 22051 - DNA, 1091 bp, Zea mays subsp. mays
  misc_feature (1)..(1091): Ceres Seq. ID no. 14305178
agttgctcggctcggctgtgcctgtgtccccccgaaaatggcctcgtccccgctcttcacctcgctccggctgcccgtgcccaccatcataccgcgctgtgcttctccgccgcacggcgtgccctcggcggacgacgccgtccctcggccggcgcctctcgtggcggccgctagccacaggagggagctggtggtaggggcggcgctgaccgcggtgctgttgccgagggcgccgctgccggcccaggcgcgcgaggtcgcggtcggcacgtacctgccaccggcgccgtccaacccgggcttcgtcttcttccgcgccacctccaaggacacccccgcgctccgcgccggcaatgtggaaccgtacgagttcatcctgccgccgacctggaagcagacgcgcgtcgccaacatcctgtccgggaactactgccagcccaagtgcgccgagccgtgggtggaggtgaagttcgaggacgagaagcagggcaaggtgcaggtggtggcctcgccgctcatccgcctcaccaacaagcccaacgccacgatcgaggacatcggcagccccgagaggctgatcgcctcgctggggcctttcgtcaccggcaacaccttcgactccgacgagctcgtcgacaccaacgtcgagaacgtcgatggacagacttactacagctacgtgctggagactccattggcgctaacaggttcgcacaacctggccaaggccaccgccaaggggagcacggtggtgctgttcgtcgcaagcgccaacgacaagcagtggccggcgtcgcagaaggttctgaaagccatagtggactcgtttcaaatatgactggtttgggtgatgcgttacgttgttggcaacatctatcggcctttttgacttgagttcagttgagttgcttgtacccgaagctctaaaatacgaggtatatataagcttataaagccaaaagggaaaagaaggcactgcttgttttaggcttgagtcacggttgctgttcgtagcttgtcgaagacgacatgtcagatgtacatgtacacggaaatgaactttttcagtaacgaaatgctggttaatatcc

SEQ ID NO: 22052 - protein, 278 aa, Zea mays subsp. mays
  peptide (1)..(278): Ceres Seq. ID no. 14305179
  misc_feature (152)..(278): Pfam Name: Pfam Description:  PsbP
  misc_feature (16)..(222): NCBI GI NO: 34909044 NR Description: P0034E02.35
  misc_feature (243)..(278): NCBI GI NO: 34909044 NR Description: P0034E02.35
  misc_feature (60)..(278): NCBI GI NO: 15228983 NR Description: thylakoid lumenal 20 kDa protein
  misc_feature (58)..(278): NCBI GI NO: 30699237 NR Description: thylakoid lumenal 29.8 kDa protein
  misc_feature (121)..(278): NCBI GI NO: 8928455 NR Description: Thylakoid lumenal 29
VARLGCACVPPKMASSPLFTSLRLPVPTIIPRCASPPHGVPSADDAVPRPAPLVAAASHRRELVVGAALTAVLLPRAPLPAQAREVAVGTYLPPAPSNPGFVFFRATSKDTPALRAGNVEPYEFILPPTWKQTRVANILSGNYCQPKCAEPWVEVKFEDEKQGKVQVVASPLIRLTNKPNATIEDIGSPERLIASLGPFVTGNTFDSDELVDTNVENVDGQTYYSYVLETPLALTGSHNLAKATAKGSTVVLFVASANDKQWPASQKVLKAIVDSFQI

SEQ ID NO: 22053 - protein, 266 aa, Zea mays subsp. mays
  peptide (1)..(266): Ceres Seq. ID no. 14305180
  misc_feature (140)..(266): Pfam Name: Pfam Description:  PsbP
  misc_feature (4)..(210): NCBI GI NO: 34909044 NR Description: P0034E02.35
  misc_feature (231)..(266): NCBI GI NO: 34909044 NR Description: P0034E02.35
  misc_feature (48)..(266): NCBI GI NO: 15228983 NR Description: thylakoid lumenal 20 kDa protein
  misc_feature (46)..(266): NCBI GI NO: 30699237 NR Description: thylakoid lumenal 29.8 kDa protein
  misc_feature (109)..(266): NCBI GI NO: 8928455 NR Description: Thylakoid lumenal 29
MASSPLFTSLRLPVPTIIPRCASPPHGVPSADDAVPRPAPLVAAASHRRELVVGAALTAVLLPRAPLPAQAREVAVGTYLPPAPSNPGFVFFRATSKDTPALRAGNVEPYEFILPPTWKQTRVANILSGNYCQPKCAEPWVEVKFEDEKQGKVQVVASPLIRLTNKPNATIEDIGSPERLIASLGPFVTGNTFDSDELVDTNVENVDGQTYYSYVLETPLALTGSHNLAKATAKGSTVVLFVASANDKQWPASQKVLKAIVDSFQI

SEQ ID NO: 22054 - DNA, 643 bp, Zea mays subsp. mays
  misc_feature (1)..(643): Ceres Seq. ID no. 13589405
aatttgaatttagaaaatccagaggacaccgcggacgtgggtcgtctggtagggtcacagaaggagagatgtgaagtgaaggtggcgttgtccaactcattcggattcggtgggcacaactcatcgattctctttgccccctttaagtgaacatgaccgaggcgaagaaccgacatcttcatcatcgcgcaaatggcttcatatatctggaactccacatagaaatctggtggattctgcaacttcctccgtgccacacatactgcatatggaggtccaaagtgagggtacaatactatgccacacacatttgagcgaacaaaacatcagcccccctacatgtttcatctactatcacaaagttgcaaaatatatatggtaactatcaaagaacttaccgtacctgggccagtgttttcgccttcaccatacctgcccattgtcagtactatttcctacatttggtgtagtcccgtagcttaatcctcttccctgcggaggtgatgggatcttatgttgtattgatgttgccaacagtatcgttattagccatgaattgctggttcccactgtaagcatcactggacgttttcgctttggttgtttctgtttcctgctgttcataaccgagttaaagatatgt

SEQ ID NO: 22055 - protein, 61 aa, Zea mays subsp. mays
  peptide (1)..(61): Ceres Seq. ID no. 13589406
MPHTFERTKHQPPYMFHLLSQSCKIYMVTIKELTVPGPVFSPSPYLPIVSTISYIWCSPVA

SEQ ID NO: 22056 - protein, 53 aa, Zea mays subsp. mays
  peptide (1)..(53): Ceres Seq. ID no. 13589407
MTEAKNRHLHHRANGFIYLELHIEIWWILQLPPCHTYCIWRSKVRVQYYATHI

SEQ ID NO: 22057 - protein, 49 aa, Zea mays subsp. mays
  peptide (1)..(49): Ceres Seq. ID no. 13589408
  misc_feature (1)..(49): NCBI GI NO: 629772 NR Description: 3-oxoacyl-
  misc_feature (1)..(49): NCBI GI NO: 33146941 NR Description: putative 3-oxoacyl-
  misc_feature (1)..(49): NCBI GI NO: 34906678 NR Description: putative 3-oxoacyl-
  misc_feature (1)..(48): NCBI GI NO: 629774 NR Description: 3-oxoacyl-
  misc_feature (1)..(47): NCBI GI NO: 30795125 NR Description: beta-ketoacyl-ACP synthase II [Elaeis guineensis]
  misc_feature (1)..(49): NCBI GI NO: 7433754 NR Description: probable 3-oxoacyl-
  misc_feature (1)..(49): NCBI GI NO: 2921211 NR Description: beta-ketoacyl-ACP synthase II [Perilla frutescens]
  misc_feature (1)..(48): NCBI GI NO: 7385215 NR Description: beta-ketoacyl-ACP synthetase 2 [Glycine max]
  misc_feature (1)..(49): NCBI GI NO: 7385219 NR Description: beta-ketoacyl-ACP synthetase 2 [Brassica napus]
  misc_feature (1)..(49): NCBI GI NO: 18410739 NR Description: 3-ketoacyl-ACP synthase -related
NLNLENPEDTADVGRLVGSQKERCEVKVALSNSFGFGGHNSSILFAPFK

SEQ ID NO: 22058 - DNA, 1024 bp, Zea mays subsp. mays
  misc_feature (1)..(1024): Ceres Seq. ID no. 14305215
aatcgaaggaacaatgaaggcagtaacattgagatgtccagtgtgcaaaatattgctaatgaagaaaagtctagcgaacctttcaattttgagagcttgtaccccctaacacgacttccaaaggagggagatctgattgcctaccgattggttgagctgtcttccatgttgtgtccggagctctcttcgtaccgtgtgggaaaagttctggtatatgatcccgtatcattgcgtatcattctcgtacccgttcaagagtatccaatcaccaccgaggaaaaagaaaacaaggacgagtcagatatgcttgtggatttgtcaccgtacaaggaagatggctccttggagatcgagtactcttcacttgttgatgtaaggctactgaagggtatcgaaacatgcaacgaagttggatcagcaccggccggaaggccagttaccttgcacaaaaacgaaggcaatattgagagccagaaaccacccttggtgtcaaacaacactaaaggcgaagaacgcacactaggaaagtcagaaagtacggtctgggaaaaaaatggtgagcccagtgataaggttgatcttctgcaaaatggctgggcaacatggaaacaaaatgctagtacgtcagcttggtcttacagagccctcaggagcagcgcccttggcccgacgatggcaattctacgagggaagaacagccagagtaaaccacccaatcgaaagaacgccaagtgatgcctaagtatttaataacttcagtgatacctatgtaatccaaagttgatccgatcctttggagaaggccaagcaagtcgaggtagttggtcttatatatgtaactgcaattactgccctgcctattttgaaaattccaaagtggtgactgatgcaaagggaactttttagaccagtcaagactcattactatgtgatgccagcttatttaatgttgatgaaaattcactaaaattgatctttattgtacatcactcagatcttcagctttggaattgcttgatttatt

SEQ ID NO: 22059 - protein, 244 aa, Zea mays subsp. mays
  peptide (1)..(244): Ceres Seq. ID no. 14305216
  misc_feature (5)..(231): NCBI GI NO: 25402750 NR Description: protein F3F19.5 [imported] - Arabidopsis thaliana
  misc_feature (5)..(231): NCBI GI NO: 22329527 NR Description: expressed protein [Arabidopsis thaliana]
NRRNNEGSNIEMSSVQNIANEEKSSEPFNFESLYPLTRLPKEGDLIAYRLVELSSMLCPELSSYRVGKVLVYDPVSLRIILVPVQEYPITTEEKENKDESDMLVDLSPYKEDGSLEIEYSSLVDVRLLKGIETCNEVGSAPAGRPVTLHKNEGNIESQKPPLVSNNTKGEERTLGKSESTVWEKNGEPSDKVDLLQNGWATWKQNASTSAWSYRALRSSALGPTMAILRGKNSQSKPPNRKNAK

SEQ ID NO: 22060 - protein, 233 aa, Zea mays subsp. mays
  peptide (1)..(233): Ceres Seq. ID no. 14305217
  misc_feature (1)..(220): NCBI GI NO: 25402750 NR Description: protein F3F19.5 [imported] - Arabidopsis thaliana
  misc_feature (1)..(220): NCBI GI NO: 22329527 NR Description: expressed protein [Arabidopsis thaliana]
MSSVQNIANEEKSSEPFNFESLYPLTRLPKEGDLIAYRLVELSSMLCPELSSYRVGKVLVYDPVSLRIILVPVQEYPITTEEKENKDESDMLVDLSPYKEDGSLEIEYSSLVDVRLLKGIETCNEVGSAPAGRPVTLHKNEGNIESQKPPLVSNNTKGEERTLGKSESTVWEKNGEPSDKVDLLQNGWATWKQNASTSAWSYRALRSSALGPTMAILRGKNSQSKPPNRKNAK

SEQ ID NO: 22061 - protein, 189 aa, Zea mays subsp. mays
  peptide (1)..(189): Ceres Seq. ID no. 14305218
  misc_feature (1)..(176): NCBI GI NO: 25402750 NR Description: protein F3F19.5 [imported] - Arabidopsis thaliana
  misc_feature (1)..(176): NCBI GI NO: 22329527 NR Description: expressed protein [Arabidopsis thaliana]
MLCPELSSYRVGKVLVYDPVSLRIILVPVQEYPITTEEKENKDESDMLVDLSPYKEDGSLEIEYSSLVDVRLLKGIETCNEVGSAPAGRPVTLHKNEGNIESQKPPLVSNNTKGEERTLGKSESTVWEKNGEPSDKVDLLQNGWATWKQNASTSAWSYRALRSSALGPTMAILRGKNSQSKPPNRKNAK

SEQ ID NO: 22062 - DNA, 749 bp, Zea mays subsp. mays
  misc_feature (1)..(749): Ceres Seq. ID no. 13624430
gaaccaagagagcagggtgtgggcgaagagaccccagccagtcgatcgttcaagaaaaataccagcttaccaacaacagcagcagcaagcccacccgttcgacgacatggcccgcctcggcgccggcgccgtgttggcgctcctagtggcggtcgcggcggtggccgcgttcctcgcggtgccggcctcggcgaagtccggggagctgagcgcgatggggttgctggcggcgaagggcggcagcggcgcgggcccgcagaagtgctcgggcgcggtgggcgagtgcgacgtggacgaggcggaggagctcgggctgagcggcggcggcctcggctccgacgacgcggtgcggcggacgctggcgcagcggaagccgaccaaccggtacatcagctacgcggcgctgcgcgcggaccaggtgccgtgcaacaagcgcggccggtcctactacagcaactgcgaggcgcagaaggccgccaacccctaccgccgcggctgctccgccatcacgcgctgcgcccgcaacatgaactgagcccagcgctagctgctgccggggcgcgccgtcgtcgccgagccggtcggtctggtctggtttggtctgcctgcctgccaggtcacgcagcctggctccaccgatcgcacaccatacattgacgtcgtcgtcgcggccgtacgtgccgttggacggtggaggaggcggtggcgctacgacagtatatatatacacaattacacatacacacccc

SEQ ID NO: 22063 - protein, 218 aa, Zea mays subsp. mays
  peptide (1)..(218): Ceres Seq. ID no. 13624431
  misc_feature (53)..(209): NCBI GI NO: 23121172 NR Description: hypothetical protein
EPREQGVGEETPASRSFKKNTSLPTTAAASPPVRRHGPPRRRRRVGAPSGGRGGGRVPRGAGLGEVRGAERDGVAGGEGRQRRGPAEVLGRGGRVRRGRGGGARAERRRPRLRRRGAADAGAAEADQPVHQLRGAARGPGAVQQARPVLLQQLRGAEGRQPLPPRLLRHHALRPQHELSPALAAAGARRRRRAGRSGLVWSACLPGHAAWLHRSHTIH

SEQ ID NO: 22064 - protein, 177 aa, Zea mays subsp. mays
  peptide (1)..(177): Ceres Seq. ID no. 13624432
  misc_feature (103)..(174): Pfam Name: RALF Pfam Description: Rapid ALkalinization Factor
  misc_feature (47)..(177): NCBI GI NO: 34903676 NR Description: B1015E06.23
  misc_feature (50)..(174): NCBI GI NO: 18397246 NR Description: expressed protein [Arabidopsis thaliana]
  misc_feature (49)..(172): NCBI GI NO: 34902918 NR Description: unnamed protein product
  misc_feature (40)..(175): NCBI GI NO: 18401177 NR Description: expressed protein [Arabidopsis thaliana]
  misc_feature (64)..(172): NCBI GI NO: 16566316 NR Description: RALF precursor [Nicotiana tabacum]
  misc_feature (87)..(174): NCBI GI NO: 18414528 NR Description: expressed protein [Arabidopsis thaliana]
  misc_feature (69)..(172): NCBI GI NO: 28628203 NR Description: rapid alkalinization factor 1 precursor
  misc_feature (47)..(172): NCBI GI NO: 15218637 NR Description: expressed protein [Arabidopsis thaliana]
  misc_feature (58)..(172): NCBI GI NO: 34915066 NR Description: P0025H06.17
  misc_feature (117)..(174): NCBI GI NO: 30685837 NR Description: expressed protein [Arabidopsis thaliana]
NQESRVWAKRPQPVDRSRKIPAYQQQQQQAHPFDDMARLGAGAVLALLVAVAAVAAFLAVPASAKSGELSAMGLLAAKGGSGAGPQKCSGAVGECDVDEAEELGLSGGGLGSDDAVRRTLAQRKPTNRYISYAALRADQVPCNKRGRSYYSNCEAQKAANPYRRGCSAITRCARNMN

SEQ ID NO: 22065 - protein, 142 aa, Zea mays subsp. mays
  peptide (1)..(142): Ceres Seq. ID no. 13624433
  misc_feature (68)..(139): Pfam Name: RALF Pfam Description: Rapid ALkalinization Factor
  misc_feature (12)..(142): NCBI GI NO: 34903676 NR Description: B1015E06.23
  misc_feature (15)..(139): NCBI GI NO: 18397246 NR Description: expressed protein [Arabidopsis thaliana]
  misc_feature (14)..(137): NCBI GI NO: 34902918 NR Description: unnamed protein product
  misc_feature (5)..(140): NCBI GI NO: 18401177 NR Description: expressed protein [Arabidopsis thaliana]
  misc_feature (29)..(137): NCBI GI NO: 16566316 NR Description: RALF precursor [Nicotiana tabacum]
  misc_feature (52)..(139): NCBI GI NO: 18414528 NR Description: expressed protein [Arabidopsis thaliana]
  misc_feature (34)..(137): NCBI GI NO: 28628203 NR Description: rapid alkalinization factor 1 precursor
  misc_feature (12)..(137): NCBI GI NO: 15218637 NR Description: expressed protein [Arabidopsis thaliana]
  misc_feature (23)..(137): NCBI GI NO: 34915066 NR Description: P0025H06.17
  misc_feature (82)..(139): NCBI GI NO: 30685837 NR Description: expressed protein [Arabidopsis thaliana]
MARLGAGAVLALLVAVAAVAAFLAVPASAKSGELSAMGLLAAKGGSGAGPQKCSGAVGECDVDEAEELGLSGGGLGSDDAVRRTLAQRKPTNRYISYAALRADQVPCNKRGRSYYSNCEAQKAANPYRRGCSAITRCARNMN

SEQ ID NO: 22066 - DNA, 1092 bp, Zea mays subsp. mays
  misc_feature (1)..(1092): Ceres Seq. ID no. 13624427
atccacctcggctcactccactcactgcaccgagctcactggcaatggctaccagcaccaagctcgtggcccttggctttgccgtcctcctgagcatcggcttctccgatgcagcgagggtagttaggcttggtagccatgcgtctgcgggaggtggaggtggcggcgggggaggcggctccgggtcgactgggggtggctttggcggtgggtcgggcggtggcggtggttacggcataggtaagggtggcggggactggtggaacaatttcgtctctagtatagcaggtggtggaggaggaggacaaggcggaggcggtggcaccaatggtgggtccgggtccggcggtgggtccggttatggttctggcagcagctcgactgcagcctctggccccagcagtggcaactacgccgacgctgagggcaagggcgccggtggaggcatgggcggtggtgccaatggtgcatatggttctggtgctggtggaggcgttggcaagggcgagggtgtgagtggtgtggcactcgcaccatcgtccaacggctactacaatggcggtgccgccgatgctaccggtggcggttccggcgccggcggtggacatggtggtggcgcagccggagctccaagctatggaaccggaggcggcctcggcggaggcaagggtgaggccggcagcgatggatcgtgggggtcaggttatgctcagggaatcggtgctggcacaggcggcggtggcggcggcggatcccaaggcggctctggtggcggtggaggctctgggtccggatccggcagcggtggaatccactgagcttgcacttcagtagctagagcctagagccccgcattagtgtcagtccattctgtggttttttgctgtctttgttacgagaattaatcaggaataaagcgtaatgggcttcgtgattgtagttcgagtaggtagcaaagcatgcaactgatatgaatgcatgtaatggctatctacgagtgtgtgcccctagctgtaatctgtttctcatcgatcgttaaggtcgttgcatccggttttatttatcttctgaaaccaaaatacattggaactc

SEQ ID NO: 22067 - protein, 271 aa, Zea mays subsp. mays
  peptide (1)..(271): Ceres Seq. ID no. 13624428
  misc_feature (44)..(271): Pfam Name: Pfam Description:  S-antigen protein
  misc_feature (15)..(271): NCBI GI NO: 7442081 NR Description: glycine-rich protein grp3 - maize
  misc_feature (15)..(271): NCBI GI NO: 37534936 NR Description: putative glycine-rich protein
  misc_feature (19)..(268): NCBI GI NO: 37534924 NR Description: putative glycine-rich protein
  misc_feature (15)..(267): NCBI GI NO: 37534920 NR Description: putative glycine-rich protein
  misc_feature (44)..(269): NCBI GI NO: 34898126 NR Description: putative glycine-rich cell wall protein precursor
  misc_feature (43)..(269): NCBI GI NO: 72320 NR Description: glycine-rich cell wall protein precursor -Arabidopsis thaliana
  misc_feature (43)..(269): NCBI GI NO: 15228946 NR Description: glycine-rich protein [Arabidopsis thaliana]
  misc_feature (44)..(268): NCBI GI NO: 15234690 NR Description: hypothetical protein [Arabidopsis thaliana]
  misc_feature (43)..(269): NCBI GI NO: 7636182 NR Description: glycine-rich protein [Triticum aestivum]
  misc_feature (30)..(268): NCBI GI NO: 34898126 NR Description: putative glycine-rich cell wall protein precursor
PPRLTPLTAPSSLAMATSTKLVALGFAVLLSIGFSDAARVVRLGSHASAGGGGGGGGGGSGSTGGGFGGGSGGGGGYGIGKGGGDWWNNFVSSIAGGGGGGQGGGGGTNGGSGSGGGSGYGSGSSSTAASGPSSGNYADAEGKGAGGGMGGGANGAYGSGAGGGVGKGEGVSGVALAPSSNGYYNGGAADATGGGSGAGGGHGGGAAGAPSYGTGGGLGGGKGEAGSDGSWGSGYAQGIGAGTGGGGGGGSQGGSGGGGGSGSGSGSGGIH

SEQ ID NO: 22068 - protein, 257 aa, Zea mays subsp. mays
  peptide (1)..(257): Ceres Seq. ID no. 13624429
  misc_feature (30)..(257): Pfam Name: Pfam Description:  S-antigen protein
  misc_feature (1)..(257): NCBI GI NO: 7442081 NR Description: glycine-rich protein grp3 - maize
  misc_feature (1)..(257): NCBI GI NO: 37534936 NR Description: putative glycine-rich protein
  misc_feature (5)..(254): NCBI GI NO: 37534924 NR Description: putative glycine-rich protein
  misc_feature (1)..(253): NCBI GI NO: 37534920 NR Description: putative glycine-rich protein
  misc_feature (30)..(255): NCBI GI NO: 34898126 NR Description: putative glycine-rich cell wall protein precursor
  misc_feature (29)..(255): NCBI GI NO: 72320 NR Description: glycine-rich cell wall protein precursor -Arabidopsis thaliana
  misc_feature (29)..(255): NCBI GI NO: 15228946 NR Description: glycine-rich protein [Arabidopsis thaliana]
  misc_feature (30)..(254): NCBI GI NO: 15234690 NR Description: hypothetical protein [Arabidopsis thaliana]
  misc_feature (29)..(255): NCBI GI NO: 7636182 NR Description: glycine-rich protein [Triticum aestivum]
  misc_feature (16)..(254): NCBI GI NO: 34898126 NR Description: putative glycine-rich cell wall protein precursor
MATSTKLVALGFAVLLSIGFSDAARVVRLGSHASAGGGGGGGGGGSGSTGGGFGGGSGGGGGYGIGKGGGDWWNNFVSSIAGGGGGGQGGGGGTNGGSGSGGGSGYGSGSSSTAASGPSSGNYADAEGKGAGGGMGGGANGAYGSGAGGGVGKGEGVSGVALAPSSNGYYNGGAADATGGGSGAGGGHGGGAAGAPSYGTGGGLGGGKGEAGSDGSWGSGYAQGIGAGTGGGGGGGSQGGSGGGGGSGSGSGSGGIH

SEQ ID NO: 22069 - DNA, 1112 bp, Zea mays subsp. mays
  misc_feature (1)..(1112): Ceres Seq. ID no. 14301944
aaaaaaaccgcaacaaatcaaaacgagccgcaatcgcagcgcagaggcaaagccgtccatctctctcaacgccgccgccgccgccccgccccgccccagaccctaccctccacctccagtccctcgtcccagcgcgaccgattctcctcgatccagcactgatccggcggcttcccggcccggccatggatttgctggcgtccttggccgccgaggagcggtggctgttcccgttgttcctcgccatgtacgccgccatctactgcgtgggccagctcctcgtgttccggcggtgggcgccgcggcagcggctggacggcgccagctgcctgatctcgctcttccacggcacccccgcggcgctggccgccgcgggggccatcctcgcgctgcccgcggggtcccggtccttcgccgcgcccaacgcgcgcctccaggaccacgtcctcgactacagcgtcgcctacttcaccatggacctgctccactacctcgccttcctgcccggggacgtgctcttcatcgcgcaccacctggccacgctcttcgtcttcctcacctgccgctacctcgtccggcacggcgcatacgcgctcctcgtcctcctccttctcgccgaggttaccagcctgctgcagaacgtctggacgctcgcggggatctggcgggaccagtcccccgccgccgcgcgcgtctacggtgccctctcgccgcccttctacgcgctctacacgctcgtcaggggcgtcgccggcccgctcttcctcctcaagatggccgccttctacctgtccggccaggccgtcgacgtcatcccgtggtgggtgcggatctcctggatcctcgttgtcggcaccgccattgccgtcagcaacctgtggatttggaacctctggaaggagctcgtcagggaatggaagcaagccccttccaagtcaaagaaagacacataggctgccacctcattctaaccacagtaccgtaccatgtacgggtgtacgaaccatatgtagcttcttaatctttccaaatacatccgagccagatgatgcagactgatgatatgctaaaagccaatttccgttgacaattggtggaggatgcttatctgg

SEQ ID NO: 22070 - protein, 339 aa, Zea mays subsp. mays
  peptide (1)..(339): Ceres Seq. ID no. 14301945
  misc_feature (18)..(207): Pfam Name: Pfam Description:  Formin Homology 2 Domain
  misc_feature (24)..(66): NCBI GI NO: 7510074 NR Description: hypothetical protein Y50E8A
  misc_feature (25)..(304): NCBI GI NO: 29247944 NR Description: GLP_26_54603_52153 [Giardia lamblia ATCC 50803]
KKPQQIKTSRNRSAEAKPSISLNAAAAAPPRPRPYPPPPVPRPSATDSPRSSTDPAASRPGHGFAGVLGRRGAVAVPVVPRHVRRHLLRGPAPRVPAVGAAAAAGRRQLPDLALPRHPRGAGRRGGHPRAARGVPVLRRAQRAPPGPRPRLQRRLLHHGPAPLPRLPARGRALHRAPPGHALRLPHLPLPRPARRIRAPRPPPSRRGYQPAAERLDARGDLAGPVPRRRARLRCPLAALLRALHARQGRRRPALPPQDGRLLPVRPGRRRHPVVGADLLDPRCRHRHCRQQPVDLEPLEGARQGMEASPFQVKERHIGCHLILTTVPYHVRVYEPYVAS

SEQ ID NO: 22071 - protein, 316 aa, Zea mays subsp. mays
  peptide (1)..(316): Ceres Seq. ID no. 14301946
  misc_feature (77)..(306): NCBI GI NO: 15241364 NR Description: expressed protein [Arabidopsis thaliana]
  misc_feature (77)..(306): NCBI GI NO: 26450181 NR Description: unknown protein [Arabidopsis thaliana]
  misc_feature (76)..(304): NCBI GI NO: 15230950 NR Description: hypothetical protein [Arabidopsis thaliana]
  misc_feature (76)..(293): NCBI GI NO: 9279600 NR Description: gene_id:MPE11.12~unknown protein
  misc_feature (77)..(298): NCBI GI NO: 15232128 NR Description: expressed protein [Arabidopsis thaliana]
KNRNKSKRAAIAAQRQSRPSLSTPPPPPRPAPDPTLHLQSLVPARPILLDPALIRRLPGPAMDLLASLAAEERWLFPLFLAMYAAIYCVGQLLVFRRWAPRQRLDGASCLISLFHGTPAALAAAGAILALPAGSRSFAAPNARLQDHVLDYSVAYFTMDLLHYLAFLPGDVLFIAHHLATLFVFLTCRYLVRHGAYALLVLLLLAEVTSLLQNVWTLAGIWRDQSPAAARVYGALSPPFYALYTLVRGVAGPLFLLKMAAFYLSGQAVDVIPWWVRISWILVVGTAIAVSNLWIWNLWKELVREWKQAPSKSKKDT

SEQ ID NO: 22072 - protein, 255 aa, Zea mays subsp. mays
  peptide (1)..(255): Ceres Seq. ID no. 14301947
  misc_feature (16)..(245): NCBI GI NO: 15241364 NR Description: expressed protein [Arabidopsis thaliana]
  misc_feature (16)..(245): NCBI GI NO: 26450181 NR Description: unknown protein [Arabidopsis thaliana]
  misc_feature (15)..(243): NCBI GI NO: 15230950 NR Description: hypothetical protein [Arabidopsis thaliana]
  misc_feature (15)..(232): NCBI GI NO: 9279600 NR Description: gene_id:MPE11.12~unknown protein
  misc_feature (16)..(237): NCBI GI NO: 15232128 NR Description: expressed protein [Arabidopsis thaliana]
MDLLASLAAEERWLFPLFLAMYAAIYCVGQLLVFRRWAPRQRLDGASCLISLFHGTPAALAAAGAILALPAGSRSFAAPNARLQDHVLDYSVAYFTMDLLHYLAFLPGDVLFIAHHLATLFVFLTCRYLVRHGAYALLVLLLLAEVTSLLQNVWTLAGIWRDQSPAAARVYGALSPPFYALYTLVRGVAGPLFLLKMAAFYLSGQAVDVIPWWVRISWILVVGTAIAVSNLWIWNLWKELVREWKQAPSKSKKDT

SEQ ID NO: 22073 - DNA, 825 bp, Zea mays subsp. mays
  misc_feature (1)..(825): Ceres Seq. ID no. 14305247
aatcttatcctcttctcattctcctttctccctcttgtgtcttccaccaggaacaagccgccgccgcacgcctccgcttgctcccacccgcgcccgccggtgcacccgccccggccccgcccgtcgcggctgcccccaccccgcccgcccctaccaccggcgcggccgcctccggccccggccccaaacgctgcacccaacagccccagccgtcccactcccagggtccatctcagtcgccgtcgcagaccacgcagcaggcgtcaccccagcagcagcaggtggcggcggtggcagcggcataggcacaagcacagacccaggcggcatgggtacgaagccccgagatggagatggcgctgcaggacgccatgcgggtctgcaatccggacgtcaatacgcccttccagtccatcgaggacgctgtcaacaggctgcatatggcgaggcgatgtctagtcagcacggaccatactatgactagaggacctcacctattgatccccaggctgtgtatgcaagtggtgggaaaagctcatggaaggtacacaatgtttgctaacgtcatcgacttgagccaggtgagggttcagcgtggaggtttgtcgaggtctgctgctagtagctcccgtcgctccactcaagatccagcaaaagtggagcaactgcgcgaagaacttaggcgaaatcctcttcgctagtggaggtatcgaccatcactcgtcactgtaacccgatggtgatcgacgaccatgagcttccatgttattgtgttctgatacttgagaattttattatgagtatgatgatgagatgtgtcttatc

SEQ ID NO: 22074 - protein, 160 aa, Zea mays subsp. mays
  peptide (1)..(160): Ceres Seq. ID no. 14305248
ILSSSHSPFSLLCLPPGTSRRRTPPLAPTRARRCTRPGPARRGCPHPARPYHRRGRLRPRPQTLHPTAPAVPLPGSISVAVADHAAGVTPAAAGGGGGSGIGTSTDPGGMGTKPRDGDGAAGRHAGLQSGRQYALPVHRGRCQQAAYGEAMSSQHGPYYD

SEQ ID NO: 22075 - protein, 152 aa, Zea mays subsp. mays
  peptide (1)..(152): Ceres Seq. ID no. 14305249
  misc_feature (15)..(75): Pfam Name: Pfam Description:  Transferrin binding protein-like solute binding protein
  misc_feature (20)..(74): NCBI GI NO: 38344072 NR Description: OSJNBa0006B20.16
  misc_feature (20)..(74): NCBI GI NO: 539030 NR Description: cysteine-rich extensin-like protein 2 precursor -common tobacco
  misc_feature (20)..(105): NCBI GI NO: 141279 NR Description: HYPOTHETICAL PROLINE-RICH PROTEIN
  misc_feature (10)..(117): NCBI GI NO: 8650496 NR Description: 163R* [porcine adenovirus 3]
  misc_feature (19)..(74): NCBI GI NO: 19919 NR Description: Pistil extensin like protein, partial CDS only
  misc_feature (20)..(75): NCBI GI NO: 19919 NR Description: Pistil extensin like protein, partial CDS only
  misc_feature (20)..(91): NCBI GI NO: 11068076 NR Description: PxORF73 peptide [Plutella xylostella granulovirus]
  misc_feature (19)..(145): NCBI GI NO: 6649859 NR Description: kexin-like serine endoprotease
  misc_feature (20)..(93): NCBI GI NO: 6523547 NR Description: hydroxyproline-rich glycoprotein DZ-HRGP
  misc_feature (20)..(108): NCBI GI NO: 29833843 NR Description: putative proline-rich protein
NLILFSFSFLPLVSSTRNKPPPHASACSHPRPPVHPPRPRPSRLPPPRPPLPPARPPPAPAPNAAPNSPSRPTPRVHLSRRRRPRSRRHPSSSRWRRWQRHRHKHRPRRHGYEAPRWRWRCRTPCGSAIRTSIRPSSPSRTLSTGCIWRGDV

SEQ ID NO: 22076 - protein, 117 aa, Zea mays subsp. mays
  peptide (1)..(117): Ceres Seq. ID no. 14305250
MEMALQDAMRVCNPDVNTPFQSIEDAVNRLHMARRCLVSTDHTMTRGPHLLIPRLCMQVVGKAHGRYTMFANVIDLSQVRVQRGGLSRSAASSSRRSTQDPAKVEQLREELRRNPLR

SEQ ID NO: 22077 - DNA, 628 bp, Zea mays subsp. mays
  misc_feature (1)..(628): Ceres Seq. ID no. 14302584
ccacacacacgcatccatcaaagaaacaagagcacacaaacaatacctctctagctcgccaccaacaatggcctctaggttctccatcatgctcgccacaacggcactggctacgttttttgtgattggttcgtgcaccaccccgctcaccttcaaggtcggcaaaggctccaagcctggccacctggtcctcacccccaacattgccaccatctccgaagtggagatcaaggagcacggtggcgatgacttctcctttgagctcaaggagggcccggccggcacctggacgcttgacacaaaggccccactcaagtaccccctctgcatccgctttgccatcaagtctggcggctaccgcatcgccgatgatgtcatccctgaaaattttaaggccgacaccacctacaagaccaccctcagcatctgatcatcctcttatgaggaataatattttgaaagagctcatctgatccatgtgccagcgagctaatatttaatttttgttctatggttattttatggcaccacaccacccaagaaataagttatgttacatgtcccttcgtgcaccttgttgtgttgggttaatacggttatataaattgaaatacaatatgtatttaat

SEQ ID NO: 22078 - protein, 142 aa, Zea mays subsp. mays
  peptide (1)..(142): Ceres Seq. ID no. 14302585
  misc_feature (49)..(127): Pfam Name: Pfam Description:  Pollen allergen
  misc_feature (23)..(142): NCBI GI NO: 33188338 NR Description: group 3 pollen allergen [Zea mays]
  misc_feature (23)..(142): NCBI GI NO: 38345096 NR Description: OSJNBa0050F15.7
  misc_feature (23)..(142): NCBI GI NO: 32489538 NR Description: OSJNBa0063G07.3
  misc_feature (23)..(142): NCBI GI NO: 38345097 NR Description: OSJNBa0050F15.8
  misc_feature (23)..(142): NCBI GI NO: 21740569 NR Description: OSJNBa0050F15.10
  misc_feature (23)..(142): NCBI GI NO: 32489537 NR Description: OSJNBa0063G07.2
  misc_feature (22)..(136): NCBI GI NO: 4006978 NR Description: pollen allergen (group II) [Cynodon dactylon]
  misc_feature (22)..(136): NCBI GI NO: 4007040 NR Description: pollen allergen (group II) [Dactylis glomerata]
  misc_feature (24)..(136): NCBI GI NO: 1171009 NR Description: Pollen allergen Phl p 2 precursor (Phl p II)
  misc_feature (47)..(140): NCBI GI NO: 10314021 NR Description: acidic Cyn d 1 isoallergen isoform 1 precursor
HTHASIKETRAHKQYLSSSPPTMASRFSIMLATTALATFFVIGSCTTPLTFKVGKGSKPGHLVLTPNIATISEVEIKEHGGDDFSFELKEGPAGTWTLDTKAPLKYPLCIRFAIKSGGYRIADDVIPENFKADTTYKTTLSI

SEQ ID NO: 22079 - protein, 120 aa, Zea mays subsp. mays
  peptide (1)..(120): Ceres Seq. ID no. 14302586
  misc_feature (27)..(105): Pfam Name: Pfam Description:  Pollen allergen
  misc_feature (1)..(120): NCBI GI NO: 33188338 NR Description: group 3 pollen allergen [Zea mays]
  misc_feature (1)..(120): NCBI GI NO: 38345096 NR Description: OSJNBa0050F15.7
  misc_feature (1)..(120): NCBI GI NO: 32489538 NR Description: OSJNBa0063G07.3
  misc_feature (1)..(120): NCBI GI NO: 38345097 NR Description: OSJNBa0050F15.8
  misc_feature (1)..(120): NCBI GI NO: 21740569 NR Description: OSJNBa0050F15.10
  misc_feature (1)..(120): NCBI GI NO: 32489537 NR Description: OSJNBa0063G07.2
  misc_feature (1)..(114): NCBI GI NO: 4006978 NR Description: pollen allergen (group II) [Cynodon dactylon]
  misc_feature (1)..(114): NCBI GI NO: 4007040 NR Description: pollen allergen (group II) [Dactylis glomerata]
  misc_feature (2)..(114): NCBI GI NO: 1171009 NR Description: Pollen allergen Phl p 2 precursor (Phl p II)
  misc_feature (25)..(118): NCBI GI NO: 10314021 NR Description: acidic Cyn d 1 isoallergen isoform 1 precursor
MASRFSIMLATTALATFFVIGSCTTPLTFKVGKGSKPGHLVLTPNIATISEVEIKEHGGDDFSFELKEGPAGTWTLDTKAPLKYPLCIRFAIKSGGYRIADDVIPENFKADTTYKTTLSI

SEQ ID NO: 22080 - protein, 113 aa, Zea mays subsp. mays
  peptide (1)..(113): Ceres Seq. ID no. 14302587
  misc_feature (20)..(98): Pfam Name: Pfam Description:  Pollen allergen
  misc_feature (1)..(113): NCBI GI NO: 33188338 NR Description: group 3 pollen allergen [Zea mays]
  misc_feature (1)..(113): NCBI GI NO: 38345096 NR Description: OSJNBa0050F15.7
  misc_feature (1)..(113): NCBI GI NO: 32489538 NR Description: OSJNBa0063G07.3
  misc_feature (1)..(113): NCBI GI NO: 38345097 NR Description: OSJNBa0050F15.8
  misc_feature (1)..(113): NCBI GI NO: 21740569 NR Description: OSJNBa0050F15.10
  misc_feature (1)..(113): NCBI GI NO: 32489537 NR Description: OSJNBa0063G07.2
  misc_feature (1)..(107): NCBI GI NO: 4006978 NR Description: pollen allergen (group II) [Cynodon dactylon]
  misc_feature (1)..(107): NCBI GI NO: 4007040 NR Description: pollen allergen (group II) [Dactylis glomerata]
  misc_feature (1)..(107): NCBI GI NO: 1171009 NR Description: Pollen allergen Phl p 2 precursor (Phl p II)
  misc_feature (18)..(111): NCBI GI NO: 10314021 NR Description: acidic Cyn d 1 isoallergen isoform 1 precursor
MLATTALATFFVIGSCTTPLTFKVGKGSKPGHLVLTPNIATISEVEIKEHGGDDFSFELKEGPAGTWTLDTKAPLKYPLCIRFAIKSGGYRIADDVIPENFKADTTYKTTLSI

SEQ ID NO: 22081 - DNA, 2788 bp, Zea mays subsp. mays
  misc_feature (1)..(2788): Ceres Seq. ID no. 15180188
caacaagggagaaggggaaaccaccaccaccaccacacttgataagaagggggccgcacgcgcctgcccgctcccgccgctacgccatggacgcctgggaggccaccaaggcggtgttcgaccgggtgcgggcgctggacccggacaacgcgtccaagatcatgggcctgctgctcatccaggacaacagcgacaaggagctcatccgcctcgccttcggccccgaccacctcctccacgccttcgtctccgccgcgcgcgccgacctcgccgccaagcccgcgtccccgccgtcgcccgtgctgggcccgctccaccagacctggggagcgccgccgcacccgagccctaccgctggctccgaccaccaacaccaggcccccttcgccgccgacctcgcgctcggctacgacttcgacggcgccggcgccggcgctgacgcgttcttccccgacgactacgactgctggtcaccggccggcgccgcccaccgccgcagcttctcgctcagcgacgccgaggccaccgccgccgccgccggaggcgctgcgtggaggccatgcatgtacttcgcgcgcgggttctgcaagaacggctcctcctgccgcttcctccacggctttccggaggacgatgacgccgccgcggagcgcgagatggtcgtcatgcgcgccaaagcccttgccgccgccgccgcgcgcccccagcagcagcagcagctcatggcgtccgcgtttcccttctcgccgtcgccgcccaagggcgtcaacctcaacttcctgctccaccagcaccagcagcagaacgagccgcaaagggcggcggcggcggcggccatgctgctccagggcggcgacgacatgcacagcaggttcccggtgcggtcgccccggatggaccgcggcgagctcatgtccagccccgccgcgcggcagatctacctcaccttcccggccgactccaccttcagcgaggaggacgtctccatctacttcagcatgtacgggccggtgcaggacgtgcgcatcccgtaccagcagaagcgcatgttcggcttcgtcaccttcgtctacgccgagacggtgaagatcatcctcagcaagggcaacccgcacttcgtttgcgacgctcgcgtgctcgtcaagccctacaaggagaagggcaaggtccccgacaggttcaggaagctgcagcacccgcaccacggcgacttcgccggctgcacgtcgcccaccggactgctggattccagggaccccttcgacctgcagcaaccgcagattggacctaggatgatgtacgggaacgttgctggccacgaagcattcctgaggaggaaactggaagagcagcagcaggcggccgagctgcagcaggccatcgagctggaggggcgccgcttcatggtgctgcacctcctcgacctcaagagcaggggccaccaccacctcggctcctcccccgcggccatggccaccaccactctggggcaaggcgacgacggctgcaaaggccgcagcgccaacgggaatgacaatgccgtcgccttccatttggaggatgccaacatccaagatactcctaccaagatgaacagtaacagccttgcaatgagtggtgggcctgcagccggtgcaggaggcgagcacgaggagcagcagcaggatggggacggggatggcagtcccaagcaggcagtcaaccctgggaaagaggagaagacggaatctggtcctgtcacagccacgcccattgttgcctgtggattccaagaaagtggcgtggtggagcacatcttgcctgacagcccctttgcgtcccccagcaaggcctccactcaaaatgggagcatcatcagcaatgcgggttggtccctcttccccccgcctgcatccaccatggagctgcccccgtacagctcttgcttcttccaggcgcccaggttttctcctgggcatgaagccattgggctgtgaatacagagcaaggggagggagggggtctactttcctctaatctgtgaggactatcggtgaccccgtcaagtggaggcaagagttaggaagctttgattaacaaatactaggtgtatgttcagagagagggacagcaacaacatcaaccaaaaagagagagagagagacaaagacaagtctaggttgttttagctctaggccctaagtatatgatgatagcagtcgtataaataacagtgttttagtaagtatctcctgccgggtatgaagactcaagaacaaaggtcagatctcgcgtatgctcgtttgtagcagtgtggatctgatacaggtaattgaaacctttagatggtggtagggctagtagtgagcagtagacgacaactagtcctggcagccagttgtagtgaggtgacatggctgcatacagacatccaaccaaaggaaacagagggtgtggtgtggaaagaaggggagagtggacaaaagccagacatggctggcgctgctgctgcataggcacaggcacaggcacagggaaaggtgatgagacgagaggggtggggtggtactctgctgggaccggcgcactcacgggtgcggagaatcagcttcgcctcacgagcgatgcagcagcggagacacagacacctctcgtctgcgtactgtttcgcccatgctcttgtcttgtacgcatgcagcagcgctccttgtcctttggctccatcgatgtattacctggctcttcttttcaactaggagtttagcggacaaagaaatgaaaaagtaattagcagtcatttatcttggtc

SEQ ID NO: 22082 - protein, 657 aa, Zea mays subsp. mays
  peptide (1)..(657): Ceres Seq. ID no. 15180189
  misc_feature (324)..(380): Pfam Name: a.k.a. RRM, RBD, or RNP domain Pfam Description: RNA recognition motif.
  misc_feature (91)..(607): NCBI GI NO: 33146675 NR Description: putative DAZ associated protein 1
  misc_feature (29)..(97): NCBI GI NO: 33146675 NR Description: putative DAZ associated protein 1
  misc_feature (142)..(657): NCBI GI NO: 38230504 NR Description: predicted protein [Populus alba x Populus tremula]
  misc_feature (29)..(107): NCBI GI NO: 38230504 NR Description: predicted protein [Populus alba x Populus tremula]
  misc_feature (223)..(562): NCBI GI NO: 21594547 NR Description: unknown [Arabidopsis thaliana]
  misc_feature (29)..(257): NCBI GI NO: 21594547 NR Description: unknown [Arabidopsis thaliana]
  misc_feature (223)..(562): NCBI GI NO: 15231090 NR Description: RNA recognition motif (RRM)-containing protein
  misc_feature (29)..(257): NCBI GI NO: 15231090 NR Description: RNA recognition motif (RRM)-containing protein
  misc_feature (223)..(562): NCBI GI NO: 19423979 NR Description: unknown protein [Arabidopsis thaliana]
  misc_feature (29)..(257): NCBI GI NO: 19423979 NR Description: unknown protein [Arabidopsis thaliana]
TREKGKPPPPPHLIRRGPHAPARSRRYAMDAWEATKAVFDRVRALDPDNASKIMGLLLIQDNSDKELIRLAFGPDHLLHAFVSAARADLAAKPASPPSPVLGPLHQTWGAPPHPSPTAGSDHQHQAPFAADLALGYDFDGAGAGADAFFPDDYDCWSPAGAAHRRSFSLSDAEATAAAAGGAAWRPCMYFARGFCKNGSSCRFLHGFPEDDDAAAEREMVVMRAKALAAAAARPQQQQQLMASAFPFSPSPPKGVNLNFLLHQHQQQNEPQRAAAAAAMLLQGGDDMHSRFPVRSPRMDRGELMSSPAARQIYLTFPADSTFSEEDVSIYFSMYGPVQDVRIPYQQKRMFGFVTFVYAETVKIILSKGNPHFVCDARVLVKPYKEKGKVPDRFRKLQHPHHGDFAGCTSPTGLLDSRDPFDLQQPQIGPRMMYGNVAGHEAFLRRKLEEQQQAAELQQAIELEGRRFMVLHLLDLKSRGHHHLGSSPAAMATTTLGQGDDGCKGRSANGNDNAVAFHLEDANIQDTPTKMNSNSLAMSGGPAAGAGGEHEEQQQDGDGDGSPKQAVNPGKEEKTESGPVTATPIVACGFQESGVVEHILPDSPFASPSKASTQNGSIISNAGWSLFPPPASTMELPPYSSCFFQAPRFSPGHEAIGL

SEQ ID NO: 22083 - protein, 629 aa, Zea mays subsp. mays
  peptide (1)..(629): Ceres Seq. ID no. 15180190
  misc_feature (296)..(352): Pfam Name: a.k.a. RRM, RBD, or RNP domain Pfam Description: RNA recognition motif.
  misc_feature (63)..(579): NCBI GI NO: 33146675 NR Description: putative DAZ associated protein 1
  misc_feature (1)..(69): NCBI GI NO: 33146675 NR Description: putative DAZ associated protein 1
  misc_feature (114)..(629): NCBI GI NO: 38230504 NR Description: predicted protein [Populus alba x Populus tremula]
  misc_feature (1)..(79): NCBI GI NO: 38230504 NR Description: predicted protein [Populus alba x Populus tremula]
  misc_feature (195)..(534): NCBI GI NO: 21594547 NR Description: unknown [Arabidopsis thaliana]
  misc_feature (1)..(229): NCBI GI NO: 21594547 NR Description: unknown [Arabidopsis thaliana]
  misc_feature (195)..(534): NCBI GI NO: 15231090 NR Description: RNA recognition motif (RRM)-containing protein
  misc_feature (1)..(229): NCBI GI NO: 15231090 NR Description: RNA recognition motif (RRM)-containing protein
  misc_feature (195)..(534): NCBI GI NO: 19423979 NR Description: unknown protein [Arabidopsis thaliana]
  misc_feature (1)..(229): NCBI GI NO: 19423979 NR Description: unknown protein [Arabidopsis thaliana]
MDAWEATKAVFDRVRALDPDNASKIMGLLLIQDNSDKELIRLAFGPDHLLHAFVSAARADLAAKPASPPSPVLGPLHQTWGAPPHPSPTAGSDHQHQAPFAADLALGYDFDGAGAGADAFFPDDYDCWSPAGAAHRRSFSLSDAEATAAAAGGAAWRPCMYFARGFCKNGSSCRFLHGFPEDDDAAAEREMVVMRAKALAAAAARPQQQQQLMASAFPFSPSPPKGVNLNFLLHQHQQQNEPQRAAAAAAMLLQGGDDMHSRFPVRSPRMDRGELMSSPAARQIYLTFPADSTFSEEDVSIYFSMYGPVQDVRIPYQQKRMFGFVTFVYAETVKIILSKGNPHFVCDARVLVKPYKEKGKVPDRFRKLQHPHHGDFAGCTSPTGLLDSRDPFDLQQPQIGPRMMYGNVAGHEAFLRRKLEEQQQAAELQQAIELEGRRFMVLHLLDLKSRGHHHLGSSPAAMATTTLGQGDDGCKGRSANGNDNAVAFHLEDANIQDTPTKMNSNSLAMSGGPAAGAGGEHEEQQQDGDGDGSPKQAVNPGKEEKTESGPVTATPIVACGFQESGVVEHILPDSPFASPSKASTQNGSIISNAGWSLFPPPASTMELPPYSSCFFQAPRFSPGHEAIGL

SEQ ID NO: 22084 - protein, 604 aa, Zea mays subsp. mays
  peptide (1)..(604): Ceres Seq. ID no. 15180191
  misc_feature (271)..(327): Pfam Name: a.k.a. RRM, RBD, or RNP domain Pfam Description: RNA recognition motif.
  misc_feature (38)..(554): NCBI GI NO: 33146675 NR Description: putative DAZ associated protein 1
  misc_feature (1)..(44): NCBI GI NO: 33146675 NR Description: putative DAZ associated protein 1
  misc_feature (89)..(604): NCBI GI NO: 38230504 NR Description: predicted protein [Populus alba x Populus tremula]
  misc_feature (1)..(54): NCBI GI NO: 38230504 NR Description: predicted protein [Populus alba x Populus tremula]
  misc_feature (170)..(509): NCBI GI NO: 21594547 NR Description: unknown [Arabidopsis thaliana]
  misc_feature (1)..(204): NCBI GI NO: 21594547 NR Description: unknown [Arabidopsis thaliana]
  misc_feature (170)..(509): NCBI GI NO: 15231090 NR Description: RNA recognition motif (RRM)-containing protein
  misc_feature (1)..(204): NCBI GI NO: 15231090 NR Description: RNA recognition motif (RRM)-containing protein
  misc_feature (170)..(509): NCBI GI NO: 19423979 NR Description: unknown protein [Arabidopsis thaliana]
  misc_feature (1)..(204): NCBI GI NO: 19423979 NR Description: unknown protein [Arabidopsis thaliana]
MGLLLIQDNSDKELIRLAFGPDHLLHAFVSAARADLAAKPASPPSPVLGPLHQTWGAPPHPSPTAGSDHQHQAPFAADLALGYDFDGAGAGADAFFPDDYDCWSPAGAAHRRSFSLSDAEATAAAAGGAAWRPCMYFARGFCKNGSSCRFLHGFPEDDDAAAEREMVVMRAKALAAAAARPQQQQQLMASAFPFSPSPPKGVNLNFLLHQHQQQNEPQRAAAAAAMLLQGGDDMHSRFPVRSPRMDRGELMSSPAARQIYLTFPADSTFSEEDVSIYFSMYGPVQDVRIPYQQKRMFGFVTFVYAETVKIILSKGNPHFVCDARVLVKPYKEKGKVPDRFRKLQHPHHGDFAGCTSPTGLLDSRDPFDLQQPQIGPRMMYGNVAGHEAFLRRKLEEQQQAAELQQAIELEGRRFMVLHLLDLKSRGHHHLGSSPAAMATTTLGQGDDGCKGRSANGNDNAVAFHLEDANIQDTPTKMNSNSLAMSGGPAAGAGGEHEEQQQDGDGDGSPKQAVNPGKEEKTESGPVTATPIVACGFQESGVVEHILPDSPFASPSKASTQNGSIISNAGWSLFPPPASTMELPPYSSCFFQAPRFSPGHEAIGL

SEQ ID NO: 22085 - DNA, 1789 bp, Zea mays subsp. mays
  misc_feature (1)..(1789): Ceres Seq. ID no. 14303249
atctagggctattagaaaacgtgcaaggcttctttcctcccaaatcccctgagcaaggcccccgtcggctagcgccgcagccgtcgccgtcgacgccgactctcaccggcagccgcttgcagcgcgtcccttccccgctcccggcgccatggactgcgcaaagggaaggtcgatggcggacctctacgacgagctgatgttggagatcttctcgcgcatgcccgtcaaagacctccgccattccacttacgtgtgcaaatcttggcgcaacctcatcaccgaccccctcaacggcaagaagctgccccagaccctggaaggcttcttccacggcggcgtcggagggcctcgcagctacggccatttcaccagcctgccggggagcggagtgcctccggtcgacccttccttctcttttatcaaggcaatggtgcctggggtcgagcgcatggtcctcttggattcttgcaacgggctcctgctctttgggtgcacgcgggagggcaagttcgggtacatcgtgtcaaaccctgcgaccaagaaattggtgactgtgcccgccagctccggctcttgtccgcctccacctttatttgcatttgaagcggaagtcgattatgatagtggggaaaaatatgcacacacctttctgatgtttaacccggctgtctcctcgcacttccacttgttccagatctggcaggatatgacggtggaggatgtggaaacggtgcactcttactcgtctgaaacgaaggcatggagtgacaggtcaagcaagtggcggcgaggtgaagagggcagtgaatgggggctgtggggtgaatgcctcatcaaattcaggatgggcagggctttgatcaacgatctgctgcattttgttggcttcgattctcagaaacaagaggatgtgatagttgcagtggatggggaagggaagacttgtaggatcatcgactggcatggtaaggatgtgagattaatcatttttattggtcaatcccaagaccgtctgcactgcatcggtgtcaatacgaaagcaggtcaagaccatatacacatcacgcggatgtcaatctgggttcttgaggactatgatacaaaagcatggatcctgaagcacagtgtgggctctttgcagttttttggattactgggtcgcctggtccatgatttcaatattgtggccattcatccagatcacaattctatcatcattgttcagcactggaaccagaaacttgtatcatataacatggatacccaggaactgcgtggtctccgcactcttgaaaatggctgtgcctatgtggctattaccccatacgttccctgtttcttggagtcatcagttcttgccaccaaaggttgaggttgttgctttttggagacttctctgcatgttcagcaatagcttgatcatccaagtgtggggcaaactagcagtgtgggtaaacctactagaatcaggtggtgcaaagttggattacatgtctttaggtgatctattctgatggtgctttaatgtcctcttgtaatgctgtgagaaagctctttacaagacagcatgcaggttagcattacatattactagttcgagctgcccaacacatgtaagttctcagttttgagtttcagatgctacactttgtgtttccagaatgatgtctccatcttttttgtgtgcttcctttttctcggcctatattagcgagccattactgactgaatttgtgcttggtcggtgctgtatatgtattttatgctgggaaatgcatttatcttcccc

SEQ ID NO: 22086 - protein, 407 aa, Zea mays subsp. mays
  peptide (1)..(407): Ceres Seq. ID no. 14303250
  misc_feature (10)..(54): Pfam Name: Pfam Description:  F-box domain
  misc_feature (2)..(212): NCBI GI NO: 34898788 NR Description: OJ1131_E05.20
  misc_feature (189)..(400): NCBI GI NO: 34898788 NR Description: OJ1131_E05.20
  misc_feature (2)..(212): NCBI GI NO: 34898790 NR Description: OJ1131_E05.21
  misc_feature (189)..(400): NCBI GI NO: 34898790 NR Description: OJ1131_E05.21
  misc_feature (190)..(400): NCBI GI NO: 34898802 NR Description: OJ1131_E05.28
  misc_feature (39)..(212): NCBI GI NO: 34898802 NR Description: OJ1131_E05.28
  misc_feature (190)..(400): NCBI GI NO: 33146479 NR Description: receptor-like kinase-like
  misc_feature (39)..(212): NCBI GI NO: 33146479 NR Description: receptor-like kinase-like
  misc_feature (189)..(401): NCBI GI NO: 34898796 NR Description: OJ1131_E05.24
  misc_feature (15)..(186): NCBI GI NO: 34898796 NR Description: OJ1131_E05.24
MDCAKGRSMADLYDELMLEIFSRMPVKDLRHSTYVCKSWRNLITDPLNGKKLPQTLEGFFHGGVGGPRSYGHFTSLPGSGVPPVDPSFSFIKAMVPGVERMVLLDSCNGLLLFGCTREGKFGYIVSNPATKKLVTVPASSGSCPPPPLFAFEAEVDYDSGEKYAHTFLMFNPAVSSHFHLFQIWQDMTVEDVETVHSYSSETKAWSDRSSKWRRGEEGSEWGLWGECLIKFRMGRALINDLLHFVGFDSQKQEDVIVAVDGEGKTCRIIDWHGKDVRLIIFIGQSQDRLHCIGVNTKAGQDHIHITRMSIWVLEDYDTKAWILKHSVGSLQFFGLLGRLVHDFNIVAIHPDHNSIIIVQHWNQKLVSYNMDTQELRGLRTLENGCAYVAITPYVPCFLESSVLATKG

SEQ ID NO: 22087 - protein, 399 aa, Zea mays subsp. mays
  peptide (1)..(399): Ceres Seq. ID no. 14303251
  misc_feature (2)..(46): Pfam Name: Pfam Description:  F-box domain
  misc_feature (1)..(204): NCBI GI NO: 34898788 NR Description: OJ1131_E05.20
  misc_feature (181)..(392): NCBI GI NO: 34898788 NR Description: OJ1131_E05.20
  misc_feature (1)..(204): NCBI GI NO: 34898790 NR Description: OJ1131_E05.21
  misc_feature (181)..(392): NCBI GI NO: 34898790 NR Description: OJ1131_E05.21
  misc_feature (182)..(392): NCBI GI NO: 34898802 NR Description: OJ1131_E05.28
  misc_feature (31)..(204): NCBI GI NO: 34898802 NR Description: OJ1131_E05.28
  misc_feature (182)..(392): NCBI GI NO: 33146479 NR Description: receptor-like kinase-like
  misc_feature (31)..(204): NCBI GI NO: 33146479 NR Description: receptor-like kinase-like
  misc_feature (181)..(393): NCBI GI NO: 34898796 NR Description: OJ1131_E05.24
  misc_feature (7)..(178): NCBI GI NO: 34898796 NR Description: OJ1131_E05.24
MADLYDELMLEIFSRMPVKDLRHSTYVCKSWRNLITDPLNGKKLPQTLEGFFHGGVGGPRSYGHFTSLPGSGVPPVDPSFSFIKAMVPGVERMVLLDSCNGLLLFGCTREGKFGYIVSNPATKKLVTVPASSGSCPPPPLFAFEAEVDYDSGEKYAHTFLMFNPAVSSHFHLFQIWQDMTVEDVETVHSYSSETKAWSDRSSKWRRGEEGSEWGLWGECLIKFRMGRALINDLLHFVGFDSQKQEDVIVAVDGEGKTCRIIDWHGKDVRLIIFIGQSQDRLHCIGVNTKAGQDHIHITRMSIWVLEDYDTKAWILKHSVGSLQFFGLLGRLVHDFNIVAIHPDHNSIIIVQHWNQKLVSYNMDTQELRGLRTLENGCAYVAITPYVPCFLESSVLATKG

SEQ ID NO: 22088 - protein, 391 aa, Zea mays subsp. mays
  peptide (1)..(391): Ceres Seq. ID no. 14303252
  misc_feature (1)..(38): Pfam Name: Pfam Description:  F-box domain
  misc_feature (1)..(196): NCBI GI NO: 34898788 NR Description: OJ1131_E05.20
  misc_feature (173)..(384): NCBI GI NO: 34898788 NR Description: OJ1131_E05.20
  misc_feature (1)..(196): NCBI GI NO: 34898790 NR Description: OJ1131_E05.21
  misc_feature (173)..(384): NCBI GI NO: 34898790 NR Description: OJ1131_E05.21
  misc_feature (174)..(384): NCBI GI NO: 34898802 NR Description: OJ1131_E05.28
  misc_feature (23)..(196): NCBI GI NO: 34898802 NR Description: OJ1131_E05.28
  misc_feature (174)..(384): NCBI GI NO: 33146479 NR Description: receptor-like kinase-like
  misc_feature (23)..(196): NCBI GI NO: 33146479 NR Description: receptor-like kinase-like
  misc_feature (173)..(385): NCBI GI NO: 34898796 NR Description: OJ1131_E05.24
  misc_feature (1)..(170): NCBI GI NO: 34898796 NR Description: OJ1131_E05.24
MLEIFSRMPVKDLRHSTYVCKSWRNLITDPLNGKKLPQTLEGFFHGGVGGPRSYGHFTSLPGSGVPPVDPSFSFIKAMVPGVERMVLLDSCNGLLLFGCTREGKFGYIVSNPATKKLVTVPASSGSCPPPPLFAFEAEVDYDSGEKYAHTFLMFNPAVSSHFHLFQIWQDMTVEDVETVHSYSSETKAWSDRSSKWRRGEEGSEWGLWGECLIKFRMGRALINDLLHFVGFDSQKQEDVIVAVDGEGKTCRIIDWHGKDVRLIIFIGQSQDRLHCIGVNTKAGQDHIHITRMSIWVLEDYDTKAWILKHSVGSLQFFGLLGRLVHDFNIVAIHPDHNSIIIVQHWNQKLVSYNMDTQELRGLRTLENGCAYVAITPYVPCFLESSVLATKG

SEQ ID NO: 22089 - DNA, 1073 bp, Zea mays subsp. mays
  misc_feature (1)..(1073): Ceres Seq. ID no. 13622757
aaagttgtggctgcgacacaaacactgcgccatcacatacacataccatctctccaccatcctctgtccagacgaccagaccaaattaaaaggagaagcaaacagagatctggcaatctgggtgggggtgggcggcgagagagcaggaggagaagaccattgccccttgaaggcgggctccagagcgagcttctccgcgcgccctctctgtttgccttgcctgcttgcctctactcgtccggcccagccatggccaccatcctggagaccatccagaaggcgaggctcctgccgcccaggccgctcaaggacgagctgccaaccttcggcggcggcggcagagaggagagccacctcacgggcctgcggaagcggctgtccgccttctccggcaagatccagcccatctcctccgcgtcggccgagtgggcgttccgccggcgctcccggccggcgccctccctcggcgcgggaggcggcggctccctgaggcagtggtggcggcggggcgtcgtcggctggctcctgtcccggaagccggggttcgcgggcgacctcgagatgaacgaggacgaggcccgccacggccaggggcacctggggctggggccacgtcctctacagggtgcgctccggcgtccgccgcctcgtcgtgtccgcgcactcgctgcccaccacgcagaggcagtccctgccgccgccggcgcactgcaagccggcggcgctcgcccacgcgcagaggctgggcttccaccacgccggccacgccatggccactaaggagggtcgccggtcgcgccgcgccgcgctgcgcttgccggtgctgtttgcggccgatctccctccagattcggaaacggagaagcgggcgagaggcacgagaagaggaggattcaggttgcaggtaggtgcgtgagatcggtggcgaagaaatcgctgtaccgttataagtgaaaactagctcggtgaatcgatggtgaatggaatggaatggaaggtttaccatcctgtgctgtagaggtcaactggtcaagtgttgtatcatatgctcgttctttatattctttttgggt

SEQ ID NO: 22090 - protein, 259 aa, Zea mays subsp. mays
  peptide (1)..(259): Ceres Seq. ID no. 13622758
  misc_feature (84)..(193): NCBI GI NO: 28411879 NR Description: OSJNBa0016N23.32
  misc_feature (84)..(194): NCBI GI NO: 21593793 NR Description: unknown [Arabidopsis thaliana]
  misc_feature (84)..(194): NCBI GI NO: 18418660 NR Description: expressed protein [Arabidopsis thaliana]
  misc_feature (88)..(194): NCBI GI NO: 7486016 NR Description: hypothetical protein F23E12
KVVAATQTLRHHIHIPSLHHPLSRRPDQIKRRSKQRSGNLGGGGRRESRRRRPLPLEGGLQSELLRAPSLFALPACLYSSGPAMATILETIQKARLLPPRPLKDELPTFGGGGREESHLTGLRKRLSAFSGKIQPISSASAEWAFRRRSRPAPSLGAGGGGSLRQWWRRGVVGWLLSRKPGFAGDLEMNEDEARHGQGHLGLGPRPLQGALRRPPPRRVRALAAHHAEAVPAAAGALQAGGARPRAEAGLPPRRPRHGH

SEQ ID NO: 22091 - protein, 176 aa, Zea mays subsp. mays
  peptide (1)..(176): Ceres Seq. ID no. 13622759
  misc_feature (1)..(110): NCBI GI NO: 28411879 NR Description: OSJNBa0016N23.32
  misc_feature (1)..(111): NCBI GI NO: 21593793 NR Description: unknown [Arabidopsis thaliana]
  misc_feature (1)..(111): NCBI GI NO: 18418660 NR Description: expressed protein [Arabidopsis thaliana]
  misc_feature (5)..(111): NCBI GI NO: 7486016 NR Description: hypothetical protein F23E12
MATILETIQKARLLPPRPLKDELPTFGGGGREESHLTGLRKRLSAFSGKIQPISSASAEWAFRRRSRPAPSLGAGGGGSLRQWWRRGVVGWLLSRKPGFAGDLEMNEDEARHGQGHLGLGPRPLQGALRRPPPRRVRALAAHHAEAVPAAAGALQAGGARPRAEAGLPPRRPRHGH

SEQ ID NO: 22092 - protein, 162 aa, Zea mays subsp. mays
  peptide (1)..(162): Ceres Seq. ID no. 13622760
KLWLRHKHCAITYTYHLSTILCPDDQTKLKGEANRDLAIWVGVGGERAGGEDHCPLKAGSRASFSARPLCLPCLLASTRPAQPWPPSWRPSRRRGSCRPGRSRTSCQPSAAAAERRATSRACGSGCPPSPARSSPSPPRRPSGRSAGAPGRRPPSAREAAAP

SEQ ID NO: 22093 - DNA, 872 bp, Zea mays subsp. mays
  misc_feature (1)..(872): Ceres Seq. ID no. 12634327
agtcgtcacgaccatgatttggtaactgaagcaacaggaagccggcggtgtaggcgacccatggcgccacagaggaggagagagagggcggtgggggaggcgcggccgagctcgtcggcgccgacaccggcggggccggggtgggtcgaggtgcagcgccggcgggtgggcggcggttggacaagccgccggatctctatctacgcctcccgagtctacttcctcctcctgatgctccagatcccgctcttcagggttccttgtagagcaggcacatgcacaactcctattcaagtcacatcgtctcagttggtgtcaaacgagatattcccaccagctgttgtgaaggccatgctctaccctggagctatcgtgagcagcctaactaaaagcaaggcatttccgagttggagtgacctgtttgacatgtacaacctgacagaagccaaaaatgcttctgctgtagttgatctccagcgtctagagatacttgcgggaagctacttctgtgttgctggagggcttcttggcatcataaatcctgggaggatgactttgtttggtactcttttggttatctggggtctcgtgaaggaagcactatttgggaagccagtgaacagcgatccgactgaatcaagttatgtctacccaaccattttgattgcacttatatgtgctttcatgtcaataacttacaatgtaaagaagacagcagcaagtagtcctgtttctctcgcgaagccactgaaaagttctgccaagtcaaaactgaagtagaccctgttacaactttaatccttgtaactcattccagaatatttatttatccttgtaactttcaatcctatagcattcagttttttccttgt

SEQ ID NO: 22094 - protein, 259 aa, Zea mays subsp. mays
  peptide (1)..(259): Ceres Seq. ID no. 12634328
  misc_feature (21)..(259): NCBI GI NO: 34913974 NR Description: B1110C07.25
  misc_feature (59)..(259): NCBI GI NO: 18416514 NR Description: putative protein; protein id: At5g11280
  misc_feature (59)..(259): NCBI GI NO: 17064978 NR Description: putative protein [Arabidopsis thaliana]
  misc_feature (107)..(259): NCBI GI NO: 8953390 NR Description: putative protein [Arabidopsis thaliana]
  misc_feature (86)..(251): NCBI GI NO: 15220078 NR Description: hypothetical protein; protein id: At1g80200.1
SRHDHDLVTEATGSRRCRRPMAPQRRRERAVGEARPSSSAPTPAGPGWVEVQRRRVGGGWTSRRISIYASRVYFLLLMLQIPLFRVPCRAGTCTTPIQVTSSQLVSNEIFPPAVVKAMLYPGAIVSSLTKSKAFPSWSDLFDMYNLTEAKNASAVVDLQRLEILAGSYFCVAGGLLGIINPGRMTLFGTLLVIWGLVKEALFGKPVNSDPTESSYVYPTILIALICAFMSITYNVKKTAASSPVSLAKPLKSSAKSKLK

SEQ ID NO: 22095 - protein, 239 aa, Zea mays subsp. mays
  peptide (1)..(239): Ceres Seq. ID no. 12634329
  misc_feature (1)..(239): NCBI GI NO: 34913974 NR Description: B1110C07.25
  misc_feature (39)..(239): NCBI GI NO: 18416514 NR Description: putative protein; protein id: At5g11280
  misc_feature (39)..(239): NCBI GI NO: 17064978 NR Description: putative protein [Arabidopsis thaliana]
  misc_feature (87)..(239): NCBI GI NO: 8953390 NR Description: putative protein [Arabidopsis thaliana]
  misc_feature (66)..(231): NCBI GI NO: 15220078 NR Description: hypothetical protein; protein id: At1g80200.1
MAPQRRRERAVGEARPSSSAPTPAGPGWVEVQRRRVGGGWTSRRISIYASRVYFLLLMLQIPLFRVPCRAGTCTTPIQVTSSQLVSNEIFPPAVVKAMLYPGAIVSSLTKSKAFPSWSDLFDMYNLTEAKNASAVVDLQRLEILAGSYFCVAGGLLGIINPGRMTLFGTLLVIWGLVKEALFGKPVNSDPTESSYVYPTILIALICAFMSITYNVKKTAASSPVSLAKPLKSSAKSKLK

SEQ ID NO: 22096 - protein, 182 aa, Zea mays subsp. mays
  peptide (1)..(182): Ceres Seq. ID no. 12634330
  misc_feature (1)..(182): NCBI GI NO: 34913974 NR Description: B1110C07.25
  misc_feature (1)..(182): NCBI GI NO: 18416514 NR Description: putative protein; protein id: At5g11280
  misc_feature (1)..(182): NCBI GI NO: 17064978 NR Description: putative protein [Arabidopsis thaliana]
  misc_feature (30)..(182): NCBI GI NO: 8953390 NR Description: putative protein [Arabidopsis thaliana]
  misc_feature (9)..(174): NCBI GI NO: 15220078 NR Description: hypothetical protein; protein id: At1g80200.1
MLQIPLFRVPCRAGTCTTPIQVTSSQLVSNEIFPPAVVKAMLYPGAIVSSLTKSKAFPSWSDLFDMYNLTEAKNASAVVDLQRLEILAGSYFCVAGGLLGIINPGRMTLFGTLLVIWGLVKEALFGKPVNSDPTESSYVYPTILIALICAFMSITYNVKKTAASSPVSLAKPLKSSAKSKLK

SEQ ID NO: 22097 - DNA, 877 bp, Zea mays subsp. mays
  misc_feature (1)..(877): Ceres Seq. ID no. 15180222
aaacatctcccctgcccttcccctcgcgcagccaaaaaaaaaaccaaaacgcctcctccgcttcgtctcctccctccccctcgccgccgcgactcccgccaccagcccaccacactattaattctgcccctcccccctcgtcctcttccacgtccacaactcccatcccacgtcgcagagccgttcctgtctgcgcctcctccctagacacgcgacgcagagcatatatatagcagcaggggcaggggcaaggacgaagggacgaaagagccagagccgccgccgccgccgccatgtccgtccgcgtggcgtccgtgccgtacctggagcagatggcgcggtgggagcggcaggtggagcggcggcagctgttcctccgcagctaccacttctcgcgcgacgccgacgcggcggcggcgctccccccgcgcgcccgcgccaggcgcgtcgtctgggcggggatgcgccgcctgcgccgcgcagccgccacgggcctccgccgcctccgcgcgcgcctccgcctctgcttcggctgggccgcccgccgccgctcttcctcccgctacggccgcctctccggcgccggcagggcccgcggcgccgccgccgccggtgccgccgagtctgcatgcttctggtaggactgcactgcacaaggactcgaagcgttctttgcttcgtctcccttggttggcgtgcgtgcgtgcgtgtgtgtgaaagtgagaaggtgagcttactttagacatggattagccggtgcgtgtgttgtttgtttgtttgtttgataacttggactgctgctccgtggagtggagttgagtgcctaattaaattagaatgaatgaatcgtctagtagtaattttggttttttgctcg

SEQ ID NO: 22098 - protein, 115 aa, Zea mays subsp. mays
  peptide (1)..(115): Ceres Seq. ID no. 15180223
  misc_feature (1)..(115): NCBI GI NO: 34897322 NR Description: hypothetical protein [Oryza sativa]
MSVRVASVPYLEQMARWERQVERRQLFLRSYHFSRDADAAAALPPRARARRVVWAGMRRLRRAAATGLRRLRARLRLCFGWAARRRSSSRYGRLSGAGRARGAAAAGAAESACFW

SEQ ID NO: 22099 - protein, 102 aa, Zea mays subsp. mays
  peptide (1)..(102): Ceres Seq. ID no. 15180224
  misc_feature (1)..(102): NCBI GI NO: 34897322 NR Description: hypothetical protein [Oryza sativa]
MARWERQVERRQLFLRSYHFSRDADAAAALPPRARARRVVWAGMRRLRRAAATGLRRLRARLRLCFGWAARRRSSSRYGRLSGAGRARGAAAAGAAESACFW

SEQ ID NO: 22100 - protein, 76 aa, Zea mays subsp. mays
  peptide (1)..(76): Ceres Seq. ID no. 15180225
  misc_feature (16)..(51): NCBI GI NO: 7510074 NR Description: hypothetical protein Y50E8A
  misc_feature (23)..(49): NCBI GI NO: 25148492 NR Description: actin-binding WH2 (3G109) [Caenorhabditis elegans]
  misc_feature (2)..(56): NCBI GI NO: 15242969 NR Description: formin homology 2 (FH2) domain-containing protein
  misc_feature (2)..(45): NCBI GI NO: 15240851 NR Description: expressed protein [Arabidopsis thaliana]
  misc_feature (23)..(49): NCBI GI NO: 7506732 NR Description: hypothetical protein R144
TSPLPFPSRSQKKNQNASSASSPPSPSPPRLPPPAHHTINSAPPPSSSSTSTTPIPRRRAVPVCASSLDTRRRAYI

SEQ ID NO: 22101 - DNA, 576 bp, Zea mays subsp. mays
  misc_feature (1)..(576): Ceres Seq. ID no. 13586586
accctctgtctcgcaagcgccggccaagtcctgtccctctcccttgtctggttcggatcgtcgttgctagccaggtgctggatccgtagcggcggcggcggccatggacaagagcatgctcggcgacctggacggcctccccgaggaggacaagatgcggatggccgccatgatcgaccagttccagatccgcgacagcctgagaatgtacaattcgctggtggagaggtgcttcacggactgcgtggacacgttccggcgcaagaacctggacaagcaagaggagtcgtgcgtccgccggtgcgcggagaagttcctgaagcactccatgagggtcggcatgaggttcgccgagcttaaccagggtgtggccacgccggactaagaaacacgctgccgctggctggctgctctcgttgcgcgcccgccgccaggtttctggctttcgctggcacagatttgtagccgacaaaaggatttcagcacttcccctgcctgagatatatgcgttttagagccgaacgctgggtgtcagattgaataaaaactgccttgagaagtgttgtatttcgtttc

SEQ ID NO: 22102 - protein, 119 aa, Zea mays subsp. mays
  peptide (1)..(119): Ceres Seq. ID no. 15220801
TLCLASAGQVLSLSLVWFGSSLLARCWIRSGGGGHGQEHARRPGRPPRGGQDADGRHDRPVPDPRQPENVQFAGGEVLHGLRGHVPAQEPGQARGVVRPPVRGEVPEALHEGRHEVRRA

SEQ ID NO: 22103 - protein, 93 aa, Zea mays subsp. mays
  peptide (1)..(93): Ceres Seq. ID no. 15220802
  misc_feature (20)..(85): Pfam Name: Pfam Description:  Tim10/DDP family zinc finger
  misc_feature (1)..(93): NCBI GI NO: 12230181 NR Description: Mitochondrial import inner membrane translocase subunit Tim9
  misc_feature (1)..(93): NCBI GI NO: 12230182 NR Description: Mitochondrial import inner membrane translocase subunit Tim9
  misc_feature (1)..(93): NCBI GI NO: 15231455 NR Description: small zinc finger-related protein TIM9
  misc_feature (1)..(93): NCBI GI NO: 21617942 NR Description: mitochondrial import inner membrane translocase subunit Tim9
  misc_feature (1)..(91): NCBI GI NO: 5107210 NR Description: small zinc finger-like protein
  misc_feature (1)..(91): NCBI GI NO: 11358850 NR Description: small zinc finger-like protein
  misc_feature (9)..(86): NCBI GI NO: 12230144 NR Description: Mitochondrial import inner membrane translocase subunit Tim9
  misc_feature (9)..(86): NCBI GI NO: 6320815 NR Description: Translocase in inner membrane of mitochondriainvolved in mitochondrial protein import
  misc_feature (9)..(86): NCBI GI NO: 19075508 NR Description: similar to yeast Tim9p essential component of themitochondrial import machinery
  misc_feature (1)..(84): NCBI GI NO: 23481518 NR Description: mitochondrial import inner membrane translocase subunit tim9
MDKSMLGDLDGLPEEDKMRMAAMIDQFQIRDSLRMYNSLVERCFTDCVDTFRRKNLDKQEESCVRRCAEKFLKHSMRVGMRFAELNQGVATPD

SEQ ID NO: 22104 - protein, 89 aa, Zea mays subsp. mays
  peptide (1)..(89): Ceres Seq. ID no. 15220803
  misc_feature (16)..(81): Pfam Name: Pfam Description:  Tim10/DDP family zinc finger
  misc_feature (1)..(89): NCBI GI NO: 12230181 NR Description: Mitochondrial import inner membrane translocase subunit Tim9
  misc_feature (1)..(89): NCBI GI NO: 12230182 NR Description: Mitochondrial import inner membrane translocase subunit Tim9
  misc_feature (1)..(89): NCBI GI NO: 15231455 NR Description: small zinc finger-related protein TIM9
  misc_feature (1)..(89): NCBI GI NO: 21617942 NR Description: mitochondrial import inner membrane translocase subunit Tim9
  misc_feature (1)..(87): NCBI GI NO: 5107210 NR Description: small zinc finger-like protein
  misc_feature (1)..(87): NCBI GI NO: 11358850 NR Description: small zinc finger-like protein
  misc_feature (5)..(82): NCBI GI NO: 12230144 NR Description: Mitochondrial import inner membrane translocase subunit Tim9
  misc_feature (5)..(82): NCBI GI NO: 6320815 NR Description: Translocase in inner membrane of mitochondriainvolved in mitochondrial protein import
  misc_feature (5)..(82): NCBI GI NO: 19075508 NR Description: similar to yeast Tim9p essential component of themitochondrial import machinery
  misc_feature (1)..(80): NCBI GI NO: 23481518 NR Description: mitochondrial import inner membrane translocase subunit tim9
MLGDLDGLPEEDKMRMAAMIDQFQIRDSLRMYNSLVERCFTDCVDTFRRKNLDKQEESCVRRCAEKFLKHSMRVGMRFAELNQGVATPD

SEQ ID NO: 22105 - DNA, 488 bp, Zea mays subsp. mays
  misc_feature (1)..(488): Ceres Seq. ID no. 13586589
gctggacctgatgtttaatgatagtaaggtttgggattttcaaaaaaaactagcaggtctcaacctcgaggcactctcacgcccaacggccacaccaccgccctctccgcgtgcccccgaaaccaccacacgcggccacgccacgccgcccactacgggcgggcctccttgcgcttggagtattggtcgacgtgctcctctcaccgcaccctctactgatactgggttggcgcgagaacggcgagcccacctgaacgcgtgattttggatggtgaaggcacagagtaaagagtctgcaacctttggtggtgcagtttttatgtgcaaccatctgaccaggaaggagtgctttgacaagaaaatatttggcctctctgatttctgtgctgattttgtagagaaagttaaagctggcacaactttattcttatatgatgttgatcagtgtaagctccatggtgttttcgaagcaacttcagatggggctg

SEQ ID NO: 22106 - protein, 86 aa, Zea mays subsp. mays
  peptide (1)..(86): Ceres Seq. ID no. 13586590
LDLMFNDSKVWDFQKKLAGLNLEALSRPTATPPPSPRAPETTTRGHATPPTTGGPPCAWSIGRRAPLTAPSTDTGLARERRAHLNA

SEQ ID NO: 22107 - protein, 83 aa, Zea mays subsp. mays
  peptide (1)..(83): Ceres Seq. ID no. 13586591
MFNDSKVWDFQKKLAGLNLEALSRPTATPPPSPRAPETTTRGHATPPTTGGPPCAWSIGRRAPLTAPSTDTGLARERRAHLNA

SEQ ID NO: 22108 - protein, 73 aa, Zea mays subsp. mays
  peptide (1)..(73): Ceres Seq. ID no. 13586592
  misc_feature (12)..(72): NCBI GI NO: 34898440 NR Description: Similar to Arabidopsis thaliana chromosome II BACT4C15 genomic sequence
  misc_feature (14)..(72): NCBI GI NO: 15226909 NR Description: hypothetical protein [Arabidopsis thaliana]
  misc_feature (2)..(72): NCBI GI NO: 15225756 NR Description: expressed protein [Arabidopsis thaliana]
  misc_feature (13)..(72): NCBI GI NO: 28393783 NR Description: unknown protein [Arabidopsis thaliana]
  misc_feature (13)..(72): NCBI GI NO: 34896110 NR Description: P0701D05.9
  misc_feature (11)..(72): NCBI GI NO: 584825 NR Description: B2 PROTEIN
  misc_feature (14)..(72): NCBI GI NO: 22328008 NR Description: expressed protein [Arabidopsis thaliana]
  misc_feature (14)..(72): NCBI GI NO: 9758390 NR Description: gene_id:K22G18
  misc_feature (11)..(72): NCBI GI NO: 9757950 NR Description: gene_id:MJC20
MVKAQSKESATFGGAVFMCNHLTRKECFDKKIFGLSDFCADFVEKVKAGTTLFLYDVDQCKLHGVFEATSDGA

SEQ ID NO: 22109 - DNA, 1353 bp, Zea mays subsp. mays
  misc_feature (1)..(1353): Ceres Seq. ID no. 15178630
gcttgtccccaccaggcgccatggacgctcgcgacgacgaaccccccgttctcctcgaccgcgccgcccgcgcctcccgaggcaagaggataaccaagctgctcgaggacgaggtcgagcaggacgaggctttctggaaccaagaagccctcaaggatgaggagaacgatgacaactacgtggaagagccggatgctggtgacgaattcgacagtgattttggtgaagatgaatctgaaactgatgatgagccggagaaggaagtacgcgagagattacctatcaagaaacggctaatgtttcctggcaagacgctgaggaagaccaacgtcaagaagaagaaggcgaccccaaaaccagaagatggcacaaaagccgacaagtctgctgataagccgagttcatccacacaagcagatcttcctgatgaactggaggctgagaaggccatccggaaatcatccagaacgtcggtcatcgtgaggcaagctgaaagagaagcgatacgtgctgaaaaagaagcaacggccaagccgattaagagaaaaaaggagggagaagaaaagcggatgacacaagaggagatgcttttggaagcagctgaaacagagatcatgaacatgagaaatctagaacgtgtcctggcaagagaggaggaagtgaagaaaaaagctgttgttcataaggacacttatgagggtcctacaattcgttttttctcaagagatggggaatcacgtctggaattcataaatggagcatcatttgggtctgaactttgtacaacatcatctccttatccggagaaacctgtttgtgtggtgacaggacttccagccaaataccgtgatccgaagacagggctgccttatgcaactatggaagcatttaaaataatccgggagagtttcctgaaagaggaggctgatagaaagcgtccgaacatgtcgaatatgggagagcttttcgaatcaataactggtggacacttgatgcctaagaagagaagggttgagataaggtctccgaacatgttaggaggctctaggcatggcgggcgtacctggcgaatacctgcttttgatatggtggacgaggactaacgagacagatcccgtggctcccaatatgtcaatatgagagatctttctaaatcaatagccggtgaagaggaagatggataggatgttgtatttagtgttagatcttgtgcttgtagttatcttaatgtatttttgtcagttgataaattcatggttattaaagtggtaaaacgttaaaatgttatgaaacaactttttaatattttaacgcttaaacgaacgttgaaacgccaaaaaaaaaaaaaaaaaa

SEQ ID NO: 22110 - protein, 366 aa, Zea mays subsp. mays
  peptide (1)..(366): Ceres Seq. ID no. 15178631
  misc_feature (64)..(249): Pfam Name: Pfam Description:  Tropomyosin
  misc_feature (8)..(366): NCBI GI NO: 40253658 NR Description: putative stress responsive gene 6 protein, Srg6
  misc_feature (20)..(366): NCBI GI NO: 12054305 NR Description: stress responsive gene 6 protein, Srg6
  misc_feature (76)..(366): NCBI GI NO: 12054303 NR Description: stress responsive gene 6 protein, Srg6
  misc_feature (20)..(366): NCBI GI NO: 15228030 NR Description: expressed protein [Arabidopsis thaliana]
  misc_feature (9)..(226): NCBI GI NO: 12054305 NR Description: stress responsive gene 6 protein, Srg6
  misc_feature (7)..(198): NCBI GI NO: 15228030 NR Description: expressed protein [Arabidopsis thaliana]
  misc_feature (20)..(240): NCBI GI NO: 6678255 NR Description: transcription factor-like 1 [Mus musculus]
  misc_feature (20)..(240): NCBI GI NO: 13436005 NR Description: transcription factor-like 1 [Mus musculus]
  misc_feature (20)..(240): NCBI GI NO: 37572298 NR Description: Transcription factor-like 1 [Mus musculus]
  misc_feature (267)..(319): NCBI GI NO: 6678255 NR Description: transcription factor-like 1 [Mus musculus]
LSPPGAMDARDDEPPVLLDRAARASRGKRITKLLEDEVEQDEAFWNQEALKDEENDDNYVEEPDAGDEFDSDFGEDESETDDEPEKEVRERLPIKKRLMFPGKTLRKTNVKKKKATPKPEDGTKADKSADKPSSSTQADLPDELEAEKAIRKSSRTSVIVRQAEREAIRAEKEATAKPIKRKKEGEEKRMTQEEMLLEAAETEIMNMRNLERVLAREEEVKKKAVVHKDTYEGPTIRFFSRDGESRLEFINGASFGSELCTTSSPYPEKPVCVVTGLPAKYRDPKTGLPYATMEAFKIIRESFLKEEADRKRPNMSNMGELFESITGGHLMPKKRRVEIRSPNMLGGSRHGGRTWRIPAFDMVDED

SEQ ID NO: 22111 - protein, 360 aa, Zea mays subsp. mays
  peptide (1)..(360): Ceres Seq. ID no. 15178632
  misc_feature (58)..(243): Pfam Name: Pfam Description:  Tropomyosin
  misc_feature (2)..(360): NCBI GI NO: 40253658 NR Description: putative stress responsive gene 6 protein, Srg6
  misc_feature (14)..(360): NCBI GI NO: 12054305 NR Description: stress responsive gene 6 protein, Srg6
  misc_feature (70)..(360): NCBI GI NO: 12054303 NR Description: stress responsive gene 6 protein, Srg6
  misc_feature (14)..(360): NCBI GI NO: 15228030 NR Description: expressed protein [Arabidopsis thaliana]
  misc_feature (3)..(220): NCBI GI NO: 12054305 NR Description: stress responsive gene 6 protein, Srg6
  misc_feature (1)..(192): NCBI GI NO: 15228030 NR Description: expressed protein [Arabidopsis thaliana]
  misc_feature (14)..(234): NCBI GI NO: 6678255 NR Description: transcription factor-like 1 [Mus musculus]
  misc_feature (14)..(234): NCBI GI NO: 37572298 NR Description: Transcription factor-like 1 [Mus musculus]
  misc_feature (14)..(234): NCBI GI NO: 13436005 NR Description: transcription factor-like 1 [Mus musculus]
  misc_feature (261)..(313): NCBI GI NO: 6678255 NR Description: transcription factor-like 1 [Mus musculus]
MDARDDEPPVLLDRAARASRGKRITKLLEDEVEQDEAFWNQEALKDEENDDNYVEEPDAGDEFDSDFGEDESETDDEPEKEVRERLPIKKRLMFPGKTLRKTNVKKKKATPKPEDGTKADKSADKPSSSTQADLPDELEAEKAIRKSSRTSVIVRQAEREAIRAEKEATAKPIKRKKEGEEKRMTQEEMLLEAAETEIMNMRNLERVLAREEEVKKKAVVHKDTYEGPTIRFFSRDGESRLEFINGASFGSELCTTSSPYPEKPVCVVTGLPAKYRDPKTGLPYATMEAFKIIRESFLKEEADRKRPNMSNMGELFESITGGHLMPKKRRVEIRSPNMLGGSRHGGRTWRIPAFDMVDED

SEQ ID NO: 22112 - protein, 268 aa, Zea mays subsp. mays
  peptide (1)..(268): Ceres Seq. ID no. 15178633
  misc_feature (1)..(151): Pfam Name: Pfam Description:  Tropomyosin
  misc_feature (1)..(268): NCBI GI NO: 40253658 NR Description: putative stress responsive gene 6 protein, Srg6
  misc_feature (1)..(268): NCBI GI NO: 12054305 NR Description: stress responsive gene 6 protein, Srg6
  misc_feature (1)..(268): NCBI GI NO: 12054303 NR Description: stress responsive gene 6 protein, Srg6
  misc_feature (1)..(268): NCBI GI NO: 15228030 NR Description: expressed protein [Arabidopsis thaliana]
  misc_feature (1)..(128): NCBI GI NO: 12054305 NR Description: stress responsive gene 6 protein, Srg6
  misc_feature (1)..(100): NCBI GI NO: 15228030 NR Description: expressed protein [Arabidopsis thaliana]
  misc_feature (1)..(142): NCBI GI NO: 6678255 NR Description: transcription factor-like 1 [Mus musculus]
  misc_feature (1)..(142): NCBI GI NO: 37572298 NR Description: Transcription factor-like 1 [Mus musculus]
  misc_feature (1)..(142): NCBI GI NO: 13436005 NR Description: transcription factor-like 1 [Mus musculus]
  misc_feature (169)..(221): NCBI GI NO: 6678255 NR Description: transcription factor-like 1 [Mus musculus]
MFPGKTLRKTNVKKKKATPKPEDGTKADKSADKPSSSTQADLPDELEAEKAIRKSSRTSVIVRQAEREAIRAEKEATAKPIKRKKEGEEKRMTQEEMLLEAAETEIMNMRNLERVLAREEEVKKKAVVHKDTYEGPTIRFFSRDGESRLEFINGASFGSELCTTSSPYPEKPVCVVTGLPAKYRDPKTGLPYATMEAFKIIRESFLKEEADRKRPNMSNMGELFESITGGHLMPKKRRVEIRSPNMLGGSRHGGRTWRIPAFDMVDED

SEQ ID NO: 22113 - DNA, 2309 bp, Zea mays subsp. mays
  misc_feature (1)..(2309): Ceres Seq. ID no. 13622744
ccagcctctcctagccgaggccaaaacccccataccaacacacacttcgcttctcgctgcctccgcggcggcgcgccgctccgctccgagccctcttcctcctcctcctctgcccgttcggtctagaatgttctactcgcatcagcttctcgcgcggaaggcgccgctcggccagatatggatggcggcgacgctccactcgaagatcaaccgcaaacggctcgacaagctcgacatcatcaaaatctgtgaggaaattttgaacccctcggtgcccatggctctgaggctctctggaatcctcatgggtggcgtggtgatcgtgtacgagaggaaggtgaagcttctctacactgatgtctctcggcttctgactgagatcaacgaggcatggcggatcaaaccggtcacagaccccaccgtcctccccaagggtaaaactcaagccaagtatgaagcagtaacactgccagagatcaatatggtggtggaacagcccatgtttttctcagagcctgatggtgccaagttccgacgaatgggattggaagatctggatgaacagtatgttcaagtcaatcttgatgatgatgacttctctcatgctgatgatcgtcatcaagctaaagcagtgaatataaccctggtcgataattttgagtctgggcttgcagaaactgatttattcaatcactttgagagatttgacatagcagatgatgagaccacagtcaatatcactcctgatgagtacccacaagttccaagtacgctgattccgtcaccacctaggcaggaagacattcctcaacaagaataaccgtactacgctgccccctcccctgttcatggagaacctcaacaagggggaccagaggaccaagaggaacagaagatgaagcaaccaccgaaagcatcaaagcggaaagcacgttgggaagtcccacgagtaattatggacaataaccagatgatgatcccaggaaacatatatcagacatggctgaaggatgcatcaagccttgtctcaaaaaggcgtaaacttaacagcaattttaattttattcgatcaaccaagataagtgatctcatgcacatccccccggttgctctaatatctcatgacaacttgttctcagaattatgttatcctaagccacttatgcagctctggaaggactgcactgaggtcaagtccacaaaagcttcttcaggagggcagcgatcatcatcacaagaaccacaaccgaaaaactcaccacctcaggctgggggagagtatgagatggaaacaggtggtctgccgatggatttaacagatggcattgaaaaactcagggcaaacatgagtgcaaaatatgacagagcttacaatattcttcacagtgaccatagtgttactcctggaagtcctgggttaagtcgcaggtctgcttcaagctctggtggctctggatcggcgtttatacaattggatccagaagtacaattgccatcaggaagtggaaggtccaaaagggggcagcattcatctgcaagaagcttggggaatcttgatactgttgaggaagattttccactggagcaggaagtgagggacttcaagatgagaaggctttcagattatgtgccaactcctgacctactggaagaaactgaaccgactcaaaccccatatgagaggcgctccaatccaatggacaagatcacagaaacaatccagtcgcatctcaaacttcatttcgataccccaggtgtcccacaatctgaatccttaagtcatttagctcatggaatgaccaaagccagggcagcccgactattctatcaaatagctgttttggcaacttgtgattacatcaaggttactcagctggaacggaaaggagatgaactgtacggagacatcttgatctccagaggattaaagatgtgacttggtgatgttggaaacaattttgctgcggtggttcccggtgcacatctcgtgtttatattacagaatgcttacatattgcataggatgtcttgtagttaacacataatctatacatggtgatctggtgaaagaaagggagcgagatatgaggcagtagttttgtgttatgtggcaagcaaaattctaagctgttattttagaggtttcataatttaagtacgaacatgtgttatactattatgaaactaagttgtcctgaaagcacttactgaaagggagaaatttacatggtaccttgtcaacgatgaaacatacatcggaggacaacataaagatgcacactgtatcctgctcttcggctgcttcatgt

SEQ ID NO: 22114 - protein, 346 aa, Zea mays subsp. mays
  peptide (1)..(346): Ceres Seq. ID no. 13622745
  misc_feature (1)..(346): NCBI GI NO: 34558723 NR Description: Rad21-4 protein
  misc_feature (1)..(108): NCBI GI NO: 5091612 NR Description: 10A19I.14 [Oryza sativa]
  misc_feature (107)..(316): NCBI GI NO: 5091612 NR Description: 10A19I.14 [Oryza sativa]
  misc_feature (1)..(118): NCBI GI NO: 15239141 NR Description: SYN1 splice variant 1 (gb AAF08981.1)
  misc_feature (1)..(118): NCBI GI NO: 30680958 NR Description: SYN1 splice variant 1 (gb AAF08981.1)
  misc_feature (1)..(346): NCBI GI NO: 15239141 NR Description: SYN1 splice variant 1 (gb AAF08981.1)
  misc_feature (1)..(346): NCBI GI NO: 30680958 NR Description: SYN1 splice variant 1 (gb AAF08981.1)
  misc_feature (186)..(326): NCBI GI NO: 32309542 NR Description: cohesin-like protein
MKQPPKASKRKARWEVPRVIMDNNQMMIPGNIYQTWLKDASSLVSKRRKLNSNFNFIRSTKISDLMHIPPVALISHDNLFSELCYPKPLMQLWKDCTEVKSTKASSGGQRSSSQEPQPKNSPPQAGGEYEMETGGLPMDLTDGIEKLRANMSAKYDRAYNILHSDHSVTPGSPGLSRRSASSSGGSGSAFIQLDPEVQLPSGSGRSKRGQHSSARSLGNLDTVEEDFPLEQEVRDFKMRRLSDYVPTPDLLEETEPTQTPYERRSNPMDKITETIQSHLKLHFDTPGVPQSESLSHLAHGMTKARAARLFYQIAVLATCDYIKVTQLERKGDELYGDILISRGLKM

SEQ ID NO: 22115 - protein, 326 aa, Zea mays subsp. mays
  peptide (1)..(326): Ceres Seq. ID no. 13622746
  misc_feature (1)..(326): NCBI GI NO: 34558723 NR Description: Rad21-4 protein
  misc_feature (1)..(88): NCBI GI NO: 5091612 NR Description: 10A19I.14 [Oryza sativa]
  misc_feature (87)..(296): NCBI GI NO: 5091612 NR Description: 10A19I.14 [Oryza sativa]
  misc_feature (1)..(98): NCBI GI NO: 15239141 NR Description: SYN1 splice variant 1 (gb AAF08981.1)
  misc_feature (1)..(98): NCBI GI NO: 30680958 NR Description: SYN1 splice variant 1 (gb AAF08981.1)
  misc_feature (1)..(326): NCBI GI NO: 15239141 NR Description: SYN1 splice variant 1 (gb AAF08981.1)
  misc_feature (1)..(326): NCBI GI NO: 30680958 NR Description: SYN1 splice variant 1 (gb AAF08981.1)
  misc_feature (166)..(306): NCBI GI NO: 32309542 NR Description: cohesin-like protein
MDNNQMMIPGNIYQTWLKDASSLVSKRRKLNSNFNFIRSTKISDLMHIPPVALISHDNLFSELCYPKPLMQLWKDCTEVKSTKASSGGQRSSSQEPQPKNSPPQAGGEYEMETGGLPMDLTDGIEKLRANMSAKYDRAYNILHSDHSVTPGSPGLSRRSASSSGGSGSAFIQLDPEVQLPSGSGRSKRGQHSSARSLGNLDTVEEDFPLEQEVRDFKMRRLSDYVPTPDLLEETEPTQTPYERRSNPMDKITETIQSHLKLHFDTPGVPQSESLSHLAHGMTKARAARLFYQIAVLATCDYIKVTQLERKGDELYGDILISRGLKM

SEQ ID NO: 22116 - protein, 321 aa, Zea mays subsp. mays
  peptide (1)..(321): Ceres Seq. ID no. 13622747
  misc_feature (1)..(321): NCBI GI NO: 34558723 NR Description: Rad21-4 protein
  misc_feature (1)..(83): NCBI GI NO: 5091612 NR Description: 10A19I.14 [Oryza sativa]
  misc_feature (82)..(291): NCBI GI NO: 5091612 NR Description: 10A19I.14 [Oryza sativa]
  misc_feature (1)..(93): NCBI GI NO: 15239141 NR Description: SYN1 splice variant 1 (gb AAF08981.1)
  misc_feature (1)..(93): NCBI GI NO: 30680958 NR Description: SYN1 splice variant 1 (gb AAF08981.1)
  misc_feature (1)..(321): NCBI GI NO: 15239141 NR Description: SYN1 splice variant 1 (gb AAF08981.1)
  misc_feature (1)..(321): NCBI GI NO: 30680958 NR Description: SYN1 splice variant 1 (gb AAF08981.1)
  misc_feature (161)..(301): NCBI GI NO: 32309542 NR Description: cohesin-like protein
MMIPGNIYQTWLKDASSLVSKRRKLNSNFNFIRSTKISDLMHIPPVALISHDNLFSELCYPKPLMQLWKDCTEVKSTKASSGGQRSSSQEPQPKNSPPQAGGEYEMETGGLPMDLTDGIEKLRANMSAKYDRAYNILHSDHSVTPGSPGLSRRSASSSGGSGSAFIQLDPEVQLPSGSGRSKRGQHSSARSLGNLDTVEEDFPLEQEVRDFKMRRLSDYVPTPDLLEETEPTQTPYERRSNPMDKITETIQSHLKLHFDTPGVPQSESLSHLAHGMTKARAARLFYQIAVLATCDYIKVTQLERKGDELYGDILISRGLKM

SEQ ID NO: 22117 - DNA, 598 bp, Zea mays subsp. mays
  misc_feature (1)..(598): Ceres Seq. ID no. 14305238
gagcagcggccacgcattctcccttccctggactattcttggtgggtggagagagccgcagaaggcagctggaagaggagaggaccgcgcgaggctccgtgccggcgagttcgggtgcttttcctgcggtccgagatgcgatcgttgggacccgggagacagcgcagctcgggttcgggttcgggggggcggtagccacctgagcaggatgtttaactggaacgacgagcagcaccaggtcgaagcacataagaggccagtgtggtcacgtagaaaaccagaggaaagaggtaaaagtaaaatatccagcagtacaagtggcttctcccacagcaaagtagagagttcatcgacgaatttgcaaactcctatggaacctgtacagactcctcaatatgcactgttccaggatagcaaattcgtcgatgaactctctaccttgttgctggcaaagcgtagttctgtacctcctctatcgttgtcctaccactctaggtctatcccttgatctaggtttctatggtctgaagatttgtgattttctccgcactgttgttgctatccccgtgtcgtaataatacgatgttttaagcggttg

SEQ ID NO: 22118 - protein, 168 aa, Zea mays subsp. mays
  peptide (1)..(168): Ceres Seq. ID no. 14305239
  misc_feature (65)..(144): NCBI GI NO: 34905386 NR Description: OJ1126_G08.25
SSGHAFSLPWTILGGWREPQKAAGRGEDRARLRAGEFGCFSCGPRCDRWDPGDSAARVRVRGGGSHLSRMFNWNDEQHQVEAHKRPVWSRRKPEERGKSKISSSTSGFSHSKVESSSTNLQTPMEPVQTPQYALFQDSKFVDELSTLLLAKRSSVPPLSLSYHSRSIP

SEQ ID NO: 22119 - protein, 99 aa, Zea mays subsp. mays
  peptide (1)..(99): Ceres Seq. ID no. 14305240
  misc_feature (1)..(75): NCBI GI NO: 34905386 NR Description: OJ1126_G08.25
MFNWNDEQHQVEAHKRPVWSRRKPEERGKSKISSSTSGFSHSKVESSSTNLQTPMEPVQTPQYALFQDSKFVDELSTLLLAKRSSVPPLSLSYHSRSIP

SEQ ID NO: 22120 - DNA, 1134 bp, Zea mays subsp. mays
  misc_feature (1)..(1134): Ceres Seq. ID no. 14305110
gaaaatcgaaaccctagaccgcgcgccccctcgccctccggccttccacgtccgatccgatccaaaatgcataagctaggcagaggaagccgggacaaggtgcaacagttcatggcaattaccggcgcaaggtacatatatttttttaaacttttcgatttgttcggagagaccggtgttcagtgctaaattgtggtttggttggttagtggccgtagtatgtcaattttgcgagctgttgggagaacttgtttgtagtgcagcaacagcattcgtgttctgcaatttggcaataatatcatgctagaaagtaagaagttcttttggttgcaggaacatggaattttgtactgtcttttatgtggaaacatgtgttactgcctaatcttgatttgtaattttgtaatggaattctccaacacactggtagcattatactccccctttgtttgggatggaccactttttcatcttttaccaaaagttaacttttttttttggtgctgcaagagtgatccattgtcattgtcctgaaaaatcactagggttgtacattacagtcagtcatcggaccaactgaacctccgaggactactgtacactttagacactgctatcccaattttctgttaattttgtcaagcattgcatatttcacacagtgagaaagctgcccttcaggctcttaaagctagtgattggcacttggaaggagcttttgatgttttctacagccagccacaaattgctgttgctaatactcgacatctggaagagctctacaacagatataaaggtggaatattttactctctgttgcgccaatcatctttttatgccttgtctctgatttttttttccaattttacctgcgccatcatgttgtgtcttgattgctcagaaccagatgctgatatgataatggtggaaggcatatcacagatctgcaatgatttacaggtcattttttgggattttttttctttgaatgtatgttgttacactaaagtatcagcctgcagtcacttgtaatggataggtatatcaggcatcaggctcgaaatttgtgaactgtgattgtttcctttgttttgtgttttcttcatagtattcttcaatggaattcgtggaacg

SEQ ID NO: 22121 - protein, 77 aa, Zea mays subsp. mays
  peptide (1)..(77): Ceres Seq. ID no. 14305111
MLESKKFFWLQEHGILYCLLCGNMCYCLILICNFVMEFSNTLVALYSPFVWDGPLFHLLPKVNFFFWCCKSDPLSLS

SEQ ID NO: 22122 - protein, 62 aa, Zea mays subsp. mays
  peptide (1)..(62): Ceres Seq. ID no. 14305112
  misc_feature (23)..(43): NCBI GI NO: 15292985 NR Description: unknown protein [Arabidopsis thaliana]
  misc_feature (23)..(43): NCBI GI NO: 18399737 NR Description: expressed protein [Arabidopsis thaliana]
ENRNPRPRAPSPSGLPRPIRSKMHKLGRGSRDKVQQFMAITGARYIYFFKLFDLFGETGVQC

SEQ ID NO: 22123 - protein, 54 aa, Zea mays subsp. mays
  peptide (1)..(54): Ceres Seq. ID no. 14305113
MCYCLILICNFVMEFSNTLVALYSPFVWDGPLFHLLPKVNFFFWCCKSDPLSLS

SEQ ID NO: 22124 - DNA, 919 bp, Zea mays subsp. mays
  misc_feature (1)..(919): Ceres Seq. ID no. 15180249
aagtttgcagaaacgaaagcagcagcccaattgggagctccaccccacacaacccaacccgccacctctcatggcgactgctgcgaccaccaccaggaggccgagcggccccgtcctctcggccgcgcactaccgctacgcctcgcccacgcgcgtctcgctctccggcgccgggcagtccgtcagcgtcagcgtctcgtcgtcgtcgcggggccgacggacctgcatgtgctcgccgaccagccacccgggctcgttccgctgcagcctgcacaaggagcgcgcgacgaagccgccgccgccgcacgggcacggcaagccgacctccccgccgccgcccctgaccaccaccagccgtctgtgcgcggcgggcaggcggatgggcagcgcgctggtgcggatcggcgccgtcgagggcggccagtgcgcgcgccgcgcgctcgcggcaaccgcccgcccgtcccccgccgcggcgcagcaccgccgccgcgtcggcgccggcgccggcgccgcccggccccgccccagccgcctctccgccgtctccgtggccggcgaccgccccggcgacaacggccacctatagacccgccgccgccttgccaccgtaccgtgtagagctagcctagcggcactagtagtaacagtatagtactagcatcgtagtaataataataaaaaaaaactggagcggcggttaactagaagaaagaacagagcagagccgggaggttggagcgctggatcaggactagttttgggagcctggtccatggatcatcatcaccatccagggaaaaaggctctctctctctttctctctcttgtacgtgtacatagaattgcagatgatgggatgcatgcgagtgtccagtttggatttcttggatggataaacatgaccggaggaatggagact

SEQ ID NO: 22125 - protein, 205 aa, Zea mays subsp. mays
  peptide (1)..(205): Ceres Seq. ID no. 15180250
  misc_feature (82)..(197): Pfam Name: Pfam Description:  Rubella capsid protein
  misc_feature (122)..(199): NCBI GI NO: 14018072 NR Description: hypothetical protein [Oryza sativa]
KFAETKAAAQLGAPPHTTQPATSHGDCCDHHQEAERPRPLGRALPLRLAHARLALRRRAVRQRQRLVVVAGPTDLHVLADQPPGLVPLQPAQGARDEAAAAARARQADLPAAAPDHHQPSVRGGQADGQRAGADRRRRGRPVRAPRARGNRPPVPRRGAAPPPRRRRRRRRPAPPQPPLRRLRGRRPPRRQRPPIDPPPPCHRTV

SEQ ID NO: 22126 - protein, 194 aa, Zea mays subsp. mays
  peptide (1)..(194): Ceres Seq. ID no. 15180251
  misc_feature (15)..(186): NCBI GI NO: 24461857 NR Description: CTV.15 [Poncirus trifoliata]
  misc_feature (44)..(166): NCBI GI NO: 15238947 NR Description: expressed protein [Arabidopsis thaliana]
  misc_feature (35)..(163): NCBI GI NO: 15238753 NR Description: serine-rich protein [Arabidopsis thaliana]
  misc_feature (35)..(163): NCBI GI NO: 21618161 NR Description: serine-rich protein [Arabidopsis thaliana]
SLQKRKQQPNWELHPTQPNPPPLMATAATTTRRPSGPVLSAAHYRYASPTRVSLSGAGQSVSVSVSSSSRGRRTCMCSPTSHPGSFRCSLHKERATKPPPPHGHGKPTSPPPPLTTTSRLCAAGRRMGSALVRIGAVEGGQCARRALAATARPSPAAAQHRRRVGAGAGAARPRPSRLSAVSVAGDRPGDNGHL

SEQ ID NO: 22127 - protein, 171 aa, Zea mays subsp. mays
  peptide (1)..(171): Ceres Seq. ID no. 15180252
  misc_feature (1)..(163): NCBI GI NO: 24461857 NR Description: CTV.15 [Poncirus trifoliata]
  misc_feature (21)..(143): NCBI GI NO: 15238947 NR Description: expressed protein [Arabidopsis thaliana]
  misc_feature (12)..(140): NCBI GI NO: 15238753 NR Description: serine-rich protein [Arabidopsis thaliana]
  misc_feature (12)..(140): NCBI GI NO: 21618161 NR Description: serine-rich protein [Arabidopsis thaliana]
MATAATTTRRPSGPVLSAAHYRYASPTRVSLSGAGQSVSVSVSSSSRGRRTCMCSPTSHPGSFRCSLHKERATKPPPPHGHGKPTSPPPPLTTTSRLCAAGRRMGSALVRIGAVEGGQCARRALAATARPSPAAAQHRRRVGAGAGAARPRPSRLSAVSVAGDRPGDNGHL

SEQ ID NO: 22128 - DNA, 1162 bp, Zea mays subsp. mays
  misc_feature (1)..(1162): Ceres Seq. ID no. 13624277
gatttagtacaacgtctcctgtagtcctgtgtcctctcgcgcgccgcgccgcccctcaggccccagctctcgctctccagtctccaccgccgctccggtgctcccttccgggattcccctccggcgagcttgctcagctccgctccaggtttccacgtcgtccatggcgctcgtcgtgatgtgtgggcagccgtgcagcagtaaaacatcagccgccgcttgccttgctgtggcgctgcactcctcctcgcctgaccttactgtccgaatcatcgatgagtcatccctccatctcaggcgcaacgatagctacaaagatatggttgtggagaaaaacttgagagggcttcttagatcagaagttgacaggtctgtgtcacgcgacagcataattattgtcgactcgttgaataatattaaggggtaccgctatgagttgtggtgtcttgcgcgtgcatctggtgtaagatattgtgtgcttttttgtgatacagaagtggaccattgtaaggaatggaacaacaaccgccaggagaaaggggaaccagcatatgatactaatatatttgaagatcttgtaagtagatttgagaagccagatagacgcaatcgttgggattcccctctttttgaattgttcccatctagagatgaattagtggaaacagctcctgatattgctgaagctgtgtcatatttgacaaaaaaagtggattccaaaacaagagatgtaaaagttctccagcctacaatagccactcagacggtgcgaacaacagaggctaattccctctatgagatggacaaggcaacgcaggaggtggtcaatgcaattgttgaagcacagtcatgcggtcttgggcttgctgtgaataagatctccattggacccaacttgccaactatcaagcttgagagatctgttggcctacctgagctcagaagcctgcggagaactttcatcaagctggcagggcagtacagtctgagtgggccaccaccaccgacagatgctgacagcgcaaagaggatgtttgtcgactacttaaaccgtgaacttggtgcatgataattttcattcgcctgcgttgcatgaacactatgtagcatgtggttaactttggggaatagataattgaagacaacttgattgtacttgttc

SEQ ID NO: 22129 - protein, 301 aa, Zea mays subsp. mays
  peptide (1)..(301): Ceres Seq. ID no. 15219178
  misc_feature (1)..(300): NCBI GI NO: 15222972 NR Description: expressed protein [Arabidopsis thaliana]
  misc_feature (1)..(300): NCBI GI NO: 23504265 NR Description: DRL1 protein [Arabidopsis thaliana]
  misc_feature (1)..(233): NCBI GI NO: 28850452 NR Description: similar to similarity to S
  misc_feature (1)..(299): NCBI GI NO: 33300521 NR Description: Hypothetical protein Y57G11C.43
  misc_feature (1)..(299): NCBI GI NO: 39583457 NR Description: Hypothetical protein CBG21524
  misc_feature (123)..(267): NCBI GI NO: 20270210 NR Description: RIKEN cDNA 1110001A12 [Mus musculus]
  misc_feature (1)..(108): NCBI GI NO: 20270210 NR Description: RIKEN cDNA 1110001A12 [Mus musculus]
  misc_feature (1)..(299): NCBI GI NO: 6322739 NR Description: Protein involved in resistance to K
  misc_feature (130)..(267): NCBI GI NO: 19923939 NR Description: hypothetical protein BC012173 [Homo sapiens]
  misc_feature (1)..(108): NCBI GI NO: 19923939 NR Description: hypothetical protein BC012173 [Homo sapiens]
MALVVMCGQPCSSKTSAAACLAVALHSSSPDLTVRIIDESSLHLRRNDSYKDMVVEKNLRGLLRSEVDRSVSRDSIIIVDSLNNIKGYRYELWCLARASGVRYCVLFCDTEVDHCKEWNNNRQEKGEPAYDTNIFEDLVSRFEKPDRRNRWDSPLFELFPSRDELVETAPDIAEAVSYLTKKVDSKTRDVKVLQPTIATQTVRTTEANSLYEMDKATQEVVNAIVEAQSCGLGLAVNKISIGPNLPTIKLERSVGLPELRSLRRTFIKLAGQYSLSGPPPPTDADSAKRMFVDYLNRELGA

SEQ ID NO: 22130 - protein, 296 aa, Zea mays subsp. mays
  peptide (1)..(296): Ceres Seq. ID no. 15219179
  misc_feature (1)..(295): NCBI GI NO: 15222972 NR Description: expressed protein [Arabidopsis thaliana]
  misc_feature (1)..(295): NCBI GI NO: 23504265 NR Description: DRL1 protein [Arabidopsis thaliana]
  misc_feature (1)..(228): NCBI GI NO: 28850452 NR Description: similar to similarity to S
  misc_feature (1)..(294): NCBI GI NO: 33300521 NR Description: Hypothetical protein Y57G11C.43
  misc_feature (1)..(294): NCBI GI NO: 39583457 NR Description: Hypothetical protein CBG21524
  misc_feature (118)..(262): NCBI GI NO: 20270210 NR Description: RIKEN cDNA 1110001A12 [Mus musculus]
  misc_feature (1)..(103): NCBI GI NO: 20270210 NR Description: RIKEN cDNA 1110001A12 [Mus musculus]
  misc_feature (1)..(294): NCBI GI NO: 6322739 NR Description: Protein involved in resistance to K
  misc_feature (125)..(262): NCBI GI NO: 19923939 NR Description: hypothetical protein BC012173 [Homo sapiens]
  misc_feature (1)..(103): NCBI GI NO: 19923939 NR Description: hypothetical protein BC012173 [Homo sapiens]
MCGQPCSSKTSAAACLAVALHSSSPDLTVRIIDESSLHLRRNDSYKDMVVEKNLRGLLRSEVDRSVSRDSIIIVDSLNNIKGYRYELWCLARASGVRYCVLFCDTEVDHCKEWNNNRQEKGEPAYDTNIFEDLVSRFEKPDRRNRWDSPLFELFPSRDELVETAPDIAEAVSYLTKKVDSKTRDVKVLQPTIATQTVRTTEANSLYEMDKATQEVVNAIVEAQSCGLGLAVNKISIGPNLPTIKLERSVGLPELRSLRRTFIKLAGQYSLSGPPPPTDADSAKRMFVDYLNRELGA

SEQ ID NO: 22131 - protein, 249 aa, Zea mays subsp. mays
  peptide (1)..(249): Ceres Seq. ID no. 15219180
  misc_feature (1)..(248): NCBI GI NO: 15222972 NR Description: expressed protein [Arabidopsis thaliana]
  misc_feature (1)..(248): NCBI GI NO: 23504265 NR Description: DRL1 protein [Arabidopsis thaliana]
  misc_feature (1)..(181): NCBI GI NO: 28850452 NR Description: similar to similarity to S
  misc_feature (1)..(247): NCBI GI NO: 33300521 NR Description: Hypothetical protein Y57G11C.43
  misc_feature (1)..(247): NCBI GI NO: 39583457 NR Description: Hypothetical protein CBG21524
  misc_feature (71)..(215): NCBI GI NO: 20270210 NR Description: RIKEN cDNA 1110001A12 [Mus musculus]
  misc_feature (1)..(56): NCBI GI NO: 20270210 NR Description: RIKEN cDNA 1110001A12 [Mus musculus]
  misc_feature (1)..(247): NCBI GI NO: 6322739 NR Description: Protein involved in resistance to K
  misc_feature (78)..(215): NCBI GI NO: 19923939 NR Description: hypothetical protein BC012173 [Homo sapiens]
  misc_feature (1)..(56): NCBI GI NO: 19923939 NR Description: hypothetical protein BC012173 [Homo sapiens]
MVVEKNLRGLLRSEVDRSVSRDSIIIVDSLNNIKGYRYELWCLARASGVRYCVLFCDTEVDHCKEWNNNRQEKGEPAYDTNIFEDLVSRFEKPDRRNRWDSPLFELFPSRDELVETAPDIAEAVSYLTKKVDSKTRDVKVLQPTIATQTVRTTEANSLYEMDKATQEVVNAIVEAQSCGLGLAVNKISIGPNLPTIKLERSVGLPELRSLRRTFIKLAGQYSLSGPPPPTDADSAKRMFVDYLNRELGA

SEQ ID NO: 22132 - DNA, 663 bp, Zea mays subsp. mays
  misc_feature (1)..(663): Ceres Seq. ID no. 12634445
accacttcctcctcagtccgccgccgcagccgcctccctgtcgcccaccacacctcggtctcaaacccacgcacccgccgccgcgggaaaaatggccatggacgccgcagcgctggagtcgctcatcctggacctccacgccatcgaggcagtgaagctgggctccttcgtgctcaagtccggcatcacctcccccatctatctggacctccgcgcgctcgtctcccacccgcgcctgctctccgccgtctcctcgctcctccacgcgctccccgccacgcgcccctacggcctcgtctgcggcgtcccctacacggcgctccccatcgccgccgtcctctccgtcgaccgctccgtccccatgctcatgcgccgcaaggaggccaaggcccacggcaccgccaagtccatcgaggagcctgggaaggaagctctcaaatatcggtgacacgccgtctgttgaggagtttgtctttcttaagctatagagactgaggaagtaggttaggggacccaaaattacatttgtacgtgctatagtagcgtgagattgatgttgttgccatgattttagtagctagcccggggtactttatgctttgtgtacttgaggacacgccgccggtcacaaatactaatagtaatatatcaagggatacatgc

SEQ ID NO: 22133 - protein, 164 aa, Zea mays subsp. mays
  peptide (1)..(164): Ceres Seq. ID no. 12634446
TTSSSVRRRSRLPVAHHTSVSNPRTRRRGKNGHGRRSAGVAHPGPPRHRGSEAGLLRAQVRHHLPHLSGPPRARLPPAPALRRLLAPPRAPRHAPLRPRLRRPLHGAPHRRRPLRRPLRPHAHAPQGGQGPRHRQVHRGAWEGSSQISVTRRLLRSLSFLSYRD

SEQ ID NO: 22134 - protein, 148 aa, Zea mays subsp. mays
  peptide (1)..(148): Ceres Seq. ID no. 12634447
  misc_feature (31)..(145): NCBI GI NO: 9255871 NR Description: UMP synthase [Zea mays]
  misc_feature (33)..(138): NCBI GI NO: 7106173 NR Description: UMP synthase 1
  misc_feature (33)..(138): NCBI GI NO: 19386830 NR Description: putative UMP synthase 1
  misc_feature (33)..(145): NCBI GI NO: 9255873 NR Description: UMP synthase [Nicotiana plumbaginifolia]
  misc_feature (36)..(138): NCBI GI NO: 1076363 NR Description: bifunctional UMP synthase
  misc_feature (36)..(138): NCBI GI NO: 22331787 NR Description: similar to UMP synthase {Arabidopsis thaliana}
  misc_feature (33)..(145): NCBI GI NO: 28277693 NR Description: Unknown (protein for MGC:55723) [Danio rerio]
  misc_feature (48)..(145): NCBI GI NO: 2499946 NR Description: Uridine 5'-monophosphate synthase (UMP synthase)
  misc_feature (31)..(145): NCBI GI NO: 2081620 NR Description: UMP synthase [Homo sapiens]
  misc_feature (31)..(145): NCBI GI NO: 4507835 NR Description: uridine monophosphate synthetase
PLPPQSAAAAASLSPTTPRSQTHAPAAAGKMAMDAAALESLILDLHAIEAVKLGSFVLKSGITSPIYLDLRALVSHPRLLSAVSSLLHALPATRPYGLVCGVPYTALPIAAVLSVDRSVPMLMRRKEAKAHGTAKSIEEPGKEALKYR

SEQ ID NO: 22135 - protein, 118 aa, Zea mays subsp. mays
  peptide (1)..(118): Ceres Seq. ID no. 12634448
  misc_feature (1)..(115): NCBI GI NO: 9255871 NR Description: UMP synthase [Zea mays]
  misc_feature (3)..(108): NCBI GI NO: 7106173 NR Description: UMP synthase 1
  misc_feature (3)..(108): NCBI GI NO: 19386830 NR Description: putative UMP synthase 1
  misc_feature (3)..(115): NCBI GI NO: 9255873 NR Description: UMP synthase [Nicotiana plumbaginifolia]
  misc_feature (6)..(108): NCBI GI NO: 1076363 NR Description: bifunctional UMP synthase
  misc_feature (6)..(108): NCBI GI NO: 22331787 NR Description: similar to UMP synthase {Arabidopsis thaliana}
  misc_feature (3)..(115): NCBI GI NO: 28277693 NR Description: Unknown (protein for MGC:55723) [Danio rerio]
  misc_feature (18)..(115): NCBI GI NO: 2499946 NR Description: Uridine 5'-monophosphate synthase (UMP synthase)
  misc_feature (1)..(115): NCBI GI NO: 2081620 NR Description: UMP synthase [Homo sapiens]
  misc_feature (1)..(115): NCBI GI NO: 4507835 NR Description: uridine monophosphate synthetase
MAMDAAALESLILDLHAIEAVKLGSFVLKSGITSPIYLDLRALVSHPRLLSAVSSLLHALPATRPYGLVCGVPYTALPIAAVLSVDRSVPMLMRRKEAKAHGTAKSIEEPGKEALKYR

SEQ ID NO: 22136 - DNA, 952 bp, Zea mays subsp. mays
  misc_feature (1)..(952): Ceres Seq. ID no. 12590523
cgtaatcaaaaacttctgattcattttcagttctagctgtgtgctgaagtgttattctggatgtatacttgattatttgtcagtttcctaaacgcacaacacattactaccattactcccaccattgctatctaggtctgatatggtttttgtgagttcttaacttgtcgtttttgtcattttggtccaggagtgtagcaccaattagttcgagtgatgtatctctgcccacatcatcattagatctcccagatgttgcagatctctttgctccccctgcagacaatgcatcaaggaagagggaatcaaataggtctgctcttcatgactcgcgcaataaatttccaatggtgggagcacaaccctaaggcataggaagtgctgcagggaacaccctaattccaccgcagctccgtggaagtagccgatggatggagaatggtggatcgaggagaccgatgacgtactgctgcatcccgcgctgctcaatgggcagcagtaccggccagtctggtcaaacgacggcgctgtgatccacgcagatttccagttaagtttcttctgatggtgatggtactaaagaggactatgttcatatccgggcaaagcgaggccaagccactaacagccacagccttgcagaaagactggggagaaagaagataagtgagaggatgaagcttcttcaagatcttgttcctgaatgcagtaaggatcaagcggccttactggcccatttaaccaaggaatcatgcagccataattgatgtgcaccattgccaatcccgttgatgttttgcacggagctattcacgacgcgtcaacaatgaaccatgtaattttacagagtgacatactgatatatgtatatgcagttccatatgtgcttccaaagataatgccttaaacatctgtgcatcacaatatttagaatcatacacttgctctactc

SEQ ID NO: 22137 - protein, 46 aa, Zea mays subsp. mays
  peptide (1)..(46): Ceres Seq. ID no. 12590524
  misc_feature (1)..(24): NCBI GI NO: 28273388 NR Description: putative Helix-loop-helix DNA-binding domaincontaining protein
MCTIANPVDVLHGAIHDASTMNHVILQSDILIYVYAVPYVLPKIMP

SEQ ID NO: 22138 - protein, 45 aa, Zea mays subsp. mays
  peptide (1)..(45): Ceres Seq. ID no. 12590525
MDGEWWIEETDDVLLHPALLNGQQYRPVWSNDGAVIHADFQLSFF

SEQ ID NO: 22139 - protein, 40 aa, Zea mays subsp. mays
  peptide (1)..(40): Ceres Seq. ID no. 12590526
MLQISLLPLQTMHQGRGNQIGLLFMTRAINFQWWEHNPKA

SEQ ID NO: 22140 - DNA, 1063 bp, Zea mays subsp. mays
  misc_feature (1)..(1063): Ceres Seq. ID no. 13586635
cacgcgattctcgactcccctccacccatacgtaacacgttctcctcccacgcccccactaaaacagatgccttcgcccttcgtgcgccacaacggaaaacccaccactcgcgagcaagtgcaggcaccgttgcccatccatcgttcatgatcccagcctgcctccgcggcctctgcacctgcttcgacgtggacgacgacaaggctaacaaccacgagcaagagccgacgatggccgccgccgccgccgctacaggcagcgccgacgacgaccagacggcaagcaccatcacccaccgcaccgtggagctgagcaccggcgtgcgcctgcacgtggcggaggccggcggcgcggcggcaacagcagcaggaggcgcgcccgcggtgctgctgctgcacggcttcccggagctgtggtacacctggcgccaccagatgcgggcgctggccgcggccgggtaccgcgccgtggcgccggacctgcgcgggtacggcggctccgacgcgccggcggtgggcggcggcgacgacgacgacgacccggccgcgcagtacaccgcgctgcacgtggtgggggacctggtggcgctcctcgacgcgctcggcgagagccaggtgttcgtggcggcgcacgactggggcgcgctcgtggcctggagcctctgcctgttccggcccgaccgggtgcgcgcgctcgtcgcgctcagcgtcgcctacacgccccgcagcgccgcgcggaagccagtcgacggcctccgggcgctcttcggcgacgactactacatctgccggatccaggagcccggggaaatagaagcagaatttgctgcagagtggtgtcttcgcccaaggatgggaagagcggggagaagacgatgaccatcgatgtaggcgtatgcagggaaggcgagttcagccaagtagcaggagcatgagcttttattagagatagatgaagataggaagatttcaaattcttttcttcttcctttttcttgtacgagtccgttcctcggagagtatgaacttgtctcgtttcaaatcccaccttttttgtttaaac

SEQ ID NO: 22141 - protein, 292 aa, Zea mays subsp. mays
  peptide (1)..(292): Ceres Seq. ID no. 13586636
  misc_feature (154)..(276): Pfam Name: Pfam Description:  alpha/beta hydrolase fold
  misc_feature (94)..(275): NCBI GI NO: 34902880 NR Description: unnamed protein product
  misc_feature (94)..(277): NCBI GI NO: 34897302 NR Description: putative hydrolase
  misc_feature (97)..(276): NCBI GI NO: 25044843 NR Description: epoxide hydrolase [Ananas comosus]
  misc_feature (124)..(276): NCBI GI NO: 18411917 NR Description: epoxide hydrolase, putative [Arabidopsis thaliana]
  misc_feature (97)..(276): NCBI GI NO: 7489256 NR Description: probable epoxide hydrolase (EC 3
  misc_feature (97)..(277): NCBI GI NO: 15230018 NR Description: epoxide hydrolase, putative [Arabidopsis thaliana]
  misc_feature (94)..(267): NCBI GI NO: 34902882 NR Description: unnamed protein product
  misc_feature (94)..(276): NCBI GI NO: 34897298 NR Description: putative hydrolase
  misc_feature (99)..(276): NCBI GI NO: 15225781 NR Description: epoxide hydrolase (ATsEH) [Arabidopsis thaliana]
  misc_feature (99)..(276): NCBI GI NO: 16226396 NR Description: At2g26740/F18A8.11 [Arabidopsis thaliana]
HAILDSPPPIRNTFSSHAPTKTDAFALRAPQRKTHHSRASAGTVAHPSFMIPACLRGLCTCFDVDDDKANNHEQEPTMAAAAAATGSADDDQTASTITHRTVELSTGVRLHVAEAGGAAATAAGGAPAVLLLHGFPELWYTWRHQMRALAAAGYRAVAPDLRGYGGSDAPAVGGGDDDDDPAAQYTALHVVGDLVALLDALGESQVFVAAHDWGALVAWSLCLFRPDRVRALVALSVAYTPRSAARKPVDGLRALFGDDYYICRIQEPGEIEAEFAAEWCLRPRMGRAGRRR

SEQ ID NO: 22142 - protein, 243 aa, Zea mays subsp. mays
  peptide (1)..(243): Ceres Seq. ID no. 13586637
  misc_feature (105)..(227): Pfam Name: Pfam Description:  alpha/beta hydrolase fold
  misc_feature (45)..(226): NCBI GI NO: 34902880 NR Description: unnamed protein product
  misc_feature (45)..(228): NCBI GI NO: 34897302 NR Description: putative hydrolase
  misc_feature (48)..(227): NCBI GI NO: 25044843 NR Description: epoxide hydrolase [Ananas comosus]
  misc_feature (75)..(227): NCBI GI NO: 18411917 NR Description: epoxide hydrolase, putative [Arabidopsis thaliana]
  misc_feature (48)..(227): NCBI GI NO: 7489256 NR Description: probable epoxide hydrolase (EC 3
  misc_feature (48)..(228): NCBI GI NO: 15230018 NR Description: epoxide hydrolase, putative [Arabidopsis thaliana]
  misc_feature (45)..(218): NCBI GI NO: 34902882 NR Description: unnamed protein product
  misc_feature (45)..(227): NCBI GI NO: 34897298 NR Description: putative hydrolase
  misc_feature (50)..(227): NCBI GI NO: 15225781 NR Description: epoxide hydrolase (ATsEH) [Arabidopsis thaliana]
  misc_feature (50)..(227): NCBI GI NO: 16226396 NR Description: At2g26740/F18A8.11 [Arabidopsis thaliana]
MIPACLRGLCTCFDVDDDKANNHEQEPTMAAAAAATGSADDDQTASTITHRTVELSTGVRLHVAEAGGAAATAAGGAPAVLLLHGFPELWYTWRHQMRALAAAGYRAVAPDLRGYGGSDAPAVGGGDDDDDPAAQYTALHVVGDLVALLDALGESQVFVAAHDWGALVAWSLCLFRPDRVRALVALSVAYTPRSAARKPVDGLRALFGDDYYICRIQEPGEIEAEFAAEWCLRPRMGRAGRRR

SEQ ID NO: 22143 - protein, 215 aa, Zea mays subsp. mays
  peptide (1)..(215): Ceres Seq. ID no. 13586638
  misc_feature (77)..(199): Pfam Name: Pfam Description:  alpha/beta hydrolase fold
  misc_feature (17)..(198): NCBI GI NO: 34902880 NR Description: unnamed protein product
  misc_feature (17)..(200): NCBI GI NO: 34897302 NR Description: putative hydrolase
  misc_feature (20)..(199): NCBI GI NO: 25044843 NR Description: epoxide hydrolase [Ananas comosus]
  misc_feature (47)..(199): NCBI GI NO: 18411917 NR Description: epoxide hydrolase, putative [Arabidopsis thaliana]
  misc_feature (20)..(199): NCBI GI NO: 7489256 NR Description: probable epoxide hydrolase (EC 3
  misc_feature (20)..(200): NCBI GI NO: 15230018 NR Description: epoxide hydrolase, putative [Arabidopsis thaliana]
  misc_feature (17)..(190): NCBI GI NO: 34902882 NR Description: unnamed protein product
  misc_feature (17)..(199): NCBI GI NO: 34897298 NR Description: putative hydrolase
  misc_feature (22)..(199): NCBI GI NO: 15225781 NR Description: epoxide hydrolase (ATsEH) [Arabidopsis thaliana]
  misc_feature (22)..(199): NCBI GI NO: 16226396 NR Description: At2g26740/F18A8.11 [Arabidopsis thaliana]
MAAAAAATGSADDDQTASTITHRTVELSTGVRLHVAEAGGAAATAAGGAPAVLLLHGFPELWYTWRHQMRALAAAGYRAVAPDLRGYGGSDAPAVGGGDDDDDPAAQYTALHVVGDLVALLDALGESQVFVAAHDWGALVAWSLCLFRPDRVRALVALSVAYTPRSAARKPVDGLRALFGDDYYICRIQEPGEIEAEFAAEWCLRPRMGRAGRRR

SEQ ID NO: 22144 - DNA, 970 bp, Zea mays subsp. mays
  misc_feature (1)..(970): Ceres Seq. ID no. 12590628
agaaaggagaggtggtggggcgatggcagcgactgcggcggagggggtggccgcgacggcgctgcgagccgtgctggggcgggcgggtatggcggcggagcggtcggggcgcgccgcggaggcggtacgggttgtggcggtggggaagaccaagcctgtttcgatgctgcggcagctatacgacgcgggccaccgctgcttcagcgagaactacgtgcaggagttcgtcaccaaggccccccagcttccgcaagatacccggtggcattttatcgggcacctgcagagcaacaaagtgaaaccactgttagctgctgttccaaatcttgatatggttgagggcgtagacaatgaaaagattgctaaccacctagatcgagccgtcaacagtttgggaaggcagcctttgaaagttttggttcaagtgaacactagtggagaagaatctaaatctggaatcgatccctccaaatgtgtcgaccttgctaagcatgtgaaactagcatgcccacacctaatattttcaggtctgatgacaataggtatgaaagactactcgtcaacaccagaaaattttaaggcattggttaattgtaagcttgaagtttgcaaggcccttgacataccaacagaacagtttgaactctccatgggaatgtctggtgactttgagcaggcgattgagatgggcagcacgaatgtgaggattggatcaaccatttttggaccaagggagtatccaaacaaaaggcagaactagtgagattcaacgcataagtgtcatctcaatacccagtcctcttgattaaccttttgcctatgtaagcatgatgctatgtataaatgcacatgtgaataggtaacatgtacaaccccatacaacactgtttgcagggggagggggaaccctccatacaacagtacggcattgtagaagaaattttgtgacatggtcttgaatagaaatttc

SEQ ID NO: 22145 - protein, 252 aa, Zea mays subsp. mays
  peptide (1)..(252): Ceres Seq. ID no. 12590629
  misc_feature (18)..(246): Pfam Name: Pfam Description:  Alanine racemase, N-terminal domain
  misc_feature (8)..(249): NCBI GI NO: 18416879 NR Description: putative Proline synthetase associated protein
  misc_feature (8)..(249): NCBI GI NO: 14030629 NR Description: AT4g26860/F10M23_200 [Arabidopsis thaliana]
  misc_feature (1)..(249): NCBI GI NO: 30682530 NR Description: Proline synthetase associated protein -related
  misc_feature (1)..(249): NCBI GI NO: 18391333 NR Description: putative Proline synthetase associated protein
  misc_feature (8)..(239): NCBI GI NO: 7445224 NR Description: hypothetical protein F10M23
  misc_feature (103)..(227): NCBI GI NO: 19386824 NR Description: B1147A04.19
  misc_feature (12)..(250): NCBI GI NO: 11359716 NR Description: conserved hypothetical protein
  misc_feature (5)..(249): NCBI GI NO: 16930823 NR Description: proline synthetase co-transcribed [Mus musculus]
  misc_feature (6)..(249): NCBI GI NO: 6005842 NR Description: proline synthetase co-transcribed homolog
  misc_feature (4)..(249): NCBI GI NO: 34879017 NR Description: similar to Proline synthetase associated
ERRGGGAMAATAAEGVAATALRAVLGRAGMAAERSGRAAEAVRVVAVGKTKPVSMLRQLYDAGHRCFSENYVQEFVTKAPQLPQDTRWHFIGHLQSNKVKPLLAAVPNLDMVEGVDNEKIANHLDRAVNSLGRQPLKVLVQVNTSGEESKSGIDPSKCVDLAKHVKLACPHLIFSGLMTIGMKDYSSTPENFKALVNCKLEVCKALDIPTEQFELSMGMSGDFEQAIEMGSTNVRIGSTIFGPREYPNKRQN

SEQ ID NO: 22146 - protein, 245 aa, Zea mays subsp. mays
  peptide (1)..(245): Ceres Seq. ID no. 12590630
  misc_feature (11)..(239): Pfam Name: Pfam Description:  Alanine racemase, N-terminal domain
  misc_feature (1)..(242): NCBI GI NO: 18416879 NR Description: putative Proline synthetase associated protein
  misc_feature (1)..(242): NCBI GI NO: 14030629 NR Description: AT4g26860/F10M23_200 [Arabidopsis thaliana]
  misc_feature (1)..(242): NCBI GI NO: 30682530 NR Description: Proline synthetase associated protein -related
  misc_feature (1)..(242): NCBI GI NO: 18391333 NR Description: putative Proline synthetase associated protein
  misc_feature (1)..(232): NCBI GI NO: 7445224 NR Description: hypothetical protein F10M23
  misc_feature (96)..(220): NCBI GI NO: 19386824 NR Description: B1147A04.19
  misc_feature (5)..(243): NCBI GI NO: 11359716 NR Description: conserved hypothetical protein
  misc_feature (1)..(242): NCBI GI NO: 16930823 NR Description: proline synthetase co-transcribed [Mus musculus]
  misc_feature (1)..(242): NCBI GI NO: 6005842 NR Description: proline synthetase co-transcribed homolog
  misc_feature (1)..(242): NCBI GI NO: 34879017 NR Description: similar to Proline synthetase associated
MAATAAEGVAATALRAVLGRAGMAAERSGRAAEAVRVVAVGKTKPVSMLRQLYDAGHRCFSENYVQEFVTKAPQLPQDTRWHFIGHLQSNKVKPLLAAVPNLDMVEGVDNEKIANHLDRAVNSLGRQPLKVLVQVNTSGEESKSGIDPSKCVDLAKHVKLACPHLIFSGLMTIGMKDYSSTPENFKALVNCKLEVCKALDIPTEQFELSMGMSGDFEQAIEMGSTNVRIGSTIFGPREYPNKRQN

SEQ ID NO: 22147 - protein, 223 aa, Zea mays subsp. mays
  peptide (1)..(223): Ceres Seq. ID no. 12590631
  misc_feature (1)..(217): Pfam Name: Pfam Description:  Alanine racemase, N-terminal domain
  misc_feature (1)..(220): NCBI GI NO: 18416879 NR Description: putative Proline synthetase associated protein
  misc_feature (1)..(220): NCBI GI NO: 14030629 NR Description: AT4g26860/F10M23_200 [Arabidopsis thaliana]
  misc_feature (1)..(220): NCBI GI NO: 30682530 NR Description: Proline synthetase associated protein -related
  misc_feature (1)..(220): NCBI GI NO: 18391333 NR Description: putative Proline synthetase associated protein
  misc_feature (1)..(210): NCBI GI NO: 7445224 NR Description: hypothetical protein F10M23
  misc_feature (74)..(198): NCBI GI NO: 19386824 NR Description: B1147A04.19
  misc_feature (1)..(221): NCBI GI NO: 11359716 NR Description: conserved hypothetical protein
  misc_feature (1)..(220): NCBI GI NO: 16930823 NR Description: proline synthetase co-transcribed [Mus musculus]
  misc_feature (1)..(220): NCBI GI NO: 6005842 NR Description: proline synthetase co-transcribed homolog
  misc_feature (1)..(220): NCBI GI NO: 34879017 NR Description: similar to Proline synthetase associated
MAAERSGRAAEAVRVVAVGKTKPVSMLRQLYDAGHRCFSENYVQEFVTKAPQLPQDTRWHFIGHLQSNKVKPLLAAVPNLDMVEGVDNEKIANHLDRAVNSLGRQPLKVLVQVNTSGEESKSGIDPSKCVDLAKHVKLACPHLIFSGLMTIGMKDYSSTPENFKALVNCKLEVCKALDIPTEQFELSMGMSGDFEQAIEMGSTNVRIGSTIFGPREYPNKRQN

SEQ ID NO: 22148 - DNA, 789 bp, Zea mays subsp. mays
  misc_feature (1)..(789): Ceres Seq. ID no. 13586610
gtcggataagccgcgcgccgtcgccgtggccatggcgtccctctcccccgcgctcctccccggcgccggcgtgaccctcctccgagcgccgcccgtgttccgcgtcaccgcctcttcctcgagctcggggagcaagaagggcaagaagcccaagagcggcagcaagggcaaggacaccaaggcgctggagcctccagcgcccgtggtccgccgcgcgccgccgggaagcgcctccatattccagcagcagaagaatgaggcggcgtccagggccgggggcgccggtgggaaggggcccacggaggaggagctacggcagcggcaggccaacgagaacgccttcctcctcgcctggcttgggctaggcatcatcatccttgtcgagggcatcgcactcgccgcctccggttttctgccagaggaatatgacagcttctttgttaagtacctttatccatcgttcactccaacagttgttctgtttttggctggtacggttgggtatggtgtcctcaaatactttgaaagcgagaaaagcaaaagctagatgacagcacgaagcatgtttggagcaatgatgagggtagagttagcaaatgtgcttgttatgtatgaagtagcttaaagcagcagatatgtgccagagaataggctggtgtttttatttatttttccttatatcctgcatcccaaattcctaattattcttttttgtttgtttgtaaattaacgatcaatggatactttcctgaatatgtattaagttgagttgtatattggtttttggcg

SEQ ID NO: 22149 - protein, 181 aa, Zea mays subsp. mays
  peptide (1)..(181): Ceres Seq. ID no. 13586611
  misc_feature (38)..(180): NCBI GI NO: 15242116 NR Description: hypothetical protein [Arabidopsis thaliana]
SDKPRAVAVAMASLSPALLPGAGVTLLRAPPVFRVTASSSSSGSKKGKKPKSGSKGKDTKALEPPAPVVRRAPPGSASIFQQQKNEAASRAGGAGGKGPTEEELRQRQANENAFLLAWLGLGIIILVEGIALAASGFLPEEYDSFFVKYLYPSFTPTVVLFLAGTVGYGVLKYFESEKSKS

SEQ ID NO: 22150 - protein, 171 aa, Zea mays subsp. mays
  peptide (1)..(171): Ceres Seq. ID no. 13586612
  misc_feature (28)..(170): NCBI GI NO: 15242116 NR Description: hypothetical protein [Arabidopsis thaliana]
MASLSPALLPGAGVTLLRAPPVFRVTASSSSSGSKKGKKPKSGSKGKDTKALEPPAPVVRRAPPGSASIFQQQKNEAASRAGGAGGKGPTEEELRQRQANENAFLLAWLGLGIIILVEGIALAASGFLPEEYDSFFVKYLYPSFTPTVVLFLAGTVGYGVLKYFESEKSKS

SEQ ID NO: 22151 - DNA, 2053 bp, Zea mays subsp. mays
  misc_feature (1)..(2053): Ceres Seq. ID no. 15180230
agtatcgacgcccttctaaaaccctaactccctctgtgtcctcgacgccgccaagccatcctccctctggagtaccgaccgactctccacctcaggaccgcaagctacttcctccgcctcgacaggcgtcggcgagatggtgaagagaagcaagaagagcaagagcaagcgcgtcacgctgcggcagaagcacaaggtgctgcgcaaggtgaaggagcaccaccgcaagaagcgcaaggaggccaagaaggagggcaaggccggccagcggaagaaggtcgagaaggaccccgggatccccaacgagtggcccttcaaggagcaggagctcaaggcgctcgaggcccgacgcgcgcaggcgctccaggagctcgagctcaagaaggaggcgcgcaaggagagggctcggaagaggaagctaggattgctcgaggatgaggaaattgctaatttggcatctgcagcttccgcgcagggcagtgagtttgcagcaaaggatgcagcaaaggataaagctcctttaacagtggcaaagagcaatgatcattctgagagatctttctacaaggagcttgttaaagtaatcgaagcttctgatgtgattcttgaggttcttgatgcaagagatccgctgggcacccgttgcattgacatggaaaagatggttaggaaggctgatccaagtaaacggattgtactacttctcaacaagatagatcttgttcctaaggaggcggtagagaagtggcttacatatctgagagaagaaatgccaacagttgcgtttaagtgtaatacccaagagcagcggaccaagctgggatggaaatcttcaaaactagataaaacaaacatcatcccacaaagtagtgattgccttggtgctgagaatctaattagattgctcaagaattattccagaagccacgagctcaaactggcaattacggtgggtattgttggactccctaatgttggcaagagcagtctgatcaacagcctgaagaggtcccgagtggttaatgtcggttccactccaggggttactagatcaatgcaagaagttcaattagacaagaaggtaaagttgttggattgtcctggtgttgttatgctcaaatcttccaacagcggtgtgtctgtagctcttcgaaactgcaaaagagttgagaaaatggaagatccagtcactcctgttaaggagatccttggtatttgcccacatgagaagttgctgtctatgtataaggttccaagcttcagttcagttgatgatttccttcagaaagtatcaactgtacgggggaaattgaaaaagggtggtgtggtggatgttgaagctgctgcgagaattgtgcttcatgactggaatgaaggtaaaataccatattttacactgccacctaaaagagatgctgtggaggactcagatgtagtgattatatcagaagatgtgaaagaatttaatattgatgaaatttacaaagctgagtcttcatatattggtggtttgaagtccattgaggagttccatcatattgagattcctcctaatgctccaccggcaattgacgaagagatgctagaggatggcagcaaaccaagtgaacccgctcaggaaaaccgggaggagcaaatgtctgacgcgaacgacccacaaggaagcaagccagccaccgccagcacgcagaacgacaagttgtacaccgccgagggcatactcgaccctcgcaagaggaaagcagagaagaaacggcgcaaggcgaacaggttcagtctgctgaacgacatggacgcggactacgatttcaaggtggattaccagatggaggacgccgcggatggtgaagacgaagacgctggggatgaagccaaggaggataatgagccgatgactggcgtcgacgattcgtgaaattttggccccttcgtcgtgtatgaggtgatggctaggctcagcgggggttgcaaaattgacccaccaaggttttgtgctcagtttgcttgtttaatgaaaagattatactatgagaaggcttgcgttttacctgtg

SEQ ID NO: 22152 - protein, 592 aa, Zea mays subsp. mays
  peptide (1)..(592): Ceres Seq. ID no. 15180231
  misc_feature (1)..(592): NCBI GI NO: 34914820 NR Description: putative GTPase
  misc_feature (1)..(589): NCBI GI NO: 15231373 NR Description: GTPase -related [Arabidopsis thaliana]
  misc_feature (37)..(540): NCBI GI NO: 15451214 NR Description: putative GTPase [Arabidopsis thaliana]
  misc_feature (1)..(551): NCBI GI NO: 39587211 NR Description: Hypothetical protein CBG00673
  misc_feature (1)..(551): NCBI GI NO: 17534827 NR Description: nucleostemin (62.3 kD) (2I572)
  misc_feature (2)..(552): NCBI GI NO: 21428328 NR Description: AT23067p [Drosophila melanogaster]
  misc_feature (2)..(552): NCBI GI NO: 24647590 NR Description: CG3983-PB [Drosophila melanogaster]
  misc_feature (2)..(591): NCBI GI NO: 31209693 NR Description: ENSANGP00000012225 [Anopheles gambiae]
  misc_feature (30)..(530): NCBI GI NO: 33468623 NR Description: SI:zK13A21
  misc_feature (15)..(451): NCBI GI NO: 9506611 NR Description: hypothetical protein FLJ10613 [Homo sapiens]
MVKRSKKSKSKRVTLRQKHKVLRKVKEHHRKKRKEAKKEGKAGQRKKVEKDPGIPNEWPFKEQELKALEARRAQALQELELKKEARKERARKRKLGLLEDEEIANLASAASAQGSEFAAKDAAKDKAPLTVAKSNDHSERSFYKELVKVIEASDVILEVLDARDPLGTRCIDMEKMVRKADPSKRIVLLLNKIDLVPKEAVEKWLTYLREEMPTVAFKCNTQEQRTKLGWKSSKLDKTNIIPQSSDCLGAENLIRLLKNYSRSHELKLAITVGIVGLPNVGKSSLINSLKRSRVVNVGSTPGVTRSMQEVQLDKKVKLLDCPGVVMLKSSNSGVSVALRNCKRVEKMEDPVTPVKEILGICPHEKLLSMYKVPSFSSVDDFLQKVSTVRGKLKKGGVVDVEAAARIVLHDWNEGKIPYFTLPPKRDAVEDSDVVIISEDVKEFNIDEIYKAESSYIGGLKSIEEFHHIEIPPNAPPAIDEEMLEDGSKPSEPAQENREEQMSDANDPQGSKPATASTQNDKLYTAEGILDPRKRKAEKKRRKANRFSLLNDMDADYDFKVDYQMEDAADGEDEDAGDEAKEDNEPMTGVDDS

SEQ ID NO: 22153 - protein, 420 aa, Zea mays subsp. mays
  peptide (1)..(420): Ceres Seq. ID no. 15180232
  misc_feature (1)..(420): NCBI GI NO: 34914820 NR Description: putative GTPase
  misc_feature (1)..(417): NCBI GI NO: 15231373 NR Description: GTPase -related [Arabidopsis thaliana]
  misc_feature (1)..(368): NCBI GI NO: 15451214 NR Description: putative GTPase [Arabidopsis thaliana]
  misc_feature (1)..(379): NCBI GI NO: 39587211 NR Description: Hypothetical protein CBG00673
  misc_feature (1)..(379): NCBI GI NO: 17534827 NR Description: nucleostemin (62.3 kD) (2I572)
  misc_feature (1)..(380): NCBI GI NO: 21428328 NR Description: AT23067p [Drosophila melanogaster]
  misc_feature (1)..(380): NCBI GI NO: 24647590 NR Description: CG3983-PB [Drosophila melanogaster]
  misc_feature (1)..(419): NCBI GI NO: 31209693 NR Description: ENSANGP00000012225 [Anopheles gambiae]
  misc_feature (1)..(358): NCBI GI NO: 33468623 NR Description: SI:zK13A21
  misc_feature (1)..(279): NCBI GI NO: 9506611 NR Description: hypothetical protein FLJ10613 [Homo sapiens]
MEKMVRKADPSKRIVLLLNKIDLVPKEAVEKWLTYLREEMPTVAFKCNTQEQRTKLGWKSSKLDKTNIIPQSSDCLGAENLIRLLKNYSRSHELKLAITVGIVGLPNVGKSSLINSLKRSRVVNVGSTPGVTRSMQEVQLDKKVKLLDCPGVVMLKSSNSGVSVALRNCKRVEKMEDPVTPVKEILGICPHEKLLSMYKVPSFSSVDDFLQKVSTVRGKLKKGGVVDVEAAARIVLHDWNEGKIPYFTLPPKRDAVEDSDVVIISEDVKEFNIDEIYKAESSYIGGLKSIEEFHHIEIPPNAPPAIDEEMLEDGSKPSEPAQENREEQMSDANDPQGSKPATASTQNDKLYTAEGILDPRKRKAEKKRRKANRFSLLNDMDADYDFKVDYQMEDAADGEDEDAGDEAKEDNEPMTGVDDS

SEQ ID NO: 22154 - protein, 417 aa, Zea mays subsp. mays
  peptide (1)..(417): Ceres Seq. ID no. 15180233
  misc_feature (1)..(417): NCBI GI NO: 34914820 NR Description: putative GTPase
  misc_feature (1)..(414): NCBI GI NO: 15231373 NR Description: GTPase -related [Arabidopsis thaliana]
  misc_feature (1)..(365): NCBI GI NO: 15451214 NR Description: putative GTPase [Arabidopsis thaliana]
  misc_feature (1)..(376): NCBI GI NO: 39587211 NR Description: Hypothetical protein CBG00673
  misc_feature (1)..(376): NCBI GI NO: 17534827 NR Description: nucleostemin (62.3 kD) (2I572)
  misc_feature (1)..(377): NCBI GI NO: 21428328 NR Description: AT23067p [Drosophila melanogaster]
  misc_feature (1)..(377): NCBI GI NO: 24647590 NR Description: CG3983-PB [Drosophila melanogaster]
  misc_feature (1)..(416): NCBI GI NO: 31209693 NR Description: ENSANGP00000012225 [Anopheles gambiae]
  misc_feature (1)..(355): NCBI GI NO: 33468623 NR Description: SI:zK13A21
  misc_feature (1)..(276): NCBI GI NO: 9506611 NR Description: hypothetical protein FLJ10613 [Homo sapiens]
MVRKADPSKRIVLLLNKIDLVPKEAVEKWLTYLREEMPTVAFKCNTQEQRTKLGWKSSKLDKTNIIPQSSDCLGAENLIRLLKNYSRSHELKLAITVGIVGLPNVGKSSLINSLKRSRVVNVGSTPGVTRSMQEVQLDKKVKLLDCPGVVMLKSSNSGVSVALRNCKRVEKMEDPVTPVKEILGICPHEKLLSMYKVPSFSSVDDFLQKVSTVRGKLKKGGVVDVEAAARIVLHDWNEGKIPYFTLPPKRDAVEDSDVVIISEDVKEFNIDEIYKAESSYIGGLKSIEEFHHIEIPPNAPPAIDEEMLEDGSKPSEPAQENREEQMSDANDPQGSKPATASTQNDKLYTAEGILDPRKRKAEKKRRKANRFSLLNDMDADYDFKVDYQMEDAADGEDEDAGDEAKEDNEPMTGVDDS

SEQ ID NO: 22155 - DNA, 962 bp, Zea mays subsp. mays
  misc_feature (1)..(962): Ceres Seq. ID no. 13599004
aacatcaaagcagagaaatgctgtcgcctgccaatctgttgccagccgttggattgcttcaacggtggagagcagctgactgggtgagccttcggtgggcgacggcaggcgatcccagtccagcacctccccctcccttcctatctctctgatctctccctcgctctcgcagccgccactgtagaagcttcgaggctgctgctgcgcccatggccgcggaagccaagacgccgtccctcgctgaggaatattcacttccaccacaggaagttccagtggaaaaggtagctgaggagaagccctctagtggtactgagactgaatctgctccttcaaccaatgatgggactccttcatctgtagaagataagaatgaaacatctgaagtacaagatgctgctgaaaagtcagacgcagaagaaactaacactgctgcagaggaagcaagtgagactaccgaggaggaagaggctgagaaacctgagatcaagattgaaacagctccagcagattttcgtttcccaacaacaaatcaaacgaggcactgtttcacacgctatgttgaataccacaggtgtgtggctgcaaaaggtgaggatgcacctgagtgtgataagtttgccaagtactatcgatccctgtgcccaggtgaatgggttgaacgctggaacgagcagcgtgaaaatggcacgttccctggacctctgtaatcctacaatgcaaaaagaattaggaactcacgatgttgtgccggccttctcctccttggtaactggcgccaagttagcagggagagagacaaatcatcctctttggagctctctacaaaataagagattctttttgacttgaagaatgccttgttgctcttcctaacggtcttgttctgcgctgctgagaaaccagcgtcacagttacatttttgtccgtatatacagtttaaaataaatgattcatgattc

SEQ ID NO: 22156 - protein, 166 aa, Zea mays subsp. mays
  peptide (1)..(166): Ceres Seq. ID no. 15222486
  misc_feature (92)..(165): Pfam Name: Pfam Description:  Cytochrome oxidase c subunit VIb
  misc_feature (1)..(166): NCBI GI NO: 4586449 NR Description: cytochrome c oxidase subunit 6b-1
  misc_feature (1)..(166): NCBI GI NO: 22204116 NR Description: putative cytochrome c oxidase subunit
  misc_feature (2)..(166): NCBI GI NO: 34906824 NR Description: putative cytochrome c oxidase subunit 6b-1
  misc_feature (2)..(166): NCBI GI NO: 15219886 NR Description: cytochrome c oxidase subunit -related
  misc_feature (2)..(166): NCBI GI NO: 21554378 NR Description: cytochrome c oxidase subunit, putative
  misc_feature (92)..(166): NCBI GI NO: 9967162 NR Description: cytochrome c oxidase subunit 6b
  misc_feature (92)..(166): NCBI GI NO: 18424030 NR Description: expressed protein [Arabidopsis thaliana]
  misc_feature (90)..(166): NCBI GI NO: 15234375 NR Description: hypothetical protein [Arabidopsis thaliana]
  misc_feature (92)..(166): NCBI GI NO: 21592329 NR Description: cytochrome c oxidase subunit 6b
  misc_feature (80)..(164): NCBI GI NO: 38048151 NR Description: similar to Drosophila melanogaster CG14235
MAAEAKTPSLAEEYSLPPQEVPVEKVAEEKPSSGTETESAPSTNDGTPSSVEDKNETSEVQDAAEKSDAEETNTAAEEASETTEEEEAEKPEIKIETAPADFRFPTTNQTRHCFTRYVEYHRCVAAKGEDAPECDKFAKYYRSLCPGEWVERWNEQRENGTFPGPL

SEQ ID NO: 22157 - protein, 159 aa, Zea mays subsp. mays
  peptide (1)..(159): Ceres Seq. ID no. 15222487
MKHLKYKMLLKSQTQKKLTLLQRKQVRLPRRKRLRNLRSRLKQLQQIFVSQQQIKRGTVSHAMLNTTGVWLQKVRMHLSVISLPSTIDPCAQVNGLNAGTSSVKMARSLDLCNPTMQKELGTHDVVPAFSSLVTGAKLAGRETNHPLWSSLQNKRFFLT

SEQ ID NO: 22158 - protein, 152 aa, Zea mays subsp. mays
  peptide (1)..(152): Ceres Seq. ID no. 15222488
MLLKSQTQKKLTLLQRKQVRLPRRKRLRNLRSRLKQLQQIFVSQQQIKRGTVSHAMLNTTGVWLQKVRMHLSVISLPSTIDPCAQVNGLNAGTSSVKMARSLDLCNPTMQKELGTHDVVPAFSSLVTGAKLAGRETNHPLWSSLQNKRFFLT

SEQ ID NO: 22159 - DNA, 1365 bp, Zea mays subsp. mays
  misc_feature (1)..(1365): Ceres Seq. ID no. 13586619
tcaaaccatcaatcacagagcaactcgaatagcagctccaacaaaagctcaacgcaccagcagcaatggcgtctcgccgtttcttctacgacgacccctacgactactactacacctccccgtaccactacgcctacccctattaccggtaccagcaccccgatccgtcccgcggcgtcggcgggttcttcccggccgccgcagaagccgcgccggaggcggtgaaggtggacccgcggcccagggtcgagtcttcgaggtcggtctccgttcccgtccgcttcgtcggttccgacccggagccggtgcgcggggcggccaggatgccaccggcggcggtgccgaggaagcgggcgccgtcggcggaagcggcggcggtgctgctgcaggccgcggtgcgcgggttcatggcgaggaagtcggtgcgtgctgttcgcgaggtggagcgtgaggcggcggaggtcggcgagaaggttgcgcgcgaggcggaggcgctgcgcggagacgcgagggcgcggatcgccgtcggggaggcgctgatgaagatgctgctgcggctcgatgcggtgcgcggcgcgcgggaataccggaagagggtcaccaagcgggtcctcgcgctgcaggatgctgttgacgccctcgaaccaaagccgacgccggattcggaggtcgtggcggaggagagcgagtctgaggtgacgtccgagatggcggacgacagcgccgaggcgacggagatgccggtcgccgcggagcacagcggcggcattgaggtgaatgcggcggctgagacggttgccgatatggaggtggacgggggcaaagctgacagcgaggcggtgccagaagcggtgaaggaatccgaaaataagcaggacgacgggcacattaacggcgaccagacggaagtctccaatgagggcgaatgggagatggtggcggatgaagcggagcctacaactgcggcgacgggttccaccgaggcgcccccgcagacaccgatgacgagcgaggtgatgaggccgacagtggaggccggagctgccgacagcgccctggacactcggaaggttatggagatggtcgcggccctgtgcgagcagaacgcgcagcagtgcgcggtgatcggggctctggcggagcgcgtggacgcgcttgagcgcgccgtgcggcgggtggaggacgccgagcgccgccgccggcggggcaagaagctgaagaaggatgggaaggggagcaataggtgctacaccgattgaggacagctctgcttcttatttgtttttacatggttagaccaggaaccttcacgagctgtagaatttagttcttgttggccaaaaaaaaaaaaaaaaaggcttggcg

SEQ ID NO: 22160 - protein, 397 aa, Zea mays subsp. mays
  peptide (1)..(397): Ceres Seq. ID no. 13586620
  misc_feature (123)..(192): Pfam Name: Pfam Description:  BAG domain
  misc_feature (161)..(397): NCBI GI NO: 4185307 NR Description: unknown [Zea mays]
  misc_feature (1)..(389): NCBI GI NO: 22208514 NR Description: hypothetical protein [Sorghum bicolor]
  misc_feature (10)..(389): NCBI GI NO: 22208518 NR Description: hypothetical protein [Sorghum bicolor]
  misc_feature (10)..(389): NCBI GI NO: 22208514 NR Description: hypothetical protein [Sorghum bicolor]
MASRRFFYDDPYDYYYTSPYHYAYPYYRYQHPDPSRGVGGFFPAAAEAAPEAVKVDPRPRVESSRSVSVPVRFVGSDPEPVRGAARMPPAAVPRKRAPSAEAAAVLLQAAVRGFMARKSVRAVREVEREAAEVGEKVAREAEALRGDARARIAVGEALMKMLLRLDAVRGAREYRKRVTKRVLALQDAVDALEPKPTPDSEVVAEESESEVTSEMADDSAEATEMPVAAEHSGGIEVNAAAETVADMEVDGGKADSEAVPEAVKESENKQDDGHINGDQTEVSNEGEWEMVADEAEPTTAATGSTEAPPQTPMTSEVMRPTVEAGAADSALDTRKVMEMVAALCEQNAQQCAVIGALAERVDALERAVRRVEDAERRRRRGKKLKKDGKGSNRCYTD

SEQ ID NO: 22161 - protein, 311 aa, Zea mays subsp. mays
  peptide (1)..(311): Ceres Seq. ID no. 13586621
  misc_feature (37)..(106): Pfam Name: Pfam Description:  BAG domain
  misc_feature (75)..(311): NCBI GI NO: 4185307 NR Description: unknown [Zea mays]
  misc_feature (1)..(303): NCBI GI NO: 22208514 NR Description: hypothetical protein [Sorghum bicolor]
  misc_feature (1)..(303): NCBI GI NO: 22208518 NR Description: hypothetical protein [Sorghum bicolor]
  misc_feature (1)..(303): NCBI GI NO: 22208514 NR Description: hypothetical protein [Sorghum bicolor]
MPPAAVPRKRAPSAEAAAVLLQAAVRGFMARKSVRAVREVEREAAEVGEKVAREAEALRGDARARIAVGEALMKMLLRLDAVRGAREYRKRVTKRVLALQDAVDALEPKPTPDSEVVAEESESEVTSEMADDSAEATEMPVAAEHSGGIEVNAAAETVADMEVDGGKADSEAVPEAVKESENKQDDGHINGDQTEVSNEGEWEMVADEAEPTTAATGSTEAPPQTPMTSEVMRPTVEAGAADSALDTRKVMEMVAALCEQNAQQCAVIGALAERVDALERAVRRVEDAERRRRRGKKLKKDGKGSNRCYTD

SEQ ID NO: 22162 - protein, 283 aa, Zea mays subsp. mays
  peptide (1)..(283): Ceres Seq. ID no. 13586622
  misc_feature (9)..(78): Pfam Name: Pfam Description:  BAG domain
  misc_feature (47)..(283): NCBI GI NO: 4185307 NR Description: unknown [Zea mays]
  misc_feature (1)..(275): NCBI GI NO: 22208514 NR Description: hypothetical protein [Sorghum bicolor]
  misc_feature (1)..(275): NCBI GI NO: 22208518 NR Description: hypothetical protein [Sorghum bicolor]
  misc_feature (1)..(275): NCBI GI NO: 22208514 NR Description: hypothetical protein [Sorghum bicolor]
MARKSVRAVREVEREAAEVGEKVAREAEALRGDARARIAVGEALMKMLLRLDAVRGAREYRKRVTKRVLALQDAVDALEPKPTPDSEVVAEESESEVTSEMADDSAEATEMPVAAEHSGGIEVNAAAETVADMEVDGGKADSEAVPEAVKESENKQDDGHINGDQTEVSNEGEWEMVADEAEPTTAATGSTEAPPQTPMTSEVMRPTVEAGAADSALDTRKVMEMVAALCEQNAQQCAVIGALAERVDALERAVRRVEDAERRRRRGKKLKKDGKGSNRCYTD

SEQ ID NO: 22163 - DNA, 1084 bp, Zea mays subsp. mays
  misc_feature (1)..(1084): Ceres Seq. ID no. 15180245
aaaaaaacagttcttcaaacgaggaacaggggcggtccacatctggccgtacccttcccggctccctccgtctccgatatgcaccagcaccacgcctcccgctcccgctccccctgcccctcctcgtccgccgcggcgcgtcccaggaccgaggacttccccgtggacatcgtcagcgacgaggagatggcgctcatcgacgccgcgctcgccgccgccgcggcgggggcgcgcccgctcctctccgcagcggcccgccgcgccgccgtcccgctctcccgtgcggcgtgctcggccaccgacgggctcgccgccggcgacatcgaggacggggtgggcgtgatggcgaccaaggtggggatgatgacctacttcgatccggagacggggaagccggtgccggtgaccgtggtcgggttccgggagggcggcaacgtggtgacgcaggtgaagacggccgccacggacgggtacgacgccgtccaggtcgggtaccacggcgtgcgcgaggacaagctcacccgcccggagctgggccacctgggcaaggccggcgcccctccgttgcgccacctgcaggagttccggctcaccgccgtcgacgccttcgagcccggccagcccctcgacttcgccgacctcttcaaggagggcgacctcatcgacgtctccggcaactccatcggcaaggggttccaaggtggcatcaagaggcacaacttcaagcgcgggctgatgacgcacggttccaagagccaccggcagctgggttccatcggagccgggacgacgccgggccgcgtgtacaaggggaagaagatgcccgggaggatgggaggaaccaagaccaagatcaggaagctcaagatcgtcaagatcgacaacaacctccgggtgctcatgatcaagggggccgtgccagggaagcccgggaacctcctccgcataacgccggccaagatcgtcggcaagaacatccccaagaactagacttcttttttcaggggggtgaatgttgagtgtttgtgtttgttaccctgctacaaactggatgtaatcctttgccaatttccagtttttgaac

SEQ ID NO: 22164 - protein, 338 aa, Zea mays subsp. mays
  peptide (1)..(338): Ceres Seq. ID no. 15180246
  misc_feature (109)..(335): Pfam Name: Pfam Description:  High molecular weight glutenin subunit
  misc_feature (28)..(232): NCBI GI NO: 79833 NR Description: hypothetical 119
  misc_feature (15)..(272): NCBI GI NO: 15790851 NR Description: Vng1983h [Halobacterium sp. NRC-1]
  misc_feature (158)..(328): NCBI GI NO: 2246532 NR Description: ORF 73, contains large complex repeat CR 73
  misc_feature (138)..(330): NCBI GI NO: 5669894 NR Description: latent nuclear antigen [Human herpesvirus 8]
  misc_feature (163)..(330): NCBI GI NO: 2246532 NR Description: ORF 73, contains large complex repeat CR 73
  misc_feature (208)..(330): NCBI GI NO: 2246532 NR Description: ORF 73, contains large complex repeat CR 73
  misc_feature (224)..(328): NCBI GI NO: 5669894 NR Description: latent nuclear antigen [Human herpesvirus 8]
  misc_feature (208)..(330): NCBI GI NO: 2246532 NR Description: ORF 73, contains large complex repeat CR 73
  misc_feature (216)..(328): NCBI GI NO: 5669894 NR Description: latent nuclear antigen [Human herpesvirus 8]
  misc_feature (236)..(328): NCBI GI NO: 2246532 NR Description: ORF 73, contains large complex repeat CR 73
KNSSSNEEQGRSTSGRTLPGSLRLRYAPAPRLPLPLPLPLLVRRGASQDRGLPRGHRQRRGDGAHRRRARRRRGGGAPAPLRSGPPRRRPALPCGVLGHRRARRRRHRGRGGRDGDQGGDDDLLRSGDGEAGAGDRGRVPGGRQRGDAGEDGRHGRVRRRPGRVPRRARGQAHPPGAGPPGQGRRPSVAPPAGVPAHRRRRLRARPAPRLRRPLQGGRPHRRLRQLHRQGVPRWHQEAQLQARADDARFQEPPAAGFHRSRDDAGPRVQGEEDAREDGRNQDQDQEAQDRQDRQQPPGAHDQGGRAREAREPPPHNAGQDRRQEHPQELDFFFQGGEC

SEQ ID NO: 22165 - protein, 329 aa, Zea mays subsp. mays
  peptide (1)..(329): Ceres Seq. ID no. 15180247
  misc_feature (118)..(316): Pfam Name: Pfam Description:  Ribosomal protein L3
  misc_feature (105)..(329): NCBI GI NO: 7440606 NR Description: ribosomal protein L3 precursor
  misc_feature (103)..(329): NCBI GI NO: 15224205 NR Description: ribosomal protein L3p family
  misc_feature (103)..(329): NCBI GI NO: 21553426 NR Description: 50S ribosomal protein L3 [Arabidopsis thaliana]
  misc_feature (112)..(324): NCBI GI NO: 3122742 NR Description: 50S ribosomal protein L3
  misc_feature (112)..(324): NCBI GI NO: 22297625 NR Description: 50S ribosomal protein L3
  misc_feature (112)..(324): NCBI GI NO: 16329941 NR Description: 50S ribosomal protein L3
  misc_feature (112)..(324): NCBI GI NO: 17231707 NR Description: 50S ribosomal protein L3 [Nostoc sp. PCC 7120]
  misc_feature (112)..(323): NCBI GI NO: 23124126 NR Description: hypothetical protein [Nostoc punctiforme]
  misc_feature (112)..(324): NCBI GI NO: 37519654 NR Description: 50S ribosomal protein L3 [Gloeobacter violaceus]
  misc_feature (112)..(325): NCBI GI NO: 32307490 NR Description: ribosomal protein rpL3 [Bigelowiella natans]
KKTVLQTRNRGGPHLAVPFPAPSVSDMHQHHASRSRSPCPSSSAAARPRTEDFPVDIVSDEEMALIDAALAAAAAGARPLLSAAARRAAVPLSRAACSATDGLAAGDIEDGVGVMATKVGMMTYFDPETGKPVPVTVVGFREGGNVVTQVKTAATDGYDAVQVGYHGVREDKLTRPELGHLGKAGAPPLRHLQEFRLTAVDAFEPGQPLDFADLFKEGDLIDVSGNSIGKGFQGGIKRHNFKRGLMTHGSKSHRQLGSIGAGTTPGRVYKGKKMPGRMGGTKTKIRKLKIVKIDNNLRVLMIKGAVPGKPGNLLRITPAKIVGKNIPKN

SEQ ID NO: 22166 - protein, 303 aa, Zea mays subsp. mays
  peptide (1)..(303): Ceres Seq. ID no. 15180248
  misc_feature (92)..(290): Pfam Name: Pfam Description:  Ribosomal protein L3
  misc_feature (79)..(303): NCBI GI NO: 7440606 NR Description: ribosomal protein L3 precursor
  misc_feature (77)..(303): NCBI GI NO: 15224205 NR Description: ribosomal protein L3p family
  misc_feature (77)..(303): NCBI GI NO: 21553426 NR Description: 50S ribosomal protein L3 [Arabidopsis thaliana]
  misc_feature (86)..(298): NCBI GI NO: 3122742 NR Description: 50S ribosomal protein L3
  misc_feature (86)..(298): NCBI GI NO: 22297625 NR Description: 50S ribosomal protein L3
  misc_feature (86)..(298): NCBI GI NO: 16329941 NR Description: 50S ribosomal protein L3
  misc_feature (86)..(298): NCBI GI NO: 17231707 NR Description: 50S ribosomal protein L3 [Nostoc sp. PCC 7120]
  misc_feature (86)..(297): NCBI GI NO: 23124126 NR Description: hypothetical protein [Nostoc punctiforme]
  misc_feature (86)..(298): NCBI GI NO: 37519654 NR Description: 50S ribosomal protein L3 [Gloeobacter violaceus]
  misc_feature (86)..(299): NCBI GI NO: 32307490 NR Description: ribosomal protein rpL3 [Bigelowiella natans]
MHQHHASRSRSPCPSSSAAARPRTEDFPVDIVSDEEMALIDAALAAAAAGARPLLSAAARRAAVPLSRAACSATDGLAAGDIEDGVGVMATKVGMMTYFDPETGKPVPVTVVGFREGGNVVTQVKTAATDGYDAVQVGYHGVREDKLTRPELGHLGKAGAPPLRHLQEFRLTAVDAFEPGQPLDFADLFKEGDLIDVSGNSIGKGFQGGIKRHNFKRGLMTHGSKSHRQLGSIGAGTTPGRVYKGKKMPGRMGGTKTKIRKLKIVKIDNNLRVLMIKGAVPGKPGNLLRITPAKIVGKNIPKN

SEQ ID NO: 22167 - DNA, 1038 bp, Zea mays subsp. mays
  misc_feature (1)..(1038): Ceres Seq. ID no. 13589401
acaccgcgcaggaacaaccaccaggcacagccaacaagcttgctagtgtgtggtttctctcatcaggtcaggaggagcatggccgaccataaggaggagcagtctgtgatggacaagatctccgagaagttccacggcggggactcctcgtcgtcgtctgactcggacgacgagaagaagaaggggtcttcttcggcgtcggcgacggaggccatgaaagccaagatctaccgtctcttcggccgcgagaggcccgtccactctgtcctcggcggcggcaagcccgccgatcttgtcctatggaggaacaagaagatctcaggcggggtactcgctggtgccacggccatctggctcctgttcgaggttatggagtaccatctcctcaccttggtgtgccactgtctcatcgtctcgctggccatcctgttcctgtggtccaacgcctccagtttcatcaacaagtccccaccaaacattcctgaggtgaaaatccctgaggatgtgtctgttaatgttgcactgacactgagatacgagatcaacaggggctttgctaccttgagggagattggacatggacacgatctaaagaaattcctaattgttatcgcaggtctctggctcttttcagttcttgggagctgttgcaacttcctgacactgttctatattgtctttgtggcactgtacactatacctgttctgtatgagaaatatgaggacaaggttgatgcttttggtgagaaggctatgatcgaactgaagaagtattatgccatcttcgatgagaagtgcctatcgaagattccaaagggcctcaaggataagaagcactagattggtagtaaggtacttgatatgaatcaacacccacgttaagtcacaccttccttgaaggatggtgcttggtcctggtctctagttgatagtatataatctgtatgggcaactctggtgtgactgacactttgatctgctgaaaattgttgatcttgtttttggtttcaactttcagcatacttgcctggaagcttg

SEQ ID NO: 22168 - protein, 279 aa, Zea mays subsp. mays
  peptide (1)..(279): Ceres Seq. ID no. 13589402
  misc_feature (27)..(279): NCBI GI NO: 34909318 NR Description: OSJNBb0021A09.5
  misc_feature (32)..(278): NCBI GI NO: 15236556 NR Description: expressed protein [Arabidopsis thaliana]
  misc_feature (32)..(278): NCBI GI NO: 15237093 NR Description: expressed protein [Arabidopsis thaliana]
  misc_feature (29)..(278): NCBI GI NO: 15238125 NR Description: expressed protein [Arabidopsis thaliana]
  misc_feature (34)..(279): NCBI GI NO: 34904202 NR Description: P0492F05.25
  misc_feature (29)..(273): NCBI GI NO: 15222616 NR Description: expressed protein [Arabidopsis thaliana]
  misc_feature (33)..(277): NCBI GI NO: 18406991 NR Description: expressed protein [Arabidopsis thaliana]
  misc_feature (38)..(273): NCBI GI NO: 18398810 NR Description: expressed protein [Arabidopsis thaliana]
  misc_feature (38)..(273): NCBI GI NO: 30681227 NR Description: expressed protein [Arabidopsis thaliana]
  misc_feature (33)..(271): NCBI GI NO: 15234108 NR Description: hypothetical protein [Arabidopsis thaliana]
TPRRNNHQAQPTSLLVCGFSHQVRRSMADHKEEQSVMDKISEKFHGGDSSSSSDSDDEKKKGSSSASATEAMKAKIYRLFGRERPVHSVLGGGKPADLVLWRNKKISGGVLAGATAIWLLFEVMEYHLLTLVCHCLIVSLAILFLWSNASSFINKSPPNIPEVKIPEDVSVNVALTLRYEINRGFATLREIGHGHDLKKFLIVIAGLWLFSVLGSCCNFLTLFYIVFVALYTIPVLYEKYEDKVDAFGEKAMIELKKYYAIFDEKCLSKIPKGLKDKKH

SEQ ID NO: 22169 - protein, 253 aa, Zea mays subsp. mays
  peptide (1)..(253): Ceres Seq. ID no. 13589403
  misc_feature (1)..(253): NCBI GI NO: 34909318 NR Description: OSJNBb0021A09.5
  misc_feature (6)..(252): NCBI GI NO: 15236556 NR Description: expressed protein [Arabidopsis thaliana]
  misc_feature (6)..(252): NCBI GI NO: 15237093 NR Description: expressed protein [Arabidopsis thaliana]
  misc_feature (3)..(252): NCBI GI NO: 15238125 NR Description: expressed protein [Arabidopsis thaliana]
  misc_feature (8)..(253): NCBI GI NO: 34904202 NR Description: P0492F05.25
  misc_feature (3)..(247): NCBI GI NO: 15222616 NR Description: expressed protein [Arabidopsis thaliana]
  misc_feature (7)..(251): NCBI GI NO: 18406991 NR Description: expressed protein [Arabidopsis thaliana]
  misc_feature (12)..(247): NCBI GI NO: 18398810 NR Description: expressed protein [Arabidopsis thaliana]
  misc_feature (12)..(247): NCBI GI NO: 30681227 NR Description: expressed protein [Arabidopsis thaliana]
  misc_feature (7)..(245): NCBI GI NO: 15234108 NR Description: hypothetical protein [Arabidopsis thaliana]
MADHKEEQSVMDKISEKFHGGDSSSSSDSDDEKKKGSSSASATEAMKAKIYRLFGRERPVHSVLGGGKPADLVLWRNKKISGGVLAGATAIWLLFEVMEYHLLTLVCHCLIVSLAILFLWSNASSFINKSPPNIPEVKIPEDVSVNVALTLRYEINRGFATLREIGHGHDLKKFLIVIAGLWLFSVLGSCCNFLTLFYIVFVALYTIPVLYEKYEDKVDAFGEKAMIELKKYYAIFDEKCLSKIPKGLKDKKH

SEQ ID NO: 22170 - protein, 243 aa, Zea mays subsp. mays
  peptide (1)..(243): Ceres Seq. ID no. 13589404
  misc_feature (1)..(243): NCBI GI NO: 34909318 NR Description: OSJNBb0021A09.5
  misc_feature (1)..(242): NCBI GI NO: 15236556 NR Description: expressed protein [Arabidopsis thaliana]
  misc_feature (1)..(242): NCBI GI NO: 15237093 NR Description: expressed protein [Arabidopsis thaliana]
  misc_feature (1)..(242): NCBI GI NO: 15238125 NR Description: expressed protein [Arabidopsis thaliana]
  misc_feature (1)..(243): NCBI GI NO: 34904202 NR Description: P0492F05.25
  misc_feature (1)..(237): NCBI GI NO: 15222616 NR Description: expressed protein [Arabidopsis thaliana]
  misc_feature (1)..(241): NCBI GI NO: 18406991 NR Description: expressed protein [Arabidopsis thaliana]
  misc_feature (2)..(237): NCBI GI NO: 18398810 NR Description: expressed protein [Arabidopsis thaliana]
  misc_feature (2)..(237): NCBI GI NO: 30681227 NR Description: expressed protein [Arabidopsis thaliana]
  misc_feature (1)..(235): NCBI GI NO: 15234108 NR Description: hypothetical protein [Arabidopsis thaliana]
MDKISEKFHGGDSSSSSDSDDEKKKGSSSASATEAMKAKIYRLFGRERPVHSVLGGGKPADLVLWRNKKISGGVLAGATAIWLLFEVMEYHLLTLVCHCLIVSLAILFLWSNASSFINKSPPNIPEVKIPEDVSVNVALTLRYEINRGFATLREIGHGHDLKKFLIVIAGLWLFSVLGSCCNFLTLFYIVFVALYTIPVLYEKYEDKVDAFGEKAMIELKKYYAIFDEKCLSKIPKGLKDKKH

SEQ ID NO: 22171 - DNA, 2196 bp, Zea mays subsp. mays
  misc_feature (1)..(2196): Ceres Seq. ID no. 15224550
  misc_feature (1591)..(1591): n is a, c, t, g, unknown, or other
sgaahagkatttatagcgagcgtcctggcctctcttctccctgctcgctcctagctggggtggggagggaagaagaggacaagcatgcagcacgccaacgcgcggcgcgagcataccgacagctccagcctccagggaacgactgaaggagtaggagaaagacaaagaacaagtgtgggaaacagacaacgagaagaccgacgagccgcgacaccgccaccgccaccccgctcctaagtcctagctcctcgtgctacaaaggaataaaccaaggccggcccatgtcttcatctagcggttgtaaccgcggccgagcagtcctcccagtcactgcctctctcgttcccttcctgctcctgctcctcctcctcctcgtcgtctcgtgcccggccgccctggtggtctccgcgacgcacacgcacgtgcacgggcacggcggcgccaccgccggcgccgcgcgggcgtccttccgtgccggggacgagcgggaggcgtacgcgaggatcatggcgcgcatggccaggatggacaaggactccaacatgacgatccaggttccttcccttccctgcagctgctcctgctcctctgccccagctgtgcgcgcgcgctgccggttccggcttccggccaagcaagcgtgcaaatccaccacctcgctgtcgtttacgtactctagctctttcgtcgtgtcgtgtcgtgcgtgtgtgtgcgcgcgcgtgtgcagagcgccgacggcgacgtcatccactgcgtgccggcgcacctgcagccggcgttcgaccaccccaggctgagagggcaggagcccgaggacgagcccgtggagaggcccatgtccaagggcgccgccggtgaggaggaggccggcgtgttcccgcaggcgtggagcgacggcggcagcaagcggtgcccggcggggacggtgccgatacggcggacgacggcgcgcgacgtgctgcgggccagctccgcgcgccggttcgggatgaaggcccgcggcagcagcagcagcaacgcccgccgcgactccaccagcagcggccacgagcacgcggtggggtacgtgacgggggagcagttctacggcgccaaggccagcctgaacgtgtggccggccaaggtggcgtcggcggcggagttcagcctgtcccagatctgggtcatctccggctccttcggcaacgacctcaacaccatcgaggccggatggcaggtgagccctgagctgtatggcgacagcagcccgaggttcttcacgtattggacgaccgatgcgtaccaggagactgggtgctacaacctgcactgctccggcttcgtccagacgaacagccggatcgccattggagccgccatctcgcctacctcggtctacaacggccggcagttcgacatcagcctgctcatatggaaggacccgcaccgggggaactggtggctgcagctggggtcgggcccgctggtggggtactggccgtcgctcctgttcacgcacctgggcggccacgccgacatggtgcagttcggcggcgaggtggtgaactcgcgcccgtcgggggcgcacaccccacgcagatgggcagcggcncacttcccccgsgagggctccaaccgcgccgcctacttccgcaacctgcaggtcgtcgacgccgacaacagcctcgtcgccgccgccgcgctccgcctcgtcgccgaccgcccgggctgctacgacatccagggcggctacaacaccgcctgggggaactacttctactacggagggcccggcaggaacgtgcactgcccgtgatctgtctctgtctctgttggtagccgacgcccgacgacgatcgaccatgaatatacgtgcacagatagacatacagagagtgaagaagaacgtacggatcaccgaccctgccggagttgcatcgtcgctcatcaaccggccggacatggatcgtataatagcaccactgctagtcatatataagctacatctagtccctcgtttagttactgcatgcatgctaattagtttttaagcagcccagctgcgtacaccgcggggacggtaacagagaggcaaaaggtttccaactttcgatacttgatgtatgtgggcttctttcgtttgcattggtttgattttttttttgtcttgagttatgtatatacatcaagaaatccacatatagtattttcttcgtc

SEQ ID NO: 22172 - protein, 319 aa, Zea mays subsp. mays
  peptide (1)..(319): Ceres Seq. ID no. 15224551
  misc_feature (83)..(278): Pfam Name: Pfam Description:  Arabidopsis proteins of unknown function
  misc_feature (73)..(319): NCBI GI NO: 15528706 NR Description: P0583G08.7
  misc_feature (1)..(88): NCBI GI NO: 15528706 NR Description: P0583G08.7
  misc_feature (1)..(319): NCBI GI NO: 21389708 NR Description: putative carboxyl-terminal proteinase
  misc_feature (1)..(318): NCBI GI NO: 34913794 NR Description: OSJNBa0026J14.25
  misc_feature (1)..(319): NCBI GI NO: 15240622 NR Description: expressed protein [Arabidopsis thaliana]
  misc_feature (1)..(319): NCBI GI NO: 30698726 NR Description: expressed protein [Arabidopsis thaliana]
  misc_feature (1)..(319): NCBI GI NO: 25345697 NR Description: unknown protein F5A18.27
  misc_feature (1)..(319): NCBI GI NO: 28416687 NR Description: At1g70550 [Arabidopsis thaliana]
  misc_feature (1)..(319): NCBI GI NO: 30688348 NR Description: expressed protein [Arabidopsis thaliana]
  misc_feature (1)..(319): NCBI GI NO: 15220207 NR Description: expressed protein [Arabidopsis thaliana]
  misc_feature (252)..(252): Xaa is any aa, unknown or other
  misc_feature (256)..(256): Xaa is any aa, unknown or other
MSKGAAGEEEAGVFPQAWSDGGSKRCPAGTVPIRRTTARDVLRASSARRFGMKARGSSSSNARRDSTSSGHEHAVGYVTGEQFYGAKASLNVWPAKVASAAEFSLSQIWVISGSFGNDLNTIEAGWQVSPELYGDSSPRFFTYWTTDAYQETGCYNLHCSGFVQTNSRIAIGAAISPTSVYNGRQFDISLLIWKDPHRGNWWLQLGSGPLVGYWPSLLFTHLGGHADMVQFGGEVVNSRPSGAHTPRRWAAXHFPXEGSNRAAYFRNLQVVDADNSLVAAAALRLVADRPGCYDIQGGYNTAWGNYFYYGGPGRNVHCP

SEQ ID NO: 22173 - protein, 268 aa, Zea mays subsp. mays
  peptide (1)..(268): Ceres Seq. ID no. 15224552
  misc_feature (32)..(227): Pfam Name: Pfam Description:  Arabidopsis proteins of unknown function
  misc_feature (22)..(268): NCBI GI NO: 15528706 NR Description: P0583G08.7
  misc_feature (1)..(37): NCBI GI NO: 15528706 NR Description: P0583G08.7
  misc_feature (1)..(268): NCBI GI NO: 21389708 NR Description: putative carboxyl-terminal proteinase
  misc_feature (1)..(267): NCBI GI NO: 34913794 NR Description: OSJNBa0026J14.25
  misc_feature (1)..(268): NCBI GI NO: 15240622 NR Description: expressed protein [Arabidopsis thaliana]
  misc_feature (1)..(268): NCBI GI NO: 30698726 NR Description: expressed protein [Arabidopsis thaliana]
  misc_feature (1)..(268): NCBI GI NO: 25345697 NR Description: unknown protein F5A18.27
  misc_feature (1)..(268): NCBI GI NO: 28416687 NR Description: At1g70550 [Arabidopsis thaliana]
  misc_feature (1)..(268): NCBI GI NO: 30688348 NR Description: expressed protein [Arabidopsis thaliana]
  misc_feature (1)..(268): NCBI GI NO: 15220207 NR Description: expressed protein [Arabidopsis thaliana]
  misc_feature (201)..(201): Xaa is any aa, unknown or other
  misc_feature (205)..(205): Xaa is any aa, unknown or other
MKARGSSSSNARRDSTSSGHEHAVGYVTGEQFYGAKASLNVWPAKVASAAEFSLSQIWVISGSFGNDLNTIEAGWQVSPELYGDSSPRFFTYWTTDAYQETGCYNLHCSGFVQTNSRIAIGAAISPTSVYNGRQFDISLLIWKDPHRGNWWLQLGSGPLVGYWPSLLFTHLGGHADMVQFGGEVVNSRPSGAHTPRRWAAXHFPXEGSNRAAYFRNLQVVDADNSLVAAAALRLVADRPGCYDIQGGYNTAWGNYFYYGGPGRNVHCP

SEQ ID NO: 22174 - protein, 171 aa, Zea mays subsp. mays
  peptide (1)..(171): Ceres Seq. ID no. 15224553
  misc_feature (102)..(171): Pfam Name: Pfam Description:  Equine herpesvirus glycoprotein gp2
  misc_feature (54)..(171): NCBI GI NO: 11360494 NR Description: antifreeze glycopeptide AFGP polyprotein precursor
  misc_feature (89)..(171): NCBI GI NO: 11360494 NR Description: antifreeze glycopeptide AFGP polyprotein precursor
  misc_feature (1)..(171): NCBI GI NO: 38077118 NR Description: similar to sublingual apomucin [Mus musculus]
  misc_feature (1)..(171): NCBI GI NO: 38077118 NR Description: similar to sublingual apomucin [Mus musculus]
  misc_feature (37)..(171): NCBI GI NO: 38077118 NR Description: similar to sublingual apomucin [Mus musculus]
  misc_feature (1)..(171): NCBI GI NO: 28574039 NR Description: Salivary gland secretion 1 CG3047-PA
  misc_feature (1)..(171): NCBI GI NO: 28574039 NR Description: Salivary gland secretion 1 CG3047-PA
  misc_feature (94)..(171): NCBI GI NO: 13592175 NR Description: ppg3 [Leishmania major]
  misc_feature (1)..(171): NCBI GI NO: 15901602 NR Description: cell wall surface anchor family protein
  misc_feature (1)..(171): NCBI GI NO: 15901602 NR Description: cell wall surface anchor family protein
MSSSSGCNRGRAVLPVTASLVPFLLLLLLLLVVSCPAALVVSATHTHVHGHGGATAGAARASFRAGDEREAYARIMARMARMDKDSNMTIQVPSLPCSCSCSSAPAVRARCRFRLPAKQACKSTTSLSFTYSSSFVVSCRACVCARVCRAPTATSSTACRRTCSRRSTTPG

SEQ ID NO: 22175 - DNA, 1438 bp, Zea mays subsp. mays
  misc_feature (1)..(1438): Ceres Seq. ID no. 13624551
cagacggactcacagctcgcagcacctgcaccacttgacaaccagccagctagctaaccaaccggcggagccaagaacaagcaagagacaacttgccctgtccaggcagcatgtgcaactccaacgtcaagtccgcgggcgtcgcccagatcgacggccgcccggtgctgcagccggcgggcaaccgcgtggcggcgccggacgccgcccgcccgctcaagaagtccctgcacaagtccttctccatgccgccttcctacgacaacaatgccaccgtgcccgcccgtcccgcccctgccgagaacacccgtgcggcgccggcgccgccttctctgctgcctcctacgacgccggccccggccccggccgccgcgagggcgaccaaggcggcgggcgccgtgcccgcggagaagcccaggtccaaggccaggaagcccggcgccgtgctgccggtggcgacgttcgcggcgccagaggcgttcgagccggcggggagcatcgccgcggcgcggcgggagcatgccgcgcaggcgcaggcgcagcgcaagtcgcggatcgcgcactacggccgcaccgcgtccttctcccgggtggagggccgagtcggcgccaccgccacggccgagccggccgtcccagcctcccccaccaccgggctcgacgagaagcgctgtagcttcatcacgccctactctgaccccttgtatgtggcgtaccacgacgaggagtggggagtgcccgtgcacgacgacgagttgctgttcgagatgctcacactgtctggcgtgcaagtcggggccgattggacttccatcctcaagaaaagacacgtctacagggaggcgttctccggcttcgacgtggatgcggtcgccaagtacaccgagaagcagatggcgtcgctgagcgccgactacgggctggatttgggcaccgtcagaggaaccgtcaacaacgcctgccggattcttgaggtgcggagggacttttgctcgctggacaagtacgtgtgggcgttcgtgaacaacaagccgctgtcgccgagctacaagtacagccggaagatcccggtgaagacgtccaagtcggagtccatcagcaaggacatggtccggcgcggcttccgcttcgtcggccccactgtcatccactccttcatggaggcggtcgggctcaccaacgaccacctcgtctcgtgcccgcgcccacgcgtctgctccgccgccgcccgcgtaaataactgattctgctgacgaccaccaagcaaaacacaagagggaattatctaaggacaaccaagacgagagagagagagagaggtagcagtagtaatatacaaaagagagtgttggcggtttgcatgtgtgtatgatgacccagtgtgcttgtgtagattaattacggcctctgattagcgaattgtttaaacacaataaag

SEQ ID NO: 22176 - protein, 377 aa, Zea mays subsp. mays
  peptide (1)..(377): Ceres Seq. ID no. 13624552
  misc_feature (194)..(368): Pfam Name: Pfam Description:  Methyladenine glycosylase
  misc_feature (1)..(196): NCBI GI NO: 34908920 NR Description: P0691E06.10
  misc_feature (194)..(373): NCBI GI NO: 34908920 NR Description: P0691E06.10
  misc_feature (90)..(373): NCBI GI NO: 18399721 NR Description: expressed protein [Arabidopsis thaliana]
  misc_feature (90)..(373): NCBI GI NO: 21536975 NR Description: unknown [Arabidopsis thaliana]
  misc_feature (57)..(373): NCBI GI NO: 15241554 NR Description: expressed protein [Arabidopsis thaliana]
  misc_feature (57)..(373): NCBI GI NO: 21592537 NR Description: unknown [Arabidopsis thaliana]
  misc_feature (28)..(283): NCBI GI NO: 34908920 NR Description: P0691E06.10
  misc_feature (58)..(377): NCBI GI NO: 38345034 NR Description: OSJNBa0029H02.18
  misc_feature (168)..(369): NCBI GI NO: 15242914 NR Description: expressed protein [Arabidopsis thaliana]
  misc_feature (77)..(373): NCBI GI NO: 15218379 NR Description: expressed protein [Arabidopsis thaliana]
MCNSNVKSAGVAQIDGRPVLQPAGNRVAAPDAARPLKKSLHKSFSMPPSYDNNATVPARPAPAENTRAAPAPPSLLPPTTPAPAPAAARATKAAGAVPAEKPRSKARKPGAVLPVATFAAPEAFEPAGSIAAARREHAAQAQAQRKSRIAHYGRTASFSRVEGRVGATATAEPAVPASPTTGLDEKRCSFITPYSDPLYVAYHDEEWGVPVHDDELLFEMLTLSGVQVGADWTSILKKRHVYREAFSGFDVDAVAKYTEKQMASLSADYGLDLGTVRGTVNNACRILEVRRDFCSLDKYVWAFVNNKPLSPSYKYSRKIPVKTSKSESISKDMVRRGFRFVGPTVIHSFMEAVGLTNDHLVSCPRPRVCSAAARVNN

SEQ ID NO: 22177 - protein, 332 aa, Zea mays subsp. mays
  peptide (1)..(332): Ceres Seq. ID no. 13624553
  misc_feature (149)..(323): Pfam Name: Pfam Description:  Methyladenine glycosylase
  misc_feature (1)..(151): NCBI GI NO: 34908920 NR Description: P0691E06.10
  misc_feature (149)..(328): NCBI GI NO: 34908920 NR Description: P0691E06.10
  misc_feature (45)..(328): NCBI GI NO: 18399721 NR Description: expressed protein [Arabidopsis thaliana]
  misc_feature (45)..(328): NCBI GI NO: 21536975 NR Description: unknown [Arabidopsis thaliana]
  misc_feature (12)..(328): NCBI GI NO: 15241554 NR Description: expressed protein [Arabidopsis thaliana]
  misc_feature (12)..(328): NCBI GI NO: 21592537 NR Description: unknown [Arabidopsis thaliana]
  misc_feature (1)..(238): NCBI GI NO: 34908920 NR Description: P0691E06.10
  misc_feature (13)..(332): NCBI GI NO: 38345034 NR Description: OSJNBa0029H02.18
  misc_feature (123)..(324): NCBI GI NO: 15242914 NR Description: expressed protein [Arabidopsis thaliana]
  misc_feature (32)..(328): NCBI GI NO: 15218379 NR Description: expressed protein [Arabidopsis thaliana]
MPPSYDNNATVPARPAPAENTRAAPAPPSLLPPTTPAPAPAAARATKAAGAVPAEKPRSKARKPGAVLPVATFAAPEAFEPAGSIAAARREHAAQAQAQRKSRIAHYGRTASFSRVEGRVGATATAEPAVPASPTTGLDEKRCSFITPYSDPLYVAYHDEEWGVPVHDDELLFEMLTLSGVQVGADWTSILKKRHVYREAFSGFDVDAVAKYTEKQMASLSADYGLDLGTVRGTVNNACRILEVRRDFCSLDKYVWAFVNNKPLSPSYKYSRKIPVKTSKSESISKDMVRRGFRFVGPTVIHSFMEAVGLTNDHLVSCPRPRVCSAAARVNN

SEQ ID NO: 22178 - protein, 224 aa, Zea mays subsp. mays
  peptide (1)..(224): Ceres Seq. ID no. 13624554
RRTHSSQHLHHLTTSQLANQPAEPRTSKRQLALSRQHVQLQRQVRGRRPDRRPPGAAAGGQPRGGAGRRPPAQEVPAQVLLHAAFLRQQCHRARPSRPCREHPCGAGAAFSAASYDAGPGPGRREGDQGGGRRARGEAQVQGQEARRRAAGGDVRGARGVRAGGEHRRGAAGACRAGAGAAQVADRALRPHRVLLPGGGPSRRHRHGRAGRPSLPHHRARREAL

SEQ ID NO: 22179 - DNA, 1878 bp, Zea mays subsp. mays
  misc_feature (1)..(1878): Ceres Seq. ID no. 15177573
ctcctcttctccagcgtccgatccccgtttcccacgaatcccactctactcctccatctgcggcctcctccattctcctgcccccttctctctcctccttgcttccccgcgcgcacgtttttacaagggtttcggcggaggcgaccggtcgccgacgatggcggacgacagcggcagccacgagggcggcggcggcggcggcgacgacgyccgggagcaggacatgttcttgcctattaccaacatcacccggatcatgaagaaggccgtcccggccaatgccaagatcactaaggacgctaaggagataatgcagtactgcgtctccgagttcatattctttgtgacgagcgaggcgagggagaaaagcaaaaaggaggagcgtaagagaatcaacgtggacgatttgctctggtcagtggatacggcaggattcgagtacgtggagcttctcaggatttgcctacaaaagtacagagagacggggaagtgcacggtgtacacgacgtgatcaggttattaacctgtaacaccttagtgagaaaacattgagcacttggcaggtagtacgcaatcagtttaagaaactgcaaactgcaagctcctgggcaactagtgttgttgctgtgaacaaggtgatagtaaggtgtctacaaaggctggcgagggctctttaaataaggatgcagttagtacccatggtggcaccagtaactcaagcaaccagcatggagtttacaaccaagagatggtaccaccacagcatggagttaacaacaaagagatggacgatatgtcgccacagttggttcaccatggagtttacaaccttgagatggacaatatgctgtcacagttggatcaacatgaagtttacaaccaagggatggatgatatgccagcacatttggttcaacatggagtttataaccaagggatatgcgatatgacgccacagttggttcaacatggagtttacaaccaagggatgagcgatatgccaccaaagcatggagtttacaaccaagcgatgaatgatatgccgacacagttagttcaacatggagtttacaaccaagagatggatgatatgctgccacagttggttcaacatggagtttacaaccaagggatgagtgatatgtcgccacagttggttcaacatggaggttacaaccaagagatggatgatatgacgccacagttggttccgcacggagtttacaaccaagggatgagcgatatgctgccgcagttggttcaacatggagttcacaaccaagagatggacgatatgccgccacagttggttcaacatggagtttacaaccaagagatcaatgatatgcagccacagttggttcaacatggactttacaatggagaaatggatgatatgccgccacagttggttcaacatggagttgacaaccaagagatggacgatatgccaccacatttggtccaacatggagtttacaaccaagaggtggacaatatggtgccacatttggttcagcatggagtttacaaccaagggatgagcgatatgctgccacagttggttccacatggagtttacaaccaagagatggataatataacgccacagttggttcagcatggagtttacaaccaagggatggacgatatgccgccacagttggttcaacatggagtttgcaaccaagggatggtcaatatgcaactgcagtttgttcaacatggagtttgcaaccaagggatggacgatatacctccacagctaagagatgttaacctactagaagatactggggtaaataaccttggacccgcttttttaagagaatgtgagttgtgccattctatttaattatataattctttggtttaagc

SEQ ID NO: 22180 - protein, 368 aa, Zea mays subsp. mays
  peptide (1)..(368): Ceres Seq. ID no. 15177574
  misc_feature (89)..(356): NCBI GI NO: 37545275 NR Description: similar to acidic repetitive protein arp1 -Tetrahymena thermophila
  misc_feature (75)..(338): NCBI GI NO: 37545275 NR Description: similar to acidic repetitive protein arp1 -Tetrahymena thermophila
  misc_feature (106)..(356): NCBI GI NO: 37545275 NR Description: similar to acidic repetitive protein arp1 -Tetrahymena thermophila
MVPPQHGVNNKEMDDMSPQLVHHGVYNLEMDNMLSQLDQHEVYNQGMDDMPAHLVQHGVYNQGICDMTPQLVQHGVYNQGMSDMPPKHGVYNQAMNDMPTQLVQHGVYNQEMDDMLPQLVQHGVYNQGMSDMSPQLVQHGGYNQEMDDMTPQLVPHGVYNQGMSDMLPQLVQHGVHNQEMDDMPPQLVQHGVYNQEINDMQPQLVQHGLYNGEMDDMPPQLVQHGVDNQEMDDMPPHLVQHGVYNQEVDNMVPHLVQHGVYNQGMSDMLPQLVPHGVYNQEMDNITPQLVQHGVYNQGMDDMPPQLVQHGVCNQGMVNMQLQFVQHGVCNQGMDDIPPQLRDVNLLEDTGVNNLGPAFLRECELCHSI

SEQ ID NO: 22181 - protein, 356 aa, Zea mays subsp. mays
  peptide (1)..(356): Ceres Seq. ID no. 15177575
  misc_feature (77)..(344): NCBI GI NO: 37545275 NR Description: similar to acidic repetitive protein arp1 -Tetrahymena thermophila
  misc_feature (63)..(326): NCBI GI NO: 37545275 NR Description: similar to acidic repetitive protein arp1 -Tetrahymena thermophila
  misc_feature (94)..(344): NCBI GI NO: 37545275 NR Description: similar to acidic repetitive protein arp1 -Tetrahymena thermophila
MDDMSPQLVHHGVYNLEMDNMLSQLDQHEVYNQGMDDMPAHLVQHGVYNQGICDMTPQLVQHGVYNQGMSDMPPKHGVYNQAMNDMPTQLVQHGVYNQEMDDMLPQLVQHGVYNQGMSDMSPQLVQHGGYNQEMDDMTPQLVPHGVYNQGMSDMLPQLVQHGVHNQEMDDMPPQLVQHGVYNQEINDMQPQLVQHGLYNGEMDDMPPQLVQHGVDNQEMDDMPPHLVQHGVYNQEVDNMVPHLVQHGVYNQGMSDMLPQLVPHGVYNQEMDNITPQLVQHGVYNQGMDDMPPQLVQHGVCNQGMVNMQLQFVQHGVCNQGMDDIPPQLRDVNLLEDTGVNNLGPAFLRECELCHSI

SEQ ID NO: 22182 - protein, 353 aa, Zea mays subsp. mays
  peptide (1)..(353): Ceres Seq. ID no. 15177576
  misc_feature (74)..(341): NCBI GI NO: 37545275 NR Description: similar to acidic repetitive protein arp1 -Tetrahymena thermophila
  misc_feature (60)..(323): NCBI GI NO: 37545275 NR Description: similar to acidic repetitive protein arp1 -Tetrahymena thermophila
  misc_feature (91)..(341): NCBI GI NO: 37545275 NR Description: similar to acidic repetitive protein arp1 -Tetrahymena thermophila
MSPQLVHHGVYNLEMDNMLSQLDQHEVYNQGMDDMPAHLVQHGVYNQGICDMTPQLVQHGVYNQGMSDMPPKHGVYNQAMNDMPTQLVQHGVYNQEMDDMLPQLVQHGVYNQGMSDMSPQLVQHGGYNQEMDDMTPQLVPHGVYNQGMSDMLPQLVQHGVHNQEMDDMPPQLVQHGVYNQEINDMQPQLVQHGLYNGEMDDMPPQLVQHGVDNQEMDDMPPHLVQHGVYNQEVDNMVPHLVQHGVYNQGMSDMLPQLVPHGVYNQEMDNITPQLVQHGVYNQGMDDMPPQLVQHGVCNQGMVNMQLQFVQHGVCNQGMDDIPPQLRDVNLLEDTGVNNLGPAFLRECELCHSI

SEQ ID NO: 22183 - DNA, 863 bp, Zea mays subsp. mays
  misc_feature (1)..(863): Ceres Seq. ID no. 12589281
acaaccacactgattgaggcagttcgtgaacaagccgtcacacccactcgctgctgaaccaggagttccatccatcgccgctcactcccacgatcagcgtcgtcgcttatccgcaaatatctctcttcctctttgcagtcggcaccatgggttccgacttcaaatcgatccccttgatcgatatcggcccgcttgtcgaaaagattgatgatccaagcatggccaacgataaggatttactgcaggttgtccggttactggatgatgcttgcaaggaggccggattcttctatgtgaaaggccatggtattgatgagtcactgatgagggaagtcaggaatgtaacccgtgaattctttcagcttccttatgaggaaaaattaaaaattaagatgacaccgagtaccacggagtttctgccgtacagctggagagaaggctccacgagcttctccacgaaagaaaccgggaccggattgaggagctggaagccgcgttgcggcgtgcggagaagaagctcgttgagaaagaaatggaggtgtccctgtggaaggacacggctaagtttgcgttgagacaggaggacaaggagttgcaatgagcatcgaatttctcctgttctctttcagtcgtacaactcttgcgcacgatttcatcggctgttcatgatcaccgaccgccgaaggaggattttggtcaaacaaggtttgccatggcgaactgcggtttgtggaagatatagtcaacctgttcataccaaagtttagtgctagcatattagatctccagtgaacgttttgggctccggtaaaaatcagtagaatgctgtgtaacagttaagttagcctactggtgtacggatc

SEQ ID NO: 22184 - protein, 142 aa, Zea mays subsp. mays
  peptide (1)..(142): Ceres Seq. ID no. 12589282
  misc_feature (1)..(86): NCBI GI NO: 6984228 NR Description: putative flavonol synthase-like protein
  misc_feature (1)..(86): NCBI GI NO: 11255902 NR Description: flavonol synthase-like protein
  misc_feature (1)..(86): NCBI GI NO: 21554579 NR Description: flavonol synthase-like protein
  misc_feature (1)..(86): NCBI GI NO: 18409039 NR Description: flavonol synthase - like protein
  misc_feature (1)..(106): NCBI GI NO: 10834554 NR Description: 2-oxoacid-dependent oxidase [Arabidopsis thaliana]
  misc_feature (1)..(106): NCBI GI NO: 11255891 NR Description: hypothetical protein T9C5
  misc_feature (1)..(106): NCBI GI NO: 22331716 NR Description: oxidoreductase
  misc_feature (1)..(106): NCBI GI NO: 19423910 NR Description: unknown protein [Arabidopsis thaliana]
  misc_feature (6)..(86): NCBI GI NO: 15229181 NR Description: putative protein; protein id: At3g49630.1
  misc_feature (1)..(118): NCBI GI NO: 28829512 NR Description: similar to Pseudomonas aeruginosa
MGSDFKSIPLIDIGPLVEKIDDPSMANDKDLLQVVRLLDDACKEAGFFYVKGHGIDESLMREVRNVTREFFQLPYEEKLKIKMTPSTTEFLPYSWREGSTSFSTKETGTGLRSWKPRCGVRRRSSLRKKWRCPCGRTRLSLR

SEQ ID NO: 22185 - protein, 118 aa, Zea mays subsp. mays
  peptide (1)..(118): Ceres Seq. ID no. 12589283
  misc_feature (1)..(62): NCBI GI NO: 6984228 NR Description: putative flavonol synthase-like protein
  misc_feature (1)..(62): NCBI GI NO: 11255902 NR Description: flavonol synthase-like protein
  misc_feature (1)..(62): NCBI GI NO: 21554579 NR Description: flavonol synthase-like protein
  misc_feature (1)..(62): NCBI GI NO: 18409039 NR Description: flavonol synthase - like protein
  misc_feature (1)..(82): NCBI GI NO: 10834554 NR Description: 2-oxoacid-dependent oxidase [Arabidopsis thaliana]
  misc_feature (1)..(82): NCBI GI NO: 11255891 NR Description: hypothetical protein T9C5
  misc_feature (1)..(82): NCBI GI NO: 22331716 NR Description: oxidoreductase
  misc_feature (1)..(82): NCBI GI NO: 19423910 NR Description: unknown protein [Arabidopsis thaliana]
  misc_feature (1)..(62): NCBI GI NO: 15229181 NR Description: putative protein; protein id: At3g49630.1
  misc_feature (1)..(94): NCBI GI NO: 28829512 NR Description: similar to Pseudomonas aeruginosa
MANDKDLLQVVRLLDDACKEAGFFYVKGHGIDESLMREVRNVTREFFQLPYEEKLKIKMTPSTTEFLPYSWREGSTSFSTKETGTGLRSWKPRCGVRRRSSLRKKWRCPCGRTRLSLR

SEQ ID NO: 22186 - protein, 83 aa, Zea mays subsp. mays
  peptide (1)..(83): Ceres Seq. ID no. 12589284
  misc_feature (1)..(27): NCBI GI NO: 6984228 NR Description: putative flavonol synthase-like protein
  misc_feature (1)..(27): NCBI GI NO: 11255902 NR Description: flavonol synthase-like protein
  misc_feature (1)..(27): NCBI GI NO: 18409039 NR Description: flavonol synthase - like protein
  misc_feature (1)..(27): NCBI GI NO: 21554579 NR Description: flavonol synthase-like protein
  misc_feature (1)..(47): NCBI GI NO: 10834554 NR Description: 2-oxoacid-dependent oxidase [Arabidopsis thaliana]
  misc_feature (1)..(47): NCBI GI NO: 11255891 NR Description: hypothetical protein T9C5
  misc_feature (1)..(47): NCBI GI NO: 19423910 NR Description: unknown protein [Arabidopsis thaliana]
  misc_feature (1)..(47): NCBI GI NO: 22331716 NR Description: oxidoreductase
  misc_feature (1)..(27): NCBI GI NO: 15229181 NR Description: putative protein; protein id: At3g49630.1
  misc_feature (1)..(59): NCBI GI NO: 28829512 NR Description: similar to Pseudomonas aeruginosa
MREVRNVTREFFQLPYEEKLKIKMTPSTTEFLPYSWREGSTSFSTKETGTGLRSWKPRCGVRRRSSLRKKWRCPCGRTRLSLR

SEQ ID NO: 22187 - DNA, 1259 bp, Zea mays subsp. mays
  misc_feature (1)..(1259): Ceres Seq. ID no. 15175746
acaaccaagaggtaagagccaaccgagcaacgaacgcccaggcacacacgagacacgacacgaaccaggcaaccagttgccgagggaggaaccctagcggaacactgtgcaggtgacggcggcgcgctaccggtgacgggggatacggaggcatcgcccccctcggcccctcctccatccccggcgcggcggcgccagcagccggcctgcaggtttccacgtcgtccatggcgctcgtcgtgatgtgtgggcagccgtgcagcggtaaaacatcagccgccgcttgccttgctgtggcgctgcactcctcctcgcctgaccttactgtccgaatcatcgatgagtcatccctccatctcaggcgcaacgatagctacaaagatatggttgtggagaaaaacttgagagggcttcttagatcagaagttgacaggtctgtgtcacgcgacagcataattattgtcgactcgttgaataatattaaggggtaccgctatgagttgtggtgtcttgcgcgtgcatctggtgtaagatattgtgtgcttttttgtgatacagaagtggaccattgtaaggaatggaacaacaaccgccaggagaaaggggaaccagcatatgatactaatatatttgaagatcttgtaagtagatttgagaagccagatagacgcaatcgttgggattcccctctttttgaattgttcccatctagagatgaattagtggaaacagctcctgatattgctgaagctgtgtcatatttgacaaaaaaagtggattccaaaacaagagatgtaaaagttctccagcctacaatagccactcagacggtgcgaacaacagaggctaattccctctatgagatggacaaggcaacgcaggaggtggtcaatgcaattgttgaagcacagtcatgcggtcttgggcttgctgtgaataagatctccattggacccaacttgccaactatcaagcttgagagatctgttggcctacctgagctcagaagcctgcggagaactttcatcaagctggcagggcagtacagtctgagtgggccaccaccaccgacagatgctgacagcgcaaagaggatgtttgtcgactacttaaaccgtgaacttggtgcatgataattttcattcgcctgcgttgcatgaacactatgtagcatgtggttaactttggggaatagataattgaagacaacttgattgtacttgttccttgttttgtggaaatgtttatatgactatctt

SEQ ID NO: 22188 - protein, 301 aa, Zea mays subsp. mays
  peptide (1)..(301): Ceres Seq. ID no. 15175747
  misc_feature (1)..(300): NCBI GI NO: 15222972 NR Description: expressed protein [Arabidopsis thaliana]
  misc_feature (1)..(300): NCBI GI NO: 23504265 NR Description: DRL1 protein [Arabidopsis thaliana]
  misc_feature (1)..(233): NCBI GI NO: 28850452 NR Description: similar to similarity to S
  misc_feature (1)..(299): NCBI GI NO: 33300521 NR Description: Hypothetical protein Y57G11C.43
  misc_feature (1)..(299): NCBI GI NO: 39583457 NR Description: Hypothetical protein CBG21524
  misc_feature (123)..(267): NCBI GI NO: 20270210 NR Description: RIKEN cDNA 1110001A12 [Mus musculus]
  misc_feature (1)..(108): NCBI GI NO: 20270210 NR Description: RIKEN cDNA 1110001A12 [Mus musculus]
  misc_feature (1)..(299): NCBI GI NO: 6322739 NR Description: Protein involved in resistance to K
  misc_feature (130)..(267): NCBI GI NO: 19923939 NR Description: hypothetical protein BC012173 [Homo sapiens]
  misc_feature (1)..(108): NCBI GI NO: 19923939 NR Description: hypothetical protein BC012173 [Homo sapiens]
MALVVMCGQPCSGKTSAAACLAVALHSSSPDLTVRIIDESSLHLRRNDSYKDMVVEKNLRGLLRSEVDRSVSRDSIIIVDSLNNIKGYRYELWCLARASGVRYCVLFCDTEVDHCKEWNNNRQEKGEPAYDTNIFEDLVSRFEKPDRRNRWDSPLFELFPSRDELVETAPDIAEAVSYLTKKVDSKTRDVKVLQPTIATQTVRTTEANSLYEMDKATQEVVNAIVEAQSCGLGLAVNKISIGPNLPTIKLERSVGLPELRSLRRTFIKLAGQYSLSGPPPPTDADSAKRMFVDYLNRELGA

SEQ ID NO: 22189 - protein, 296 aa, Zea mays subsp. mays
  peptide (1)..(296): Ceres Seq. ID no. 15175748
  misc_feature (1)..(295): NCBI GI NO: 15222972 NR Description: expressed protein [Arabidopsis thaliana]
  misc_feature (1)..(295): NCBI GI NO: 23504265 NR Description: DRL1 protein [Arabidopsis thaliana]
  misc_feature (1)..(228): NCBI GI NO: 28850452 NR Description: similar to similarity to S
  misc_feature (1)..(294): NCBI GI NO: 33300521 NR Description: Hypothetical protein Y57G11C.43
  misc_feature (1)..(294): NCBI GI NO: 39583457 NR Description: Hypothetical protein CBG21524
  misc_feature (118)..(262): NCBI GI NO: 20270210 NR Description: RIKEN cDNA 1110001A12 [Mus musculus]
  misc_feature (1)..(103): NCBI GI NO: 20270210 NR Description: RIKEN cDNA 1110001A12 [Mus musculus]
  misc_feature (1)..(294): NCBI GI NO: 6322739 NR Description: Protein involved in resistance to K
  misc_feature (125)..(262): NCBI GI NO: 19923939 NR Description: hypothetical protein BC012173 [Homo sapiens]
  misc_feature (1)..(103): NCBI GI NO: 19923939 NR Description: hypothetical protein BC012173 [Homo sapiens]
MCGQPCSGKTSAAACLAVALHSSSPDLTVRIIDESSLHLRRNDSYKDMVVEKNLRGLLRSEVDRSVSRDSIIIVDSLNNIKGYRYELWCLARASGVRYCVLFCDTEVDHCKEWNNNRQEKGEPAYDTNIFEDLVSRFEKPDRRNRWDSPLFELFPSRDELVETAPDIAEAVSYLTKKVDSKTRDVKVLQPTIATQTVRTTEANSLYEMDKATQEVVNAIVEAQSCGLGLAVNKISIGPNLPTIKLERSVGLPELRSLRRTFIKLAGQYSLSGPPPPTDADSAKRMFVDYLNRELGA

SEQ ID NO: 22190 - protein, 249 aa, Zea mays subsp. mays; identical to SEQ ID NO: 22131
  peptide (1)..(249): Ceres Seq. ID no. 15175749
  misc_feature (1)..(248): NCBI GI NO: 15222972 NR Description: expressed protein [Arabidopsis thaliana]
  misc_feature (1)..(248): NCBI GI NO: 23504265 NR Description: DRL1 protein [Arabidopsis thaliana]
  misc_feature (1)..(181): NCBI GI NO: 28850452 NR Description: similar to similarity to S
  misc_feature (1)..(247): NCBI GI NO: 33300521 NR Description: Hypothetical protein Y57G11C.43
  misc_feature (1)..(247): NCBI GI NO: 39583457 NR Description: Hypothetical protein CBG21524
  misc_feature (71)..(215): NCBI GI NO: 20270210 NR Description: RIKEN cDNA 1110001A12 [Mus musculus]
  misc_feature (1)..(56): NCBI GI NO: 20270210 NR Description: RIKEN cDNA 1110001A12 [Mus musculus]
  misc_feature (1)..(247): NCBI GI NO: 6322739 NR Description: Protein involved in resistance to K
  misc_feature (78)..(215): NCBI GI NO: 19923939 NR Description: hypothetical protein BC012173 [Homo sapiens]
  misc_feature (1)..(56): NCBI GI NO: 19923939 NR Description: hypothetical protein BC012173 [Homo sapiens]

SEQ ID NO: 22191 - DNA, 2542 bp, Zea mays subsp. mays
  misc_feature (1)..(2542): Ceres Seq. ID no. 15180024
attacctagaacatcctaatcaaaaaaaaaaaacaatttctttccttttttttctctctctcttatctgcaaaaaaaattcgttctgctaatttcggagctcaagacgctcgccccatctctcctctcgtcgtctttctcatcgatcctgccaaacaaaaaaacgaaaaaaaatactcttgctgttgatagagcgagtgaaaaaaaagaatagtctcagaaccatctagagacagcggcccgtggagcggacagcggagcgagcaagcctgcgccgccgccggcgtcctcccgaagtagaagctgttctgatccacagctctcgattccggaaggagttggtcaagaactggggatcctgagttgaatatgatatcaaatccggtggactggtatagtttcggacccggatagaattggtagggatgccagattggagggtgcgtgagtttgaaggtaaattcactgatgagtttgcccacagtaacaacaacaaacatgaaagtggagttgaggctcctggtgtcactagtagtaagaagttgaagcatgcagttgccggtgagaaaattcaaggtgtcatccctggaataaatagctcagatccacagaaatgtaattcagagaacatccaacatgagaacaggatagtatcccagaatataaacagtgctggtgactgcattggagactgcaaagacagctccaacgccttctcttcaagggaagaaaatacaatcgctgaaaccagatgtccaacggatgactggaactcctgtcagtttgcactgagcaatggttcatccattctcaataaccacattgctccacaggatagcctcacttatggagataatgatctaaactacattgattggcctggcattgacaattttgaggatgttgacacattattcaggagatctgatttcacatatgatccgcagcagctggagaatacagatgggttatcttggcttccttcttcagatgctgtttactcttctgatgttgctttgcagcaagggtttgactcgtcttattccgattatgatattctggatgatctctcagcattccaatgtgcagaagataaatcactaccctcagttggtccttcatcggatttatgtgataatcaattcaatgatacctatctgttcagtgagcagaagaatgcgaatgcatatggtgaacagatataccaagaggatgtgatggagttgttgcccactgaccagatatgcagtggacatgaaaacattgatatgttgcagggtggaaaccagtattcatctgaacatacaattcaaggtattgaagacaagaaattttctatagcatcaacttctcagctgagctcctctcagaatttactgaagcaaaggcaccacttagattccaattcaccaagcaacattacttatgaggcctatgaagaaaagttcggtccatctagtggttcttttgcacaaaggaattcaaaagtgcagaagaaaactatgaacatgcaaccaacacagccgacaaatgataatgtcatgaacagacatcctcaaacattgacaagaagtgcttcttatccttgtgagaacaatgaatctgaaagaagaggattagggaaaagaactctgggggatcctaagttacaatgggtacttcaatggtagtggatggctcatttgtatcatccatgtcctctgatatctctgttgaagaaagtagctttcgacaactgcagaatgctgttagtcagctggatgtgcaaaccaaattgtgcattagagatggtttataccgattggcacgaagtgcgcagcacaggcaagttattccaaatatgatgagcagcaatgaagacaacccggatataaaggatctgcagaatgcagaaactttgcgcaagttcgtcgatcctcggagcatcgagacacagacaaacccgatcgaccggtctatcgctctgctacttttccaccagtcatcggaccatgcggctgtggctgtcgacgatgcctcatcacttaaaccccctgctggtagcaaacaacaccagggccctgctgctaaccaaaaccaaggcctgatgcctgattcatcggtgtattcccctggagatggggcccccaaggatgtacagtccctggacaagttctgaatttatgtccctgctctccatgacctagttaagggcatgttcggttccccgggaatgggcatgttcggttccccgggaatggtcgttctggaatgaatcctggtcggatttcttcactaatttatataagctttgatcagttggaacgattctcgggaggaatttcaggataaacgaacagggcctaaggcgtctccatgacctggttaaggcggcataatacggcgtccacatgatgcttctaggcatatatgtaaaaaacaagcatattgtgtacccaatagtctgtagcctgttccaatcacattggttttgacatgcttgtatcctattggtaggcggccgttgtgctctctagtggcgttgactcacatatgtgtaatct

SEQ ID NO: 22192 - protein, 414 aa, Zea mays subsp. mays
  peptide (1)..(414): Ceres Seq. ID no. 15180025
  misc_feature (105)..(371): NCBI GI NO: 15237638 NR Description: expressed protein [Arabidopsis thaliana]
MPDWRVREFEGKFTDEFAHSNNNKHESGVEAPGVTSSKKLKHAVAGEKIQGVIPGINSSDPQKCNSENIQHENRIVSQNINSAGDCIGDCKDSSNAFSSREENTIAETRCPTDDWNSCQFALSNGSSILNNHIAPQDSLTYGDNDLNYIDWPGIDNFEDVDTLFRRSDFTYDPQQLENTDGLSWLPSSDAVYSSDVALQQGFDSSYSDYDILDDLSAFQCAEDKSLPSVGPSSDLCDNQFNDTYLFSEQKNANAYGEQIYQEDVMELLPTDQICSGHENIDMLQGGNQYSSEHTIQGIEDKKFSIASTSQLSSSQNLLKQRHHLDSNSPSNITYEAYEEKFGPSSGSFAQRNSKVQKKTMNMQPTQPTNDNVMNRHPQTLTRSASYPCENNESERRGLGKRTLGDPKLQWVLQW

SEQ ID NO: 22193 - DNA, 808 bp, Zea mays subsp. mays
  misc_feature (1)..(808): Ceres Seq. ID no. 12634455
accaccacactgtgcagcagcctcctttcgtctcgtagttggctggggttgccaacgcgacacctcgtcggaatccggtcgcgcgacctccccttctcgccggccggagcgggtgcgccatcaccatggacccggaagcggtacggaaaagcctggagcccaccgcaactgtcgaaaaaatcaccggctccacccctgcgcggctccacttctacgaccccttcgtcctcagcggagtcagcatcgaagccgccgagcacggtcgcctcctctgctcctttgtcgtcacccctcgccttgcgagtcccgcggggtacctccgcagcggtgtcacagcgacgctcgccgaccagctgggatcggccgtgtttttctgcagcgggctccccagcagcggggtatccctcgaaatcagcgtctcctttgttgacgcggctgccgtcggggaggaaatagaggtcgagggaaagctgttgcgtgccggcaagtcagtcggtgtcgtctctgtcgatttcaggaagaaaaagacaggaaaactgatggcgcaggcccgtcacaccaagtatcttgtggcatcaagcagattgtgaggctgcccccttctgttaacaagatgtcaacataattgcgcccgaactgtccattactgatgccattattaataggcagcaacgatacaacgcttgtagtatatcctttatgtcaaattttttttgtgctgtatatttatttacatatgaaatccaagtatcagtggtgcctctgtgacagccaatcaagcgtgatcagataaggtcttgttagcgtg

SEQ ID NO: 22194 - protein, 154 aa, Zea mays subsp. mays
  peptide (1)..(154): Ceres Seq. ID no. 12634456
  misc_feature (1)..(154): NCBI GI NO: 21740488 NR Description: OSJNBa0006B20.3
  misc_feature (1)..(154): NCBI GI NO: 18379308 NR Description: expressed protein; protein id: At1g04290
  misc_feature (1)..(152): NCBI GI NO: 13605902 NR Description: At1g04290/F19P19_27 [Arabidopsis thaliana]
  misc_feature (65)..(154): NCBI GI NO: 20161439 NR Description: B1065E10.13
  misc_feature (34)..(148): NCBI GI NO: 13385260 NR Description: RIKEN cDNA 0610006O17 [Mus musculus]
  misc_feature (17)..(148): NCBI GI NO: 8923812 NR Description: uncharacterized hypothalamus protein HT012
  misc_feature (34)..(148): NCBI GI NO: 27685797 NR Description: similar to RIKEN cDNA 0610006O17
  misc_feature (29)..(154): NCBI GI NO: 18402093 NR Description: expressed protein; protein id: At2g29590
  misc_feature (29)..(154): NCBI GI NO: 25408036 NR Description: hypothetical protein At2g29590
  misc_feature (34)..(149): NCBI GI NO: 33146522 NR Description: unknown protein
MDPEAVRKSLEPTATVEKITGSTPARLHFYDPFVLSGVSIEAAEHGRLLCSFVVTPRLASPAGYLRSGVTATLADQLGSAVFFCSGLPSSGVSLEISVSFVDAAAVGEEIEVEGKLLRAGKSVGVVSVDFRKKKTGKLMAQARHTKYLVASSRL

SEQ ID NO: 22195 - protein, 151 aa, Zea mays subsp. mays
  peptide (1)..(151): Ceres Seq. ID no. 12634457
TTTLCSSLLSSRSWLGLPTRHLVGIRSRDLPFSPAGAGAPSPWTRKRYGKAWSPPQLSKKSPAPPLRGSTSTTPSSSAESASKPPSTVASSAPLSSPLALRVPRGTSAAVSQRRSPTSWDRPCFSAAGSPAAGYPSKSASPLLTRLPSGRK

SEQ ID NO: 22196 - protein, 142 aa, Zea mays subsp. mays
  peptide (1)..(142): Ceres Seq. ID no. 12634458
PPHCAAASFRLVVGWGCQRDTSSESGRATSPSRRPERVRHHHGPGSGTEKPGAHRNCRKNHRLHPCAAPLLRPLRPQRSQHRSRRARSPPLLLCRHPSPCESRGVPPQRCHSDARRPAGIGRVFLQRAPQQRGIPRNQRLLC

SEQ ID NO: 22197 - DNA, 968 bp, Zea mays subsp. mays
  misc_feature (1)..(968): Ceres Seq. ID no. 12635196
acaaaaaccctcttctcctctgtccgagattcatacaaaaatgcttctcaaatccgcttctactttctcgctcgtgaacatccatggaggagtcaagaaggacatctctcccctctcctcctcctcctcctcctcattgagtcttcccgtttcttcgggaaaatcaagaaacctctccttctctgtttctgcctccacgcaaaccctgagcggcgtcgttttcgagccgtttgaggaggtgaagaaggaactcgatctcgtcccttcgagtccgcagctctcgctcgctcgccacatgtactctcccgagtgcgaagccgccgtcaacgagcagatcaatgtggagtacaacgtgtcttatgtgtatcacgccttgtacgcttacttcgatcgtgataacgttgctctcaaaggtcttgccaagtttttcaaggactcgagtgtggaagagcgtgaccatgctgagatgttgatggagtatcagaacaaacgtggtgggagggttaagttacagcctatggtgatgcctcaaactgagtttgatcacgctgagaaaggagatgctctctatgccatggagctggctctgtcattggagaagctggtcaatgagaagctccttaacgtgcacagtgtggcttccaagaacgatgatgtgcagttggcagatttcattgagagcgagtttttgaacgaacaggttgaagcaattaagaaaatctctgaatatgtagctcagctcagaagactcggcaaaggacatggaacatggcatttcgatcaagggcttctggaagctgctgctgcttaaatctagttttgggtgtagtcttcttcttatgaacttctgctgctgcttaaatctattttgtttgtaatctcttataaactcttgttgcttgatttgttttggttctggattattaagcctttagtttttgttcacatttctgattcacaaacctttg

SEQ ID NO: 22198 - protein, 269 aa, Zea mays subsp. mays
  peptide (1)..(269): Ceres Seq. ID no. 12635197
  misc_feature (105)..(250): Pfam Name: Pfam Description:  Ferritin-like domain
  misc_feature (14)..(268): NCBI GI NO: 15228818 NR Description: putative protein; protein id: At3g56090
  misc_feature (14)..(265): NCBI GI NO: 15225679 NR Description: putative ferritin; protein id: At2g40300
  misc_feature (14)..(269): NCBI GI NO: 29839387 NR Description: Ferritin 3, chloroplast precursor (SFerH-3)
  misc_feature (14)..(265): NCBI GI NO: 29839345 NR Description: Ferritin 2, chloroplast precursor (NtFer2)
  misc_feature (14)..(264): NCBI GI NO: 21593905 NR Description: ferritin subunit, putative [Arabidopsis thaliana]
  misc_feature (14)..(264): NCBI GI NO: 29839287 NR Description: Ferritin 2, chloroplast precursor
  misc_feature (14)..(269): NCBI GI NO: 29839371 NR Description: Ferritin 1, chloroplast precursor (NtFer1)
  misc_feature (14)..(264): NCBI GI NO: 15228431 NR Description: ferritin subunit, putative; protein id:At3g11050
  misc_feature (21)..(264): NCBI GI NO: 29839257 NR Description: Ferritin 3, chloroplast precursor
  misc_feature (39)..(264): NCBI GI NO: 29839386 NR Description: Ferritin 4, chloroplast precursor (SFerH-4)
QKPSSPLSEIHTKMLLKSASTFSLVNIHGGVKKDISPLSSSSSSSLSLPVSSGKSRNLSFSVSASTQTLSGVVFEPFEEVKKELDLVPSSPQLSLARHMYSPECEAAVNEQINVEYNVSYVYHALYAYFDRDNVALKGLAKFFKDSSVEERDHAEMLMEYQNKRGGRVKLQPMVMPQTEFDHAEKGDALYAMELALSLEKLVNEKLLNVHSVASKNDDVQLADFIESEFLNEQVEAIKKISEYVAQLRRLGKGHGTWHFDQGLLEAAAA

SEQ ID NO: 22199 - protein, 256 aa, Zea mays subsp. mays
  peptide (1)..(256): Ceres Seq. ID no. 12635198
  misc_feature (92)..(237): Pfam Name: Pfam Description:  Ferritin-like domain
  misc_feature (1)..(255): NCBI GI NO: 15228818 NR Description: putative protein; protein id: At3g56090
  misc_feature (1)..(252): NCBI GI NO: 15225679 NR Description: putative ferritin; protein id: At2g40300
  misc_feature (1)..(256): NCBI GI NO: 29839387 NR Description: Ferritin 3, chloroplast precursor (SFerH-3)
  misc_feature (1)..(252): NCBI GI NO: 29839345 NR Description: Ferritin 2, chloroplast precursor (NtFer2)
  misc_feature (1)..(251): NCBI GI NO: 21593905 NR Description: ferritin subunit, putative [Arabidopsis thaliana]
  misc_feature (1)..(251): NCBI GI NO: 29839287 NR Description: Ferritin 2, chloroplast precursor
  misc_feature (1)..(256): NCBI GI NO: 29839371 NR Description: Ferritin 1, chloroplast precursor (NtFer1)
  misc_feature (1)..(251): NCBI GI NO: 15228431 NR Description: ferritin subunit, putative; protein id:At3g11050
  misc_feature (8)..(251): NCBI GI NO: 29839257 NR Description: Ferritin 3, chloroplast precursor
  misc_feature (26)..(251): NCBI GI NO: 29839386 NR Description: Ferritin 4, chloroplast precursor (SFerH-4)
MLLKSASTFSLVNIHGGVKKDISPLSSSSSSSLSLPVSSGKSRNLSFSVSASTQTLSGVVFEPFEEVKKELDLVPSSPQLSLARHMYSPECEAAVNEQINVEYNVSYVYHALYAYFDRDNVALKGLAKFFKDSSVEERDHAEMLMEYQNKRGGRVKLQPMVMPQTEFDHAEKGDALYAMELALSLEKLVNEKLLNVHSVASKNDDVQLADFIESEFLNEQVEAIKKISEYVAQLRRLGKGHGTWHFDQGLLEAAAA

SEQ ID NO: 22200 - protein, 171 aa, Zea mays subsp. mays
  peptide (1)..(171): Ceres Seq. ID no. 12635199
  misc_feature (7)..(152): Pfam Name: Pfam Description:  Ferritin-like domain
  misc_feature (1)..(170): NCBI GI NO: 15228818 NR Description: putative protein; protein id: At3g56090
  misc_feature (1)..(167): NCBI GI NO: 15225679 NR Description: putative ferritin; protein id: At2g40300
  misc_feature (1)..(171): NCBI GI NO: 29839387 NR Description: Ferritin 3, chloroplast precursor (SFerH-3)
  misc_feature (1)..(167): NCBI GI NO: 29839345 NR Description: Ferritin 2, chloroplast precursor (NtFer2)
  misc_feature (1)..(166): NCBI GI NO: 21593905 NR Description: ferritin subunit, putative [Arabidopsis thaliana]
  misc_feature (1)..(166): NCBI GI NO: 29839287 NR Description: Ferritin 2, chloroplast precursor
  misc_feature (1)..(171): NCBI GI NO: 29839371 NR Description: Ferritin 1, chloroplast precursor (NtFer1)
  misc_feature (1)..(166): NCBI GI NO: 15228431 NR Description: ferritin subunit, putative; protein id:At3g11050
  misc_feature (1)..(166): NCBI GI NO: 29839257 NR Description: Ferritin 3, chloroplast precursor
  misc_feature (1)..(166): NCBI GI NO: 29839386 NR Description: Ferritin 4, chloroplast precursor (SFerH-4)
MYSPECEAAVNEQINVEYNVSYVYHALYAYFDRDNVALKGLAKFFKDSSVEERDHAEMLMEYQNKRGGRVKLQPMVMPQTEFDHAEKGDALYAMELALSLEKLVNEKLLNVHSVASKNDDVQLADFIESEFLNEQVEAIKKISEYVAQLRRLGKGHGTWHFDQGLLEAAAA

SEQ ID NO: 22201 - DNA, 1048 bp, Zea mays subsp. mays
  misc_feature (1)..(1048): Ceres Seq. ID no. 13599424
actttcgccgctgctctccgctttcatagggtttatctctttcctcttcccctctcgcgcacggcagccggattccctaccgcaggcgagccaccacgccggccggagctcggagataaggtagttgtttagcaagcaatcgagaatgtcgtcggtgcagctctccggtgccggtgttgccacggtggccttcaacaacactggtctgcgcccctctcaggcgtcagcagtcagagtgtgctcatcgaggcgctcatctcgtagcctcgttgtcagggctgccactgtcgtcaccccgaagtatacatcactcaagcctctgggagacagagtgcttgtgaagcttagcgcagctgaggagaagaccattggtggaattttgcttccatcctccgcgcagtccaagcctcagggaggcgagattgttgctgttggagggggtagaaccattggggataagaaggtggaggtcagcataccgactggatctcaagttgtatattcaaagtatgctggtactgaggttgaatacaacaactccaagcatcttattatgaaagaggatgacatcataggtattcttgaatctgatgatgtcaaagacatgaagcctctcaatgaccggattctcatcaaggttgcagaggcttcagacaagactgaagctggtcttatcctcaccgagacaaccaaggagaagccatccattggaacagtcgtagctgttggtccgggctctcttgacgaggaaggcaagaggcagccattgccagtgtcaccaggcagcaccgtgctgtactccaagtacgcaggcggcgagttcaagggagctgatggcacgaactacattgtgttgagagtgtctgatgtgatggctgagctctcttaagtgtgtggtttattactttgtttcagttttgagttcacgatataggctagcatgagtggtaagattgctatgtgataaccacttgatgctgtttcggatgattacggaattgtacgagcaaacctgttgtctgggataaaaacatttactgaatttgtt

SEQ ID NO: 22202 - protein, 247 aa, Zea mays subsp. mays; identical to SEQ ID NO: 7503
  peptide (1)..(247): Ceres Seq. ID no. 13599425
  misc_feature (152)..(247): Pfam Name: Pfam Description:  Chaperonin 10 Kd subunit
  misc_feature (1)..(247): NCBI GI NO: 15242045 NR Description: chloroplast Cpn21 protein [Arabidopsis thaliana]
  misc_feature (1)..(247): NCBI GI NO: 25453528 NR Description: chaperonin 10 [imported] - Arabidopsis thaliana
  misc_feature (1)..(247): NCBI GI NO: 7331143 NR Description: chaperonin 21 precursor [Lycopersicon esculentum]
  misc_feature (1)..(247): NCBI GI NO: 21780187 NR Description: cp10-like protein [Gossypium hirsutum]
  misc_feature (19)..(247): NCBI GI NO: 399241 NR Description: 20 kDa chaperonin, chloroplast precursor
  misc_feature (56)..(147): NCBI GI NO: 2493659 NR Description: 10 kDa chaperonin (Protein Cpn10) (groES protein)
  misc_feature (56)..(147): NCBI GI NO: 20807075 NR Description: Co-chaperonin GroES (HSP10)
  misc_feature (151)..(244): NCBI GI NO: 22297730 NR Description: 10kD chaperonin
  misc_feature (55)..(147): NCBI GI NO: 23474135 NR Description: hypothetical protein
  misc_feature (56)..(147): NCBI GI NO: 15895961 NR Description: Co-chaperonin GroES, HSP10 family

SEQ ID NO: 22203 - DNA, 1406 bp, Zea mays subsp. mays
  misc_feature (1)..(1406): Ceres Seq. ID no. 15227046
accttcccagttcccacgtcccaacaacaaccaccccaggatatgagaatactatgatccccatccctcccctcccctcccctgactctactactcctcccccactgccttgccttcgtcgtcacatgcgcacaagaaagaacccgcgccgcccctgaccctggcccctcctctcctccagcgcgcagccaagacgtcgccgcgcccgcttccatgaccctcgtccccacctcgcgatgagcgacattgcgccgtggtggcgcctgccttttcgttcttgaccgcccgtcgagctgctacgagaaagggagggaggccgggcgatggccgccgcgaggaggctctcggagctgctgcaggagcagcaggagccgttcctcgtcgaggccgccagggcgaggcggccccgacgcgtccgtggcgcgagcggggcggcggcggaggaagcgggaggaggaggtgggctgggctgctgccccaccgcggcgtgccggcggctgctcaggctctgcagccacgggttcaagaagaggagcgccggcgccctcaggtcggcgctgaccaaggtgctgtgcagcagggccatgcgccgggtgctgcgctgggacggcctcggcggagactgcctctcgggcgccggcgcatgcggcgccagcgagttccgccgcctgcgccgctcactgggggacagcggcgagtgtgaccctcgcgccatggtgtttcccggcgatggtggggacgaggagcgggtggggtggaaggccgacatggacgtcgactcgtcgcggcagctcagcccggtctccgtcctggacctgcactccgacgatgacgacgacgagtcgctggcgcattcttactggggcgacgagaagccgtccacctccgggagctcacctccgtccgagcctttcctcgggccgacctctccgtgcttcagctactacagccacagccacatcctgcacgacaagttccgcgagatggaggtggacgagggcgaggaggagacggcccggaccggcaggtccgtcgaggagcagatctcgtcgtgggagaagatcgcgggtgacatctccaggatccccgcgatggtggagctggacctggcgcggtccgcgcggcagtggcgggagccgaggctggaggccagggaggtcggcgccaggatagagaccctcatcttcgatgacatcaggagggagaccgtgtgcgacatgctcgcctcgcattgtagatcggcggcggcggcggcggcagcagcaacgtcttgttgatcgaggtagtaggaggaggaggggttgttgtgttggtcagaagctatgcagcggatacgggtacatttatcgacagttttcaaaaataaaatggagaataaatagcgtatatatgttgaaaaggttaac

SEQ ID NO: 22204 - protein, 317 aa, Zea mays subsp. mays
  peptide (1)..(317): Ceres Seq. ID no. 15227047
  misc_feature (1)..(317): NCBI GI NO: 12039271 NR Description: hypothetical protein [Oryza sativa]
MAAARRLSELLQEQQEPFLVEAARARRPRRVRGASGAAAEEAGGGGGLGCCPTAACRRLLRLCSHGFKKRSAGALRSALTKVLCSRAMRRVLRWDGLGGDCLSGAGACGASEFRRLRRSLGDSGECDPRAMVFPGDGGDEERVGWKADMDVDSSRQLSPVSVLDLHSDDDDDESLAHSYWGDEKPSTSGSSPPSEPFLGPTSPCFSYYSHSHILHDKFREMEVDEGEEETARTGRSVEEQISSWEKIAGDISRIPAMVELDLARSARQWREPRLEAREVGARIETLIFDDIRRETVCDMLASHCRSAAAAAAAATSC

SEQ ID NO: 22205 - protein, 230 aa, Zea mays subsp. mays
  peptide (1)..(230): Ceres Seq. ID no. 15227048
  misc_feature (1)..(230): NCBI GI NO: 12039271 NR Description: hypothetical protein [Oryza sativa]
MRRVLRWDGLGGDCLSGAGACGASEFRRLRRSLGDSGECDPRAMVFPGDGGDEERVGWKADMDVDSSRQLSPVSVLDLHSDDDDDESLAHSYWGDEKPSTSGSSPPSEPFLGPTSPCFSYYSHSHILHDKFREMEVDEGEEETARTGRSVEEQISSWEKIAGDISRIPAMVELDLARSARQWREPRLEAREVGARIETLIFDDIRRETVCDMLASHCRSAAAAAAAATSC

SEQ ID NO: 22206 - protein, 187 aa, Zea mays subsp. mays
  peptide (1)..(187): Ceres Seq. ID no. 15227049
  misc_feature (1)..(187): NCBI GI NO: 12039271 NR Description: hypothetical protein [Oryza sativa]
MVFPGDGGDEERVGWKADMDVDSSRQLSPVSVLDLHSDDDDDESLAHSYWGDEKPSTSGSSPPSEPFLGPTSPCFSYYSHSHILHDKFREMEVDEGEEETARTGRSVEEQISSWEKIAGDISRIPAMVELDLARSARQWREPRLEAREVGARIETLIFDDIRRETVCDMLASHCRSAAAAAAAATSC

SEQ ID NO: 22207 - DNA, 683 bp, Zea mays subsp. mays
  misc_feature (1)..(683): Ceres Seq. ID no. 13599649
aaatcacaccaaaaccctaatctctcccaaagcttctctcccaaacacaaaatggttaaccctaaagtttacttcgacatgaccgtcggcgacaaagccgccggacgcatcgtcatggagctttacgccgacacagtccccgagacggccgagaacttccgtgccctctgcaccggcgagaaaggaatcggcaaatccgggaagccgctccactacaagggctcggctttccaccgcgtgatccccaagttcatgtgccagggaggagatttcaccgccgggaacggaaccggaggagagtcgatctacggcatgaagttcaaagacgagaactttgtcaagaagcacaccggtccgggtattctctccatggccaacgctggttcgaacacgaacggatctcagtttttcatttgcactgagaagacatcgtggctcgacgggaagcatgttgtgttcggtcaagttgtcgaagggatggatgtcgttagagacattgagaaggttggatctgacagtggaaggacttctaagaaggttgtgatcgctgactgtggtcagctttagatctgatgagggagaaaagagagaggttgttgatccaatggtagctttgtgttcttttctgttgtgttttttttttgttctggttttctccgtgttctatggctaccatgaataat

SEQ ID NO: 22208 - protein, 188 aa, Zea mays subsp. mays
  peptide (1)..(188): Ceres Seq. ID no. 13599650
  misc_feature (22)..(188): Pfam Name: Pfam Description:  Cyclophilin type peptidyl-prolyl cis-trans isomerase
  misc_feature (18)..(188): NCBI GI NO: 1345921 NR Description: PEPTIDYL-PROLYL CIS-TRANS ISOMERASE
  misc_feature (18)..(188): NCBI GI NO: 68407 NR Description: peptidylprolyl isomerase (EC 5.2.1.8) - rape
  misc_feature (21)..(188): NCBI GI NO: 167138 NR Description: cyclophilin
  misc_feature (20)..(188): NCBI GI NO: 15227259 NR Description: cytosolic cyclophilin (ROC3)
  misc_feature (18)..(188): NCBI GI NO: 11270316 NR Description: peptidylprolyl isomerase (EC 5.2.1.8)
  misc_feature (18)..(187): NCBI GI NO: 17981611 NR Description: cyclophilin [Glycine max]
  misc_feature (21)..(188): NCBI GI NO: 11270318 NR Description: peptidylprolyl isomerase (EC 5.2.1.8) CYP18
  misc_feature (18)..(188): NCBI GI NO: 3334157 NR Description: Peptidyl-prolyl cis-trans isomerase
  misc_feature (20)..(188): NCBI GI NO: 18076088 NR Description: cyclophilin [Ricinus communis]
  misc_feature (18)..(188): NCBI GI NO: 6014890 NR Description: Peptidyl-prolyl cis-trans isomerase
KSHQNPNLSQSFSPKHKMVNPKVYFDMTVGDKAAGRIVMELYADTVPETAENFRALCTGEKGIGKSGKPLHYKGSAFHRVIPKFMCQGGDFTAGNGTGGESIYGMKFKDENFVKKHTGPGILSMANAGSNTNGSQFFICTEKTSWLDGKHVVFGQVVEGMDVVRDIEKVGSDSGRTSKKVVIADCGQL

SEQ ID NO: 22209 - protein, 171 aa, Zea mays subsp. mays
  peptide (1)..(171): Ceres Seq. ID no. 13599651
  misc_feature (5)..(171): Pfam Name: Pfam Description:  Cyclophilin type peptidyl-prolyl cis-trans isomerase
  misc_feature (1)..(171): NCBI GI NO: 1345921 NR Description: PEPTIDYL-PROLYL CIS-TRANS ISOMERASE
  misc_feature (1)..(171): NCBI GI NO: 68407 NR Description: peptidylprolyl isomerase (EC 5.2.1.8) - rape
  misc_feature (4)..(171): NCBI GI NO: 167138 NR Description: cyclophilin
  misc_feature (3)..(171): NCBI GI NO: 15227259 NR Description: cytosolic cyclophilin (ROC3)
  misc_feature (1)..(171): NCBI GI NO: 11270316 NR Description: peptidylprolyl isomerase (EC 5.2.1.8)
  misc_feature (1)..(170): NCBI GI NO: 17981611 NR Description: cyclophilin [Glycine max]
  misc_feature (4)..(171): NCBI GI NO: 11270318 NR Description: peptidylprolyl isomerase (EC 5.2.1.8) CYP18
  misc_feature (1)..(171): NCBI GI NO: 3334157 NR Description: Peptidyl-prolyl cis-trans isomerase
  misc_feature (3)..(171): NCBI GI NO: 18076088 NR Description: cyclophilin [Ricinus communis]
  misc_feature (1)..(171): NCBI GI NO: 6014890 NR Description: Peptidyl-prolyl cis-trans isomerase
MVNPKVYFDMTVGDKAAGRIVMELYADTVPETAENFRALCTGEKGIGKSGKPLHYKGSAFHRVIPKFMCQGGDFTAGNGTGGESIYGMKFKDENFVKKHTGPGILSMANAGSNTNGSQFFICTEKTSWLDGKHVVFGQVVEGMDVVRDIEKVGSDSGRTSKKVVIADCGQL

SEQ ID NO: 22210 - protein, 162 aa, Zea mays subsp. mays
  peptide (1)..(162): Ceres Seq. ID no. 13599652
  misc_feature (1)..(162): Pfam Name: Pfam Description:  Cyclophilin type peptidyl-prolyl cis-trans isomerase
  misc_feature (1)..(162): NCBI GI NO: 1345921 NR Description: PEPTIDYL-PROLYL CIS-TRANS ISOMERASE
  misc_feature (1)..(162): NCBI GI NO: 68407 NR Description: peptidylprolyl isomerase (EC 5.2.1.8) - rape
  misc_feature (1)..(162): NCBI GI NO: 167138 NR Description: cyclophilin
  misc_feature (1)..(162): NCBI GI NO: 15227259 NR Description: cytosolic cyclophilin (ROC3)
  misc_feature (1)..(162): NCBI GI NO: 11270316 NR Description: peptidylprolyl isomerase (EC 5.2.1.8)
  misc_feature (1)..(161): NCBI GI NO: 17981611 NR Description: cyclophilin [Glycine max]
  misc_feature (1)..(162): NCBI GI NO: 11270318 NR Description: peptidylprolyl isomerase (EC 5.2.1.8) CYP18
  misc_feature (1)..(162): NCBI GI NO: 3334157 NR Description: Peptidyl-prolyl cis-trans isomerase
  misc_feature (1)..(162): NCBI GI NO: 18076088 NR Description: cyclophilin [Ricinus communis]
  misc_feature (1)..(162): NCBI GI NO: 6014890 NR Description: Peptidyl-prolyl cis-trans isomerase
MTVGDKAAGRIVMELYADTVPETAENFRALCTGEKGIGKSGKPLHYKGSAFHRVIPKFMCQGGDFTAGNGTGGESIYGMKFKDENFVKKHTGPGILSMANAGSNTNGSQFFICTEKTSWLDGKHVVFGQVVEGMDVVRDIEKVGSDSGRTSKKVVIADCGQL

SEQ ID NO: 22211 - DNA, 907 bp, Zea mays subsp. mays
  misc_feature (1)..(907): Ceres Seq. ID no. 12635952
aataacaatctaactgttgtgtcttgtaagagaaagagagacagaaaaaaagatggtgctaaaggtgtacggacctcactttgcttcaccaaagcgagctttggtaacgcttatcgagaagggcgttcccttcgagaccgtccccgtcgatctcatgaaaggagagcacaagcagcctgcttatctcgccttacagcctttcggcaccgttcctgctgttgtcgacggtgactacaagatcttcgagtcacgtgcggtgatgaggtacgtagctgagaagtacaggtcacaaggacctgaccttttgggcaaaaccgtcgaagacagaggtcaagttgagcaatggctcgacgttgaggccaccactttccacccacctctccttaacctcacactccacatcatgttcgcatcagtcatgggattcccttccgatgagaagctgatcaaggagagcgaggagaagctctcagctgtgctcgatgtctacgaggcacatctcgccaagagcaagtacttggctggtgatttcgtcagcttggctgatttggctcacctccctttcactgattacttggttggacccatcggtaaggcttacatgatcaaagacaggaagcacgtgagcgcgtggtgggatgatattagcagccgtcctgcttggaaggagacccttgagaagtactcattccctgcttaaagatgatgatcatgttcttgatctttgtttgtgtttcggagtttctaagcaatgcctgtgtttaatgtgaggtttttaataaagagtggaactgtatgcctcctcttatcttatgtatgccacctctcttttctcttttgtttcatattgtaactccaattctgtgtgattgagttgaggtttgaatctagaggaacttaattatct

SEQ ID NO: 22212 - protein, 215 aa, Zea mays subsp. mays
  peptide (1)..(215): Ceres Seq. ID no. 12635953
  misc_feature (1)..(215): NCBI GI NO: 15224581 NR Description: glutathione transferase, putative
  misc_feature (1)..(215): NCBI GI NO: 2462929 NR Description: glutathione transferase [Arabidopsis thaliana]
  misc_feature (1)..(214): NCBI GI NO: 15224582 NR Description: glutathione transferase, putative
  misc_feature (6)..(214): NCBI GI NO: 11385459 NR Description: glutathione S-transferase GST 22 [Glycine max]
  misc_feature (1)..(214): NCBI GI NO: 11385463 NR Description: glutathione S-transferase GST 24 [Glycine max]
  misc_feature (1)..(214): NCBI GI NO: 21217741 NR Description: putative glutathione S-transferase
  misc_feature (1)..(209): NCBI GI NO: 15228488 NR Description: glutathione transferase, putative
  misc_feature (1)..(209): NCBI GI NO: 1524316 NR Description: glutathione S-transferase [Petunia x hybrida]
  misc_feature (5)..(214): NCBI GI NO: 11177845 NR Description: putative glutathione S-transferase OsGSTF3
  misc_feature (5)..(214): NCBI GI NO: 22758267 NR Description: Putative glutathione S-transferase
MVLKVYGPHFASPKRALVTLIEKGVPFETVPVDLMKGEHKQPAYLALQPFGTVPAVVDGDYKIFESRAVMRYVAEKYRSQGPDLLGKTVEDRGQVEQWLDVEATTFHPPLLNLTLHIMFASVMGFPSDEKLIKESEEKLSAVLDVYEAHLAKSKYLAGDFVSLADLAHLPFTDYLVGPIGKAYMIKDRKHVSAWWDDISSRPAWKETLEKYSFPA

SEQ ID NO: 22213 - protein, 181 aa, Zea mays subsp. mays
  peptide (1)..(181): Ceres Seq. ID no. 12635954
  misc_feature (1)..(181): NCBI GI NO: 15224581 NR Description: glutathione transferase, putative
  misc_feature (1)..(181): NCBI GI NO: 2462929 NR Description: glutathione transferase [Arabidopsis thaliana]
  misc_feature (1)..(180): NCBI GI NO: 15224582 NR Description: glutathione transferase, putative
  misc_feature (1)..(180): NCBI GI NO: 11385459 NR Description: glutathione S-transferase GST 22 [Glycine max]
  misc_feature (1)..(180): NCBI GI NO: 11385463 NR Description: glutathione S-transferase GST 24 [Glycine max]
  misc_feature (1)..(180): NCBI GI NO: 21217741 NR Description: putative glutathione S-transferase
  misc_feature (1)..(175): NCBI GI NO: 15228488 NR Description: glutathione transferase, putative
  misc_feature (1)..(175): NCBI GI NO: 1524316 NR Description: glutathione S-transferase [Petunia x hybrida]
  misc_feature (1)..(180): NCBI GI NO: 11177845 NR Description: putative glutathione S-transferase OsGSTF3
  misc_feature (1)..(180): NCBI GI NO: 22758267 NR Description: Putative glutathione S-transferase
MKGEHKQPAYLALQPFGTVPAVVDGDYKIFESRAVMRYVAEKYRSQGPDLLGKTVEDRGQVEQWLDVEATTFHPPLLNLTLHIMFASVMGFPSDEKLIKESEEKLSAVLDVYEAHLAKSKYLAGDFVSLADLAHLPFTDYLVGPIGKAYMIKDRKHVSAWWDDISSRPAWKETLEKYSFPA

SEQ ID NO: 22214 - protein, 146 aa, Zea mays subsp. mays
  peptide (1)..(146): Ceres Seq. ID no. 12635955
  misc_feature (1)..(146): NCBI GI NO: 15224581 NR Description: glutathione transferase, putative
  misc_feature (1)..(146): NCBI GI NO: 2462929 NR Description: glutathione transferase [Arabidopsis thaliana]
  misc_feature (1)..(145): NCBI GI NO: 15224582 NR Description: glutathione transferase, putative
  misc_feature (1)..(145): NCBI GI NO: 11385459 NR Description: glutathione S-transferase GST 22 [Glycine max]
  misc_feature (1)..(145): NCBI GI NO: 11385463 NR Description: glutathione S-transferase GST 24 [Glycine max]
  misc_feature (1)..(145): NCBI GI NO: 21217741 NR Description: putative glutathione S-transferase
  misc_feature (1)..(140): NCBI GI NO: 15228488 NR Description: glutathione transferase, putative
  misc_feature (1)..(140): NCBI GI NO: 1524316 NR Description: glutathione S-transferase [Petunia x hybrida]
  misc_feature (1)..(145): NCBI GI NO: 11177845 NR Description: putative glutathione S-transferase OsGSTF3
  misc_feature (1)..(145): NCBI GI NO: 22758267 NR Description: Putative glutathione S-transferase
MRYVAEKYRSQGPDLLGKTVEDRGQVEQWLDVEATTFHPPLLNLTLHIMFASVMGFPSDEKLIKESEEKLSAVLDVYEAHLAKSKYLAGDFVSLADLAHLPFTDYLVGPIGKAYMIKDRKHVSAWWDDISSRPAWKETLEKYSFPA

SEQ ID NO: 22215 - DNA, 736 bp, Zea mays subsp. mays
  misc_feature (1)..(736): Ceres Seq. ID no. 12635268
atagattaggtcgagtgtgctctcacagacacggataacgcaaaacctctctgtcttcccaaatccaccacctcacaacgacgactacgatggctctttctactggaatcttctccaccttcctctgcgtcaaaacggtgacgttacgcagctcaccgttcctccgtgtttcccctcctcatccggctaacctgcggatggtgcgagccgtgacctccgcgacggcggcgtcctccgagccgtcagccaccaagactcgggagccacgtggcatcatgaagcctcgcccagtgtcccccgagatgcaggacgtggtgggtgagccggtgattcctcgcacgcaggctcttaagcgcatttgggcctacatcaaggaacacgaccttcaggatccacaagacaagaaggttataatctgcgacgagaagctgaagaagatattcgcaggcaaagaccgtgtcgggttcttggagattgcaaagctcatcggtcctcacttcctctgaatgagaagacaatcgatcactagcgtatgtttacatattagtaacgttaggtttaagaagttttatgcaacaaagtagtagtcaagccctttgggacgatatcttttgcgtttgttggttatgtgtctctttgcttcagattgcagtttaaaatttgctatgttttgtcttaggacttgagcaactcttcgatgcatcgtttcttcatattatcaacaggcctgccatct

SEQ ID NO: 22216 - protein, 138 aa, Zea mays subsp. mays; identical to SEQ ID NO: 11652
  peptide (1)..(138): Ceres Seq. ID no. 12635269
  misc_feature (62)..(138): Pfam Name: Pfam Description:  SWIB/MDM2 domain
  misc_feature (1)..(138): NCBI GI NO: 14423526 NR Description: putative protein [Arabidopsis thaliana]
  misc_feature (1)..(138): NCBI GI NO: 15235320 NR Description: putative protein; protein id: At4g34290
  misc_feature (1)..(138): NCBI GI NO: 21553903 NR Description: unknown [Arabidopsis thaliana]
  misc_feature (1)..(138): NCBI GI NO: 18397658 NR Description: expressed protein; protein id: At2g14880
  misc_feature (1)..(138): NCBI GI NO: 19698859 NR Description: unknown protein [Arabidopsis thaliana]
  misc_feature (1)..(138): NCBI GI NO: 21593713 NR Description: unknown [Arabidopsis thaliana]
  misc_feature (9)..(138): NCBI GI NO: 14488372 NR Description: hypothetical protein
  misc_feature (28)..(138): NCBI GI NO: 18396594 NR Description: expressed protein; protein id: At3g03590
  misc_feature (28)..(138): NCBI GI NO: 21593643 NR Description: unknown [Arabidopsis thaliana]
  misc_feature (36)..(137): NCBI GI NO: 33667910 NR Description: SWIb domain-containing protein [Solanum chacoense]

SEQ ID NO: 22217 - protein, 102 aa, Zea mays subsp. mays; identical to SEQ ID NO: 11653
  peptide (1)..(102): Ceres Seq. ID no. 12635270
  misc_feature (26)..(102): Pfam Name: Pfam Description:  SWIB/MDM2 domain
  misc_feature (1)..(102): NCBI GI NO: 14423526 NR Description: putative protein [Arabidopsis thaliana]
  misc_feature (1)..(102): NCBI GI NO: 15235320 NR Description: putative protein; protein id: At4g34290
  misc_feature (1)..(102): NCBI GI NO: 21553903 NR Description: unknown [Arabidopsis thaliana]
  misc_feature (1)..(102): NCBI GI NO: 18397658 NR Description: expressed protein; protein id: At2g14880
  misc_feature (1)..(102): NCBI GI NO: 19698859 NR Description: unknown protein [Arabidopsis thaliana]
  misc_feature (1)..(102): NCBI GI NO: 21593713 NR Description: unknown [Arabidopsis thaliana]
  misc_feature (1)..(102): NCBI GI NO: 14488372 NR Description: hypothetical protein
  misc_feature (1)..(102): NCBI GI NO: 18396594 NR Description: expressed protein; protein id: At3g03590
  misc_feature (1)..(102): NCBI GI NO: 21593643 NR Description: unknown [Arabidopsis thaliana]
  misc_feature (1)..(101): NCBI GI NO: 33667910 NR Description: SWIb domain-containing protein [Solanum chacoense]

SEQ ID NO: 22218 - protein, 76 aa, Zea mays subsp. mays; identical to SEQ ID NO: 11654
  peptide (1)..(76): Ceres Seq. ID no. 12635271
  misc_feature (1)..(76): Pfam Name: Pfam Description:  SWIB/MDM2 domain
  misc_feature (1)..(76): NCBI GI NO: 14423526 NR Description: putative protein [Arabidopsis thaliana]
  misc_feature (1)..(76): NCBI GI NO: 15235320 NR Description: putative protein; protein id: At4g34290
  misc_feature (1)..(76): NCBI GI NO: 21553903 NR Description: unknown [Arabidopsis thaliana]
  misc_feature (1)..(76): NCBI GI NO: 18397658 NR Description: expressed protein; protein id: At2g14880
  misc_feature (1)..(76): NCBI GI NO: 19698859 NR Description: unknown protein [Arabidopsis thaliana]
  misc_feature (1)..(76): NCBI GI NO: 21593713 NR Description: unknown [Arabidopsis thaliana]
  misc_feature (1)..(76): NCBI GI NO: 14488372 NR Description: hypothetical protein
  misc_feature (1)..(76): NCBI GI NO: 18396594 NR Description: expressed protein; protein id: At3g03590
  misc_feature (1)..(76): NCBI GI NO: 21593643 NR Description: unknown [Arabidopsis thaliana]
  misc_feature (1)..(75): NCBI GI NO: 33667910 NR Description: SWIb domain-containing protein [Solanum chacoense]

SEQ ID NO: 22219 - DNA, 976 bp, Zea mays subsp. mays
  misc_feature (1)..(976): Ceres Seq. ID no. 12635446
aacctcattcctcagccaccacaccgatctagggtttcctgctagggttttagtccttcgtttccagcggcggcgcaagatgggtgagagagtgaagggaaccgtgaagtggttcaacgtcaccaaggggttcggattcatctccccggaggacggcagcgaggacctcttcgtccaccagtccgccatcaaggccgacggctaccgcagcctcaacgagaacgacgtcgtcgagtttgaggtcatcaccggcgacgacggccgaaccaaggccgccgacgtcaccgcaccaggagggggtgcgctcgccggcggctcccgccctggcgacggcggtggtgaccgcgggggtcgcggcgggggtggctacggtggaggcggctacggcggcggcggcggcggcggctacggtggtggtggcggcggctacggcagcggtggcggcagctacgacggcggtggcggctatggaggtggtggcggcggcggccgctacggaggagggcggcggcggcgtccgtgagtgctacaagtgcggcgaggagggccacatctccagggactgcccccagggcggcggcggcggtggcggtggctacggaggtggtggcggccgtggcggtggtggtggcggtggcggctgcttctcctgcggcgagtccggccacttctcgcgcgagtgccccaacaagaccaactagacggctttgcccgtcagatctgagtgccccgttccccttcgctccttttcctaccgcctgactctgcagcaagtcatacctatacctatcagtattagtatatgtcgccgtagtgttccccgtgcttctcgtaggaagaagaatcgacgatgcgagcttggttccagaagtattgttggtggcgtgttgttcgtttgaagttatcttgtgtcgtctgatggggacagaccttatatctttatgtattggattgaatggactaagttatgcaagtc

SEQ ID NO: 22220 - protein, 173 aa, Zea mays subsp. mays
  peptide (1)..(173): Ceres Seq. ID no. 12635447
  misc_feature (30)..(97): Pfam Name: Pfam Description:  'Cold-shock' DNA-binding domain
  misc_feature (27)..(168): NCBI GI NO: 40363759 NR Description: putative glycine-rich protein [Triticum aestivum]
  misc_feature (27)..(168): NCBI GI NO: 21322752 NR Description: cold shock protein-1 [Triticum aestivum]
  misc_feature (29)..(163): NCBI GI NO: 29467522 NR Description: P0582D05.12
  misc_feature (28)..(168): NCBI GI NO: 121631 NR Description: Glycine-rich protein 2
  misc_feature (97)..(164): NCBI GI NO: 21322752 NR Description: cold shock protein-1 [Triticum aestivum]
  misc_feature (28)..(170): NCBI GI NO: 15234010 NR Description: glycine-rich protein 2
  misc_feature (33)..(163): NCBI GI NO: 7442089 NR Description: glycine-rich protein T13L16
  misc_feature (33)..(163): NCBI GI NO: 18398546 NR Description: putative glycine-rich
  misc_feature (82)..(166): NCBI GI NO: 121631 NR Description: Glycine-rich protein 2
  misc_feature (28)..(169): NCBI GI NO: 15226451 NR Description: glycine-rich protein
TSFLSHHTDLGFPARVLVLRFQRRRKMGERVKGTVKWFNVTKGFGFISPEDGSEDLFVHQSAIKADGYRSLNENDVVEFEVITGDDGRTKAADVTAPGGGALAGGSRPGDGGGDRGGRGGGGYGGGGYGGGGGGGYGGGGGGYGSGGGSYDGGGGYGGGGGGGRYGGGRRRRP

SEQ ID NO: 22221 - protein, 147 aa, Zea mays subsp. mays
  peptide (1)..(147): Ceres Seq. ID no. 12635448
  misc_feature (4)..(71): Pfam Name: Pfam Description:  'Cold-shock' DNA-binding domain
  misc_feature (1)..(142): NCBI GI NO: 40363759 NR Description: putative glycine-rich protein [Triticum aestivum]
  misc_feature (1)..(142): NCBI GI NO: 21322752 NR Description: cold shock protein-1 [Triticum aestivum]
  misc_feature (3)..(137): NCBI GI NO: 29467522 NR Description: P0582D05.12
  misc_feature (2)..(142): NCBI GI NO: 121631 NR Description: Glycine-rich protein 2
  misc_feature (71)..(138): NCBI GI NO: 21322752 NR Description: cold shock protein-1 [Triticum aestivum]
  misc_feature (2)..(144): NCBI GI NO: 15234010 NR Description: glycine-rich protein 2
  misc_feature (7)..(137): NCBI GI NO: 7442089 NR Description: glycine-rich protein T13L16
  misc_feature (7)..(137): NCBI GI NO: 18398546 NR Description: putative glycine-rich
  misc_feature (56)..(140): NCBI GI NO: 121631 NR Description: Glycine-rich protein 2
  misc_feature (2)..(143): NCBI GI NO: 15226451 NR Description: glycine-rich protein
MGERVKGTVKWFNVTKGFGFISPEDGSEDLFVHQSAIKADGYRSLNENDVVEFEVITGDDGRTKAADVTAPGGGALAGGSRPGDGGGDRGGRGGGGYGGGGYGGGGGGGYGGGGGGYGSGGGSYDGGGGYGGGGGGGRYGGGRRRRP

SEQ ID NO: 22222 - DNA, 943 bp, Zea mays subsp. mays
  misc_feature (1)..(943): Ceres Seq. ID no. 13599646
aaaaaccactttcatcgcaactcagccagccagagcttaggcgagagagacagagacagaagatggcgtacagcgcgtgtttcctacatcagagcgcactggcctcctccgccgctcgatcatcatcttcctcctcatcccagcgctacgtttcactctccaaacccgtccaggtagtgtgtaaagctcaacagtctcatgaagacgataatcccgccgtctctcgccgtctcgccctcacactcctcgtcggcgccgccgccgttggttccaaagtgtctcctgccgatgccgcctatggtgaagctgcaaatgtgtttgggaagccaaagaaaaacacagacttcacgccatacaatggagatggattccaagtgcaggttccagctaaatggaacccaagcagagaggtagagtatccaggacaagtccttaggtacgaagacaactttgatgctactagcaatctcaatgtcatggtcactcctaccgacaagaagtccatcactgattacggctctcctgaagagttcctctctcaggtcaactaccttcttgggaaacaagcttacttcggtgagactgcctccgagggaggctttgacaacaatgcagtggcaacagcaaacattctggagacaaatgttcaggacgttggtgggaaaccatactactacttgtccgtgttgacaagaacggccgatggagatgaaggtggtaagcatcagctgatcacagccaccgtgaacggaggcaagctttacatctgcaaagcacaagctggagacaagaggtggttcaagggagccaacaaatttgtcgagaaagcagccacttctttcagtgttgcttgaatcaaagcaacacaaacagaacaatgctctgctttctttttttttcatttgtctcttgtaaaaaaatggaaaatgaaactaagcttttg

SEQ ID NO: 22223 - protein, 283 aa, Zea mays subsp. mays
  peptide (1)..(283): Ceres Seq. ID no. 13599647
  misc_feature (81)..(283): Pfam Name: Pfam Description:  PsbP
  misc_feature (21)..(283): NCBI GI NO: 15222166 NR Description: photosystem II oxygen-evolving complex 23 (OEC23)
  misc_feature (21)..(283): NCBI GI NO: 131391 NR Description: Oxygen-evolving enhancer protein 2
  misc_feature (33)..(283): NCBI GI NO: 81723 NR Description: photosystem II oxygen-evolving complex protein 2precursor
  misc_feature (21)..(283): NCBI GI NO: 11133887 NR Description: OXYGEN-EVOLVING ENHANCER PROTEIN 2-2
  misc_feature (21)..(283): NCBI GI NO: 7443216 NR Description: photosystem II oxygen-evolving complex protein 2precursor
  misc_feature (21)..(283): NCBI GI NO: 15224572 NR Description: photosystem II oxygen-evolving complex 23 (OEC23)
  misc_feature (67)..(283): NCBI GI NO: 11134091 NR Description: Oxygen-evolving enhancer protein 2
  misc_feature (26)..(283): NCBI GI NO: 1345550 NR Description: 23-kDa ploypeptide of photosystem II oxygen-evolving complex
  misc_feature (28)..(283): NCBI GI NO: 19898 NR Description: photosystem II 23 kDa polypeptide
  misc_feature (21)..(283): NCBI GI NO: 417604 NR Description: 23 kDa polypeptide of water-oxidizing complex ofphotosystem II
KPLSSQLSQPELRRERQRQKMAYSACFLHQSALASSAARSSSSSSSQRYVSLSKPVQVVCKAQQSHEDDNPAVSRRLALTLLVGAAAVGSKVSPADAAYGEAANVFGKPKKNTDFTPYNGDGFQVQVPAKWNPSREVEYPGQVLRYEDNFDATSNLNVMVTPTDKKSITDYGSPEEFLSQVNYLLGKQAYFGETASEGGFDNNAVATANILETNVQDVGGKPYYYLSVLTRTADGDEGGKHQLITATVNGGKLYICKAQAGDKRWFKGANKFVEKAATSFSVA

SEQ ID NO: 22224 - protein, 263 aa, Zea mays subsp. mays
  peptide (1)..(263): Ceres Seq. ID no. 13599648
  misc_feature (61)..(263): Pfam Name: Pfam Description:  PsbP
  misc_feature (1)..(263): NCBI GI NO: 15222166 NR Description: photosystem II oxygen-evolving complex 23 (OEC23)
  misc_feature (1)..(263): NCBI GI NO: 131391 NR Description: Oxygen-evolving enhancer protein 2
  misc_feature (13)..(263): NCBI GI NO: 81723 NR Description: photosystem II oxygen-evolving complex protein 2precursor
  misc_feature (1)..(263): NCBI GI NO: 11133887 NR Description: OXYGEN-EVOLVING ENHANCER PROTEIN 2-2
  misc_feature (1)..(263): NCBI GI NO: 7443216 NR Description: photosystem II oxygen-evolving complex protein 2precursor
  misc_feature (1)..(263): NCBI GI NO: 15224572 NR Description: photosystem II oxygen-evolving complex 23 (OEC23)
  misc_feature (47)..(263): NCBI GI NO: 11134091 NR Description: Oxygen-evolving enhancer protein 2
  misc_feature (6)..(263): NCBI GI NO: 1345550 NR Description: 23-kDa ploypeptide of photosystem II oxygen-evolving complex
  misc_feature (8)..(263): NCBI GI NO: 19898 NR Description: photosystem II 23 kDa polypeptide
  misc_feature (1)..(263): NCBI GI NO: 417604 NR Description: 23 kDa polypeptide of water-oxidizing complex ofphotosystem II
MAYSACFLHQSALASSAARSSSSSSSQRYVSLSKPVQVVCKAQQSHEDDNPAVSRRLALTLLVGAAAVGSKVSPADAAYGEAANVFGKPKKNTDFTPYNGDGFQVQVPAKWNPSREVEYPGQVLRYEDNFDATSNLNVMVTPTDKKSITDYGSPEEFLSQVNYLLGKQAYFGETASEGGFDNNAVATANILETNVQDVGGKPYYYLSVLTRTADGDEGGKHQLITATVNGGKLYICKAQAGDKRWFKGANKFVEKAATSFSVA

SEQ ID NO: 22225 - DNA, 1314 bp, Zea mays subsp. mays
  misc_feature (1)..(1314): Ceres Seq. ID no. 13599438
accaggatcagcaaagagacatccaagaactccaatggctgatgagtcatggaggctgccgagttcagtgcagcaactggctgccagcatacaggagccaccaaggcagtacttgctcagagagcaagaaccgcttggtgggaacctggctggtacggagatgccggaccccattccaacaatcgatctcggcctgctgtctgcatccaacgacgcggaggaagccgccaagctgcggtcggcactgcagacctggggattcttcaaggtttctaaccatggaatggagacctctctgatggattctgtgatgaccgcatcaagggatttcttccgcctaccgcttgaagagaagagaaagtacagtaacataataggtgggaaacatttccagatggaagggtatggaactgaccaggtgaaaactcaagaccaaaggctggactggtccgatcgactgcatcttaaagtggagccagaggacgagagaaaccttgccctttggcccatacatccaaaatctttcagggatgacctgcatgagtacacattgaggagcaagagaattaaagacgacatccttcgggcaatggccaagctactggagctcgatgaagattgcctagttaaccagtttagcgacagggctctcacttatgctagattcaattactatcctccatgtccaaggcctgatcttgtcttgggcatcaagcctcactctgatgtctacgctcttacggttcttctaatggacaaagatgtcgctgggctgcagtttctcagagatggaacgtggtacaatgtcccatctgcgtctaactacaccttgctgatcaacgttggtgttacaatggagataatgaccaacgggatatttaaagggccagtacatagggttgtgactaattctgagaaagagaggatgtcagtggccgtgttctatggcctggatcctgaaagagagattggaccgatagctcagatgttgactgaggaccaaccggcgcgatacaggaaaatgaaggtcaaggatttcctggtcgcgcaccttgagcatttctctcgaggagaaagagtcgtcgattcgttaaggatatgatcaaggtgagtttgctttggtgctgcaatacccatggaataaagaatttgtgacttgcctattcgttaaggatataaacgaggcgactttacttctataaggcgatgaatctggtgaaaataaataatttcatcgtatttatgttgcattttgggtttgttctgtggtagatgtggctctatggacacctttgtattctcttacctcaagtg

SEQ ID NO: 22226 - protein, 366 aa, Zea mays subsp. mays
  peptide (1)..(366): Ceres Seq. ID no. 13599439
  misc_feature (216)..(317): Pfam Name: II Pfam Description: 2OG-Fe
  misc_feature (12)..(366): NCBI GI NO: 24413984 NR Description: ethylene-forming-enzyme-like dioxygenase-like
  misc_feature (12)..(366): NCBI GI NO: 24413982 NR Description: ethylene-forming-enzyme-like dioxygenase-like
  misc_feature (23)..(366): NCBI GI NO: 33115140 NR Description: iron/ascorbate-dependent oxidoreductase
  misc_feature (12)..(340): NCBI GI NO: 34898470 NR Description: ESTs D47168
  misc_feature (23)..(366): NCBI GI NO: 34898468 NR Description: Similar to Prunus armeniaca ethylene-forming-enzyme-like dioxygenase
  misc_feature (23)..(274): NCBI GI NO: 24413981 NR Description: contains EST C72504
  misc_feature (287)..(366): NCBI GI NO: 24413981 NR Description: contains EST C72504
  misc_feature (12)..(366): NCBI GI NO: 34898472 NR Description: Similar to Prunus armeniaca ethylene-forming-enzyme-like dioxygenase
  misc_feature (170)..(366): NCBI GI NO: 24413983 NR Description: ethylene-forming-enzyme-like dioxygenase-like
  misc_feature (12)..(134): NCBI GI NO: 24413983 NR Description: ethylene-forming-enzyme-like dioxygenase-like
PGSAKRHPRTPMADESWRLPSSVQQLAASIQEPPRQYLLREQEPLGGNLAGTEMPDPIPTIDLGLLSASNDAEEAAKLRSALQTWGFFKVSNHGMETSLMDSVMTASRDFFRLPLEEKRKYSNIIGGKHFQMEGYGTDQVKTQDQRLDWSDRLHLKVEPEDERNLALWPIHPKSFRDDLHEYTLRSKRIKDDILRAMAKLLELDEDCLVNQFSDRALTYARFNYYPPCPRPDLVLGIKPHSDVYALTVLLMDKDVAGLQFLRDGTWYNVPSASNYTLLINVGVTMEIMTNGIFKGPVHRVVTNSEKERMSVAVFYGLDPEREIGPIAQMLTEDQPARYRKMKVKDFLVAHLEHFSRGERVVDSLRI

SEQ ID NO: 22227 - protein, 355 aa, Zea mays subsp. mays
  peptide (1)..(355): Ceres Seq. ID no. 13599440
  misc_feature (205)..(306): Pfam Name: II Pfam Description: 2OG-Fe
  misc_feature (1)..(355): NCBI GI NO: 24413984 NR Description: ethylene-forming-enzyme-like dioxygenase-like
  misc_feature (1)..(355): NCBI GI NO: 24413982 NR Description: ethylene-forming-enzyme-like dioxygenase-like
  misc_feature (12)..(355): NCBI GI NO: 33115140 NR Description: iron/ascorbate-dependent oxidoreductase
  misc_feature (1)..(329): NCBI GI NO: 34898470 NR Description: ESTs D47168
  misc_feature (12)..(355): NCBI GI NO: 34898468 NR Description: Similar to Prunus armeniaca ethylene-forming-enzyme-like dioxygenase
  misc_feature (12)..(263): NCBI GI NO: 24413981 NR Description: contains EST C72504
  misc_feature (276)..(355): NCBI GI NO: 24413981 NR Description: contains EST C72504
  misc_feature (1)..(355): NCBI GI NO: 34898472 NR Description: Similar to Prunus armeniaca ethylene-forming-enzyme-like dioxygenase
  misc_feature (159)..(355): NCBI GI NO: 24413983 NR Description: ethylene-forming-enzyme-like dioxygenase-like
  misc_feature (1)..(123): NCBI GI NO: 24413983 NR Description: ethylene-forming-enzyme-like dioxygenase-like
MADESWRLPSSVQQLAASIQEPPRQYLLREQEPLGGNLAGTEMPDPIPTIDLGLLSASNDAEEAAKLRSALQTWGFFKVSNHGMETSLMDSVMTASRDFFRLPLEEKRKYSNIIGGKHFQMEGYGTDQVKTQDQRLDWSDRLHLKVEPEDERNLALWPIHPKSFRDDLHEYTLRSKRIKDDILRAMAKLLELDEDCLVNQFSDRALTYARFNYYPPCPRPDLVLGIKPHSDVYALTVLLMDKDVAGLQFLRDGTWYNVPSASNYTLLINVGVTMEIMTNGIFKGPVHRVVTNSEKERMSVAVFYGLDPEREIGPIAQMLTEDQPARYRKMKVKDFLVAHLEHFSRGERVVDSLRI

SEQ ID NO: 22228 - protein, 313 aa, Zea mays subsp. mays
  peptide (1)..(313): Ceres Seq. ID no. 13599441
  misc_feature (163)..(264): Pfam Name: II Pfam Description: 2OG-Fe
  misc_feature (1)..(313): NCBI GI NO: 24413984 NR Description: ethylene-forming-enzyme-like dioxygenase-like
  misc_feature (1)..(313): NCBI GI NO: 24413982 NR Description: ethylene-forming-enzyme-like dioxygenase-like
  misc_feature (1)..(313): NCBI GI NO: 33115140 NR Description: iron/ascorbate-dependent oxidoreductase
  misc_feature (1)..(287): NCBI GI NO: 34898470 NR Description: ESTs D47168
  misc_feature (1)..(313): NCBI GI NO: 34898468 NR Description: Similar to Prunus armeniaca ethylene-forming-enzyme-like dioxygenase
  misc_feature (1)..(221): NCBI GI NO: 24413981 NR Description: contains EST C72504
  misc_feature (234)..(313): NCBI GI NO: 24413981 NR Description: contains EST C72504
  misc_feature (1)..(313): NCBI GI NO: 34898472 NR Description: Similar to Prunus armeniaca ethylene-forming-enzyme-like dioxygenase
  misc_feature (117)..(313): NCBI GI NO: 24413983 NR Description: ethylene-forming-enzyme-like dioxygenase-like
  misc_feature (1)..(81): NCBI GI NO: 24413983 NR Description: ethylene-forming-enzyme-like dioxygenase-like
MPDPIPTIDLGLLSASNDAEEAAKLRSALQTWGFFKVSNHGMETSLMDSVMTASRDFFRLPLEEKRKYSNIIGGKHFQMEGYGTDQVKTQDQRLDWSDRLHLKVEPEDERNLALWPIHPKSFRDDLHEYTLRSKRIKDDILRAMAKLLELDEDCLVNQFSDRALTYARFNYYPPCPRPDLVLGIKPHSDVYALTVLLMDKDVAGLQFLRDGTWYNVPSASNYTLLINVGVTMEIMTNGIFKGPVHRVVTNSEKERMSVAVFYGLDPEREIGPIAQMLTEDQPARYRKMKVKDFLVAHLEHFSRGERVVDSLRI

SEQ ID NO: 22229 - DNA, 1110 bp, Zea mays subsp. mays
  misc_feature (1)..(1110): Ceres Seq. ID no. 13599342
acctcctccctcctgttccttcagccaccgtgagcaatggcgcccaagcggaagggtggcaacggccggaagaagaccgtcctcctctcgatcgtcaaggaggacgcccgccatgtatgcttctcaaagcgcaagcggggcctgttcagcaagaccagcgcgctgtccctgctcacgggcgcccaggtggccgccgtcatcttctcgcccggcggcaaggtcttctccttcggccacccctccgtcgacgccgtcgtcaaccgcttcatggcgggggacgccgcggtggtccaggccgccgccgacgacaacgggttgcagacgctgcagctgcagcacggcgacatgcgcaccgagctggcggaccagaagaagcggaagaagcgcgctgaggaggccctggacaaggagcgcgctgggggggaccagattgcctcgtggctccaccccgacgtgcgcgacatggggcatgacgacatggcggccttcgccgccgcgctcttgcaggtccaggccgccgtctccggacgcgccaaccaggttctcgtcgaggcctttcgcgtcgacatcagccgtatgctccaggtgcccccgccgccgccgcctccgctccagctcttcggtgccagcaccattgagttcggtagtagcagcagcagcgccaacgccgggatggagatgcaacagatgcagatggttatggagatgccaccgccgcctgacttccccgcagtgatggggatgcagcagttggttatggagatgccaccacagccaaggttcgaggcagcgatggagatgacgccgctgcaggagttcgtcgccgggatgcagaaggtgcagcggcaggggctcgggccgaacgccgacttcccctactgaggagaagaaagacaccagacagagtccgaccgagtccgagtctcagttactatattctaaataaatcgttcagatccatgtaagatccatctacgtgggtccaagatctatgcattagttggttcaattatcttagtagcaattaaatttatggcattgtaatcttttttgtatcggtagtacaatggctggaaattcgtgaatgaaatactattaagccttttcaag

SEQ ID NO: 22230 - protein, 281 aa, Zea mays subsp. mays; identical to SEQ ID NO: 13438
  peptide (1)..(281): Ceres Seq. ID no. 13599343
  misc_feature (19)..(67): Pfam Name: DNA-binding and dimerisationdomain Pfam Description: SRF-type transcription factor
  misc_feature (2)..(176): NCBI GI NO: 34906076 NR Description: P0459B04.16
  misc_feature (10)..(159): NCBI GI NO: 15234456 NR Description: MADS-box protein [Arabidopsis thaliana]
  misc_feature (1)..(186): NCBI GI NO: 30682571 NR Description: MADS-box protein [Arabidopsis thaliana]
  misc_feature (4)..(186): NCBI GI NO: 25412255 NR Description: probable MADS-box protein
  misc_feature (6)..(168): NCBI GI NO: 15239333 NR Description: MADS-box protein [Arabidopsis thaliana]
  misc_feature (6)..(168): NCBI GI NO: 32402436 NR Description: MADS-box protein AGL62 [Arabidopsis thaliana]
  misc_feature (10)..(180): NCBI GI NO: 15226309 NR Description: MADS-box protein [Arabidopsis thaliana]
  misc_feature (10)..(127): NCBI GI NO: 15218647 NR Description: MADS-box protein [Arabidopsis thaliana]
  misc_feature (1)..(142): NCBI GI NO: 15218684 NR Description: MADS-box protein [Arabidopsis thaliana]
  misc_feature (10)..(142): NCBI GI NO: 15230767 NR Description: MADS-box protein [Arabidopsis thaliana]

SEQ ID NO: 22231 - protein, 244 aa, Zea mays subsp. mays
  peptide (1)..(244): Ceres Seq. ID no. 13599344
  misc_feature (3)..(222): NCBI GI NO: 11359723 NR Description: proteophosphoglycan, membrane-associated
  misc_feature (3)..(220): NCBI GI NO: 13592175 NR Description: ppg3 [Leishmania major]
  misc_feature (3)..(220): NCBI GI NO: 13592175 NR Description: ppg3 [Leishmania major]
  misc_feature (3)..(220): NCBI GI NO: 13592175 NR Description: ppg3 [Leishmania major]
  misc_feature (3)..(220): NCBI GI NO: 13592175 NR Description: ppg3 [Leishmania major]
  misc_feature (3)..(220): NCBI GI NO: 13592175 NR Description: ppg3 [Leishmania major]
  misc_feature (3)..(220): NCBI GI NO: 5420387 NR Description: proteophosphoglycan [Leishmania major]
  misc_feature (3)..(220): NCBI GI NO: 13592175 NR Description: ppg3 [Leishmania major]
  misc_feature (2)..(220): NCBI GI NO: 13592175 NR Description: ppg3 [Leishmania major]
  misc_feature (69)..(201): NCBI GI NO: 7248459 NR Description: arabinogalactan protein [Zea mays]
PPPSCSFSHREQWRPSGRVATAGRRPSSSRSSRRTPAMYASQSASGACSARPARCPCSRAPRWPPSSSRPAARSSPSATPPSTPSSTASWRGTPRWSRPPPTTTGCRRCSCSTATCAPSWRTRRSGRSALRRPWTRSALGGTRLPRGSTPTCATWGMTTWRPSPPRSCRSRPPSPDAPTRFSSRPFASTSAVCSRCPRRRRLRSSSSVPAPLSSVVAAAAPTPGWRCNRCRWLWRCHRRLTSPQ

SEQ ID NO: 22232 - protein, 207 aa, Zea mays subsp. mays; identical to SEQ ID NO: 13440
  peptide (1)..(207): Ceres Seq. ID no. 13599345
  misc_feature (1)..(185): NCBI GI NO: 11359723 NR Description: proteophosphoglycan, membrane-associated
  misc_feature (1)..(183): NCBI GI NO: 13592175 NR Description: ppg3 [Leishmania major]
  misc_feature (1)..(183): NCBI GI NO: 13592175 NR Description: ppg3 [Leishmania major]
  misc_feature (1)..(183): NCBI GI NO: 13592175 NR Description: ppg3 [Leishmania major]
  misc_feature (1)..(183): NCBI GI NO: 13592175 NR Description: ppg3 [Leishmania major]
  misc_feature (1)..(183): NCBI GI NO: 13592175 NR Description: ppg3 [Leishmania major]
  misc_feature (1)..(183): NCBI GI NO: 5420387 NR Description: proteophosphoglycan [Leishmania major]
  misc_feature (1)..(183): NCBI GI NO: 13592175 NR Description: ppg3 [Leishmania major]
  misc_feature (1)..(183): NCBI GI NO: 13592175 NR Description: ppg3 [Leishmania major]
  misc_feature (32)..(164): NCBI GI NO: 7248459 NR Description: arabinogalactan protein [Zea mays]

SEQ ID NO: 22233 - DNA, 750 bp, Zea mays subsp. mays
  misc_feature (1)..(750): Ceres Seq. ID no. 13599645
atcacgttcaacaagctcatctaccaatccagcaaactagctaaaacccacttctccaaaatggcgtcccagcttgtcgagagccaccgccccggtgccgaggtccacaaggggaacgatatctgcaagaagaagacggttgagcttctcgaagagctcggcctcccgaaaggcctctttcctatggatgacatcgaggaggtcgggcacaactgtgagagtgggttcgtgtggatacttcagaagaagaagctagagcacacgttcaacaagctcaaccagaccgtctcctacgacactgaggtgaccgcttttgtggaaaagggcaagatgaagaaggtcaccggggtcaagatcgaggacatgtctttggtcgaggtctatgtggatgagtcttctgctgataaggttaccatcaagaccaacaccggtctgtctgacacccatgatgcggccgtgttcgctctcggagaatagggagctactatttacaaaggccagaagaataaagtcagaatggttcggcactgcagttcaaatgttatgcagaagtatatgtttccgttttctttgtaatctaataaaggctgttgcatgaatgttgcttcctttcagcccatgttatgcagaaatttatgtttccgttttctttgtaatgtaataaaggatgttgcacgaatgttgcttcctttcagcccgtaagcgtactccaaatgtaatgaataacacttataccgcctcctatatccc

SEQ ID NO: 22234 - protein, 158 aa, Zea mays subsp. mays
  peptide (1)..(158): Ceres Seq. ID no. 15218873
  misc_feature (24)..(157): Pfam Name: Pfam Description:  Protein of unknown function, DUF538
  misc_feature (21)..(158): NCBI GI NO: 34915410 NR Description: hypothetical protein~similar to Arabidopsisthaliana chromosome1
  misc_feature (21)..(158): NCBI GI NO: 34915418 NR Description: hypothetical protein~similar to Arabidopsisthaliana chromosome1
  misc_feature (21)..(158): NCBI GI NO: 33146557 NR Description: unknown protein
  misc_feature (21)..(158): NCBI GI NO: 34915422 NR Description: hypothetical protein~similar to Arabidopsisthaliana chromosome1
  misc_feature (21)..(158): NCBI GI NO: 34915426 NR Description: hypothetical protein~similar to Arabidopsisthaliana chromosome1
  misc_feature (21)..(158): NCBI GI NO: 34915376 NR Description: hypothetical protein~similar to Oryza sativachromosome 7
  misc_feature (21)..(158): NCBI GI NO: 34915430 NR Description: hypothetical protein~similar to Arabidopsisthaliana chromosome3
  misc_feature (21)..(158): NCBI GI NO: 34915416 NR Description: hypothetical protein~similar to Arabidopsisthaliana chromosome1
  misc_feature (21)..(158): NCBI GI NO: 34915378 NR Description: hypothetical protein~similar to Oryza sativachromosome 7
  misc_feature (21)..(155): NCBI GI NO: 34903866 NR Description: unnamed protein product
ITFNKLIYQSSKLAKTHFSKMASQLVESHRPGAEVHKGNDICKKKTVELLEELGLPKGLFPMDDIEEVGHNCESGFVWILQKKKLEHTFNKLNQTVSYDTEVTAFVEKGKMKKVTGVKIEDMSLVEVYVDESSADKVTIKTNTGLSDTHDAAVFALGE

SEQ ID NO: 22235 - protein, 138 aa, Zea mays subsp. mays
  peptide (1)..(138): Ceres Seq. ID no. 15218874
  misc_feature (4)..(137): Pfam Name: Pfam Description:  Protein of unknown function, DUF538
  misc_feature (1)..(138): NCBI GI NO: 34915410 NR Description: hypothetical protein~similar to Arabidopsisthaliana chromosome1
  misc_feature (1)..(138): NCBI GI NO: 34915418 NR Description: hypothetical protein~similar to Arabidopsisthaliana chromosome1
  misc_feature (1)..(138): NCBI GI NO: 33146557 NR Description: unknown protein
  misc_feature (1)..(138): NCBI GI NO: 34915422 NR Description: hypothetical protein~similar to Arabidopsisthaliana chromosome1
  misc_feature (1)..(138): NCBI GI NO: 34915426 NR Description: hypothetical protein~similar to Arabidopsisthaliana chromosome1
  misc_feature (1)..(138): NCBI GI NO: 34915376 NR Description: hypothetical protein~similar to Oryza sativachromosome 7
  misc_feature (1)..(138): NCBI GI NO: 34915430 NR Description: hypothetical protein~similar to Arabidopsisthaliana chromosome3
  misc_feature (1)..(138): NCBI GI NO: 34915416 NR Description: hypothetical protein~similar to Arabidopsisthaliana chromosome1
  misc_feature (1)..(138): NCBI GI NO: 34915378 NR Description: hypothetical protein~similar to Oryza sativachromosome 7
  misc_feature (1)..(135): NCBI GI NO: 34903866 NR Description: unnamed protein product
MASQLVESHRPGAEVHKGNDICKKKTVELLEELGLPKGLFPMDDIEEVGHNCESGFVWILQKKKLEHTFNKLNQTVSYDTEVTAFVEKGKMKKVTGVKIEDMSLVEVYVDESSADKVTIKTNTGLSDTHDAAVFALGE

SEQ ID NO: 22236 - protein, 97 aa, Zea mays subsp. mays
  peptide (1)..(97): Ceres Seq. ID no. 15218875
  misc_feature (1)..(96): Pfam Name: Pfam Description:  Protein of unknown function, DUF538
  misc_feature (1)..(97): NCBI GI NO: 34915410 NR Description: hypothetical protein~similar to Arabidopsisthaliana chromosome1
  misc_feature (1)..(97): NCBI GI NO: 34915418 NR Description: hypothetical protein~similar to Arabidopsisthaliana chromosome1
  misc_feature (1)..(97): NCBI GI NO: 33146557 NR Description: unknown protein
  misc_feature (1)..(97): NCBI GI NO: 34915422 NR Description: hypothetical protein~similar to Arabidopsisthaliana chromosome1
  misc_feature (1)..(97): NCBI GI NO: 34915426 NR Description: hypothetical protein~similar to Arabidopsisthaliana chromosome1
  misc_feature (1)..(97): NCBI GI NO: 34915376 NR Description: hypothetical protein~similar to Oryza sativachromosome 7
  misc_feature (1)..(97): NCBI GI NO: 34915430 NR Description: hypothetical protein~similar to Arabidopsisthaliana chromosome3
  misc_feature (1)..(97): NCBI GI NO: 34915416 NR Description: hypothetical protein~similar to Arabidopsisthaliana chromosome1
  misc_feature (1)..(97): NCBI GI NO: 34915378 NR Description: hypothetical protein~similar to Oryza sativachromosome 7
  misc_feature (1)..(94): NCBI GI NO: 34903866 NR Description: unnamed protein product
MDDIEEVGHNCESGFVWILQKKKLEHTFNKLNQTVSYDTEVTAFVEKGKMKKVTGVKIEDMSLVEVYVDESSADKVTIKTNTGLSDTHDAAVFALGE

SEQ ID NO: 22237 - DNA, 915 bp, Zea mays subsp. mays
  misc_feature (1)..(915): Ceres Seq. ID no. 12589876
accataagtaatttaatacttaattaccgcatttgagaaaatctcacattcacacatttaaagatgacaaggaccattatgctcctatctattgccgtcgccgtcttggccatcaccgccgtcttcgccgctgatcctccaacaccagccggagcgcctaaagccaacgccaacaaaagctcacccactgcttctcccaccgcagcagcatcccccaaacaaccctccggagcagcatccccaaaaccaaccgccgcaggatccccaaaaccacccgccgcagggtccccaaaacaaaccgcttccgccccaacctcgccgcctacggcctctgctcccaccaccaccaagaagaactcctccgccactccaagcgcttccccatcttcaggtggtggctcccccgcaaacgctccaaaatcttcgtcagccaaaactccggctccaagccccgactcaagctccggaggtcctaccagctcatccgaaggtcctacaagctcatcggaaggtcctacaagctcgtccgaaggccctacaagctcgtctgaaggtcctactagctcgtccgactcaccatccgcatcgtctccgccgtctccgacaccagacatgtctccgtcgtcgtcccctgatgaaggacccaccagtgaaggccccgaagcttcagctccgacgggaagagcctcgtcgcttgagatctctatctctggatctgttctcatcgcagctgcatggttattcttcatatgatgaaatgttactcttgtgttttttattacacttataaagggctcgtttcatttaatattttttggttccttaaaaaaggtttgcactcaggttcagttgaattcgtgcatagtatggaggttaggatttgatatatgttgtaataaatgtttcgcttgggtt

SEQ ID NO: 22238 - protein, 229 aa, Zea mays subsp. mays
  peptide (1)..(229): Ceres Seq. ID no. 12589877
  misc_feature (35)..(205): Pfam Name: Pfam Description:  Glycoprotein GG/GX
  misc_feature (16)..(224): NCBI GI NO: 13592175 NR Description: ppg3 [Leishmania major]
  misc_feature (16)..(224): NCBI GI NO: 13592175 NR Description: ppg3 [Leishmania major]
  misc_feature (10)..(224): NCBI GI NO: 5420387 NR Description: proteophosphoglycan [Leishmania major]
  misc_feature (29)..(218): NCBI GI NO: 11359723 NR Description: proteophosphoglycan, membrane-associated
  misc_feature (16)..(224): NCBI GI NO: 13592175 NR Description: ppg3 [Leishmania major]
  misc_feature (2)..(204): NCBI GI NO: 32699068 NR Description: hypothetical protein FLJ35107 [Homo sapiens]
  misc_feature (16)..(218): NCBI GI NO: 11359723 NR Description: proteophosphoglycan, membrane-associated
  misc_feature (22)..(224): NCBI GI NO: 5420387 NR Description: proteophosphoglycan [Leishmania major]
  misc_feature (16)..(224): NCBI GI NO: 13592175 NR Description: ppg3 [Leishmania major]
  misc_feature (16)..(218): NCBI GI NO: 13592175 NR Description: ppg3 [Leishmania major]
MTRTIMLLSIAVAVLAITAVFAADPPTPAGAPKANANKSSPTASPTAAASPKQPSGAASPKPTAAGSPKPPAAGSPKQTASAPTSPPTASAPTTTKKNSSATPSASPSSGGGSPANAPKSSSAKTPAPSPDSSSGGPTSSSEGPTSSSEGPTSSSEGPTSSSEGPTSSSDSPSASSPPSPTPDMSPSSSPDEGPTSEGPEASAPTGRASSLEISISGSVLIAAAWLFFI

SEQ ID NO: 22239 - protein, 224 aa, Zea mays subsp. mays
  peptide (1)..(224): Ceres Seq. ID no. 12589878
  misc_feature (30)..(200): Pfam Name: Pfam Description:  Glycoprotein GG/GX
  misc_feature (11)..(219): NCBI GI NO: 13592175 NR Description: ppg3 [Leishmania major]
  misc_feature (11)..(219): NCBI GI NO: 13592175 NR Description: ppg3 [Leishmania major]
  misc_feature (5)..(219): NCBI GI NO: 5420387 NR Description: proteophosphoglycan [Leishmania major]
  misc_feature (24)..(213): NCBI GI NO: 11359723 NR Description: proteophosphoglycan, membrane-associated
  misc_feature (11)..(219): NCBI GI NO: 13592175 NR Description: ppg3 [Leishmania major]
  misc_feature (1)..(199): NCBI GI NO: 32699068 NR Description: hypothetical protein FLJ35107 [Homo sapiens]
  misc_feature (11)..(213): NCBI GI NO: 11359723 NR Description: proteophosphoglycan, membrane-associated
  misc_feature (17)..(219): NCBI GI NO: 5420387 NR Description: proteophosphoglycan [Leishmania major]
  misc_feature (11)..(219): NCBI GI NO: 13592175 NR Description: ppg3 [Leishmania major]
  misc_feature (11)..(213): NCBI GI NO: 13592175 NR Description: ppg3 [Leishmania major]
MLLSIAVAVLAITAVFAADPPTPAGAPKANANKSSPTASPTAAASPKQPSGAASPKPTAAGSPKPPAAGSPKQTASAPTSPPTASAPTTTKKNSSATPSASPSSGGGSPANAPKSSSAKTPAPSPDSSSGGPTSSSEGPTSSSEGPTSSSEGPTSSSEGPTSSSDSPSASSPPSPTPDMSPSSSPDEGPTSEGPEASAPTGRASSLEISISGSVLIAAAWLFFI

SEQ ID NO: 22240 - DNA, 1209 bp, Zea mays subsp. mays
  misc_feature (1)..(1209): Ceres Seq. ID no. 13623029
ctcttccgcccgcggcggctcaaacttaaaccctagagccgctcccctcctcgcctccgaagcgctcgccacccgattcgcgagtcccctcctcccagggaggcgcttccgcgaaggtccgctgctgcggtcatggctcgcgtctacgtggggaatctggatccgcgcgccactgcgcgcgagatcgaggacgagttccgcgtgtttggggttctcaagagtgtgtgggttgctagaaagccaccaggatttgctttcattgactttgatgagaccagggacgcaaaggatgcaattcgtgaattggatggcaagaatgggtggagagttgagctgtcaaccaaatctggtagtggccgtggccgagaacgtgaacgctctggaggttctgatatgaagtgctatgagtgtggtgaaagtggccactttgcacgagagtgtcgcctacggattggttctgggggcctgggtagcggaagacgccgcagccggagcccgaggcaccgcagccgtagccgtagcccaagataccgcaggagcccaagctatggcagaaggagctacagcccacgggatcggtctcccaggaagcgaagttacagcagatcaccaccgcctccccgggcgcggagtatcagcaggtctccaccacctgcccgtgcgcgaagcatcagcaggtctccaccgccggcccgtgggcgaagcatcagcaggtcaccgccgcctgcccgtgcgcgaaacatcagcaggtcaccaccgcctcctcgcgccagaagcatcagtaagtcaccaccgccagcccgtgaacggagctatagcaggtccccagcacagccaccccagcgtgaggagtccccttatgctgataacgcgtgagcacttggttccacaatgctggaagtgttggggggcgggggcctccacttgtttccttgaatgtttcggtatgactattgaatggccaggcggccgagtattgttcttcgctggcatttgtgttcttttgctgctgatacaattgcggaagcgggatttctcttgactgtatgactctagcgtatgtagttggtcttgagacaagatatgttttctttttctgtaacatttgtactgttggattattcggatgctgtgcatggatttttatgtgctgatgaaactgtttcttgaatattaatgtgtcaccgtcttgttacgtttctgttctcc

SEQ ID NO: 22241 - protein, 247 aa, Zea mays subsp. mays
  peptide (1)..(247): Ceres Seq. ID no. 13623030
  misc_feature (4)..(61): Pfam Name: a.k.a. RRM, RBD, or RNP domain Pfam Description: RNA recognition motif.
  misc_feature (1)..(190): NCBI GI NO: 15236000 NR Description: splicing factor SRZ_22 [Arabidopsis thaliana]
  misc_feature (1)..(190): NCBI GI NO: 25294318 NR Description: splicing factor RSZp22
  misc_feature (1)..(192): NCBI GI NO: 15224171 NR Description: RSZp22 splicing factor -related
  misc_feature (1)..(199): NCBI GI NO: 18395314 NR Description: splicing factor SRZ_21 [Arabidopsis thaliana]
  misc_feature (1)..(189): NCBI GI NO: 25294317 NR Description: protein T23E23.2 [imported] - Arabidopsis thaliana
  misc_feature (1)..(189): NCBI GI NO: 25294319 NR Description: splicing factor RSZp21
  misc_feature (2)..(207): NCBI GI NO: 31222328 NR Description: ENSANGP00000018287 [Anopheles gambiae]
  misc_feature (3)..(220): NCBI GI NO: 34862002 NR Description: similar to 9430065L19Rik protein
  misc_feature (3)..(220): NCBI GI NO: 22122585 NR Description: RIKEN cDNA 9430065L19 [Mus musculus]
  misc_feature (3)..(220): NCBI GI NO: 26337671 NR Description: unnamed protein product [Mus musculus]
MARVYVGNLDPRATAREIEDEFRVFGVLKSVWVARKPPGFAFIDFDETRDAKDAIRELDGKNGWRVELSTKSGSGRGRERERSGGSDMKCYECGESGHFARECRLRIGSGGLGSGRRRSRSPRHRSRSRSPRYRRSPSYGRRSYSPRDRSPRKRSYSRSPPPPRARSISRSPPPARARSISRSPPPARGRSISRSPPPARARNISRSPPPPRARSISKSPPPARERSYSRSPAQPPQREESPYADNA

SEQ ID NO: 22242 - protein, 212 aa, Zea mays subsp. mays
  peptide (1)..(212): Ceres Seq. ID no. 13623031
MSVVKVATLHESVAYGLVLGAWVAEDAAAGARGTAAVAVAQDTAGAQAMAEGATAHGIGLPGSEVTADHHRLPGRGVSAGLHHLPVREASAGLHRRPVGEASAGHRRLPVRETSAGHHRLLAPEASVSHHRQPVNGAIAGPQHSHPSVRSPLMLITREHLVPQCWKCWGAGASTCFLECFGMTIEWPGGRVLFFAGICVLLLLIQLRKRDFS

SEQ ID NO: 22243 - protein, 164 aa, Zea mays subsp. mays
  peptide (1)..(164): Ceres Seq. ID no. 13623032
MAEGATAHGIGLPGSEVTADHHRLPGRGVSAGLHHLPVREASAGLHRRPVGEASAGHRRLPVRETSAGHHRLLAPEASVSHHRQPVNGAIAGPQHSHPSVRSPLMLITREHLVPQCWKCWGAGASTCFLECFGMTIEWPGGRVLFFAGICVLLLLIQLRKRDFS

SEQ ID NO: 22244 - DNA, 832 bp, Zea mays subsp. mays
  misc_feature (1)..(832): Ceres Seq. ID no. 12589963
attctctgccccaaacgcacaagccctagccgccgaccaccatggcggcggcgccacctccggacccgacggttctaattgaagacctcgtcgaggagttcctcctccgcattcccccggatgaccccgccagcctcgctcgcgccgccctcgtcagtaggcactggcaccgcgtgatcaccggccccgtcttccgccgtagattccagtagaacctgacgcccaaattaacggcatggccactgtgcttattgccacagaggacggcaggctaggagttgccaaaacaagcaattcaacgcttggttgttcaacacttcacctgtggataagggaccatgaaagatgggaagaaagaaggcccattgagcttcgtatgctgctcccagatgatgccctacgcgatcctcaattcccgcctgaattttttccagacaagccttggctggctggctttgcagggacaagagctggtgtcattttctttaagacacgtcttgggtattttgttgttgatctgaattcagggacgagcaagaacataggcgagtgcttaggttggggttgcattattccctatgtgagcttctggcactccagcgccaggagcaatatccacagatgagggaccagaagctggtctcgagggctaggatctggcttgtgaagtgaataagaagctctaaatcaagaaggatatttactagaccagaagcatggtttgggtgggacggatatctctacatgattttgttgctgttctgaccttgtttgtgctcctgaacttgagtttgcatattgcaatcaaattatgataatggtattggctccc

SEQ ID NO: 22245 - protein, 129 aa, Zea mays subsp. mays
  peptide (1)..(129): Ceres Seq. ID no. 12589964
  misc_feature (1)..(121): NCBI GI NO: 34915420 NR Description: contains EST C98814
  misc_feature (71)..(127): NCBI GI NO: 34915428 NR Description: hypothetical protein~similar to Oryza sativachromosome1
  misc_feature (5)..(124): NCBI GI NO: 35215058 NR Description: hypothetical protein
  misc_feature (5)..(119): NCBI GI NO: 34015373 NR Description: hypothetical protein OSJNBa0070J19.13
MATVLIATEDGRLGVAKTSNSTLGCSTLHLWIRDHERWEERRPIELRMLLPDDALRDPQFPPEFFPDKPWLAGFAGTRAGVIFFKTRLGYFVVDLNSGTSKNIGECLGWGCIIPYVSFWHSSARSNIHR

SEQ ID NO: 22246 - protein, 82 aa, Zea mays subsp. mays
  peptide (1)..(82): Ceres Seq. ID no. 12589965
  misc_feature (1)..(74): NCBI GI NO: 34915420 NR Description: contains EST C98814
  misc_feature (24)..(80): NCBI GI NO: 34915428 NR Description: hypothetical protein~similar to Oryza sativachromosome1
  misc_feature (1)..(77): NCBI GI NO: 35215058 NR Description: hypothetical protein
  misc_feature (1)..(72): NCBI GI NO: 34015373 NR Description: hypothetical protein OSJNBa0070J19.13
MLLPDDALRDPQFPPEFFPDKPWLAGFAGTRAGVIFFKTRLGYFVVDLNSGTSKNIGECLGWGCIIPYVSFWHSSARSNIHR

SEQ ID NO: 22247 - DNA, 1317 bp, Zea mays subsp. mays
  misc_feature (1)..(1317): Ceres Seq. ID no. 13599348
ggacgatcaggatgtctgattgaccaatcagagcccggttaatcgggctggtcgtcaactaatcgtgattagtcagctgatcgcccctctggcgatcaggagcgatcagccgatctgaaaacattgcttctggggctaggggccgagctgccgcagacaacaccaactgcacattgctgcataggaggtcaggagaaggcgctccagcgcagcacggcagcagggatttctggacggctctgattgaataaaccgtgaaggagatgccctggaatagattcatgcccttcctttcaaaatgttgtacttctaccgttcagacatcttcatcatattcatctttttcctcgtccttctccccgatacaaccatggttatttgtgggtcttggcaaccctggtgagaagtatcaatccaccaggcacaacgtgggttttgatatgatagatgcatttgcgcattcccagggtatacccctgactacacattacttcaaagcactctttggtgaagggatggttgatggagtccctgttcttcttgccaagccccagacttatatgaatctcagtggagaatctgtcggcccacttgctgcctattataaactgccacttaatcgtgtcctagtggcgtttgatgacatggacttgccatgtggagttctccgtctacagccaaaaggaggttctggacgacacaatggatcgattcagccgtgagagagggtgtcgatattctgaagatggtggctgcgaggggtttgacagaggcggcaaaactgacaaatgcggaccagaagtataagcatctgagatcacatggtatccagactaacgatgactagacaaagcttactagggggactactcttttcagcacatctcccgatattcagactaaagacgaaactcgttttatggcctgttgtctagagcatggtaggcttgagaaacaggcgctcgatgagcccctttagaccgtcgctgaacgtgaacgcgtccttgttgtcaccgtacatcaacggcatgctggcggttatgtcggcaactcgctgcactgctggaagtagtttgctgttctcaaagcgtgctccgtttatagttttccatgcatcttcaatcagggagcttatctgtgcaaaggcaacctcagctgtgacgccatgctcactgatgtagcattcgaccgagctgtccacgtcgtttttgttctttccacgctgcgaaagaacacatccatttatttattatttattactgggcaacaatccaaaggacaagaatacttaatggtcttattaaagaattaatcaag

SEQ ID NO: 22248 - protein, 152 aa, Zea mays subsp. mays
  peptide (1)..(152): Ceres Seq. ID no. 13599349
  misc_feature (35)..(148): NCBI GI NO: 30687503 NR Description: expressed protein [Arabidopsis thaliana]
  misc_feature (33)..(148): NCBI GI NO: 30685853 NR Description: expressed protein [Arabidopsis thaliana]
  misc_feature (33)..(148): NCBI GI NO: 26453108 NR Description: unknown protein [Arabidopsis thaliana]
  misc_feature (12)..(148): NCBI GI NO: 15237280 NR Description: CRS2-related protein [Arabidopsis thaliana]
  misc_feature (36)..(148): NCBI GI NO: 40889732 NR Description: Chain A
  misc_feature (36)..(148): NCBI GI NO: 40889731 NR Description: Chain A
  misc_feature (33)..(148): NCBI GI NO: 6752919 NR Description: CRS2 [Zea mays]
  misc_feature (36)..(148): NCBI GI NO: 40889730 NR Description: Chain A
  misc_feature (36)..(148): NCBI GI NO: 15240875 NR Description: CRS2 -related protein [Arabidopsis thaliana]
  misc_feature (5)..(148): NCBI GI NO: 34911418 NR Description: putative CRS2
MPWNRFMPFLSKCCTSTVQTSSSYSSFSSSFSPIQPWLFVGLGNPGEKYQSTRHNVGFDMIDAFAHSQGIPLTTHYFKALFGEGMVDGVPVLLAKPQTYMNLSGESVGPLAAYYKLPLNRVLVAFDDMDLPCGVLRLQPKGGSGRHNGSIQP

SEQ ID NO: 22249 - protein, 146 aa, Zea mays subsp. mays
  peptide (1)..(146): Ceres Seq. ID no. 13599350
  misc_feature (29)..(142): NCBI GI NO: 30687503 NR Description: expressed protein [Arabidopsis thaliana]
  misc_feature (27)..(142): NCBI GI NO: 30685853 NR Description: expressed protein [Arabidopsis thaliana]
  misc_feature (27)..(142): NCBI GI NO: 26453108 NR Description: unknown protein [Arabidopsis thaliana]
  misc_feature (6)..(142): NCBI GI NO: 15237280 NR Description: CRS2-related protein [Arabidopsis thaliana]
  misc_feature (30)..(142): NCBI GI NO: 40889732 NR Description: Chain A
  misc_feature (30)..(142): NCBI GI NO: 40889731 NR Description: Chain A
  misc_feature (27)..(142): NCBI GI NO: 6752919 NR Description: CRS2 [Zea mays]
  misc_feature (30)..(142): NCBI GI NO: 40889730 NR Description: Chain A
  misc_feature (30)..(142): NCBI GI NO: 15240875 NR Description: CRS2 -related protein [Arabidopsis thaliana]
  misc_feature (1)..(142): NCBI GI NO: 34911418 NR Description: putative CRS2
MPFLSKCCTSTVQTSSSYSSFSSSFSPIQPWLFVGLGNPGEKYQSTRHNVGFDMIDAFAHSQGIPLTTHYFKALFGEGMVDGVPVLLAKPQTYMNLSGESVGPLAAYYKLPLNRVLVAFDDMDLPCGVLRLQPKGGSGRHNGSIQP

SEQ ID NO: 22250 - protein, 93 aa, Zea mays subsp. mays
  peptide (1)..(93): Ceres Seq. ID no. 13599351
  misc_feature (1)..(89): NCBI GI NO: 30687503 NR Description: expressed protein [Arabidopsis thaliana]
  misc_feature (1)..(89): NCBI GI NO: 30685853 NR Description: expressed protein [Arabidopsis thaliana]
  misc_feature (1)..(89): NCBI GI NO: 26453108 NR Description: unknown protein [Arabidopsis thaliana]
  misc_feature (1)..(89): NCBI GI NO: 15237280 NR Description: CRS2-related protein [Arabidopsis thaliana]
  misc_feature (1)..(89): NCBI GI NO: 40889732 NR Description: Chain A
  misc_feature (1)..(89): NCBI GI NO: 40889731 NR Description: Chain A
  misc_feature (1)..(89): NCBI GI NO: 6752919 NR Description: CRS2 [Zea mays]
  misc_feature (1)..(89): NCBI GI NO: 40889730 NR Description: Chain A
  misc_feature (1)..(89): NCBI GI NO: 15240875 NR Description: CRS2 -related protein [Arabidopsis thaliana]
  misc_feature (1)..(89): NCBI GI NO: 34911418 NR Description: putative CRS2
MIDAFAHSQGIPLTTHYFKALFGEGMVDGVPVLLAKPQTYMNLSGESVGPLAAYYKLPLNRVLVAFDDMDLPCGVLRLQPKGGSGRHNGSIQP

SEQ ID NO: 22251 - DNA, 707 bp, Zea mays subsp. mays
  misc_feature (1)..(707): Ceres Seq. ID no. 12590171
tacatctatgcaccatacctccacatacaatgcttctctatgcaaactgatggaatactgcttgaccccagccataactgtgcttgaggaccgtgtgaaagaaaacgaacttcggttagctatgctagtggaggaggctaaacaactggaggccgagcagagcacgaaaactggctctcctcgccgtgcgatgcccggagggactaccagtggcatcacttcgccaaggggccaggacaagtacccttccggcagacaagggggccctataagccctagcagcagcggccggaggaaggctccttgaatccgaccttgctcgccattctgtgatgatggatagtccgattctcggccctgcctgatgctttctggaaccccaaacctgtcccttcgcgcgaggggtgaagtcgcaatgcaaatgtacatacccatctcctttcagcgcctggcccgccgtccttctgtggaagtaaccaaccaacagtggttcccttttgctttgtgttgtccttgcgccaaatccttttgcctggttgcgctgagcttgtaatgtgtactcactggcgcgacgagtctcgggcagtggttgcgctgagcttgtaatgtgtactcactggcgcgacgagtctcgggcaggctttctagttggaaaaaactcttgtaccaatcctgttgtcgaaatgttcagggaagcctcgcttgcc

SEQ ID NO: 22252 - protein, 101 aa, Zea mays subsp. mays
  peptide (1)..(101): Ceres Seq. ID no. 12590172
  misc_feature (3)..(77): NCBI GI NO: 19715647 NR Description: AT3g06820/F3E22_4 [Arabidopsis thaliana]
  misc_feature (3)..(77): NCBI GI NO: 30680023 NR Description: expressed protein [Arabidopsis thaliana]
  misc_feature (3)..(70): NCBI GI NO: 20147355 NR Description: At1g80210/F18B13_28 [Arabidopsis thaliana]
TSMHHTSTYNASLCKLMEYCLTPAITVLEDRVKENELRLAMLVEEAKQLEAEQSTKTGSPRRAMPGGTTSGITSPRGQDKYPSGRQGGPISPSSSGRRKAP

SEQ ID NO: 22253 - protein, 99 aa, Zea mays subsp. mays
  peptide (1)..(99): Ceres Seq. ID no. 12590173
  misc_feature (1)..(75): NCBI GI NO: 19715647 NR Description: AT3g06820/F3E22_4 [Arabidopsis thaliana]
  misc_feature (1)..(75): NCBI GI NO: 30680023 NR Description: expressed protein [Arabidopsis thaliana]
  misc_feature (1)..(68): NCBI GI NO: 20147355 NR Description: At1g80210/F18B13_28 [Arabidopsis thaliana]
MHHTSTYNASLCKLMEYCLTPAITVLEDRVKENELRLAMLVEEAKQLEAEQSTKTGSPRRAMPGGTTSGITSPRGQDKYPSGRQGGPISPSSSGRRKAP

SEQ ID NO: 22254 - protein, 85 aa, Zea mays subsp. mays
  peptide (1)..(85): Ceres Seq. ID no. 12590174
  misc_feature (1)..(61): NCBI GI NO: 19715647 NR Description: AT3g06820/F3E22_4 [Arabidopsis thaliana]
  misc_feature (1)..(61): NCBI GI NO: 30680023 NR Description: expressed protein [Arabidopsis thaliana]
  misc_feature (1)..(54): NCBI GI NO: 20147355 NR Description: At1g80210/F18B13_28 [Arabidopsis thaliana]
MEYCLTPAITVLEDRVKENELRLAMLVEEAKQLEAEQSTKTGSPRRAMPGGTTSGITSPRGQDKYPSGRQGGPISPSSSGRRKAP

SEQ ID NO: 22255 - DNA, 469 bp, Zea mays subsp. mays
  misc_feature (1)..(469): Ceres Seq. ID no. 13599357
ccacaaaccccgctgcgccaatagctcttccccagaacaatagactagtcaatgaaggggaggtttattaagcagagcagaagaatatagttaatggttcctggatgagaagtggaaatgctactggctgtggaaggaggaggttttttctcatcgtcagcttcaggatacagtcatggcctcgctcttttgctgcttggacggaaagaagaagagaagcctgtcaaggtatcaccatggagtcagtaccgactagtcgatggggaagctgagcatgtttgtcatctggcttccacgaaaaaccaagctccccgtaaatgtgctcccttcatctgcttcggtagcactgctttggagctcgaaggggcgtctcctccgaaactgagttcaagcaacactttggactctttggaggagccatcccgttcaacaaagaagaaggttaccactaatggttccataactggag

SEQ ID NO: 22256 - protein, 117 aa, Zea mays subsp. mays
  peptide (1)..(117): Ceres Seq. ID no. 13599358
  misc_feature (1)..(116): NCBI GI NO: 34912224 NR Description: P0415C01.14
  misc_feature (1)..(116): NCBI GI NO: 25334118 NR Description: F12G12.17 protein - Arabidopsis thaliana
  misc_feature (1)..(116): NCBI GI NO: 10092447 NR Description: unknown protein; 15226-14726
  misc_feature (1)..(116): NCBI GI NO: 30692973 NR Description: expressed protein [Arabidopsis thaliana]
  misc_feature (1)..(89): NCBI GI NO: 2505872 NR Description: hypothetical protein [Arabidopsis thaliana]
  misc_feature (1)..(89): NCBI GI NO: 18395162 NR Description: expressed protein [Arabidopsis thaliana]
  misc_feature (21)..(89): NCBI GI NO: 7452500 NR Description: hypothetical protein T22J18
MLLAVEGGGFFSSSASGYSHGLALLLLGRKEEEKPVKVSPWSQYRLVDGEAEHVCHLASTKNQAPRKCAPFICFGSTALELEGASPPKLSSSNTLDSLEEPSRSTKKKVTTNGSITG

SEQ ID NO: 22257 - DNA, 984 bp, Zea mays subsp. mays
  misc_feature (1)..(984): Ceres Seq. ID no. 13599364
cctaatcgaaaatcataaacccttctttacctttgtgctcatcttccttcctcgttatcaacagtctcaatcgaaaccgattcattgagaatgacggagatggtaacgcctggagacgtgctcggtaatgcggctgagttaaaacccgggaaaggagcttacgtcaacgacaacaccatctacgcttccctcacaggatctcgccggattgtttctcctcttcccgaatctcttgaccagagagctactgtggaagttactggtcacaaggcgcatggacttatccccgagcctggctctcttgtcttagctagggttactaaagttatggctcgtatggcttctgttgatatcttgtgtgttggttcaaaggccgttcgtgaaaaatttgctggcgtaatcaggcaacaagatgttagagaaacagagattgacaaagttgagattcatcagtctttccgtcctggtgacattgttagagctgtggttctgtctcttggtgactcacgggcttactatctgtcaactgctaagaatgagcttggtgtggtctctgctgagagcgctgcaggtgaaacaatggttccgattagttggacagagatgcaatgtcctttgtctggccaaaccgagcagaggaaagttgccaaggtggcctaatttgaatgacactacagataatctggcttctatcatagatgtgtgtctctacaacaagaaaagacatgtttgattattacagttttgagctcttttgacatgctttaacttaaaagaccatgttttgtcaagtgcaaaagcaacttgcctttgttcctaaactcagaagacatttcaatgaaagggttaagagagaatgaatttgaatgtgagcccttttaattcttttacactgcattgataatggcgacgaagattgccttggttagcaccattttattttggatgctaagcttgaaatttctatgtactatcgtttctgct

SEQ ID NO: 22258 - protein, 189 aa, Zea mays subsp. mays; identical to SEQ ID NO: 10991
  peptide (1)..(189): Ceres Seq. ID no. 15222568
  misc_feature (2)..(188): NCBI GI NO: 18421805 NR Description: expressed protein [Arabidopsis thaliana]
  misc_feature (2)..(136): NCBI GI NO: 9758066 NR Description: gene_id:K15E6
  misc_feature (7)..(188): NCBI GI NO: 7705612 NR Description: exosomal core protein CSL4
  misc_feature (7)..(188): NCBI GI NO: 22267446 NR Description: RIKEN cDNA 2610104C07 [Mus musculus]
  misc_feature (4)..(187): NCBI GI NO: 7491999 NR Description: hypothetical protein SPCC965
  misc_feature (4)..(187): NCBI GI NO: 19076010 NR Description: hypothetical protein [Schizosaccharomyces pombe]
  misc_feature (39)..(187): NCBI GI NO: 38104559 NR Description: hypothetical protein MG08628.4
  misc_feature (93)..(187): NCBI GI NO: 6324097 NR Description: Represses the replication of double-strand ed RNAviruses
  misc_feature (40)..(94): NCBI GI NO: 6324097 NR Description: Represses the replication of double-strand ed RNAviruses
  misc_feature (2)..(188): NCBI GI NO: 24583644 NR Description: CG6249-PA [Drosophila melanogaster]

SEQ ID NO: 22259 - protein, 186 aa, Zea mays subsp. mays; identical to SEQ ID NO: 10992
  peptide (1)..(186): Ceres Seq. ID no. 15222569
  misc_feature (1)..(185): NCBI GI NO: 18421805 NR Description: expressed protein [Arabidopsis thaliana]
  misc_feature (1)..(133): NCBI GI NO: 9758066 NR Description: gene_id:K15E6
  misc_feature (4)..(185): NCBI GI NO: 7705612 NR Description: exosomal core protein CSL4
  misc_feature (4)..(185): NCBI GI NO: 22267446 NR Description: RIKEN cDNA 2610104C07 [Mus musculus]
  misc_feature (1)..(184): NCBI GI NO: 7491999 NR Description: hypothetical protein SPCC965
  misc_feature (1)..(184): NCBI GI NO: 19076010 NR Description: hypothetical protein [Schizosaccharomyces pombe]
  misc_feature (36)..(184): NCBI GI NO: 38104559 NR Description: hypothetical protein MG08628.4
  misc_feature (90)..(184): NCBI GI NO: 6324097 NR Description: Represses the replication of double-strand ed RNAviruses
  misc_feature (37)..(91): NCBI GI NO: 6324097 NR Description: Represses the replication of double-strand ed RNAviruses
  misc_feature (1)..(185): NCBI GI NO: 24583644 NR Description: CG6249-PA [Drosophila melanogaster]

SEQ ID NO: 22260 - protein, 110 aa, Zea mays subsp. mays; identical to SEQ ID NO: 10993
  peptide (1)..(110): Ceres Seq. ID no. 15222570
  misc_feature (1)..(109): NCBI GI NO: 18421805 NR Description: expressed protein [Arabidopsis thaliana]
  misc_feature (1)..(57): NCBI GI NO: 9758066 NR Description: gene_id:K15E6
  misc_feature (1)..(109): NCBI GI NO: 7705612 NR Description: exosomal core protein CSL4
  misc_feature (1)..(109): NCBI GI NO: 22267446 NR Description: RIKEN cDNA 2610104C07 [Mus musculus]
  misc_feature (1)..(108): NCBI GI NO: 7491999 NR Description: hypothetical protein SPCC965
  misc_feature (1)..(108): NCBI GI NO: 19076010 NR Description: hypothetical protein [Schizosaccharomyces pombe]
  misc_feature (1)..(108): NCBI GI NO: 38104559 NR Description: hypothetical protein MG08628.4
  misc_feature (14)..(108): NCBI GI NO: 6324097 NR Description: Represses the replication of double-strand ed RNAviruses
  misc_feature (1)..(15): NCBI GI NO: 6324097 NR Description: Represses the replication of double-strand ed RNAviruses
  misc_feature (1)..(109): NCBI GI NO: 24583644 NR Description: CG6249-PA [Drosophila melanogaster]

SEQ ID NO: 22261 - DNA, 1022 bp, Zea mays subsp. mays
  misc_feature (1)..(1022): Ceres Seq. ID no. 13599365
agatttgatcccaacgaaaacgcgtcttcatcttcctcctcctcctttcttttctctcgattttggctgaaagcagctttgtcttttttactacaaccaaatatggatgactgggaggatgaacaaattgcaccacttccagcaaaagttgtgcttaaaagcaactgggatgatgaagatgtagatgagaatgagattaaggactcatgggaggatgatgatgacgaacaacctgctcctccgcctccggtaaagcctgctcctccgaagaaagctgttgagaaaaagggcaaagcggctgaggctccaaaagaagaacctttagatcctctctctgagaaacttcgcatgcagaggcttgttgaagaagcggactacagggcaactgccgaactctttggaacgaagggtgaagagaaaagccttgacatgttcatccccaagtctgaatctgattttttggaatatgctgaaatgatttctcataggcttacaccatatgagaaaagttatcactatatcgcattgctgaaagctgtcatgagactttcggtgaccaacatgaaggcagcagatgttaaagatgttgcttcgtccgttacagcaattgcaaatgaaaagcttaaggctgagaaagaagctgctgctggtagaaagaagacgggtggcaagaagaaacagcttattgtagataaggccgatgacgatctagtagctggtccttatgatgccatggacgattttgacttcatgtagattacaagagctttgtgattgtgagggaatacagtttcgattgcctggcgtctgtttcatcattatctctcgggaagaagagcaaaagtttcttagttctgggatatatatagttggaacaaagaagtcttgctttatgggttttggtctgtttggtctggagacattctctaaagagtcatgttttgtttcttttctgttggttaaaaagctaatactttaatcaattctcgtgtaatggtaatacaaatgtcttatctttgctc

SEQ ID NO: 22262 - protein, 251 aa, Zea mays subsp. mays
  peptide (1)..(251): Ceres Seq. ID no. 13599366
  misc_feature (35)..(251): NCBI GI NO: 18408426 NR Description: expressed protein [Arabidopsis thaliana]
  misc_feature (35)..(251): NCBI GI NO: 30693092 NR Description: expressed protein [Arabidopsis thaliana]
  misc_feature (36)..(251): NCBI GI NO: 27374242 NR Description: CG12131-PA [Drosophila erecta]
  misc_feature (36)..(251): NCBI GI NO: 27374365 NR Description: Adam-PA [Drosophila willistoni]
  misc_feature (36)..(251): NCBI GI NO: 19921950 NR Description: CG12131-PA [Drosophila melanogaster]
  misc_feature (52)..(251): NCBI GI NO: 26349519 NR Description: unnamed protein product [Mus musculus]
  misc_feature (52)..(251): NCBI GI NO: 34856798 NR Description: similar to Eukaryotic translation initiation factor3 subunit 1
  misc_feature (52)..(251): NCBI GI NO: 4503511 NR Description: eukaryotic translation initiation factor 3
  misc_feature (52)..(251): NCBI GI NO: 10435304 NR Description: unnamed protein product [Homo sapiens]
  misc_feature (52)..(251): NCBI GI NO: 23503065 NR Description: Eukaryotic translation initiation factor 3 subunit1
RFDPNENASSSSSSSFLFSRFWLKAALSFLLQPNMDDWEDEQIAPLPAKVVLKSNWDDEDVDENEIKDSWEDDDDEQPAPPPPVKPAPPKKAVEKKGKAAEAPKEEPLDPLSEKLRMQRLVEEADYRATAELFGTKGEEKSLDMFIPKSESDFLEYAEMISHRLTPYEKSYHYIALLKAVMRLSVTNMKAADVKDVASSVTAIANEKLKAEKEAAAGRKKTGGKKKQLIVDKADDDLVAGPYDAMDDFDFM

SEQ ID NO: 22263 - protein, 217 aa, Zea mays subsp. mays
  peptide (1)..(217): Ceres Seq. ID no. 13599367
  misc_feature (1)..(217): NCBI GI NO: 18408426 NR Description: expressed protein [Arabidopsis thaliana]
  misc_feature (1)..(217): NCBI GI NO: 30693092 NR Description: expressed protein [Arabidopsis thaliana]
  misc_feature (2)..(217): NCBI GI NO: 27374242 NR Description: CG12131-PA [Drosophila erecta]
  misc_feature (2)..(217): NCBI GI NO: 27374365 NR Description: Adam-PA [Drosophila willistoni]
  misc_feature (2)..(217): NCBI GI NO: 19921950 NR Description: CG12131-PA [Drosophila melanogaster]
  misc_feature (18)..(217): NCBI GI NO: 26349519 NR Description: unnamed protein product [Mus musculus]
  misc_feature (18)..(217): NCBI GI NO: 34856798 NR Description: similar to Eukaryotic translation initiation factor3 subunit 1
  misc_feature (18)..(217): NCBI GI NO: 4503511 NR Description: eukaryotic translation initiation factor 3
  misc_feature (18)..(217): NCBI GI NO: 23503065 NR Description: Eukaryotic translation initiation factor 3 subunit1
  misc_feature (18)..(217): NCBI GI NO: 10435304 NR Description: unnamed protein product [Homo sapiens]
MDDWEDEQIAPLPAKVVLKSNWDDEDVDENEIKDSWEDDDDEQPAPPPPVKPAPPKKAVEKKGKAAEAPKEEPLDPLSEKLRMQRLVEEADYRATAELFGTKGEEKSLDMFIPKSESDFLEYAEMISHRLTPYEKSYHYIALLKAVMRLSVTNMKAADVKDVASSVTAIANEKLKAEKEAAAGRKKTGGKKKQLIVDKADDDLVAGPYDAMDDFDFM

SEQ ID NO: 22264 - protein, 135 aa, Zea mays subsp. mays
  peptide (1)..(135): Ceres Seq. ID no. 13599368
  misc_feature (1)..(135): NCBI GI NO: 18408426 NR Description: expressed protein [Arabidopsis thaliana]
  misc_feature (1)..(135): NCBI GI NO: 30693092 NR Description: expressed protein [Arabidopsis thaliana]
  misc_feature (1)..(135): NCBI GI NO: 27374242 NR Description: CG12131-PA [Drosophila erecta]
  misc_feature (1)..(135): NCBI GI NO: 27374365 NR Description: Adam-PA [Drosophila willistoni]
  misc_feature (1)..(135): NCBI GI NO: 19921950 NR Description: CG12131-PA [Drosophila melanogaster]
  misc_feature (1)..(135): NCBI GI NO: 26349519 NR Description: unnamed protein product [Mus musculus]
  misc_feature (1)..(135): NCBI GI NO: 34856798 NR Description: similar to Eukaryotic translation initiation factor3 subunit 1
  misc_feature (1)..(135): NCBI GI NO: 4503511 NR Description: eukaryotic translation initiation factor 3
  misc_feature (1)..(135): NCBI GI NO: 10435304 NR Description: unnamed protein product [Homo sapiens]
  misc_feature (1)..(135): NCBI GI NO: 23503065 NR Description: Eukaryotic translation initiation factor 3 subunit1
MQRLVEEADYRATAELFGTKGEEKSLDMFIPKSESDFLEYAEMISHRLTPYEKSYHYIALLKAVMRLSVTNMKAADVKDVASSVTAIANEKLKAEKEAAAGRKKTGGKKKQLIVDKADDDLVAGPYDAMDDFDFM

SEQ ID NO: 22265 - DNA, 888 bp, Zea mays subsp. mays
  misc_feature (1)..(888): Ceres Seq. ID no. 12635696
gagctacgaagatggctaactcggctcttgtctatttctgtgcgagcagccggagatcggtggagaagcgggttgtgtcggtgccgctggccgagtgcggggaccggcccagaggggccagcggggaggggccgccgccgtcggactcgtgggcgtggcgcaagtatgggcagaagcccatcaagggctccccctacccacggggttactaccgctgcagcagctccaaggggtgcccagcgaggaagcaggtggagcgcagccacgcggaccccaccgcgctgctcgtcacctacaccttcgagcacaatcacgaggcgccgcagcccaagaccagcggcggcagctgctgccaccagcaaggcaagccgtccgcgcggccgccggcgccgaagcctgagccgtccgtggtcctggtccagcgggatgagctcggcccggagcacgagctggtagaaacagaggtgccggagcaggagcaggagacggagccagaagaggagcacgagccggcggaagagggcgtcccatgtctggccggtccggaagcggcagcatccttaacggtggcgccggcggccgaggaggacgaaagcttcgactttgggtggttcgaccagtacccgacgtggcaccggtcggcgctgtacgcccctctgctgcctccggaggagtgggagcgggagctgcagggggaggacgccctgtttgcggggctcggcgagctgcccgagtgcgccgtcgtcttcggccgccgccgcgagctcagcctggccgccaccgcgccgtgctcctgatggtccttcgactctttgtacgtttgtttttatttttttttcttttccttttgggcccctctttaagttttacacggaacgatttggaggc

SEQ ID NO: 22266 - protein, 264 aa, Zea mays subsp. mays
  peptide (1)..(264): Ceres Seq. ID no. 12635697
  misc_feature (46)..(104): Pfam Name: Pfam Description:  WRKY DNA -binding domain
  misc_feature (16)..(264): NCBI GI NO: 34909540 NR Description: P0481E12.40
  misc_feature (1)..(252): NCBI GI NO: 34910854 NR Description: P0435H01.23
  misc_feature (16)..(202): NCBI GI NO: 22329838 NR Description: WRKY family transcription factor
  misc_feature (16)..(120): NCBI GI NO: 30694863 NR Description: WRKY family transcription factor
  misc_feature (17)..(120): NCBI GI NO: 22331854 NR Description: WRKY family transcription factor
  misc_feature (17)..(150): NCBI GI NO: 21553615 NR Description: putative DNA-binding protein
  misc_feature (17)..(229): NCBI GI NO: 15226838 NR Description: WRKY family transcription factor
  misc_feature (17)..(150): NCBI GI NO: 18397606 NR Description: WRKY family transcription factor
  misc_feature (17)..(150): NCBI GI NO: 25518142 NR Description: T5I8.10 protein - Arabidopsis thaliana
  misc_feature (17)..(115): NCBI GI NO: 37537178 NR Description: putative DNA-binding protein
ATKMANSALVYFCASSRRSVEKRVVSVPLAECGDRPRGASGEGPPPSDSWAWRKYGQKPIKGSPYPRGYYRCSSSKGCPARKQVERSHADPTALLVTYTFEHNHEAPQPKTSGGSCCHQQGKPSARPPAPKPEPSVVLVQRDELGPEHELVETEVPEQEQETEPEEEHEPAEEGVPCLAGPEAAASLTVAPAAEEDESFDFGWFDQYPTWHRSALYAPLLPPEEWERELQGEDALFAGLGELPECAVVFGRRRELSLAATAPCS

SEQ ID NO: 22267 - protein, 261 aa, Zea mays subsp. mays
  peptide (1)..(261): Ceres Seq. ID no. 12635698
  misc_feature (43)..(101): Pfam Name: Pfam Description:  WRKY DNA -binding domain
  misc_feature (13)..(261): NCBI GI NO: 34909540 NR Description: P0481E12.40
  misc_feature (1)..(249): NCBI GI NO: 34910854 NR Description: P0435H01.23
  misc_feature (13)..(199): NCBI GI NO: 22329838 NR Description: WRKY family transcription factor
  misc_feature (13)..(117): NCBI GI NO: 30694863 NR Description: WRKY family transcription factor
  misc_feature (14)..(117): NCBI GI NO: 22331854 NR Description: WRKY family transcription factor
  misc_feature (14)..(147): NCBI GI NO: 21553615 NR Description: putative DNA-binding protein
  misc_feature (14)..(226): NCBI GI NO: 15226838 NR Description: WRKY family transcription factor
  misc_feature (14)..(147): NCBI GI NO: 18397606 NR Description: WRKY family transcription factor
  misc_feature (14)..(147): NCBI GI NO: 25518142 NR Description: T5I8.10 protein - Arabidopsis thaliana
  misc_feature (14)..(112): NCBI GI NO: 37537178 NR Description: putative DNA-binding protein
MANSALVYFCASSRRSVEKRVVSVPLAECGDRPRGASGEGPPPSDSWAWRKYGQKPIKGSPYPRGYYRCSSSKGCPARKQVERSHADPTALLVTYTFEHNHEAPQPKTSGGSCCHQQGKPSARPPAPKPEPSVVLVQRDELGPEHELVETEVPEQEQETEPEEEHEPAEEGVPCLAGPEAAASLTVAPAAEEDESFDFGWFDQYPTWHRSALYAPLLPPEEWERELQGEDALFAGLGELPECAVVFGRRRELSLAATAPCS

SEQ ID NO: 22268 - protein, 151 aa, Zea mays subsp. mays
  peptide (1)..(151): Ceres Seq. ID no. 12635699
  misc_feature (37)..(151): NCBI GI NO: 5821151 NR Description: RNA binding protein [Homo sapiens]
  misc_feature (11)..(151): NCBI GI NO: 5821151 NR Description: RNA binding protein [Homo sapiens]
  misc_feature (46)..(151): NCBI GI NO: 5821151 NR Description: RNA binding protein [Homo sapiens]
ELRRWLTRLLSISVRAAGDRWRSGLCRCRWPSAGTGPEGPAGRGRRRRTRGRGASMGRSPSRAPPTHGVTTAAAAPRGAQRGSRWSAATRTPPRCSSPTPSSTITRRRSPRPAAAAAATSKASRPRGRRRRSLSRPWSWSSGMSSARSTSW

SEQ ID NO: 22269 - DNA, 730 bp, Zea mays subsp. mays
  misc_feature (1)..(730): Ceres Seq. ID no. 12635311
actacttctcttcctactccatctttcgcttgtacaaacctaatcagaaatggcaacggcgtcgtttagtatgctgtcagtgttcgccgctccttccggtggattgggctctcgcaacatcagaaacacaaaccaagtcttctccaataggaatcctttggtgggagtcaggtgcatggctcaggacgatcctatcaaggaagaatctcctctgccttcgacctcggccactccaccacagacgccgttgtattctcctccaccacttagcaagcctaaggtgagtacgaagtttggagatcttttagcgtttagcggtccagcgcccgaaagaataaatgggagactcgctatggtagggttcgtagcagcgattgcggtggagcttttgaagggagagaacgtgtttgctcaaatctccgacggtggagtcggatggtttctaggaacaacggcgttgctaacgttggcatcgatgattccattgttcaagggaataagggcagagtcaaagtccaaagggtttatgacgtcagatgccgagctatggaatggtcgattcgccatgctcggcctcgtggccttggctttcactgagtacgtcaaaggcgggactcttgtctaagtctcttttttttttcttcttttttgcatttcttgtgttaccctttagctatgttttaagggataatttggaggataataagtaaatcaaagttttgtttttaat

SEQ ID NO: 22270 - protein, 191 aa, Zea mays subsp. mays
  peptide (1)..(191): Ceres Seq. ID no. 12635312
  misc_feature (1)..(191): NCBI GI NO: 21618071 NR Description: light-induced protein-like protein
  misc_feature (1)..(191): NCBI GI NO: 18414282 NR Description: Expressed protein; protein id: At4g14690
  misc_feature (1)..(190): NCBI GI NO: 7488128 NR Description: probable light induced protein - Arabidopsisthaliana
  misc_feature (8)..(191): NCBI GI NO: 25315849 NR Description: early light-inducable protein
  misc_feature (1)..(191): NCBI GI NO: 15228866 NR Description: early light-induced protein; protein id:At3g22840
  misc_feature (1)..(191): NCBI GI NO: 38123375 NR Description: ELIP [Brassica rapa subsp. pekinensis]
  misc_feature (1)..(191): NCBI GI NO: 7447856 NR Description: early light-inducible protein precursor - soybean
  misc_feature (1)..(188): NCBI GI NO: 28194659 NR Description: putative early light induced protein
  misc_feature (56)..(191): NCBI GI NO: 16930757 NR Description: early light-induced protein-like protein
  misc_feature (1)..(191): NCBI GI NO: 33520417 NR Description: early light inducible protein [Trifolium pratense]
MATASFSMLSVFAAPSGGLGSRNIRNTNQVFSNRNPLVGVRCMAQDDPIKEESPLPSTSATPPQTPLYSPPPLSKPKVSTKFGDLLAFSGPAPERINGRLAMVGFVAAIAVELLKGENVFAQISDGGVGWFLGTTALLTLASMIPLFKGIRAESKSKGFMTSDAELWNGRFAMLGLVALAFTEYVKGGTLV

SEQ ID NO: 22271 - protein, 184 aa, Zea mays subsp. mays
  peptide (1)..(184): Ceres Seq. ID no. 12635313
  misc_feature (1)..(184): NCBI GI NO: 21618071 NR Description: light-induced protein-like protein
  misc_feature (1)..(184): NCBI GI NO: 18414282 NR Description: Expressed protein; protein id: At4g14690
  misc_feature (1)..(183): NCBI GI NO: 7488128 NR Description: probable light induced protein - Arabidopsisthaliana
  misc_feature (1)..(184): NCBI GI NO: 25315849 NR Description: early light-inducable protein
  misc_feature (1)..(184): NCBI GI NO: 15228866 NR Description: early light-induced protein; protein id:At3g22840
  misc_feature (1)..(184): NCBI GI NO: 38123375 NR Description: ELIP [Brassica rapa subsp. pekinensis]
  misc_feature (1)..(184): NCBI GI NO: 7447856 NR Description: early light-inducible protein precursor - soybean
  misc_feature (1)..(181): NCBI GI NO: 28194659 NR Description: putative early light induced protein
  misc_feature (49)..(184): NCBI GI NO: 16930757 NR Description: early light-induced protein-like protein
  misc_feature (1)..(184): NCBI GI NO: 33520417 NR Description: early light inducible protein [Trifolium pratense]
MLSVFAAPSGGLGSRNIRNTNQVFSNRNPLVGVRCMAQDDPIKEESPLPSTSATPPQTPLYSPPPLSKPKVSTKFGDLLAFSGPAPERINGRLAMVGFVAAIAVELLKGENVFAQISDGGVGWFLGTTALLTLASMIPLFKGIRAESKSKGFMTSDAELWNGRFAMLGLVALAFTEYVKGGTLV

SEQ ID NO: 22272 - protein, 149 aa, Zea mays subsp. mays
  peptide (1)..(149): Ceres Seq. ID no. 12635314
  misc_feature (1)..(149): NCBI GI NO: 21618071 NR Description: light-induced protein-like protein
  misc_feature (1)..(149): NCBI GI NO: 18414282 NR Description: Expressed protein; protein id: At4g14690
  misc_feature (1)..(148): NCBI GI NO: 7488128 NR Description: probable light induced protein - Arabidopsisthaliana
  misc_feature (1)..(149): NCBI GI NO: 25315849 NR Description: early light-inducable protein
  misc_feature (1)..(149): NCBI GI NO: 15228866 NR Description: early light-induced protein; protein id:At3g22840
  misc_feature (1)..(149): NCBI GI NO: 38123375 NR Description: ELIP [Brassica rapa subsp. pekinensis]
  misc_feature (1)..(149): NCBI GI NO: 7447856 NR Description: early light-inducible protein precursor - soybean
  misc_feature (1)..(146): NCBI GI NO: 28194659 NR Description: putative early light induced protein
  misc_feature (14)..(149): NCBI GI NO: 16930757 NR Description: early light-induced protein-like protein
  misc_feature (1)..(149): NCBI GI NO: 33520417 NR Description: early light inducible protein [Trifolium pratense]
MAQDDPIKEESPLPSTSATPPQTPLYSPPPLSKPKVSTKFGDLLAFSGPAPERINGRLAMVGFVAAIAVELLKGENVFAQISDGGVGWFLGTTALLTLASMIPLFKGIRAESKSKGFMTSDAELWNGRFAMLGLVALAFTEYVKGGTLV

SEQ ID NO: 22273 - DNA, 1293 bp, Zea mays subsp. mays
  misc_feature (1)..(1293): Ceres Seq. ID no. 15226354
atcaagattccgaccccaaaatccctctccgagctcgaccaaaaaccaccctctctgattcattccacccacgtccacgtacgtacgtacattcccaccacctcccagtgcagcgccagtctgtaacccataaccataaccataccatggtggtcctcaccaagggcgagctggagcagatcgcgctgccggccgtgcagcgcgcatcgccgccgccgccggccgccgtgccggaggtcgacctggcagccggggacgccgccgccgcgcgcgcggtggccaaggcgtgcgaggaccacggcttcttcaaggtgacgggccacggcgtgccgcagcacctcctggcgcgcctcgaggccgccgcggccgcgttcttcgcgctcccgcagcgggagaaggacagggccgccggctgcccgttcggatacgccagcaagcggattggcgccaacggcgatctcggctgggtcgagtacctcctgcttgccgtcaccgccgccggcgcagcggccgcgccggtgtctgcgtgcgagggcgcggagccgccctgtttccgtgctgtgctggacgagtacgtggcggcggtgaggcgcatgacctgcacggtgctgcagctgatggcgcaggggctgggcctcgacgacagggacgtgttcagccggctggtgctggaccgggacagcgactccatgctgagggtgaaccactacccgccgcggccccagccagcggcggcggcggagacgaggcggctgacggggttcggcgagcacaccgacccgcagatcatctccgtcctccgctccaacgacgcgtccggcctcgagatcacgctgcgggacggcacctgggtgtccgtgccctccgacacggaatccttcttcgtcaatgtcggcgacgcgttgcaggtgctgaccaacgggcggttccggagcgtgcggcaccgggtgatggtgagcagcgcgcggccgcgggtgtcggtgatcttcttcggcggcccgccgccgcgggagcgcctggcgccgctgccgggtctggtggaccgggagggcggccgacgccgctacagggagttcacgtggagggagtacaagaactcggcgtaccggaccaagctggcagacaacaggctctgctccttcgagaccatggcgacgagctagctaagccgccgcgctgacgccggacacggctcatcgccctcccttctcgatgtgtagtgtagcaagagacgtttttttgtgccatatagttttctgtttatacacgataaggctggtctcaacttcgttt

SEQ ID NO: 22274 - protein, 386 aa, Zea mays subsp. mays
  peptide (1)..(386): Ceres Seq. ID no. 15226355
  misc_feature (227)..(333): Pfam Name: II Pfam Description: 2OG-Fe
  misc_feature (49)..(381): NCBI GI NO: 34903844 NR Description: unnamed protein product
  misc_feature (60)..(386): NCBI GI NO: 1666096 NR Description: dioxygenase [Marah macrocarpus]
  misc_feature (74)..(386): NCBI GI NO: 27123665 NR Description: gibberellin 2-oxidase [Cucurbita maxima]
  misc_feature (74)..(386): NCBI GI NO: 32127337 NR Description: Gibberellin 2-oxidase [Cucurbita maxima]
  misc_feature (49)..(386): NCBI GI NO: 9971227 NR Description: gibberellin 2-oxidase No1 [Lactuca sativa]
  misc_feature (49)..(384): NCBI GI NO: 4678586 NR Description: GA 2-oxidase [Phaseolus coccineus]
  misc_feature (49)..(386): NCBI GI NO: 6478202 NR Description: gibberellin 2 beta-hydroxylase [Pisum sativum]
  misc_feature (49)..(386): NCBI GI NO: 6446413 NR Description: gibberellin 2-beta-hydroxylase [Pisum sativum]
  misc_feature (74)..(386): NCBI GI NO: 5579094 NR Description: gibberellin 2-oxidase [Pisum sativum]
  misc_feature (49)..(381): NCBI GI NO: 34909676 NR Description: putative GA 2-oxidase
QDSDPKIPLRARPKTTLSDSFHPRPRTYVHSHHLPVQRQSVTHNHNHTMVVLTKGELEQIALPAVQRASPPPPAAVPEVDLAAGDAAAARAVAKACEDHGFFKVTGHGVPQHLLARLEAAAAAFFALPQREKDRAAGCPFGYASKRIGANGDLGWVEYLLLAVTAAGAAAAPVSACEGAEPPCFRAVLDEYVAAVRRMTCTVLQLMAQGLGLDDRDVFSRLVLDRDSDSMLRVNHYPPRPQPAAAAETRRLTGFGEHTDPQIISVLRSNDASGLEITLRDGTWVSVPSDTESFFVNVGDALQVLTNGRFRSVRHRVMVSSARPRVSVIFFGGPPPRERLAPLPGLVDREGGRRRYREFTWREYKNSAYRTKLADNRLCSFETMATS

SEQ ID NO: 22275 - protein, 338 aa, Zea mays subsp. mays
  peptide (1)..(338): Ceres Seq. ID no. 15226356
  misc_feature (179)..(285): Pfam Name: II Pfam Description: 2OG-Fe
  misc_feature (1)..(333): NCBI GI NO: 34903844 NR Description: unnamed protein product
  misc_feature (12)..(338): NCBI GI NO: 1666096 NR Description: dioxygenase [Marah macrocarpus]
  misc_feature (26)..(338): NCBI GI NO: 27123665 NR Description: gibberellin 2-oxidase [Cucurbita maxima]
  misc_feature (26)..(338): NCBI GI NO: 32127337 NR Description: Gibberellin 2-oxidase [Cucurbita maxima]
  misc_feature (1)..(338): NCBI GI NO: 9971227 NR Description: gibberellin 2-oxidase No1 [Lactuca sativa]
  misc_feature (1)..(336): NCBI GI NO: 4678586 NR Description: GA 2-oxidase [Phaseolus coccineus]
  misc_feature (1)..(338): NCBI GI NO: 6478202 NR Description: gibberellin 2 beta-hydroxylase [Pisum sativum]
  misc_feature (1)..(338): NCBI GI NO: 6446413 NR Description: gibberellin 2-beta-hydroxylase [Pisum sativum]
  misc_feature (26)..(338): NCBI GI NO: 5579094 NR Description: gibberellin 2-oxidase [Pisum sativum]
  misc_feature (1)..(333): NCBI GI NO: 34909676 NR Description: putative GA 2-oxidase
MVVLTKGELEQIALPAVQRASPPPPAAVPEVDLAAGDAAAARAVAKACEDHGFFKVTGHGVPQHLLARLEAAAAAFFALPQREKDRAAGCPFGYASKRIGANGDLGWVEYLLLAVTAAGAAAAPVSACEGAEPPCFRAVLDEYVAAVRRMTCTVLQLMAQGLGLDDRDVFSRLVLDRDSDSMLRVNHYPPRPQPAAAAETRRLTGFGEHTDPQIISVLRSNDASGLEITLRDGTWVSVPSDTESFFVNVGDALQVLTNGRFRSVRHRVMVSSARPRVSVIFFGGPPPRERLAPLPGLVDREGGRRRYREFTWREYKNSAYRTKLADNRLCSFETMATS

SEQ ID NO: 22276 - DNA, 926 bp, Zea mays subsp. mays
  misc_feature (1)..(926): Ceres Seq. ID no. 12638274
gtcgagagagagaagatggaggattcgtcggcatcgtttgtaggaaacagatattgggtgctccgacatggaaagagcattccaaacgagagaggcctcatcgtctcttcaatggaaaatggagtgctaccagagtaccagttagcgcctgatggtgtcgctcaggctcagctcgctggccaatccttcctcaagcaactcgaggaaagtaagatatcactggacaaggtccgcatttgctactcccccttctctagaaccactcacaccgctaaggttgtcgctcaggtcctcaatatcccttttgattcccctcaatgcaagatgatggaaactctgcgagaacgctactttggacctacatttgaactcaagtcacatgataagtacccggagatatgggatcttgatgagaaagatccattcatgggaccagaaggaggtgaaagcgctgatgacgttgtatccagacttgccactgccatgttatccatggaagcagaatttcaaaggtgcgcaattctggtggtgagccatggagatccactgcagatgctgcagaacataatgcattcagcaaagcaacaaagcggaggagatggtggtttagctgagagaattcagatgagcagagttgcttctgtcttgtcacagcaccgcaagtttgctttgctcactggtgaactccgacccctcgtctgattgattgcaaaccagaaaaagtattcaactttgggatgttggtcctatctgccaatgacaattcttgcaatttttaaacttttatatggaataagcaagctgtttttgttagaaagacaaaggtttattcttctgtttggaataaatcatgattcatatgcatcttcaaatctgtacacgacctgagagctaccaaaaaaaaaaaaaaaaaagcttatcgatac

SEQ ID NO: 22277 - protein, 233 aa, Zea mays subsp. mays
  peptide (1)..(233): Ceres Seq. ID no. 12638275
  misc_feature (16)..(228): Pfam Name: Pfam Description:  Phosphoglycerate mutase family
  misc_feature (8)..(233): NCBI GI NO: 21592519 NR Description: unknown [Arabidopsis thaliana]
  misc_feature (8)..(233): NCBI GI NO: 18420226 NR Description: expressed protein; protein id: At4g38370
  misc_feature (108)..(233): NCBI GI NO: 7485952 NR Description: hypothetical protein F22I13
  misc_feature (8)..(109): NCBI GI NO: 7485952 NR Description: hypothetical protein F22I13
  misc_feature (16)..(233): NCBI GI NO: 38344128 NR Description: OSJNBb0072N21.7
VEREKMEDSSASFVGNRYWVLRHGKSIPNERGLIVSSMENGVLPEYQLAPDGVAQAQLAGQSFLKQLEESKISLDKVRICYSPFSRTTHTAKVVAQVLNIPFDSPQCKMMETLRERYFGPTFELKSHDKYPEIWDLDEKDPFMGPEGGESADDVVSRLATAMLSMEAEFQRCAILVVSHGDPLQMLQNIMHSAKQQSGGDGGLAERIQMSRVASVLSQHRKFALLTGELRPLV

SEQ ID NO: 22278 - protein, 228 aa, Zea mays subsp. mays
  peptide (1)..(228): Ceres Seq. ID no. 12638276
  misc_feature (11)..(223): Pfam Name: Pfam Description:  Phosphoglycerate mutase family
  misc_feature (3)..(228): NCBI GI NO: 21592519 NR Description: unknown [Arabidopsis thaliana]
  misc_feature (3)..(228): NCBI GI NO: 18420226 NR Description: expressed protein; protein id: At4g38370
  misc_feature (103)..(228): NCBI GI NO: 7485952 NR Description: hypothetical protein F22I13
  misc_feature (3)..(104): NCBI GI NO: 7485952 NR Description: hypothetical protein F22I13
  misc_feature (11)..(228): NCBI GI NO: 38344128 NR Description: OSJNBb0072N21.7
MEDSSASFVGNRYWVLRHGKSIPNERGLIVSSMENGVLPEYQLAPDGVAQAQLAGQSFLKQLEESKISLDKVRICYSPFSRTTHTAKVVAQVLNIPFDSPQCKMMETLRERYFGPTFELKSHDKYPEIWDLDEKDPFMGPEGGESADDVVSRLATAMLSMEAEFQRCAILVVSHGDPLQMLQNIMHSAKQQSGGDGGLAERIQMSRVASVLSQHRKFALLTGELRPLV

SEQ ID NO: 22279 - protein, 196 aa, Zea mays subsp. mays
  peptide (1)..(196): Ceres Seq. ID no. 12638277
  misc_feature (1)..(191): Pfam Name: Pfam Description:  Phosphoglycerate mutase family
  misc_feature (1)..(196): NCBI GI NO: 21592519 NR Description: unknown [Arabidopsis thaliana]
  misc_feature (1)..(196): NCBI GI NO: 18420226 NR Description: expressed protein; protein id: At4g38370
  misc_feature (71)..(196): NCBI GI NO: 7485952 NR Description: hypothetical protein F22I13
  misc_feature (1)..(72): NCBI GI NO: 7485952 NR Description: hypothetical protein F22I13
  misc_feature (1)..(196): NCBI GI NO: 38344128 NR Description: OSJNBb0072N21.7
MENGVLPEYQLAPDGVAQAQLAGQSFLKQLEESKISLDKVRICYSPFSRTTHTAKVVAQVLNIPFDSPQCKMMETLRERYFGPTFELKSHDKYPEIWDLDEKDPFMGPEGGESADDVVSRLATAMLSMEAEFQRCAILVVSHGDPLQMLQNIMHSAKQQSGGDGGLAERIQMSRVASVLSQHRKFALLTGELRPLV

SEQ ID NO: 22280 - DNA, 822 bp, Zea mays subsp. mays
  misc_feature (1)..(822): Ceres Seq. ID no. 12635934
actcccacacaagacaagcgtcgattgccccccatccgtggctgcgcgtccgccggtggccgggggttctaatccgagcgattcccaatcccaaccgccgctggaagaccccgcagctccacgacagcgcgggcagacatggcgcccgtgctacctgcgccgccggcggtggcggctcctcccaccttctgccgcgtctctatcccggcccgcagcgctttcccctcctcctcccccgtcagaaaccttcgcaggtttgcggccaggagcggcggcggcggcggcggccgtcccgagcccaaagcaggtgatgatgagagcaaggccgtccttgacgccttcttcctcgggaaggccttggcggaggcgctgacggagcgggccgagtcggtggtgggcgaggtgttcagcgtcgtcgggcagtggcaggcggagcagcagaagcaggtccaggaatttcaggaggaagtagttcagagagcccaaaaggctaaggaaagagctgctgaggaggtcgttgatgataagggaccaaagactctaaagggaccttcaacaacaatcgtgacgcctgcacctacgcctcctccttctcctaatattcccacacaggcagaacagttataagcggcgatgaagagttagtgctgcatgtagactcactttgtgctccaagaaagtgatgaaattctcctatgagatatgtattgatcaagttgtcctttctttgatagtgaatatccagaatatcaactagaaaaatctatggtacaagttccgagatgaatggaataaaaatctgttagtttactacagattctg

SEQ ID NO: 22281 - protein, 162 aa, Zea mays subsp. mays
  peptide (1)..(162): Ceres Seq. ID no. 12635935
  misc_feature (56)..(148): NCBI GI NO: 21553912 NR Description: unknown [Arabidopsis thaliana]
  misc_feature (56)..(131): NCBI GI NO: 15235625 NR Description: putative protein; protein id: At4g13200
  misc_feature (61)..(134): NCBI GI NO: 17232006 NR Description: hypothetical protein [Nostoc sp. PCC 7120]
  misc_feature (61)..(122): NCBI GI NO: 23130619 NR Description: hypothetical protein [Nostoc punctiforme]
MAPVLPAPPAVAAPPTFCRVSIPARSAFPSSSPVRNLRRFAARSGGGGGGRPEPKAGDDESKAVLDAFFLGKALAEALTERAESVVGEVFSVVGQWQAEQQKQVQEFQEEVVQRAQKAKERAAEEVVDDKGPKTLKGPSTTIVTPAPTPPPSPNIPTQAEQL

SEQ ID NO: 22282 - protein, 123 aa, Zea mays subsp. mays
  peptide (1)..(123): Ceres Seq. ID no. 12635936
LPHKTSVDCPPSVAARPPVAGGSNPSDSQSQPPLEDPAAPRQRGQTWRPCYLRRRRWRLLPPSAASLSRPAALSPPPPPSETFAGLRPGAAAAAAAVPSPKQVMMRARPSLTPSSSGRPWRRR

SEQ ID NO: 22283 - protein, 102 aa, Zea mays subsp. mays
  peptide (1)..(102): Ceres Seq. ID no. 12635937
SHTRQASIAPHPWLRVRRWPGVLIRAIPNPNRRWKTPQLHDSAGRHGARATCAAGGGGSSHLLPRLYPGPQRFPLLLPRQKPSQVCGQERRRRRRPSRAQSR

SEQ ID NO: 22284 - DNA, 1321 bp, Zea mays subsp. mays
  misc_feature (1)..(1321): Ceres Seq. ID no. 13599377
  misc_feature (2)..(2): n is a, c, t, g, unknown, or other
cnaaatttacgattagcctagcgactcggcatggctactgtcttcccccgtgacgccggcgtctccacgccggaagccgacgaggctaagaaaatctacgatgaagcacggcgagtggtgtccacctacgagactgttcccagtcccagcggaaccctgcaggattactgccgccaccccagcggctggtgcataaccctgccgatcatggtgagctccatggtcgcagagcagcactttgaggcgcgtggcaccgacgtgctccttgttacgatgcccaagtccgggactacctggatcaaggccctcctctatgctgcggcccaccgcactgacgacacatcatcgtccatactccggcagctcgcctcccacaactcccaccagctcgttcctttcctcgaggcccaggtctacaccaaggaccagattccagacctgagctcgcttcccgcgccacggctcttcgccacgcacatcccggctgagtcgctgccaccctccgttgtggcgtccggctgcaaggtggtgtacttgtgccgggaccccaaggactgcttcgtgtctctctggcactttatgaacaagttcaccccatgggacatcgacgaggcacacggccggttctgcgagggtgtctcgttgtatgggccattttgggagcacgtgctgagctactggcgttggcacgtcgaccgaccgggtcaggtgctcttcctgacttacgaggagctcagcgccgacccgctcggccaactgaggcgcctagccgagttcattgggcgccccttcacgccgggggagcaggaggcgggagtggacagggagattgcggaggcatgtgccatgaaaagcatggtcaaccaggaggtgaaccagtccaggacgaccgaaatcgttgagatgccgattcccaacgggatcttcttccggcgaggcgtggtcggagactggaccaactacctcacgccggagatggcaggaaggatcgatgagattaccaagagcaagtttgaaggatccggcctcatgctgccgaaaacaatctcggaaatctcaaagatctagcatccctccgtcgtgtttgatgtttgaaatcgttcaccttttttttctcttgttgtaaactgcaccctgctggcactggcttggctgaataaaaaaagcttgcattgttcttgttgatcaaacgaaataccagctggcgagttgttgatgttacggaaaaggcctgcttagtcttaggtatttttcttatcggtttaattgtgatcaaatgtgtttgtactctgcttaattattaataaaaatgattgtatgc

SEQ ID NO: 22285 - protein, 345 aa, Zea mays subsp. mays
  peptide (1)..(345): Ceres Seq. ID no. 15218612
  misc_feature (75)..(332): Pfam Name: Pfam Description:  Sulfotransferase domain
  misc_feature (12)..(336): NCBI GI NO: 34894524 NR Description: putative steroid sulfotransferase
  misc_feature (15)..(333): NCBI GI NO: 38344441 NR Description: OSJNBa0038O10.13
  misc_feature (24)..(333): NCBI GI NO: 15230602 NR Description: sulfotransferase family [Arabidopsis thaliana]
  misc_feature (54)..(334): NCBI GI NO: 18395604 NR Description: sulfotransferase family [Arabidopsis thaliana]
  misc_feature (54)..(334): NCBI GI NO: 25288806 NR Description: probable steroid sulfotransferase
  misc_feature (14)..(333): NCBI GI NO: 9759557 NR Description: steroid sulfotransferase-like protein
  misc_feature (14)..(333): NCBI GI NO: 18415376 NR Description: sulfotransferase family [Arabidopsis thaliana]
  misc_feature (6)..(335): NCBI GI NO: 15222843 NR Description: sulfotransferase family [Arabidopsis thaliana]
  misc_feature (3)..(334): NCBI GI NO: 21593660 NR Description: putative flavonol sulfotransferase
  misc_feature (14)..(333): NCBI GI NO: 15809903 NR Description: AT5g07010/MOJ9_18 [Arabidopsis thaliana]
MATVFPRDAGVSTPEADEAKKIYDEARRVVSTYETVPSPSGTLQDYCRHPSGWCITLPIMVSSMVAEQHFEARGTDVLLVTMPKSGTTWIKALLYAAAHRTDDTSSSILRQLASHNSHQLVPFLEAQVYTKDQIPDLSSLPAPRLFATHIPAESLPPSVVASGCKVVYLCRDPKDCFVSLWHFMNKFTPWDIDEAHGRFCEGVSLYGPFWEHVLSYWRWHVDRPGQVLFLTYEELSADPLGQLRRLAEFIGRPFTPGEQEAGVDREIAEACAMKSMVNQEVNQSRTTEIVEMPIPNGIFFRRGVVGDWTNYLTPEMAGRIDEITKSKFEGSGLMLPKTISEISKI

SEQ ID NO: 22286 - protein, 286 aa, Zea mays subsp. mays
  peptide (1)..(286): Ceres Seq. ID no. 15218613
  misc_feature (16)..(273): Pfam Name: Pfam Description:  Sulfotransferase domain
  misc_feature (1)..(277): NCBI GI NO: 34894524 NR Description: putative steroid sulfotransferase
  misc_feature (1)..(274): NCBI GI NO: 38344441 NR Description: OSJNBa0038O10.13
  misc_feature (1)..(274): NCBI GI NO: 15230602 NR Description: sulfotransferase family [Arabidopsis thaliana]
  misc_feature (1)..(275): NCBI GI NO: 18395604 NR Description: sulfotransferase family [Arabidopsis thaliana]
  misc_feature (1)..(275): NCBI GI NO: 25288806 NR Description: probable steroid sulfotransferase
  misc_feature (1)..(274): NCBI GI NO: 9759557 NR Description: steroid sulfotransferase-like protein
  misc_feature (1)..(274): NCBI GI NO: 18415376 NR Description: sulfotransferase family [Arabidopsis thaliana]
  misc_feature (1)..(276): NCBI GI NO: 15222843 NR Description: sulfotransferase family [Arabidopsis thaliana]
  misc_feature (1)..(275): NCBI GI NO: 21593660 NR Description: putative flavonol sulfotransferase
  misc_feature (1)..(274): NCBI GI NO: 15809903 NR Description: AT5g07010/MOJ9_18 [Arabidopsis thaliana]
MVSSMVAEQHFEARGTDVLLVTMPKSGTTWIKALLYAAAHRTDDTSSSILRQLASHNSHQLVPFLEAQVYTKDQIPDLSSLPAPRLFATHIPAESLPPSVVASGCKVVYLCRDPKDCFVSLWHFMNKFTPWDIDEAHGRFCEGVSLYGPFWEHVLSYWRWHVDRPGQVLFLTYEELSADPLGQLRRLAEFIGRPFTPGEQEAGVDREIAEACAMKSMVNQEVNQSRTTEIVEMPIPNGIFFRRGVVGDWTNYLTPEMAGRIDEITKSKFEGSGLMLPKTISEISKI

SEQ ID NO: 22287 - protein, 282 aa, Zea mays subsp. mays
  peptide (1)..(282): Ceres Seq. ID no. 15218614
  misc_feature (12)..(269): Pfam Name: Pfam Description:  Sulfotransferase domain
  misc_feature (1)..(273): NCBI GI NO: 34894524 NR Description: putative steroid sulfotransferase
  misc_feature (1)..(270): NCBI GI NO: 38344441 NR Description: OSJNBa0038O10.13
  misc_feature (1)..(270): NCBI GI NO: 15230602 NR Description: sulfotransferase family [Arabidopsis thaliana]
  misc_feature (1)..(271): NCBI GI NO: 18395604 NR Description: sulfotransferase family [Arabidopsis thaliana]
  misc_feature (1)..(271): NCBI GI NO: 25288806 NR Description: probable steroid sulfotransferase
  misc_feature (1)..(270): NCBI GI NO: 9759557 NR Description: steroid sulfotransferase-like protein
  misc_feature (1)..(270): NCBI GI NO: 18415376 NR Description: sulfotransferase family [Arabidopsis thaliana]
  misc_feature (1)..(272): NCBI GI NO: 15222843 NR Description: sulfotransferase family [Arabidopsis thaliana]
  misc_feature (1)..(271): NCBI GI NO: 21593660 NR Description: putative flavonol sulfotransferase
  misc_feature (1)..(270): NCBI GI NO: 15809903 NR Description: AT5g07010/MOJ9_18 [Arabidopsis thaliana]
MVAEQHFEARGTDVLLVTMPKSGTTWIKALLYAAAHRTDDTSSSILRQLASHNSHQLVPFLEAQVYTKDQIPDLSSLPAPRLFATHIPAESLPPSVVASGCKVVYLCRDPKDCFVSLWHFMNKFTPWDIDEAHGRFCEGVSLYGPFWEHVLSYWRWHVDRPGQVLFLTYEELSADPLGQLRRLAEFIGRPFTPGEQEAGVDREIAEACAMKSMVNQEVNQSRTTEIVEMPIPNGIFFRRGVVGDWTNYLTPEMAGRIDEITKSKFEGSGLMLPKTISEISKI

SEQ ID NO: 22288 - DNA, 933 bp, Zea mays subsp. mays
  misc_feature (1)..(933): Ceres Seq. ID no. 13599557
aacaatggcagttcctccacttctcctcctcacactcctctccctcccttctcttctcatccacgccgccatctccgatgcttaccccaccattcccggaaccgctccgatcgacggaggtttctccgatgaactcaaacccatccgccgtgaggtctacggcgaaggcaaaatcttcgacatcagccaccgctacacgccggagatgccggcgtgggagtcaaaagaaggaatcggacggtttctatggctagccgcgagcatgaagaacgggtcgctcgctaacaactccgagatgaagatcccgactcacactgggacccacgtcgattcgcctggacacgtgtacgatgagtattacgacgctgggttcgatgtagactcgcttgatctccaagtcttaaacggtcctgcgttgttggttgatgttccaaggaacaagaacataactgccgaagtgatgaagtctcttaacataccaagaggagtccgtcgtgtgcttttcagaacattgaatactgacaggcgtctgatgttcaagaaggagtttgatacaagctatgtcggattcatgaaggacggcgcacaatggttggtagacaacactgacatcaaacttgttggggttgattatctatcagtagctgcatatgatgatctgattccgtcccacctagtattcctaaaaggccgagagactatactggtggagggattgaagctggatgatgtgaaggcaggagtctactctgttcattgcttacctctaagacttgttggagcagaagggtctccaattcgctgcatcctcatcagttgatttcttcctccaaaacttggagttgtctgtatgcaagttaacctttcgtatctttacttcaagatcttatgcttgacaaaaaaaaaaagtaaaataaataaggaaacttggcg

SEQ ID NO: 22289 - protein, 272 aa, Zea mays subsp. mays
  peptide (1)..(272): Ceres Seq. ID no. 13599558
  misc_feature (58)..(258): Pfam Name: Pfam Description:  Putative cyclase
  misc_feature (2)..(271): NCBI GI NO: 18418598 NR Description: expressed protein [Arabidopsis thaliana]
  misc_feature (5)..(271): NCBI GI NO: 35215089 NR Description: hypothetical protein
  misc_feature (7)..(271): NCBI GI NO: 15219416 NR Description: hypothetical protein [Arabidopsis thaliana]
  misc_feature (42)..(271): NCBI GI NO: 18418393 NR Description: expressed protein [Arabidopsis thaliana]
  misc_feature (2)..(150): NCBI GI NO: 7486023 NR Description: hypothetical protein F23E12
  misc_feature (42)..(231): NCBI GI NO: 7486287 NR Description: hypothetical protein F28A23
  misc_feature (58)..(270): NCBI GI NO: 16330650 NR Description: hypothetical protein [Synechocystis sp. PCC 6803]
  misc_feature (59)..(270): NCBI GI NO: 23016903 NR Description: hypothetical protein
  misc_feature (57)..(272): NCBI GI NO: 39998438 NR Description: cyclase, putative [Geobacter sulfurreducens PCA]
  misc_feature (58)..(270): NCBI GI NO: 23056289 NR Description: hypothetical protein [Geobacter metallireducens]
TMAVPPLLLLTLLSLPSLLIHAAISDAYPTIPGTAPIDGGFSDELKPIRREVYGEGKIFDISHRYTPEMPAWESKEGIGRFLWLAASMKNGSLANNSEMKIPTHTGTHVDSPGHVYDEYYDAGFDVDSLDLQVLNGPALLVDVPRNKNITAEVMKSLNIPRGVRRVLFRTLNTDRRLMFKKEFDTSYVGFMKDGAQWLVDNTDIKLVGVDYLSVAAYDDLIPSHLVFLKGRETILVEGLKLDDVKAGVYSVHCLPLRLVGAEGSPIRCILIS

SEQ ID NO: 22290 - protein, 271 aa, Zea mays subsp. mays
  peptide (1)..(271): Ceres Seq. ID no. 13599559
  misc_feature (57)..(257): Pfam Name: Pfam Description:  Putative cyclase
  misc_feature (1)..(270): NCBI GI NO: 18418598 NR Description: expressed protein [Arabidopsis thaliana]
  misc_feature (4)..(270): NCBI GI NO: 35215089 NR Description: hypothetical protein
  misc_feature (6)..(270): NCBI GI NO: 15219416 NR Description: hypothetical protein [Arabidopsis thaliana]
  misc_feature (41)..(270): NCBI GI NO: 18418393 NR Description: expressed protein [Arabidopsis thaliana]
  misc_feature (1)..(149): NCBI GI NO: 7486023 NR Description: hypothetical protein F23E12
  misc_feature (41)..(230): NCBI GI NO: 7486287 NR Description: hypothetical protein F28A23
  misc_feature (57)..(269): NCBI GI NO: 16330650 NR Description: hypothetical protein [Synechocystis sp. PCC 6803]
  misc_feature (58)..(269): NCBI GI NO: 23016903 NR Description: hypothetical protein
  misc_feature (56)..(271): NCBI GI NO: 39998438 NR Description: cyclase, putative [Geobacter sulfurreducens PCA]
  misc_feature (57)..(269): NCBI GI NO: 23056289 NR Description: hypothetical protein [Geobacter metallireducens]
MAVPPLLLLTLLSLPSLLIHAAISDAYPTIPGTAPIDGGFSDELKPIRREVYGEGKIFDISHRYTPEMPAWESKEGIGRFLWLAASMKNGSLANNSEMKIPTHTGTHVDSPGHVYDEYYDAGFDVDSLDLQVLNGPALLVDVPRNKNITAEVMKSLNIPRGVRRVLFRTLNTDRRLMFKKEFDTSYVGFMKDGAQWLVDNTDIKLVGVDYLSVAAYDDLIPSHLVFLKGRETILVEGLKLDDVKAGVYSVHCLPLRLVGAEGSPIRCILIS

SEQ ID NO: 22291 - protein, 204 aa, Zea mays subsp. mays
  peptide (1)..(204): Ceres Seq. ID no. 13599560
  misc_feature (1)..(190): Pfam Name: Pfam Description:  Putative cyclase
  misc_feature (1)..(203): NCBI GI NO: 18418598 NR Description: expressed protein [Arabidopsis thaliana]
  misc_feature (1)..(203): NCBI GI NO: 35215089 NR Description: hypothetical protein
  misc_feature (1)..(203): NCBI GI NO: 15219416 NR Description: hypothetical protein [Arabidopsis thaliana]
  misc_feature (1)..(203): NCBI GI NO: 18418393 NR Description: expressed protein [Arabidopsis thaliana]
  misc_feature (1)..(82): NCBI GI NO: 7486023 NR Description: hypothetical protein F23E12
  misc_feature (1)..(163): NCBI GI NO: 7486287 NR Description: hypothetical protein F28A23
  misc_feature (1)..(202): NCBI GI NO: 16330650 NR Description: hypothetical protein [Synechocystis sp. PCC 6803]
  misc_feature (1)..(202): NCBI GI NO: 23016903 NR Description: hypothetical protein
  misc_feature (1)..(204): NCBI GI NO: 39998438 NR Description: cyclase, putative [Geobacter sulfurreducens PCA]
  misc_feature (1)..(202): NCBI GI NO: 23056289 NR Description: hypothetical protein [Geobacter metallireducens]
MPAWESKEGIGRFLWLAASMKNGSLANNSEMKIPTHTGTHVDSPGHVYDEYYDAGFDVDSLDLQVLNGPALLVDVPRNKNITAEVMKSLNIPRGVRRVLFRTLNTDRRLMFKKEFDTSYVGFMKDGAQWLVDNTDIKLVGVDYLSVAAYDDLIPSHLVFLKGRETILVEGLKLDDVKAGVYSVHCLPLRLVGAEGSPIRCILIS

SEQ ID NO: 22292 - DNA, 674 bp, Zea mays subsp. mays
  misc_feature (1)..(674): Ceres Seq. ID no. 12635708
acctacgtcgataaatctacgagggagcttgaccttgagcaacagagagagagagagagatgggtttcttctcgtttcttggaagagttcttttcgcttctctcttcatcctctccgcttggcaaatgttcaatgactttggagttgatggtggtcctgcagctacagagctggctccaaagcttcatctggctaagtcacatctatcttctagattaggtgtaactttgcctagcgtagaggtaaaacaagtcgttgctgctatagttgcgttgaaaggagttggaggcttactctttgttatcggaaacatcttcggtgcttatcttctggctttctaccttgtggttgtcagtcctattctgtatgatttctacaactacggacctgaggagcgtcatttctctccattgttgactgagttcttgcagagcgttgcactctttggagcattactcttctttattggaatgaagaactcaacacccactaagaggaatctgaagaggactcctaagcccaaagctgcttagtatctcttttttttttataacttttgttcggacaaaatcgtttcttagcactttggttttctttttgttgtgtgattcttagattggctcatgatatcataaaattatcttttacttgatttgattattgggatttcttgg

SEQ ID NO: 22293 - protein, 157 aa, Zea mays subsp. mays
  peptide (1)..(157): Ceres Seq. ID no. 12635709
  misc_feature (1)..(138): Pfam Name: Pfam Description:  HR-like lesion-inducing
  misc_feature (1)..(157): NCBI GI NO: 21592798 NR Description: Nicotiana lesion-inducing like
  misc_feature (1)..(157): NCBI GI NO: 15239873 NR Description: Nicotiana lesion-inducing like
  misc_feature (1)..(157): NCBI GI NO: 15219714 NR Description: unknown protein; protein id: At1g04340
  misc_feature (1)..(155): NCBI GI NO: 27261473 NR Description: Unknown protein
  misc_feature (1)..(157): NCBI GI NO: 40287494 NR Description: putative lesion-inducing protein [Capsicum annuum]
  misc_feature (1)..(155): NCBI GI NO: 38346190 NR Description: OSJNBa0027O01.6
  misc_feature (24)..(156): NCBI GI NO: 37534824 NR Description: putative RNA-binding protein
  misc_feature (1)..(24): NCBI GI NO: 37534824 NR Description: putative RNA-binding protein
  misc_feature (1)..(156): NCBI GI NO: 15236497 NR Description: elicitor like protein; protein id: At4g14420
  misc_feature (1)..(155): NCBI GI NO: 7489144 NR Description: hypothetical protein (clone NF22) - common tobacco
MGFFSFLGRVLFASLFILSAWQMFNDFGVDGGPAATELAPKLHLAKSHLSSRLGVTLPSVEVKQVVAAIVALKGVGGLLFVIGNIFGAYLLAFYLVVVSPILYDFYNYGPEERHFSPLLTEFLQSVALFGALLFFIGMKNSTPTKRNLKRTPKPKAA

SEQ ID NO: 22294 - protein, 135 aa, Zea mays subsp. mays
  peptide (1)..(135): Ceres Seq. ID no. 12635710
  misc_feature (1)..(116): Pfam Name: Pfam Description:  HR-like lesion-inducing
  misc_feature (1)..(135): NCBI GI NO: 21592798 NR Description: Nicotiana lesion-inducing like
  misc_feature (1)..(135): NCBI GI NO: 15239873 NR Description: Nicotiana lesion-inducing like
  misc_feature (1)..(135): NCBI GI NO: 15219714 NR Description: unknown protein; protein id: At1g04340
  misc_feature (1)..(133): NCBI GI NO: 27261473 NR Description: Unknown protein
  misc_feature (1)..(135): NCBI GI NO: 40287494 NR Description: putative lesion-inducing protein [Capsicum annuum]
  misc_feature (1)..(133): NCBI GI NO: 38346190 NR Description: OSJNBa0027O01.6
  misc_feature (2)..(134): NCBI GI NO: 37534824 NR Description: putative RNA-binding protein
  misc_feature (1)..(134): NCBI GI NO: 15236497 NR Description: elicitor like protein; protein id: At4g14420
  misc_feature (1)..(133): NCBI GI NO: 7489144 NR Description: hypothetical protein (clone NF22) - common tobacco
  misc_feature (9)..(134): NCBI GI NO: 3885517 NR Description: similar to Nicotiana HR lesion-inducing ORF
MFNDFGVDGGPAATELAPKLHLAKSHLSSRLGVTLPSVEVKQVVAAIVALKGVGGLLFVIGNIFGAYLLAFYLVVVSPILYDFYNYGPEERHFSPLLTEFLQSVALFGALLFFIGMKNSTPTKRNLKRTPKPKAA

SEQ ID NO: 22295 - DNA, 814 bp, Zea mays subsp. mays
  misc_feature (1)..(814): Ceres Seq. ID no. 15227042
tttcccgagccggaggtggacgaggtaagaagaagcagccgcagccgcagcgcgaccccgcgaggaaaccctaccgccgccgcagcaggagcagccatgggtatcgacctcgtcgccggcgggaggaacaagaggaccaagcgcgtcgcgcccaagtccgacgatgtctacctcaagctcctcgtcaagctctaccgtttcctggtgaggaggaccaagagcaagttcaacgccgtcatcctcaagaggctcttcatgagcaagactaaccgcccgccgctctccatgcgccgcctctccaacttcatgaagggaaaggaggagaagaacattgctgtggttgttggtacaatcacagatgacatgcggatccaagaggtcccagcaatgaaggttaccgctctgaggttcacagagacagcgagggcaaggattgtcaatgctggtggggagtgcctcacttttgaccagcttgcactccgtgctccaactggggagaacactatcctgttgaggggacccaagaatgcccgtgaggcggtgaggcacttcggcaaagcacctggtgtgccgcacagccataccaagccctatgtgcgctccaagggtaggaagtttgagaaggctcgtggtaggaggaacagccgtggcttcaaggtttaagtcgccctttcttgttagtcgctgtttgcgtggagcggctgttgttctgtttgagcaattgacagtaattagtaaagtactttgtactgagagtagcaaaatctatcgccccagtgtttgaatgatattttgcaagattcttatcgctgcc

SEQ ID NO: 22296 - protein, 220 aa, Zea mays subsp. mays
  peptide (1)..(220): Ceres Seq. ID no. 15227043
  misc_feature (33)..(220): NCBI GI NO: 34897628 NR Description: cytoplasmic ribosomal protein L18 [Oryza sativa]
  misc_feature (33)..(220): NCBI GI NO: 34393858 NR Description: putative cytoplasmic ribosomal protein L18
  misc_feature (33)..(220): NCBI GI NO: 606970 NR Description: cytoplasmic ribosomal protein L18
  misc_feature (33)..(220): NCBI GI NO: 15230011 NR Description: 60S ribosomal protein L18 (RPL18B)
  misc_feature (33)..(220): NCBI GI NO: 15241061 NR Description: 60S ribosomal protein L18 (RPL18C)
  misc_feature (36)..(220): NCBI GI NO: 6094021 NR Description: 60S RIBOSOMAL PROTEIN L18
  misc_feature (34)..(220): NCBI GI NO: 7440855 NR Description: ribosomal protein L18
  misc_feature (33)..(196): NCBI GI NO: 28798549 NR Description: 60S ribosomal protein [Medicago sativa]
  misc_feature (33)..(219): NCBI GI NO: 4506607 NR Description: ribosomal protein L18; 60S ribosomal protein L18
  misc_feature (33)..(219): NCBI GI NO: 13592057 NR Description: ribosomal protein L18 [Rattus norvegicus]
FPEPEVDEVRRSSRSRSATPRGNPTAAAAGAAMGIDLVAGGRNKRTKRVAPKSDDVYLKLLVKLYRFLVRRTKSKFNAVILKRLFMSKTNRPPLSMRRLSNFMKGKEEKNIAVVVGTITDDMRIQEVPAMKVTALRFTETARARIVNAGGECLTFDQLALRAPTGENTILLRGPKNAREAVRHFGKAPGVPHSHTKPYVRSKGRKFEKARGRRNSRGFKV

SEQ ID NO: 22297 - protein, 188 aa, Zea mays subsp. mays
  peptide (1)..(188): Ceres Seq. ID no. 15227044
  misc_feature (1)..(188): NCBI GI NO: 34897628 NR Description: cytoplasmic ribosomal protein L18 [Oryza sativa]
  misc_feature (1)..(188): NCBI GI NO: 34393858 NR Description: putative cytoplasmic ribosomal protein L18
  misc_feature (1)..(188): NCBI GI NO: 606970 NR Description: cytoplasmic ribosomal protein L18
  misc_feature (1)..(188): NCBI GI NO: 15230011 NR Description: 60S ribosomal protein L18 (RPL18B)
  misc_feature (1)..(188): NCBI GI NO: 15241061 NR Description: 60S ribosomal protein L18 (RPL18C)
  misc_feature (4)..(188): NCBI GI NO: 6094021 NR Description: 60S RIBOSOMAL PROTEIN L18
  misc_feature (2)..(188): NCBI GI NO: 7440855 NR Description: ribosomal protein L18
  misc_feature (1)..(164): NCBI GI NO: 28798549 NR Description: 60S ribosomal protein [Medicago sativa]
  misc_feature (1)..(187): NCBI GI NO: 4506607 NR Description: ribosomal protein L18; 60S ribosomal protein L18
  misc_feature (1)..(187): NCBI GI NO: 13592057 NR Description: ribosomal protein L18 [Rattus norvegicus]
MGIDLVAGGRNKRTKRVAPKSDDVYLKLLVKLYRFLVRRTKSKFNAVILKRLFMSKTNRPPLSMRRLSNFMKGKEEKNIAVVVGTITDDMRIQEVPAMKVTALRFTETARARIVNAGGECLTFDQLALRAPTGENTILLRGPKNAREAVRHFGKAPGVPHSHTKPYVRSKGRKFEKARGRRNSRGFKV

SEQ ID NO: 22298 - protein, 135 aa, Zea mays subsp. mays
  peptide (1)..(135): Ceres Seq. ID no. 15227045
  misc_feature (1)..(135): NCBI GI NO: 34897628 NR Description: cytoplasmic ribosomal protein L18 [Oryza sativa]
  misc_feature (1)..(135): NCBI GI NO: 34393858 NR Description: putative cytoplasmic ribosomal protein L18
  misc_feature (1)..(135): NCBI GI NO: 606970 NR Description: cytoplasmic ribosomal protein L18
  misc_feature (1)..(135): NCBI GI NO: 15230011 NR Description: 60S ribosomal protein L18 (RPL18B)
  misc_feature (1)..(135): NCBI GI NO: 15241061 NR Description: 60S ribosomal protein L18 (RPL18C)
  misc_feature (1)..(135): NCBI GI NO: 6094021 NR Description: 60S RIBOSOMAL PROTEIN L18
  misc_feature (1)..(135): NCBI GI NO: 7440855 NR Description: ribosomal protein L18
  misc_feature (1)..(111): NCBI GI NO: 28798549 NR Description: 60S ribosomal protein [Medicago sativa]
  misc_feature (1)..(134): NCBI GI NO: 4506607 NR Description: ribosomal protein L18; 60S ribosomal protein L18
  misc_feature (1)..(134): NCBI GI NO: 13592057 NR Description: ribosomal protein L18 [Rattus norvegicus]
MSKTNRPPLSMRRLSNFMKGKEEKNIAVVVGTITDDMRIQEVPAMKVTALRFTETARARIVNAGGECLTFDQLALRAPTGENTILLRGPKNAREAVRHFGKAPGVPHSHTKPYVRSKGRKFEKARGRRNSRGFKV

SEQ ID NO: 22299 - DNA, 813 bp, Zea mays subsp. mays
  misc_feature (1)..(813): Ceres Seq. ID no. 12635711
accgtgccagaaccgcaatccgcgcctccccaatcgcgcgcttccatccatggcacacggtttggtcctttccttcccaaccgcgcccctccatccatggcagtcgccagcgcccttccatccatggaagcgcgcccacactcacacctccatctcccccccttctctctccctcaatcgccctgatccagatacccaagcacgcgcgtggcgaagagacgggtgtaacctccaggatgattcagggtcgatggcgtggatcgaaaatgaccgggcgccttggcgtcatccaaccagcgcggagctccatccgcaacaaattcgagtggcctcgcctccggtcccggtcagtagacccggtcgtgcagatcggcaggaacttcacccccgtcggtgagcagtcaccgacttcatctccaacgactccgacgaagacaggcggctccagagcgcgcgtcacggagatctccgtcatcaccgtgtccgacagcggggtcccatgcctcacgtttgggtccaggaatgcgtctttcctcttggaggtgccactcggcgtcgctgcctcgctccccgatgagggccacattgggggtcgtgcagttgatagcggtgtcatgatcgaggagcgcttgaatcttgtcatacacgcctgctagggcgaacctgaatcctgtcgtgtttgaagggtaccaggtgtgtggtgtccctggtgggcagctgatgaccaccatagagacggttgtccccttctcctctgtttgactgcctccacatccgcttctataaaattttagatgcatggacatctgctcc

SEQ ID NO: 22300 - protein, 217 aa, Zea mays subsp. mays
  peptide (1)..(217): Ceres Seq. ID no. 12635712
  misc_feature (150)..(210): NCBI GI NO: 29467530 NR Description: P0582D05.22
RARTAIRASPIARFHPWHTVWSFPSQPRPSIHGSRQRPSIHGSAPTLTPPSPPLLSPSIALIQIPKHARGEETGVTSRMIQGRWRGSKMTGRLGVIQPARSSIRNKFEWPRLRSRSVDPVVQIGRNFTPVGEQSPTSSPTTPTKTGGSRARVTEISVITVSDSGVPCLTFGSRNASFLLEVPLGVAASLPDEGHIGGRAVDSGVMIEERLNLVIHAC

SEQ ID NO: 22301 - protein, 139 aa, Zea mays subsp. mays
  peptide (1)..(139): Ceres Seq. ID no. 12635713
  misc_feature (72)..(132): NCBI GI NO: 29467530 NR Description: P0582D05.22
MIQGRWRGSKMTGRLGVIQPARSSIRNKFEWPRLRSRSVDPVVQIGRNFTPVGEQSPTSSPTTPTKTGGSRARVTEISVITVSDSGVPCLTFGSRNASFLLEVPLGVAASLPDEGHIGGRAVDSGVMIEERLNLVIHAC

SEQ ID NO: 22302 - protein, 131 aa, Zea mays subsp. mays
  peptide (1)..(131): Ceres Seq. ID no. 12635714
PCQNRNPRLPNRALPSMAHGLVLSFPTAPLHPWQSPAPFHPWKRAHTHTSISPPSLSLNRPDPDTQARAWRRDGCNLQDDSGSMAWIENDRAPWRHPTSAELHPQQIRVASPPVPVSRPGRADRQELHPRR

SEQ ID NO: 22303 - DNA, 912 bp, Zea mays subsp. mays
  misc_feature (1)..(912): Ceres Seq. ID no. 12635930
aactgaaagataagaagaagatgaagctgaaagtgtatgcagatcgtatgtcacagccgtctcgtgctgtaatcatattctgcaaggttaatggaatcgaattcgatgaggttctgattatcttggcgaagcgtcagcaattatcccctgaattcaaagagattaacccattggggaaagttccaactattgttgacggcagacttaagctcttcgagagtcacgccatcttgatttatctttcctctgcattcccgagtgtagctgatcattggtacccgaatgatctttccaagagagccaagattcactctgtcttggattggcatcactccaatttacgccctggtgcagctggatatgtaatgaatagtgttctagctccatttcttggcggttctctggactcgaaagcagctgctgaagctgagcagatactaaccaagtctctgtccactctagagactttttggcttaagggcaatgctaaattcttgctcggaagcaaccaaccatccatagctgatctcagccttgtatgcgaacttatgcaactccaggttttggatgagaaagatcgtcttagattgttttctccttacaagaaagttgaggaatggattgagaatacgagaaaggccacgcagcctcactttgatgtggttcataaaaccctttacggagctaaagacaaatttgagaaacagcggaagatggggacaacaaccgtatctaaacctggttttcaatctaagatgtgagaacaaatttgtatcggaggctgtttgtgaaaaccccggtttaggggatcactgtaataactcggttcaacatttacactgtaatcggaaccaaggaatgtatttgtaatcacttatcagggctgtttcaaaataaacatataagtgaggc

SEQ ID NO: 22304 - protein, 252 aa, Zea mays subsp. mays
  peptide (1)..(252): Ceres Seq. ID no. 12635931
  misc_feature (7)..(252): NCBI GI NO: 15237583 NR Description: glutathione transferase, putative
  misc_feature (7)..(252): NCBI GI NO: 30693769 NR Description: glutathione transferase, putative
  misc_feature (7)..(252): NCBI GI NO: 25453559 NR Description: glutathione transferase (EC 2.5.1.18) GST 10b
  misc_feature (7)..(252): NCBI GI NO: 15237595 NR Description: glutathione transferase, putative
  misc_feature (7)..(252): NCBI GI NO: 10177768 NR Description: glutathione transferase [Arabidopsis thaliana]
  misc_feature (7)..(236): NCBI GI NO: 11385461 NR Description: glutathione S-transferase GST 23 [Glycine max]
  misc_feature (7)..(239): NCBI GI NO: 7595788 NR Description: glutathione S-transferase [Euphorbia esula]
  misc_feature (9)..(237): NCBI GI NO: 15430709 NR Description: putative glutathione S-transferase OsGSTT1
  misc_feature (6)..(244): NCBI GI NO: 33416577 NR Description: Unknown (protein for MGC:66350) [Danio rerio]
  misc_feature (7)..(184): NCBI GI NO: 2495110 NR Description: GLUTATHIONE S-TRANSFERASE THETA 2
LKDKKKMKLKVYADRMSQPSRAVIIFCKVNGIEFDEVLIILAKRQQLSPEFKEINPLGKVPTIVDGRLKLFESHAILIYLSSAFPSVADHWYPNDLSKRAKIHSVLDWHHSNLRPGAAGYVMNSVLAPFLGGSLDSKAAAEAEQILTKSLSTLETFWLKGNAKFLLGSNQPSIADLSLVCELMQLQVLDEKDRLRLFSPYKKVEEWIENTRKATQPHFDVVHKTLYGAKDKFEKQRKMGTTTVSKPGFQSKM

SEQ ID NO: 22305 - protein, 246 aa, Zea mays subsp. mays
  peptide (1)..(246): Ceres Seq. ID no. 12635932
  misc_feature (1)..(246): NCBI GI NO: 15237583 NR Description: glutathione transferase, putative
  misc_feature (1)..(246): NCBI GI NO: 30693769 NR Description: glutathione transferase, putative
  misc_feature (1)..(246): NCBI GI NO: 25453559 NR Description: glutathione transferase (EC 2.5.1.18) GST 10b
  misc_feature (1)..(246): NCBI GI NO: 15237595 NR Description: glutathione transferase, putative
  misc_feature (1)..(246): NCBI GI NO: 10177768 NR Description: glutathione transferase [Arabidopsis thaliana]
  misc_feature (1)..(230): NCBI GI NO: 11385461 NR Description: glutathione S-transferase GST 23 [Glycine max]
  misc_feature (1)..(233): NCBI GI NO: 7595788 NR Description: glutathione S-transferase [Euphorbia esula]
  misc_feature (3)..(231): NCBI GI NO: 15430709 NR Description: putative glutathione S-transferase OsGSTT1
  misc_feature (1)..(238): NCBI GI NO: 33416577 NR Description: Unknown (protein for MGC:66350) [Danio rerio]
  misc_feature (1)..(178): NCBI GI NO: 2495110 NR Description: GLUTATHIONE S-TRANSFERASE THETA 2
MKLKVYADRMSQPSRAVIIFCKVNGIEFDEVLIILAKRQQLSPEFKEINPLGKVPTIVDGRLKLFESHAILIYLSSAFPSVADHWYPNDLSKRAKIHSVLDWHHSNLRPGAAGYVMNSVLAPFLGGSLDSKAAAEAEQILTKSLSTLETFWLKGNAKFLLGSNQPSIADLSLVCELMQLQVLDEKDRLRLFSPYKKVEEWIENTRKATQPHFDVVHKTLYGAKDKFEKQRKMGTTTVSKPGFQSKM

SEQ ID NO: 22306 - protein, 237 aa, Zea mays subsp. mays
  peptide (1)..(237): Ceres Seq. ID no. 12635933
  misc_feature (1)..(237): NCBI GI NO: 15237583 NR Description: glutathione transferase, putative
  misc_feature (1)..(237): NCBI GI NO: 30693769 NR Description: glutathione transferase, putative
  misc_feature (1)..(237): NCBI GI NO: 25453559 NR Description: glutathione transferase (EC 2.5.1.18) GST 10b
  misc_feature (1)..(237): NCBI GI NO: 15237595 NR Description: glutathione transferase, putative
  misc_feature (1)..(237): NCBI GI NO: 10177768 NR Description: glutathione transferase [Arabidopsis thaliana]
  misc_feature (1)..(221): NCBI GI NO: 11385461 NR Description: glutathione S-transferase GST 23 [Glycine max]
  misc_feature (1)..(224): NCBI GI NO: 7595788 NR Description: glutathione S-transferase [Euphorbia esula]
  misc_feature (1)..(222): NCBI GI NO: 15430709 NR Description: putative glutathione S-transferase OsGSTT1
  misc_feature (1)..(229): NCBI GI NO: 33416577 NR Description: Unknown (protein for MGC:66350) [Danio rerio]
  misc_feature (1)..(169): NCBI GI NO: 2495110 NR Description: GLUTATHIONE S-TRANSFERASE THETA 2
MSQPSRAVIIFCKVNGIEFDEVLIILAKRQQLSPEFKEINPLGKVPTIVDGRLKLFESHAILIYLSSAFPSVADHWYPNDLSKRAKIHSVLDWHHSNLRPGAAGYVMNSVLAPFLGGSLDSKAAAEAEQILTKSLSTLETFWLKGNAKFLLGSNQPSIADLSLVCELMQLQVLDEKDRLRLFSPYKKVEEWIENTRKATQPHFDVVHKTLYGAKDKFEKQRKMGTTTVSKPGFQSKM

SEQ ID NO: 22307 - DNA, 622 bp, Zea mays subsp. mays
  misc_feature (1)..(622): Ceres Seq. ID no. 13623037
attttttcccactttcctttgagaaaacagagcaaaatggcactgagaatgtgggcttcctctacagcaaacgctcttaagctctcttcttctacctccaaatctcatctccttcctgcgttctccatctccagatgcttctcctcagtgttggaaggactcaagtatgcaacttcacacgagtgggtgaaacatgatggctcggtggctaccattggcatcactgaccatgcccaggaccatctaggagaagttgtgtttgtggagctgccagaagagaaaagctcagtgagcaaagaaaagaactttggagctgtggagagtgtgaaggcaacaagtgagattctatctccaatctctggtgaagtcattgaggttaacacaaagctaaccgattcacctggtttgatcaactcaagcccctatgaagatggttggatgataaaggtgaaaccaagcaaccctgcagagttggaaaccttgatgggttcaaaggaatacaccaagttctgcgaagaggaagatgctgctcactagagggtttcatctgtctatgtttcgtaccctatctctctcagctttgtatctctgtaatactaatttggttgaaagatgatcattc

SEQ ID NO: 22308 - protein, 178 aa, Zea mays subsp. mays
  peptide (1)..(178): Ceres Seq. ID no. 13623038
  misc_feature (54)..(174): Pfam Name: Pfam Description:  Glycine cleavage H-protein
  misc_feature (13)..(178): NCBI GI NO: 15223217 NR Description: glycine cleavage system H protein precursor -related
  misc_feature (13)..(178): NCBI GI NO: 15226973 NR Description: glycine decarboxylase complex H-protein
  misc_feature (13)..(178): NCBI GI NO: 121080 NR Description: Glycine cleavage system H protein
  misc_feature (13)..(178): NCBI GI NO: 2147453 NR Description: glycine cleavage system protein H precursor
  misc_feature (13)..(178): NCBI GI NO: 2499417 NR Description: Glycine cleavage system H protein
  misc_feature (13)..(178): NCBI GI NO: 3688309 NR Description: H-Protein precursor [Flaveria pringlei]
  misc_feature (13)..(178): NCBI GI NO: 2887286 NR Description: H protein [Flaveria anomala]
  misc_feature (13)..(178): NCBI GI NO: 1346118 NR Description: Glycine cleavage system H protein
  misc_feature (14)..(178): NCBI GI NO: 2119600 NR Description: glycine cleavage system protein H precursor
  misc_feature (13)..(176): NCBI GI NO: 3334201 NR Description: Glycine cleavage system H protein
IFSHFPLRKQSKMALRMWASSTANALKLSSSTSKSHLLPAFSISRCFSSVLEGLKYATSHEWVKHDGSVATIGITDHAQDHLGEVVFVELPEEKSSVSKEKNFGAVESVKATSEILSPISGEVIEVNTKLTDSPGLINSSPYEDGWMIKVKPSNPAELETLMGSKEYTKFCEEEDAAH

SEQ ID NO: 22309 - protein, 166 aa, Zea mays subsp. mays
  peptide (1)..(166): Ceres Seq. ID no. 13623039
  misc_feature (42)..(162): Pfam Name: Pfam Description:  Glycine cleavage H-protein
  misc_feature (1)..(166): NCBI GI NO: 15223217 NR Description: glycine cleavage system H protein precursor -related
  misc_feature (1)..(166): NCBI GI NO: 15226973 NR Description: glycine decarboxylase complex H-protein
  misc_feature (1)..(166): NCBI GI NO: 121080 NR Description: Glycine cleavage system H protein
  misc_feature (1)..(166): NCBI GI NO: 2147453 NR Description: glycine cleavage system protein H precursor
  misc_feature (1)..(166): NCBI GI NO: 2499417 NR Description: Glycine cleavage system H protein
  misc_feature (1)..(166): NCBI GI NO: 3688309 NR Description: H-Protein precursor [Flaveria pringlei]
  misc_feature (1)..(166): NCBI GI NO: 2887286 NR Description: H protein [Flaveria anomala]
  misc_feature (1)..(166): NCBI GI NO: 1346118 NR Description: Glycine cleavage system H protein
  misc_feature (2)..(166): NCBI GI NO: 2119600 NR Description: glycine cleavage system protein H precursor
  misc_feature (1)..(164): NCBI GI NO: 3334201 NR Description: Glycine cleavage system H protein
MALRMWASSTANALKLSSSTSKSHLLPAFSISRCFSSVLEGLKYATSHEWVKHDGSVATIGITDHAQDHLGEVVFVELPEEKSSVSKEKNFGAVESVKATSEILSPISGEVIEVNTKLTDSPGLINSSPYEDGWMIKVKPSNPAELETLMGSKEYTKFCEEEDAAH

SEQ ID NO: 22310 - protein, 162 aa, Zea mays subsp. mays
  peptide (1)..(162): Ceres Seq. ID no. 13623040
  misc_feature (38)..(158): Pfam Name: Pfam Description:  Glycine cleavage H-protein
  misc_feature (1)..(162): NCBI GI NO: 15223217 NR Description: glycine cleavage system H protein precursor -related
  misc_feature (1)..(162): NCBI GI NO: 15226973 NR Description: glycine decarboxylase complex H-protein
  misc_feature (1)..(162): NCBI GI NO: 121080 NR Description: Glycine cleavage system H protein
  misc_feature (1)..(162): NCBI GI NO: 2147453 NR Description: glycine cleavage system protein H precursor
  misc_feature (1)..(162): NCBI GI NO: 2499417 NR Description: Glycine cleavage system H protein
  misc_feature (1)..(162): NCBI GI NO: 3688309 NR Description: H-Protein precursor [Flaveria pringlei]
  misc_feature (1)..(162): NCBI GI NO: 2887286 NR Description: H protein [Flaveria anomala]
  misc_feature (1)..(162): NCBI GI NO: 1346118 NR Description: Glycine cleavage system H protein
  misc_feature (1)..(162): NCBI GI NO: 2119600 NR Description: glycine cleavage system protein H precursor
  misc_feature (1)..(160): NCBI GI NO: 3334201 NR Description: Glycine cleavage system H protein
MWASSTANALKLSSSTSKSHLLPAFSISRCFSSVLEGLKYATSHEWVKHDGSVATIGITDHAQDHLGEVVFVELPEEKSSVSKEKNFGAVESVKATSEILSPISGEVIEVNTKLTDSPGLINSSPYEDGWMIKVKPSNPAELETLMGSKEYTKFCEEEDAAH

SEQ ID NO: 22311 - DNA, 735 bp, Zea mays subsp. mays
  misc_feature (1)..(735): Ceres Seq. ID no. 13599383
ctaacccaacgaccagacgcaacacgacggcgacggccatggcttcgccggacctcgccgccggcgacggcagctacgactttcaccttcgctctctctccgcggcctcacgggactccgctgcggcctccgaccccgcctctgaccccaacctcctccaatctgttaggagggtgtgcgagatgtgccgaacggcgaaggaagcgaaggacgagatggtggcgcgggcgttccccgtgatgggcaagctatttcagcgatgcgccgccgctcccacgcaggccgttgcctccaccggcgtgctgctcctcaccattttgcaattcttcttggattttggggaggctgttttgcatgatgctgatggtagcttgaaaaccttcttccgctcttgcttaagtagggagtttgcagatcctattgttgcagagcgcacagttgaattccttgtaacaaacaagacaaagatccttagctcctttcccaatttgattccacaggaggctgtaggccaaaaaggtagagaaaaaacagaaaaaaccatatttgtatgataagctactcaaccaatcttttgtaagattctttatagaatatctctcttctcttcctattttccatattcgacttaatcttgttaacacatgccaatgcttgtgtatccttgtttatacacagttctatccattgttgataaagcttatcgataccgtcgacctcgagggggcgtccggt

SEQ ID NO: 22312 - protein, 183 aa, Zea mays subsp. mays
  peptide (1)..(183): Ceres Seq. ID no. 13599384
  misc_feature (13)..(166): NCBI GI NO: 39545844 NR Description: OSJNBb0060E08.15
  misc_feature (22)..(166): NCBI GI NO: 20465414 NR Description: unknown protein [Arabidopsis thaliana]
  misc_feature (22)..(166): NCBI GI NO: 22331098 NR Description: expressed protein [Arabidopsis thaliana]
NPTTRRNTTATAMASPDLAAGDGSYDFHLRSLSAASRDSAAASDPASDPNLLQSVRRVCEMCRTAKEAKDEMVARAFPVMGKLFQRCAAAPTQAVASTGVLLLTILQFFLDFGEAVLHDADGSLKTFFRSCLSREFADPIVAERTVEFLVTNKTKILSSFPNLIPQEAVGQKGREKTEKTIFV

SEQ ID NO: 22313 - protein, 171 aa, Zea mays subsp. mays
  peptide (1)..(171): Ceres Seq. ID no. 13599385
  misc_feature (1)..(154): NCBI GI NO: 39545844 NR Description: OSJNBb0060E08.15
  misc_feature (10)..(154): NCBI GI NO: 20465414 NR Description: unknown protein [Arabidopsis thaliana]
  misc_feature (10)..(154): NCBI GI NO: 22331098 NR Description: expressed protein [Arabidopsis thaliana]
MASPDLAAGDGSYDFHLRSLSAASRDSAAASDPASDPNLLQSVRRVCEMCRTAKEAKDEMVARAFPVMGKLFQRCAAAPTQAVASTGVLLLTILQFFLDFGEAVLHDADGSLKTFFRSCLSREFADPIVAERTVEFLVTNKTKILSSFPNLIPQEAVGQKGREKTEKTIFV

SEQ ID NO: 22314 - protein, 123 aa, Zea mays subsp. mays
  peptide (1)..(123): Ceres Seq. ID no. 13599386
  misc_feature (1)..(106): NCBI GI NO: 39545844 NR Description: OSJNBb0060E08.15
  misc_feature (1)..(106): NCBI GI NO: 20465414 NR Description: unknown protein [Arabidopsis thaliana]
  misc_feature (1)..(106): NCBI GI NO: 22331098 NR Description: expressed protein [Arabidopsis thaliana]
MCRTAKEAKDEMVARAFPVMGKLFQRCAAAPTQAVASTGVLLLTILQFFLDFGEAVLHDADGSLKTFFRSCLSREFADPIVAERTVEFLVTNKTKILSSFPNLIPQEAVGQKGREKTEKTIFV

SEQ ID NO: 22315 - DNA, 910 bp, Zea mays subsp. mays
  misc_feature (1)..(910): Ceres Seq. ID no. 12635723
aaaacacacctctccttcacatatttcttctttgtagtaatcagaaaggcagagagagagagagagatcagaggaaacaatggcgtctaactcgctcatgagctgcggcatcgccgccgtctacccttcccttctttcttcttcaaagtctaaattcgtctcagccggagtttctctccccaacgttggtaacgttggccacatcagaatggctgctcactggatgcccggcgagccacgtccagcttacctcgacggctctgcccctggtgactttggatttgacccgcttggacttggagaggttccagagaatcttgagagatacaaagaatcagagctcatccattgcagatgggctatgctcgctgttccagggattttggtaccagaggctttgggatacggaaactgggtcaaggcccaagaatgggcagcagtgcctggaggacaagccacttacttgggcaacccagtcccatggggtactttgcccacaatcttggctatagagttcttagctattgcctttgtggagcaccagaggagcatggagaaagaccctgagaaaaagaagtaccctggaggtgcatttgaccctcttggatactccaaggacccgaagaagtttgaggagttgaaagtcaaggagatcaagaacgggcgtcttgcgttgttggcgtttgtaggattctgtgtgcagcaatcggcctacccaggcacaggaccattggagaacctggctactcacttggcggatccatggcacaaaaacattggcgatattgttatccctttgaactagtgactttgtaaagaaaagatagtaatgtgtcctatgagctttatgtgtatcaaaactctctgtaatgaatgacagattgtctgaaacctttgttttgtcttggtg

SEQ ID NO: 22316 - protein, 241 aa, Zea mays subsp. mays
  peptide (1)..(241): Ceres Seq. ID no. 12635724
  misc_feature (53)..(210): Pfam Name: Pfam Description:  Chlorophyll A-B binding protein
  misc_feature (1)..(241): NCBI GI NO: 15233115 NR Description: light-harvesting chlorophyll a/b binding protein
  misc_feature (1)..(241): NCBI GI NO: 13265501 NR Description: AT3g54890 [Arabidopsis thaliana]
  misc_feature (1)..(238): NCBI GI NO: 625547 NR Description: chlorophyll a/b-binding protein type I
  misc_feature (1)..(239): NCBI GI NO: 82078 NR Description: chlorophyll a/b-binding protein type I precursor
  misc_feature (1)..(239): NCBI GI NO: 82079 NR Description: chlorophyll a/b-binding protein type I precursor
  misc_feature (1)..(239): NCBI GI NO: 115764 NR Description: Chlorophyll A-B binding protein 6A
  misc_feature (1)..(151): NCBI GI NO: 30694146 NR Description: light-harvesting chlorophyll a/b binding protein
  misc_feature (186)..(241): NCBI GI NO: 30694146 NR Description: light-harvesting chlorophyll a/b binding protein
  misc_feature (1)..(241): NCBI GI NO: 6685157 NR Description: chlorophyll a/b binding protein precursor
  misc_feature (1)..(239): NCBI GI NO: 3789954 NR Description: chlorophyll a/b-binding protein precursor
MASNSLMSCGIAAVYPSLLSSSKSKFVSAGVSLPNVGNVGHIRMAAHWMPGEPRPAYLDGSAPGDFGFDPLGLGEVPENLERYKESELIHCRWAMLAVPGILVPEALGYGNWVKAQEWAAVPGGQATYLGNPVPWGTLPTILAIEFLAIAFVEHQRSMEKDPEKKKYPGGAFDPLGYSKDPKKFEELKVKEIKNGRLALLAFVGFCVQQSAYPGTGPLENLATHLADPWHKNIGDIVIPLN

SEQ ID NO: 22317 - protein, 235 aa, Zea mays subsp. mays
  peptide (1)..(235): Ceres Seq. ID no. 12635725
  misc_feature (47)..(204): Pfam Name: Pfam Description:  Chlorophyll A-B binding protein
  misc_feature (1)..(235): NCBI GI NO: 15233115 NR Description: light-harvesting chlorophyll a/b binding protein
  misc_feature (1)..(235): NCBI GI NO: 13265501 NR Description: AT3g54890 [Arabidopsis thaliana]
  misc_feature (1)..(232): NCBI GI NO: 625547 NR Description: chlorophyll a/b-binding protein type I
  misc_feature (1)..(233): NCBI GI NO: 82078 NR Description: chlorophyll a/b-binding protein type I precursor
  misc_feature (1)..(233): NCBI GI NO: 82079 NR Description: chlorophyll a/b-binding protein type I precursor
  misc_feature (1)..(233): NCBI GI NO: 115764 NR Description: Chlorophyll A-B binding protein 6A
  misc_feature (1)..(145): NCBI GI NO: 30694146 NR Description: light-harvesting chlorophyll a/b binding protein
  misc_feature (180)..(235): NCBI GI NO: 30694146 NR Description: light-harvesting chlorophyll a/b binding protein
  misc_feature (1)..(235): NCBI GI NO: 6685157 NR Description: chlorophyll a/b binding protein precursor
  misc_feature (1)..(233): NCBI GI NO: 3789954 NR Description: chlorophyll a/b-binding protein precursor
MSCGIAAVYPSLLSSSKSKFVSAGVSLPNVGNVGHIRMAAHWMPGEPRPAYLDGSAPGDFGFDPLGLGEVPENLERYKESELIHCRWAMLAVPGILVPEALGYGNWVKAQEWAAVPGGQATYLGNPVPWGTLPTILAIEFLAIAFVEHQRSMEKDPEKKKYPGGAFDPLGYSKDPKKFEELKVKEIKNGRLALLAFVGFCVQQSAYPGTGPLENLATHLADPWHKNIGDIVIPLN

SEQ ID NO: 22318 - protein, 198 aa, Zea mays subsp. mays
  peptide (1)..(198): Ceres Seq. ID no. 12635726
  misc_feature (10)..(167): Pfam Name: Pfam Description:  Chlorophyll A-B binding protein
  misc_feature (1)..(198): NCBI GI NO: 15233115 NR Description: light-harvesting chlorophyll a/b binding protein
  misc_feature (1)..(198): NCBI GI NO: 13265501 NR Description: AT3g54890 [Arabidopsis thaliana]
  misc_feature (1)..(195): NCBI GI NO: 625547 NR Description: chlorophyll a/b-binding protein type I
  misc_feature (1)..(196): NCBI GI NO: 82078 NR Description: chlorophyll a/b-binding protein type I precursor
  misc_feature (1)..(196): NCBI GI NO: 82079 NR Description: chlorophyll a/b-binding protein type I precursor
  misc_feature (1)..(196): NCBI GI NO: 115764 NR Description: Chlorophyll A-B binding protein 6A
  misc_feature (1)..(108): NCBI GI NO: 30694146 NR Description: light-harvesting chlorophyll a/b binding protein
  misc_feature (143)..(198): NCBI GI NO: 30694146 NR Description: light-harvesting chlorophyll a/b binding protein
  misc_feature (1)..(198): NCBI GI NO: 6685157 NR Description: chlorophyll a/b binding protein precursor
  misc_feature (1)..(196): NCBI GI NO: 3789954 NR Description: chlorophyll a/b-binding protein precursor
MAAHWMPGEPRPAYLDGSAPGDFGFDPLGLGEVPENLERYKESELIHCRWAMLAVPGILVPEALGYGNWVKAQEWAAVPGGQATYLGNPVPWGTLPTILAIEFLAIAFVEHQRSMEKDPEKKKYPGGAFDPLGYSKDPKKFEELKVKEIKNGRLALLAFVGFCVQQSAYPGTGPLENLATHLADPWHKNIGDIVIPLN

SEQ ID NO: 22319 - DNA, 704 bp, Zea mays subsp. mays
  misc_feature (1)..(704): Ceres Seq. ID no. 13600599
cccccctccagttcscarmwaaatactaatatctaaatctcttccttcttccaatcaagacctgactactcttgaagtttctgaaacaacagggcattttaatggcggccatgaactcgagtgttctcacctgcagctacgctatctctggtgctggctcagcagaactgaaccagaaagtgggtttggtcaattcatcagttggttttggtcaaaagaaacaaacgcttccagtgatcaaagcagctcaaagagttggtggtgatgatgttaatggaagaagatccgcaatggtgttcttagctgctacactcttctcctctgctgctgtatctgcttccgctaatgctagcgtcttcgatgaatacctcgagaagagcaaagccaacaaagagctgaatgataagaagagattggcaacaagtggagcaaactttgcgagagcgtttactgtccagttcggaagctgcaagttccctgagaatttcactggctgccaagatcttgccaagcaaaagaaagttccatttatctcagaagatttggcgttggaatgtgaaggcaaagacaagttcaagtgtggttccaatgttttctggaaatggtgatcatcttttgtttctgttttaatccattcttgtataaactcaacaatgtatcaatccatctctctgttcatcaaagtctcatatccatttgaattt

SEQ ID NO: 22320 - protein, 168 aa, Zea mays subsp. mays
  peptide (1)..(168): Ceres Seq. ID no. 15218981
  misc_feature (34)..(168): Pfam Name: PSAN or PSI-N Pfam Description: Photosystem I reaction centre subunit N
  misc_feature (1)..(168): NCBI GI NO: 15237593 NR Description: photosystem I reaction center subunit PSI-Nprecursor
  misc_feature (1)..(168): NCBI GI NO: 28629385 NR Description: photosystem I-N subunit [Phaseolus vulgaris]
  misc_feature (48)..(168): NCBI GI NO: 400879 NR Description: Photosystem I reaction centre subunit N
  misc_feature (78)..(168): NCBI GI NO: 3914466 NR Description: Photosystem I reaction centre subunit N
  misc_feature (71)..(162): NCBI GI NO: 11134150 NR Description: Photosystem I reaction centre subunit N
  misc_feature (59)..(162): NCBI GI NO: 12744797 NR Description: PsaN precursor [Chlamydomonas reinhardtii]
  misc_feature (85)..(133): NCBI GI NO: 485082 NR Description: photosystem I 9K protein - rice
MAAMNSSVLTCSYAISGAGSAELNQKVGLVNSSVGFGQKKQTLPVIKAAQRVGGDDVNGRRSAMVFLAATLFSSAAVSASANASVFDEYLEKSKANKELNDKKRLATSGANFARAFTVQFGSCKFPENFTGCQDLAKQKKVPFISEDLALECEGKDKFKCGSNVFWKW

SEQ ID NO: 22321 - protein, 165 aa, Zea mays subsp. mays
  peptide (1)..(165): Ceres Seq. ID no. 15218982
  misc_feature (31)..(165): Pfam Name: PSAN or PSI-N Pfam Description: Photosystem I reaction centre subunit N
  misc_feature (1)..(165): NCBI GI NO: 15237593 NR Description: photosystem I reaction center subunit PSI-Nprecursor
  misc_feature (1)..(165): NCBI GI NO: 28629385 NR Description: photosystem I-N subunit [Phaseolus vulgaris]
  misc_feature (45)..(165): NCBI GI NO: 400879 NR Description: Photosystem I reaction centre subunit N
  misc_feature (75)..(165): NCBI GI NO: 3914466 NR Description: Photosystem I reaction centre subunit N
  misc_feature (68)..(159): NCBI GI NO: 11134150 NR Description: Photosystem I reaction centre subunit N
  misc_feature (56)..(159): NCBI GI NO: 12744797 NR Description: PsaN precursor [Chlamydomonas reinhardtii]
  misc_feature (82)..(130): NCBI GI NO: 485082 NR Description: photosystem I 9K protein - rice
MNSSVLTCSYAISGAGSAELNQKVGLVNSSVGFGQKKQTLPVIKAAQRVGGDDVNGRRSAMVFLAATLFSSAAVSASANASVFDEYLEKSKANKELNDKKRLATSGANFARAFTVQFGSCKFPENFTGCQDLAKQKKVPFISEDLALECEGKDKFKCGSNVFWKW

SEQ ID NO: 22322 - protein, 105 aa, Zea mays subsp. mays; identical to SEQ ID NO: 11
  peptide (1)..(105): Ceres Seq. ID no. 15218983
  misc_feature (1)..(105): Pfam Name: PSAN or PSI-N Pfam Description: Photosystem I reaction centre subunit N
  misc_feature (1)..(105): NCBI GI NO: 15237593 NR Description: photosystem I reaction center subunit PSI-Nprecursor
  misc_feature (1)..(105): NCBI GI NO: 28629385 NR Description: photosystem I-N subunit [Phaseolus vulgaris]
  misc_feature (1)..(105): NCBI GI NO: 400879 NR Description: Photosystem I reaction centre subunit N
  misc_feature (15)..(105): NCBI GI NO: 3914466 NR Description: Photosystem I reaction centre subunit N
  misc_feature (8)..(99): NCBI GI NO: 11134150 NR Description: Photosystem I reaction centre subunit N
  misc_feature (1)..(99): NCBI GI NO: 12744797 NR Description: PsaN precursor [Chlamydomonas reinhardtii]
  misc_feature (22)..(70): NCBI GI NO: 485082 NR Description: photosystem I 9K protein - rice

SEQ ID NO: 22323 - DNA, 624 bp, Zea mays subsp. mays
  misc_feature (1)..(624): Ceres Seq. ID no. 13599565
atattctctcattccgatctctatctgcctaatctctatccattttgtttcatttcttcttcccaatcacaaaaatgggtcgccgtagctcaggaggaagatctgcacctcgtcctcgccctgctgctgcacgtgcccccgctcctcaacatgtaaaccgtgcacctcctccagctccagctcaggcgaccagtggtggtggcatgttctcaggcattggttccaccatagctcagggtatggcttttggaaccggaagtgctgttgcacatagggctgttgattccgtcatgggcccacgtaccattcagcatgaaactgttgaggctgcctctgcatctgccgctcctgtcggaagcagcatgttctcgagctcctgtgacattcatgctaaggctttccaagattgcatcagcagctatggaagcgacattagcaagtgtcagttctacatggacatgttgtctgagtgcaagaagaactccggttccactattggtgcctgaatcaagcttgtttcatttcttatctagctttgtctaaacattatgcagctgttatatgctgagggtctggatatcaaataaacaacatttsaacatttcrggtaaaaaaaaaaaaaaa

SEQ ID NO: 22324 - protein, 143 aa, Zea mays subsp. mays
  peptide (1)..(143): Ceres Seq. ID no. 15218597
  misc_feature (1)..(143): NCBI GI NO: 15237688 NR Description: expressed protein [Arabidopsis thaliana]
  misc_feature (1)..(143): NCBI GI NO: 15242455 NR Description: expressed protein [Arabidopsis thaliana]
  misc_feature (1)..(139): NCBI GI NO: 13174237 NR Description: unknown protein [Oryza sativa]
  misc_feature (1)..(136): NCBI GI NO: 23509031 NR Description: hypothetical protein, conserved
  misc_feature (15)..(134): NCBI GI NO: 32417732 NR Description: hypothetical protein [Neurospora crassa]
MGRRSSGGRSAPRPRPAAARAPAPQHVNRAPPPAPAQATSGGGMFSGIGSTIAQGMAFGTGSAVAHRAVDSVMGPRTIQHETVEAASASAAPVGSSMFSSSCDIHAKAFQDCISSYGSDISKCQFYMDMLSECKKNSGSTIGA

SEQ ID NO: 22325 - protein, 100 aa, Zea mays subsp. mays
  peptide (1)..(100): Ceres Seq. ID no. 15218598
  misc_feature (1)..(100): NCBI GI NO: 15237688 NR Description: expressed protein [Arabidopsis thaliana]
  misc_feature (1)..(100): NCBI GI NO: 15242455 NR Description: expressed protein [Arabidopsis thaliana]
  misc_feature (1)..(96): NCBI GI NO: 13174237 NR Description: unknown protein [Oryza sativa]
  misc_feature (1)..(93): NCBI GI NO: 23509031 NR Description: hypothetical protein, conserved
  misc_feature (1)..(91): NCBI GI NO: 32417732 NR Description: hypothetical protein [Neurospora crassa]
MFSGIGSTIAQGMAFGTGSAVAHRAVDSVMGPRTIQHETVEAASASAAPVGSSMFSSSCDIHAKAFQDCISSYGSDISKCQFYMDMLSECKKNSGSTIGA

SEQ ID NO: 22326 - protein, 88 aa, Zea mays subsp. mays
  peptide (1)..(88): Ceres Seq. ID no. 15218599
  misc_feature (1)..(88): NCBI GI NO: 15237688 NR Description: expressed protein [Arabidopsis thaliana]
  misc_feature (1)..(88): NCBI GI NO: 15242455 NR Description: expressed protein [Arabidopsis thaliana]
  misc_feature (1)..(84): NCBI GI NO: 13174237 NR Description: unknown protein [Oryza sativa]
  misc_feature (1)..(81): NCBI GI NO: 23509031 NR Description: hypothetical protein, conserved
  misc_feature (1)..(79): NCBI GI NO: 32417732 NR Description: hypothetical protein [Neurospora crassa]
MAFGTGSAVAHRAVDSVMGPRTIQHETVEAASASAAPVGSSMFSSSCDIHAKAFQDCISSYGSDISKCQFYMDMLSECKKNSGSTIGA

SEQ ID NO: 22327 - DNA, 1371 bp, Zea mays subsp. mays
  misc_feature (1)..(1371): Ceres Seq. ID no. 13623041
acaccacagcacaccaaccgcgcgccactgatccatcaactccactccactagctacgtaccttccgaccgagcagccagagagatggagaggatggtgatgaggctggtgaggaacaagcagtccctccgccagctgcaaggggccgccgccggcggcctagcgtcgtcgtcctccgcctcctcgaccgccggcgccgccgcgtcctccttctccaccctgcagcagcagcaggaggaccaccccggagtgctcaacatcagggacaccgccgcccacctcatcggccggacgccgctggtgtacctgaacaaggtgacggaggggtgcggcgcccgcgtcgccgccaagctcgagttcctccagccttccttcagcgtcaaggacaggccagcaatctccatgatcgaagacgcggagaagaaggggctgataaccccaggcaagacgacgctgatcgagcccacatccgggaacatgggcatcggcctggcgttcatggcagcactcaaagggtacgagctcgtgctgacgatgccatcatacaccagcctcgagaggagggtggtcatgaaggccttcggtgcgcagctcgtgctcactgacccggccaaggggatgggaggcaccgtcaggaaagcaacccagctctatgagaaccatcccagcgccttcatgctccagcagttcgagaatcccgccaacgtccaggtgcactacgagactaccggtccggagatatgggaggacacgctcgggcaggtcgacatcttcgtcatgggaatcggcagcggcggcaccgtcaccggcgtcggcaagtaccttaaggagaagaaccccaacgcaaagatctatggagttgaacctgccgaagcaaatgtcctgaacggtggcaagccagggcctcacctcatcactggaaatggagttggatttaagccagatattttggatatggatataatggagaaggttctagaggtgaaaagcgaggacgccgttacgatggcgcaacagttggcactgcaggagggcctgctggtggggatatcatcaggagccaacacagtggctgcgatcgaactcgcaaagaggccagaaaacaaagggaagctcatcgtgactgttcatccgagcgcgggagagcgatacttatcgtcggcgctattcgagggtctgaggaaggaggctgaggcaatgcagccagtgccagtggactaagttggagctatacaatgcatgtagaataaattcactgcaaccatgttgcaagtgctagtcatacctcatttgtgattcttcagtttgttcatcatgtggaagtcgtgtaaacaacagttcaaatggttgaaaaaaggactttacctctct

SEQ ID NO: 22328 - protein, 406 aa, Zea mays subsp. mays
  peptide (1)..(406): Ceres Seq. ID no. 13623042
  misc_feature (91)..(379): Pfam Name: Pfam Description:  Pyridoxal-phosphate dependent enzyme
  misc_feature (29)..(406): NCBI GI NO: 10241630 NR Description: cysteine synthase
  misc_feature (29)..(406): NCBI GI NO: 38346461 NR Description: OSJNBa0019G23.9
  misc_feature (86)..(406): NCBI GI NO: 1071913 NR Description: cysteine synthase (EC 4
  misc_feature (70)..(406): NCBI GI NO: 30840956 NR Description: beta-cyanoalanine synthase [Betula pendula]
  misc_feature (69)..(406): NCBI GI NO: 11559260 NR Description: beta-cyanoalanine synthase [Solanum tuberosum]
  misc_feature (62)..(406): NCBI GI NO: 15233111 NR Description: cysteine synthase
  misc_feature (86)..(406): NCBI GI NO: 11995005 NR Description: beta-cyanoalanine synthase like protein
  misc_feature (85)..(402): NCBI GI NO: 12081919 NR Description: plastidic cysteine synthase 1 [Solanum tuberosum]
  misc_feature (39)..(402): NCBI GI NO: 303902 NR Description: cysteine synthase [Spinacia oleracea]
  misc_feature (39)..(402): NCBI GI NO: 12644209 NR Description: CYSTEINE SYNTHASE, CHLOROPLAST PRECURSOR
TPQHTNRAPLIHQLHSTSYVPSDRAAREMERMVMRLVRNKQSLRQLQGAAAGGLASSSSASSTAGAAASSFSTLQQQQEDHPGVLNIRDTAAHLIGRTPLVYLNKVTEGCGARVAAKLEFLQPSFSVKDRPAISMIEDAEKKGLITPGKTTLIEPTSGNMGIGLAFMAALKGYELVLTMPSYTSLERRVVMKAFGAQLVLTDPAKGMGGTVRKATQLYENHPSAFMLQQFENPANVQVHYETTGPEIWEDTLGQVDIFVMGIGSGGTVTGVGKYLKEKNPNAKIYGVEPAEANVLNGGKPGPHLITGNGVGFKPDILDMDIMEKVLEVKSEDAVTMAQQLALQEGLLVGISSGANTVAAIELAKRPENKGKLIVTVHPSAGERYLSSALFEGLRKEAEAMQPVPVD

SEQ ID NO: 22329 - protein, 378 aa, Zea mays subsp. mays; identical to SEQ ID NO: 15588
  peptide (1)..(378): Ceres Seq. ID no. 13623043
  misc_feature (63)..(351): Pfam Name: Pfam Description:  Pyridoxal-phosphate dependent enzyme
  misc_feature (1)..(378): NCBI GI NO: 10241630 NR Description: cysteine synthase
  misc_feature (1)..(378): NCBI GI NO: 38346461 NR Description: OSJNBa0019G23.9
  misc_feature (58)..(378): NCBI GI NO: 1071913 NR Description: cysteine synthase (EC 4
  misc_feature (42)..(378): NCBI GI NO: 30840956 NR Description: beta-cyanoalanine synthase [Betula pendula]
  misc_feature (41)..(378): NCBI GI NO: 11559260 NR Description: beta-cyanoalanine synthase [Solanum tuberosum]
  misc_feature (34)..(378): NCBI GI NO: 15233111 NR Description: cysteine synthase
  misc_feature (58)..(378): NCBI GI NO: 11995005 NR Description: beta-cyanoalanine synthase like protein
  misc_feature (57)..(374): NCBI GI NO: 12081919 NR Description: plastidic cysteine synthase 1 [Solanum tuberosum]
  misc_feature (11)..(374): NCBI GI NO: 303902 NR Description: cysteine synthase [Spinacia oleracea]
  misc_feature (11)..(374): NCBI GI NO: 12644209 NR Description: CYSTEINE SYNTHASE, CHLOROPLAST PRECURSOR

SEQ ID NO: 22330 - protein, 375 aa, Zea mays subsp. mays; identical to SEQ ID NO: 15589
  peptide (1)..(375): Ceres Seq. ID no. 13623044
  misc_feature (60)..(348): Pfam Name: Pfam Description:  Pyridoxal-phosphate dependent enzyme
  misc_feature (1)..(375): NCBI GI NO: 10241630 NR Description: cysteine synthase
  misc_feature (1)..(375): NCBI GI NO: 38346461 NR Description: OSJNBa0019G23.9
  misc_feature (55)..(375): NCBI GI NO: 1071913 NR Description: cysteine synthase (EC 4
  misc_feature (39)..(375): NCBI GI NO: 30840956 NR Description: beta-cyanoalanine synthase [Betula pendula]
  misc_feature (38)..(375): NCBI GI NO: 11559260 NR Description: beta-cyanoalanine synthase [Solanum tuberosum]
  misc_feature (31)..(375): NCBI GI NO: 15233111 NR Description: cysteine synthase
  misc_feature (55)..(375): NCBI GI NO: 11995005 NR Description: beta-cyanoalanine synthase like protein
  misc_feature (54)..(371): NCBI GI NO: 12081919 NR Description: plastidic cysteine synthase 1 [Solanum tuberosum]
  misc_feature (8)..(371): NCBI GI NO: 303902 NR Description: cysteine synthase [Spinacia oleracea]
  misc_feature (8)..(371): NCBI GI NO: 12644209 NR Description: CYSTEINE SYNTHASE, CHLOROPLAST PRECURSOR

SEQ ID NO: 22331 - DNA, 785 bp, Zea mays subsp. mays
  misc_feature (1)..(785): Ceres Seq. ID no. 13623047
gctagatcactgcccccggcagaccacctgacccggccgctcgagatggccgccagaaggcacgccgggagcagctccggtcccacttcggccaacctaagcatgaagctgctggtggaggtggacaggcgcggcacgcccaggcgcgtggtgtacgccgaggccggcaaggacgtcgtcgacttcctcctcaccttcctcaccttgccgatcggcacggtcgtcaagctgctcaggaggaactccatgcccatggtaggctgcgtcggcaacctgtacggcagcgtcgaggagctccccgacgacttcatctgccacagggacgccagggccgccaaggacaccctgctcaggcccgccggcggcaggcttcccctgctcacgaacgcggggtcgtcgtcgtccagcaccggcggctttgtgagggcgggcgtgacctacgaggtcatggacgacctcgagattgctcccaggtctaacgtcgatttcatcaccaacctcaacagatatggtatcagggacatcggctgtctccagaggaagactgtccgagttggcgacaccgagggtctccagatactgagggcgtcactcaagtcgaagacggtcctcaccgacgtcttccttcggacgaacactccgagtccgagtccgagggccttaactgcagggtgaagtgtccttgccgtgtcatccttgtggtgcgtgcatgtgtttctttggtcatatcgttcgtgttggtcactggttcacggctcacatactatgaataaaggcaaggaatt

SEQ ID NO: 22332 - protein, 224 aa, Zea mays subsp. mays
  peptide (1)..(224): Ceres Seq. ID no. 13623048
  misc_feature (34)..(123): Pfam Name: DUF674 Pfam Description: Protein of unknown function
  misc_feature (24)..(136): NCBI GI NO: 34895918 NR Description: P0030H07.25
  misc_feature (120)..(209): NCBI GI NO: 34895918 NR Description: P0030H07.25
  misc_feature (29)..(122): NCBI GI NO: 34895922 NR Description: P0030H07.27
  misc_feature (139)..(209): NCBI GI NO: 34895922 NR Description: P0030H07.27
  misc_feature (29)..(136): NCBI GI NO: 34895912 NR Description: P0030H07.21
  misc_feature (130)..(189): NCBI GI NO: 34895912 NR Description: P0030H07.21
  misc_feature (30)..(126): NCBI GI NO: 34895930 NR Description: P0030H07.32
  misc_feature (139)..(222): NCBI GI NO: 34895930 NR Description: P0030H07.32
  misc_feature (16)..(127): NCBI GI NO: 32490477 NR Description: hypothetical protein
  misc_feature (120)..(208): NCBI GI NO: 32490477 NR Description: hypothetical protein
ARSLPPADHLTRPLEMAARRHAGSSSGPTSANLSMKLLVEVDRRGTPRRVVYAEAGKDVVDFLLTFLTLPIGTVVKLLRRNSMPMVGCVGNLYGSVEELPDDFICHRDARAAKDTLLRPAGGRLPLLTNAGSSSSSTGGFVRAGVTYEVMDDLEIAPRSNVDFITNLNRYGIRDIGCLQRKTVRVGDTEGLQILRASLKSKTVLTDVFLRTNTPSPSPRALTAG

SEQ ID NO: 22333 - protein, 209 aa, Zea mays subsp. mays
  peptide (1)..(209): Ceres Seq. ID no. 13623049
  misc_feature (19)..(108): Pfam Name: DUF674 Pfam Description: Protein of unknown function
  misc_feature (9)..(121): NCBI GI NO: 34895918 NR Description: P0030H07.25
  misc_feature (105)..(194): NCBI GI NO: 34895918 NR Description: P0030H07.25
  misc_feature (14)..(107): NCBI GI NO: 34895922 NR Description: P0030H07.27
  misc_feature (124)..(194): NCBI GI NO: 34895922 NR Description: P0030H07.27
  misc_feature (14)..(121): NCBI GI NO: 34895912 NR Description: P0030H07.21
  misc_feature (115)..(174): NCBI GI NO: 34895912 NR Description: P0030H07.21
  misc_feature (15)..(111): NCBI GI NO: 34895930 NR Description: P0030H07.32
  misc_feature (124)..(207): NCBI GI NO: 34895930 NR Description: P0030H07.32
  misc_feature (1)..(112): NCBI GI NO: 32490477 NR Description: hypothetical protein
  misc_feature (105)..(193): NCBI GI NO: 32490477 NR Description: hypothetical protein
MAARRHAGSSSGPTSANLSMKLLVEVDRRGTPRRVVYAEAGKDVVDFLLTFLTLPIGTVVKLLRRNSMPMVGCVGNLYGSVEELPDDFICHRDARAAKDTLLRPAGGRLPLLTNAGSSSSSTGGFVRAGVTYEVMDDLEIAPRSNVDFITNLNRYGIRDIGCLQRKTVRVGDTEGLQILRASLKSKTVLTDVFLRTNTPSPSPRALTAG

SEQ ID NO: 22334 - protein, 190 aa, Zea mays subsp. mays
  peptide (1)..(190): Ceres Seq. ID no. 13623050
  misc_feature (1)..(89): Pfam Name: DUF674 Pfam Description: Protein of unknown function
  misc_feature (1)..(102): NCBI GI NO: 34895918 NR Description: P0030H07.25
  misc_feature (86)..(175): NCBI GI NO: 34895918 NR Description: P0030H07.25
  misc_feature (1)..(88): NCBI GI NO: 34895922 NR Description: P0030H07.27
  misc_feature (105)..(175): NCBI GI NO: 34895922 NR Description: P0030H07.27
  misc_feature (1)..(102): NCBI GI NO: 34895912 NR Description: P0030H07.21
  misc_feature (96)..(155): NCBI GI NO: 34895912 NR Description: P0030H07.21
  misc_feature (1)..(92): NCBI GI NO: 34895930 NR Description: P0030H07.32
  misc_feature (105)..(188): NCBI GI NO: 34895930 NR Description: P0030H07.32
  misc_feature (1)..(93): NCBI GI NO: 32490477 NR Description: hypothetical protein
  misc_feature (86)..(174): NCBI GI NO: 32490477 NR Description: hypothetical protein
MKLLVEVDRRGTPRRVVYAEAGKDVVDFLLTFLTLPIGTVVKLLRRNSMPMVGCVGNLYGSVEELPDDFICHRDARAAKDTLLRPAGGRLPLLTNAGSSSSSTGGFVRAGVTYEVMDDLEIAPRSNVDFITNLNRYGIRDIGCLQRKTVRVGDTEGLQILRASLKSKTVLTDVFLRTNTPSPSPRALTAG

SEQ ID NO: 22335 - DNA, 1326 bp, Zea mays subsp. mays
  misc_feature (1)..(1326): Ceres Seq. ID no. 13587054
agtataatcatggccggcggcgtgagctaggctttccctcctataaataccggccgcccggcattcctccaccatccagcaaacaagctctcaagccactatctatctagctagctactagctagataacacacttgactcgatcgatcatcagcaacgtaaacccatagatcgatcatggcggcgcgcgccattgtcgtcctggtctcgctcatccttgcggtggtcgccggcggcgcgtcggcgcagctgtcgtcgggcttctactcccgctcgtgcccgggcatgctcaaagccgtgcgctcggcgctgcggccggcgatcgccagggagcggcgcgtgggcgcctccatcgtccgcctcttcttccacgactgcttcgtccagggctgcgacgcctcgctgctgctggacgacgccccgggcctgagcggcgagaagaacgccaagcccaacaagaactccgtcagggggttcgacgtcatcgacgccatcaagacggccgtcgagaaggagtgtcccggcgtcgtctcctgtgccgacatcctcgccatcgccgccgaggagagcgtcgtcttgctgggtggcccgagttgggaggtgaagatgggacggagggactcgacgacggcgagcttcaacggcgccgagaacaacatcccaccaccgacatcggggctcgcaaaccttacgtcgctcttcgccgcgcaggggctctcccagaaagacatggtcgccctctcaggagcccacacgatcggccaagcacgctgcacattcttccgggaccacatctacaacgacacaaacatcgactccggcttcgccaggagccgccagtcaggctgccctcgtaccgccggctccggcgacaacaacctggcgccactggacctgcagaccccgaccaccttcgagaacgactactacaagaatctcgtccagaagaggggcatcctgcactcggaccaggagctcttcaatggcggcgccgctgacgcgctggtccggcagtacatcggcagccagagcaccttcttcaaggacttcgtggtggggatggtcaagatgggggacatcacgccgctgacgggatccaacggacagatcaggaagaactgcaggaggatcaactaagaaaagatcctccactttctgcgcagacagttgtgaaatccctagaaatgcagcacaatccgtagcaatccaggatgtgtttggtcgcgcccatgcttgcaagcaagcttgtggtttcctctcgttcgactctgtttatgcaattgtgaaatcaatgtacgttgtgcctggtggattaataaaaggtcg

SEQ ID NO: 22336 - protein, 319 aa, Zea mays subsp. mays
  peptide (1)..(319): Ceres Seq. ID no. 15220810
  misc_feature (41)..(280): Pfam Name: Pfam Description:  Peroxidase
  misc_feature (1)..(319): NCBI GI NO: 5381253 NR Description: peroxidase [Nicotiana tabacum]
  misc_feature (10)..(319): NCBI GI NO: 28400798 NR Description: peroxidase [Asparagus officinalis]
  misc_feature (10)..(319): NCBI GI NO: 28400794 NR Description: peroxidase [Asparagus officinalis]
  misc_feature (19)..(319): NCBI GI NO: 28400796 NR Description: peroxidase [Asparagus officinalis]
  misc_feature (1)..(319): NCBI GI NO: 39777536 NR Description: peroxidase precursor [Quercus suber]
  misc_feature (2)..(319): NCBI GI NO: 39777532 NR Description: peroxidase precursor [Quercus suber]
  misc_feature (1)..(319): NCBI GI NO: 19698446 NR Description: gaiacol peroxidase [Gossypium hirsutum]
  misc_feature (3)..(319): NCBI GI NO: 5453379 NR Description: bacterial-induced peroxidase precursor
  misc_feature (1)..(319): NCBI GI NO: 15239075 NR Description: peroxidase, putative [Arabidopsis thaliana]
  misc_feature (12)..(319): NCBI GI NO: 7433047 NR Description: probable peroxidase (EC 1
MAARAIVVLVSLILAVVAGGASAQLSSGFYSRSCPGMLKAVRSALRPAIARERRVGASIVRLFFHDCFVQGCDASLLLDDAPGLSGEKNAKPNKNSVRGFDVIDAIKTAVEKECPGVVSCADILAIAAEESVVLLGGPSWEVKMGRRDSTTASFNGAENNIPPPTSGLANLTSLFAAQGLSQKDMVALSGAHTIGQARCTFFRDHIYNDTNIDSGFARSRQSGCPRTAGSGDNNLAPLDLQTPTTFENDYYKNLVQKRGILHSDQELFNGGAADALVRQYIGSQSTFFKDFVVGMVKMGDITPLTGSNGQIRKNCRRIN

SEQ ID NO: 22337 - protein, 283 aa, Zea mays subsp. mays
  peptide (1)..(283): Ceres Seq. ID no. 15220811
  misc_feature (5)..(244): Pfam Name: Pfam Description:  Peroxidase
  misc_feature (1)..(283): NCBI GI NO: 5381253 NR Description: peroxidase [Nicotiana tabacum]
  misc_feature (1)..(283): NCBI GI NO: 28400798 NR Description: peroxidase [Asparagus officinalis]
  misc_feature (1)..(283): NCBI GI NO: 28400794 NR Description: peroxidase [Asparagus officinalis]
  misc_feature (1)..(283): NCBI GI NO: 28400796 NR Description: peroxidase [Asparagus officinalis]
  misc_feature (1)..(283): NCBI GI NO: 39777536 NR Description: peroxidase precursor [Quercus suber]
  misc_feature (1)..(283): NCBI GI NO: 39777532 NR Description: peroxidase precursor [Quercus suber]
  misc_feature (1)..(283): NCBI GI NO: 19698446 NR Description: gaiacol peroxidase [Gossypium hirsutum]
  misc_feature (1)..(283): NCBI GI NO: 5453379 NR Description: bacterial-induced peroxidase precursor
  misc_feature (1)..(283): NCBI GI NO: 15239075 NR Description: peroxidase, putative [Arabidopsis thaliana]
  misc_feature (1)..(283): NCBI GI NO: 7433047 NR Description: probable peroxidase (EC 1
MLKAVRSALRPAIARERRVGASIVRLFFHDCFVQGCDASLLLDDAPGLSGEKNAKPNKNSVRGFDVIDAIKTAVEKECPGVVSCADILAIAAEESVVLLGGPSWEVKMGRRDSTTASFNGAENNIPPPTSGLANLTSLFAAQGLSQKDMVALSGAHTIGQARCTFFRDHIYNDTNIDSGFARSRQSGCPRTAGSGDNNLAPLDLQTPTTFENDYYKNLVQKRGILHSDQELFNGGAADALVRQYIGSQSTFFKDFVVGMVKMGDITPLTGSNGQIRKNCRRIN

SEQ ID NO: 22338 - protein, 176 aa, Zea mays subsp. mays
  peptide (1)..(176): Ceres Seq. ID no. 15220812
  misc_feature (1)..(137): Pfam Name: Pfam Description:  Peroxidase
  misc_feature (1)..(176): NCBI GI NO: 5381253 NR Description: peroxidase [Nicotiana tabacum]
  misc_feature (1)..(176): NCBI GI NO: 28400798 NR Description: peroxidase [Asparagus officinalis]
  misc_feature (1)..(176): NCBI GI NO: 28400794 NR Description: peroxidase [Asparagus officinalis]
  misc_feature (1)..(176): NCBI GI NO: 28400796 NR Description: peroxidase [Asparagus officinalis]
  misc_feature (1)..(176): NCBI GI NO: 39777536 NR Description: peroxidase precursor [Quercus suber]
  misc_feature (1)..(176): NCBI GI NO: 39777532 NR Description: peroxidase precursor [Quercus suber]
  misc_feature (1)..(176): NCBI GI NO: 19698446 NR Description: gaiacol peroxidase [Gossypium hirsutum]
  misc_feature (1)..(176): NCBI GI NO: 5453379 NR Description: bacterial-induced peroxidase precursor
  misc_feature (1)..(176): NCBI GI NO: 15239075 NR Description: peroxidase, putative [Arabidopsis thaliana]
  misc_feature (1)..(176): NCBI GI NO: 7433047 NR Description: probable peroxidase (EC 1
MGRRDSTTASFNGAENNIPPPTSGLANLTSLFAAQGLSQKDMVALSGAHTIGQARCTFFRDHIYNDTNIDSGFARSRQSGCPRTAGSGDNNLAPLDLQTPTTFENDYYKNLVQKRGILHSDQELFNGGAADALVRQYIGSQSTFFKDFVVGMVKMGDITPLTGSNGQIRKNCRRIN

SEQ ID NO: 22339 - DNA, 685 bp, Zea mays subsp. mays
  misc_feature (1)..(685): Ceres Seq. ID no. 12590595
aataattcttttctgctgcgccgggcaggccaggggtgatgctgctttatcctctctacgcgtccatgcgcgccatcgagagcccttcttccctggacgaccagcagtggctcacctactgggtcctgtactcgctgatcaccctcttcgagctctcaagctggaaagtcctgcagtggtttcccctgtggccgtacatgaagctgctcttctgctgctggctggtgcttcccgtcttcaacggcgcggcctacatctacgaggcgcacgtccggcgctacttcaagacgggcacctacgtgagccccagctacggcgagcgccagcgccgggtgctgcagatgatgagcctcgacgcgcgcaagtccgtcgagcgcttcatcgacacgcacgggcccgacgcgctcgacaggatcatcggagccgctgaagaggaagccaagagggagaaacctgaattgttccgggtggaaaccgaagcaagtctcccatcggttgggtagtcacttgtgcagaaatcgtatcgtatgcgtgtgtgtgtggttgatcattacgtcgggcttgcccagcagttggagaagagatgcccggtgcccatgagagcatgcatgcatatatggcttgaaagaagccgcgaaatttggtgtacttgttaatgaaaatttggcttggacctgtgaaagcc

SEQ ID NO: 22340 - protein, 154 aa, Zea mays subsp. mays
  peptide (1)..(154): Ceres Seq. ID no. 12590596
  misc_feature (10)..(82): Pfam Name: Pfam Description:  TB2/DP1, HVA22 family
  misc_feature (10)..(136): NCBI GI NO: 34910810 NR Description: P0042A10.34
  misc_feature (1)..(146): NCBI GI NO: 15221266 NR Description: AtHVA22a; protein id: At1g74520
  misc_feature (1)..(127): NCBI GI NO: 15222421 NR Description: AtHVA22c; protein id: At1g69700
  misc_feature (1)..(81): NCBI GI NO: 4884934 NR Description: AtHVA22b [Arabidopsis thaliana]
  misc_feature (1)..(81): NCBI GI NO: 15241840 NR Description: AtHVA22b-like protein; protein id: At5g62490
  misc_feature (1)..(90): NCBI GI NO: 18423191 NR Description: putative protein; protein id: At5g50720
  misc_feature (1)..(90): NCBI GI NO: 8777395 NR Description: gene_id:MFB16
  misc_feature (1)..(83): NCBI GI NO: 1076715 NR Description: abscisic acid-induced protein HVA22 - barley
  misc_feature (1)..(83): NCBI GI NO: 33342176 NR Description: hypothetical protein [Triticum aestivum]
  misc_feature (1)..(83): NCBI GI NO: 18416458 NR Description: abscisic acid-induced - like protein
MLLYPLYASMRAIESPSSLDDQQWLTYWVLYSLITLFELSSWKVLQWFPLWPYMKLLFCCWLVLPVFNGAAYIYEAHVRRYFKTGTYVSPSYGERQRRVLQMMSLDARKSVERFIDTHGPDALDRIIGAAEEEAKREKPELFRVETEASLPSVG

SEQ ID NO: 22341 - protein, 145 aa, Zea mays subsp. mays
  peptide (1)..(145): Ceres Seq. ID no. 12590597
  misc_feature (1)..(73): Pfam Name: Pfam Description:  TB2/DP1, HVA22 family
  misc_feature (1)..(127): NCBI GI NO: 34910810 NR Description: P0042A10.34
  misc_feature (1)..(137): NCBI GI NO: 15221266 NR Description: AtHVA22a; protein id: At1g74520
  misc_feature (1)..(118): NCBI GI NO: 15222421 NR Description: AtHVA22c; protein id: At1g69700
  misc_feature (1)..(72): NCBI GI NO: 4884934 NR Description: AtHVA22b [Arabidopsis thaliana]
  misc_feature (1)..(72): NCBI GI NO: 15241840 NR Description: AtHVA22b-like protein; protein id: At5g62490
  misc_feature (1)..(81): NCBI GI NO: 18423191 NR Description: putative protein; protein id: At5g50720
  misc_feature (1)..(81): NCBI GI NO: 8777395 NR Description: gene_id:MFB16
  misc_feature (1)..(74): NCBI GI NO: 1076715 NR Description: abscisic acid-induced protein HVA22 - barley
  misc_feature (1)..(74): NCBI GI NO: 33342176 NR Description: hypothetical protein [Triticum aestivum]
  misc_feature (1)..(74): NCBI GI NO: 18416458 NR Description: abscisic acid-induced - like protein
MRAIESPSSLDDQQWLTYWVLYSLITLFELSSWKVLQWFPLWPYMKLLFCCWLVLPVFNGAAYIYEAHVRRYFKTGTYVSPSYGERQRRVLQMMSLDARKSVERFIDTHGPDALDRIIGAAEEEAKREKPELFRVETEASLPSVG

SEQ ID NO: 22342 - protein, 142 aa, Zea mays subsp. mays
  peptide (1)..(142): Ceres Seq. ID no. 12590598
IILFCCAGQARGDAALSSLRVHARHREPFFPGRPAVAHLLGPVLADHPLRALKLESPAVVSPVAVHEAALLLLAGASRLQRRGLHLRGARPALLQDGHLREPQLRRAPAPGAADDEPRRAQVRRALHRHARARRARQDHRSR

SEQ ID NO: 22343 - DNA, 784 bp, Zea mays subsp. mays
  misc_feature (1)..(784): Ceres Seq. ID no. 12635820
aacaaaatcttctctcattgattccttcgtcaagcctcaatcactttcatcactcttctctctctttctcaaaccaacagcgcgaagagatgaagcatctgatccgccgcctctcccgcgtcgccgactccgcaaactacagcctcctccgttccgattcgcagcgacctagccgccgtccaccggcgcctcgccgctcgaagaagcacacatcctccgttcccgagggtcacgtgcctgtctacgtgggagacgagatggagcggttcgtggtgagcgcggagctgctaaaccacccggttttcatcggtttgttgaaccgatcgactcaagagtacggttacgaacagaaaggagttctgcagatcccctgccacgtgttggtattcgagcgaatcatggagtcgcttcggctcggattagcggtgccgagcgacctacaagatgtaatcggcgacgagacgatttgacacgcgagggaatctttggtagttagagagatatggatctggttctttttttttcggctcagatgcagtacgacgtcgtgttgatggtgtacatagctatgtatatttttcatttttctggatgatagatgatgaagaagattgaagttcaaatggggaaggggaaagattagcgatatttttagggcttttctttttgaatttttttttcttttttcaaaatttgtttgttgcaaatttcctgtttttcgccggtttaagaaccggtttgagactcttgtgaaggtttaaatggaaattggttcggtttggtt

SEQ ID NO: 22344 - protein, 155 aa, Zea mays subsp. mays
  peptide (1)..(155): Ceres Seq. ID no. 12635821
  misc_feature (33)..(137): Pfam Name: Pfam Description:  Auxin responsive protein
  misc_feature (30)..(155): NCBI GI NO: 15230601 NR Description: unknown protein; protein id: At3g12830.1
  misc_feature (30)..(141): NCBI GI NO: 15223462 NR Description: unknown protein; protein id: At1g56150.1
  misc_feature (30)..(155): NCBI GI NO: 15219275 NR Description: putative auxin-induced protein
  misc_feature (30)..(150): NCBI GI NO: 15219296 NR Description: hypothetical protein; protein id: At1g79130.1
  misc_feature (57)..(145): NCBI GI NO: 15228626 NR Description: putative protein; protein id: At3g61900.1
  misc_feature (64)..(135): NCBI GI NO: 15236199 NR Description: putative protein; protein id: At4g34800.1
  misc_feature (70)..(139): NCBI GI NO: 38345606 NR Description: OSJNBa0093O08.8
  misc_feature (55)..(137): NCBI GI NO: 15238919 NR Description: putative protein; protein id: At5g10990.1
  misc_feature (71)..(137): NCBI GI NO: 9369367 NR Description: F10A5.20 [Arabidopsis thaliana]
  misc_feature (71)..(137): NCBI GI NO: 18410889 NR Description: expressed protein; protein id: At1g75590
QNLLSLIPSSSLNHFHHSSLSFSNQQREEMKHLIRRLSRVADSANYSLLRSDSQRPSRRPPAPRRSKKHTSSVPEGHVPVYVGDEMERFVVSAELLNHPVFIGLLNRSTQEYGYEQKGVLQIPCHVLVFERIMESLRLGLAVPSDLQDVIGDETI

SEQ ID NO: 22345 - protein, 126 aa, Zea mays subsp. mays
  peptide (1)..(126): Ceres Seq. ID no. 12635822
  misc_feature (4)..(108): Pfam Name: Pfam Description:  Auxin responsive protein
  misc_feature (1)..(126): NCBI GI NO: 15230601 NR Description: unknown protein; protein id: At3g12830.1
  misc_feature (1)..(112): NCBI GI NO: 15223462 NR Description: unknown protein; protein id: At1g56150.1
  misc_feature (1)..(126): NCBI GI NO: 15219275 NR Description: putative auxin-induced protein
  misc_feature (1)..(121): NCBI GI NO: 15219296 NR Description: hypothetical protein; protein id: At1g79130.1
  misc_feature (28)..(116): NCBI GI NO: 15228626 NR Description: putative protein; protein id: At3g61900.1
  misc_feature (35)..(106): NCBI GI NO: 15236199 NR Description: putative protein; protein id: At4g34800.1
  misc_feature (41)..(110): NCBI GI NO: 38345606 NR Description: OSJNBa0093O08.8
  misc_feature (26)..(108): NCBI GI NO: 15238919 NR Description: putative protein; protein id: At5g10990.1
  misc_feature (42)..(108): NCBI GI NO: 9369367 NR Description: F10A5.20 [Arabidopsis thaliana]
  misc_feature (42)..(108): NCBI GI NO: 18410889 NR Description: expressed protein; protein id: At1g75590
MKHLIRRLSRVADSANYSLLRSDSQRPSRRPPAPRRSKKHTSSVPEGHVPVYVGDEMERFVVSAELLNHPVFIGLLNRSTQEYGYEQKGVLQIPCHVLVFERIMESLRLGLAVPSDLQDVIGDETI

SEQ ID NO: 22346 - DNA, 843 bp, Zea mays subsp. mays
  misc_feature (1)..(843): Ceres Seq. ID no. 13587260
aaatagcctcccagccctctctgcctcccgaaaaaacaaacaaacagagatcgcgcttccaatctagctctgcggctgtcgcgaggctccacatttccctccccgcagcgccgaagtaagcatgtgtcccggcggcaggtacgcgggccttgacctccccgccggcgccggcgcgggggacctgcggccggcgttcgacgtgctggacgcggaccacgacggccgcatcagccgcgacgacctcaagaccttctacgccaacgcgggcgccaccgacgagcgcttcgacgacgacgacatcgaggccatgatcaccgccgccgacgccgacctcgacggcttcgtgcagtaccacgagttcgagggcctccttggccgcgcagctaaggcgggggcggacagcggctgccgctcggcgatggaggacgccttccggctaatggaccgcgacggggacggcaaggtcgggttcgaggacctcaaggcctacctcgggtgggccgggatgccggtcgccgacgacgagatccgcgccatgataagtatggctggtgacggcgacagcggcgtggggctcgaggcgctcgccagaatactcgccgtggactttgatgccatcgtctgaagaatctaaaataatcctactgtaaagcactagacttgattttttgggactttttccccctaaaatttggttggtggggagagcaggctggcgtgagattgattgttgtgagtggttctcgttaaccgtgagttttgaatgtatcgtactgttacccataaaaaatcgaaaatctttgagaaacatgaaagatactatgcgtgtatccttggaaactc

SEQ ID NO: 22347 - protein, 167 aa, Zea mays subsp. mays; identical to SEQ ID NO: 11841
  peptide (1)..(167): Ceres Seq. ID no. 13587261
  misc_feature (20)..(46): Pfam Name: Pfam Description:  EF hand
  misc_feature (1)..(162): NCBI GI NO: 5702231 NR Description: hypersensitive reaction associated Ca2+-binding
  misc_feature (1)..(158): NCBI GI NO: 15239904 NR Description: sodium-inducible calcium-binding protein
  misc_feature (1)..(156): NCBI GI NO: 2352828 NR Description: NaCl-inducible Ca2+-binding protein
  misc_feature (20)..(159): NCBI GI NO: 4959637 NR Description: calmodulin mutant SYNCAM37 [synthetic construct]
  misc_feature (19)..(159): NCBI GI NO: 34909152 NR Description: putative calmodulin
  misc_feature (20)..(159): NCBI GI NO: 1168797 NR Description: CALTRACTIN (CENTRIN)
  misc_feature (20)..(159): NCBI GI NO: 4959162 NR Description: calmodulin mutant SYNCAM57A [synthetic construct]
  misc_feature (20)..(159): NCBI GI NO: 4959626 NR Description: calmodulin mutant SYNCAM14 [synthetic construct]
  misc_feature (20)..(159): NCBI GI NO: 7441481 NR Description: probable calmodulin - rice
  misc_feature (20)..(159): NCBI GI NO: 115516 NR Description: CALMODULIN

SEQ ID NO: 22348 - protein, 105 aa, Zea mays subsp. mays; identical to SEQ ID NO: 11842
  peptide (1)..(105): Ceres Seq. ID no. 13587262
  misc_feature (1)..(100): NCBI GI NO: 5702231 NR Description: hypersensitive reaction associated Ca2+-binding
  misc_feature (1)..(96): NCBI GI NO: 15239904 NR Description: sodium-inducible calcium-binding protein
  misc_feature (1)..(94): NCBI GI NO: 2352828 NR Description: NaCl-inducible Ca2+-binding protein
  misc_feature (1)..(97): NCBI GI NO: 4959637 NR Description: calmodulin mutant SYNCAM37 [synthetic construct]
  misc_feature (1)..(97): NCBI GI NO: 34909152 NR Description: putative calmodulin
  misc_feature (1)..(97): NCBI GI NO: 1168797 NR Description: CALTRACTIN (CENTRIN)
  misc_feature (1)..(97): NCBI GI NO: 4959162 NR Description: calmodulin mutant SYNCAM57A [synthetic construct]
  misc_feature (1)..(97): NCBI GI NO: 4959626 NR Description: calmodulin mutant SYNCAM14 [synthetic construct]
  misc_feature (1)..(97): NCBI GI NO: 7441481 NR Description: probable calmodulin - rice
  misc_feature (1)..(97): NCBI GI NO: 115516 NR Description: CALMODULIN

SEQ ID NO: 22349 - DNA, 976 bp, Zea mays subsp. mays
  misc_feature (1)..(976): Ceres Seq. ID no. 13599397
atctttcattcgtgcctgaagcagcagccattgcccattgctaacgagagtggagtggtagagcagttcgagtttgcctttctctcttgcttgattggttgatcggtgactcgatccatcgtcggaggtacatatagttagcgaggaattctccggccggccaccggcgacgacgaccgcaagtgatccgtgaggatggtgaacacgacggcggctatggtgagcggcggcaagggcggcgtgctgccgctggcgtccctgaaccacatcagcatagtgtgcaagtcggtggaggagtcgctcgacttctacatgaacgtcctcgggttcacccccatccgccggcccggctccttcgacttcgacggcgcatggctgttcaactacgggatcggcatccacctgctgcagtcggagcgtcccgacagcttaccagcgaagaaggagatcaaccccaaggataaccacatctccttccagtgcgagagcatggtggcggtggagcggcggctcaaggagctgggcattccatacatccagcggtgcgtggaggagggcggcatctacgtggaccagatcttcttccacgaccccgacggcttcatgatcgagatctgcaactgcgacaacctcccggtcgtcccgctcgccgaccagaccttcgccatggccgcctgcaagagggtcgcctccgtcaagcagtagcaggtgcccatgccggtcgcacaagtagcgcaagcaacccctgctcccacggcggccgcggcttcgcagtgcattcccgcgccgaacccggccttgcagcgcgtcggcggcgaggaggcggcgcatatctcgtgcgcgtgagaggtgggaggccggggtagccaggccgcccaactggtggcgcgctccgtggagtcgtggtttttgtatattgtgatataacagtgtgcgtatgaataaagtgaggggagcagagtgtggtttcagctcc

SEQ ID NO: 22350 - protein, 169 aa, Zea mays subsp. mays
  peptide (1)..(169): Ceres Seq. ID no. 13599398
  misc_feature (21)..(140): Pfam Name: Pfam Description:  Glyoxalase/Bleomycin resistance protein/Dioxygenasesuperfamily
  misc_feature (1)..(151): NCBI GI NO: 34910246 NR Description: OSJNBa0089K24.9
  misc_feature (14)..(169): NCBI GI NO: 18412683 NR Description: glyoxalase family protein
  misc_feature (14)..(169): NCBI GI NO: 25406639 NR Description: hypothetical protein F18B13.24
  misc_feature (14)..(169): NCBI GI NO: 18394235 NR Description: glyoxalase family protein
  misc_feature (18)..(150): NCBI GI NO: 18401734 NR Description: glyoxalase family protein
  misc_feature (18)..(150): NCBI GI NO: 15529260 NR Description: At2g28420/T1B3.6 [Arabidopsis thaliana]
  misc_feature (17)..(150): NCBI GI NO: 34395261 NR Description: glyoxalase family-like protein
  misc_feature (17)..(150): NCBI GI NO: 34899038 NR Description: hypothetical protein~similar to Arabidopsisthaliana chromosome 2
  misc_feature (17)..(151): NCBI GI NO: 21740426 NR Description: OSJNBa0091D06.24
  misc_feature (19)..(139): NCBI GI NO: 33146737 NR Description: unknown protein
MVNTTAAMVSGGKGGVLPLASLNHISIVCKSVEESLDFYMNVLGFTPIRRPGSFDFDGAWLFNYGIGIHLLQSERPDSLPAKKEINPKDNHISFQCESMVAVERRLKELGIPYIQRCVEEGGIYVDQIFFHDPDGFMIEICNCDNLPVVPLADQTFAMAACKRVASVKQ

SEQ ID NO: 22351 - protein, 162 aa, Zea mays subsp. mays
  peptide (1)..(162): Ceres Seq. ID no. 13599399
  misc_feature (14)..(133): Pfam Name: Pfam Description:  Glyoxalase/Bleomycin resistance protein/Dioxygenasesuperfamily
  misc_feature (1)..(144): NCBI GI NO: 34910246 NR Description: OSJNBa0089K24.9
  misc_feature (7)..(162): NCBI GI NO: 18412683 NR Description: glyoxalase family protein
  misc_feature (7)..(162): NCBI GI NO: 25406639 NR Description: hypothetical protein F18B13.24
  misc_feature (7)..(162): NCBI GI NO: 18394235 NR Description: glyoxalase family protein
  misc_feature (11)..(143): NCBI GI NO: 18401734 NR Description: glyoxalase family protein
  misc_feature (11)..(143): NCBI GI NO: 15529260 NR Description: At2g28420/T1B3.6 [Arabidopsis thaliana]
  misc_feature (10)..(143): NCBI GI NO: 34395261 NR Description: glyoxalase family-like protein
  misc_feature (10)..(143): NCBI GI NO: 34899038 NR Description: hypothetical protein~similar to Arabidopsisthaliana chromosome 2
  misc_feature (10)..(144): NCBI GI NO: 21740426 NR Description: OSJNBa0091D06.24
  misc_feature (12)..(132): NCBI GI NO: 33146737 NR Description: unknown protein
MVSGGKGGVLPLASLNHISIVCKSVEESLDFYMNVLGFTPIRRPGSFDFDGAWLFNYGIGIHLLQSERPDSLPAKKEINPKDNHISFQCESMVAVERRLKELGIPYIQRCVEEGGIYVDQIFFHDPDGFMIEICNCDNLPVVPLADQTFAMAACKRVASVKQ

SEQ ID NO: 22352 - protein, 130 aa, Zea mays subsp. mays
  peptide (1)..(130): Ceres Seq. ID no. 13599400
  misc_feature (1)..(101): Pfam Name: Pfam Description:  Glyoxalase/Bleomycin resistance protein/Dioxygenasesuperfamily
  misc_feature (1)..(112): NCBI GI NO: 34910246 NR Description: OSJNBa0089K24.9
  misc_feature (1)..(130): NCBI GI NO: 18412683 NR Description: glyoxalase family protein
  misc_feature (1)..(130): NCBI GI NO: 25406639 NR Description: hypothetical protein F18B13.24
  misc_feature (1)..(130): NCBI GI NO: 18394235 NR Description: glyoxalase family protein
  misc_feature (1)..(111): NCBI GI NO: 18401734 NR Description: glyoxalase family protein
  misc_feature (1)..(111): NCBI GI NO: 15529260 NR Description: At2g28420/T1B3.6 [Arabidopsis thaliana]
  misc_feature (1)..(111): NCBI GI NO: 34395261 NR Description: glyoxalase family-like protein
  misc_feature (1)..(111): NCBI GI NO: 34899038 NR Description: hypothetical protein~similar to Arabidopsisthaliana chromosome 2
  misc_feature (1)..(112): NCBI GI NO: 21740426 NR Description: OSJNBa0091D06.24
  misc_feature (1)..(100): NCBI GI NO: 33146737 NR Description: unknown protein
MNVLGFTPIRRPGSFDFDGAWLFNYGIGIHLLQSERPDSLPAKKEINPKDNHISFQCESMVAVERRLKELGIPYIQRCVEEGGIYVDQIFFHDPDGFMIEICNCDNLPVVPLADQTFAMAACKRVASVKQ

SEQ ID NO: 22353 - DNA, 1647 bp, Zea mays subsp. mays
  misc_feature (1)..(1647): Ceres Seq. ID no. 13599602
aaaagaacaaacccagttgaattttcccagaaagttttctcctttttttcttgaattaagcttaacagtgagaaaagatggagaaagccactgaaaggcagaagattctgattcgtcatctcaatccactttcttcttctccttctcttcctagcattaatgataataaacctactcttctctccgctgtgaactgtgctgctgagctttccccaatggctgccttcggagacgacgttgtgatcgttgcggcgtatcgcactgccatctgcaaagctaaacgtggagggttcaaagatactctcccagatgatcttcttgcttctgttctcaaggctgtggtggaaaggacgtctttggatccaagtgaagttggggatattgttgttggtaccgttatagctcctggctctcagagagccatggagtgtagagtagctgcttactttgctggctttcctgactctgtgccaatcagaactgtcaacagacaatgctcatcaggactacaagctgttgctgatgttgctgcttccatcagagctggatattacgacattggtattggtgctggagttgagtccatgtcgattgatcacactgctggaggtggctttcacacaacaaacccgagggcacaagagtttcgtggagctcgtgactgcttgcttccgatgggcataacttctgaaaacgtagcagaaagatactgtgtcacaagagaagatcaagacatggctgcggtggagtctcacaagcgtgcagcagctgcaaacgcgtctggtaaactaaaggatgagatagttcctgttgcgactaagattgttgaccctgatacaaaagcagagaagccaattgttgtttctgttgatgatggtgtacgtccaaactcaaacatggctgatcttgcaaagctgaagacagtctttaaacctaatggttcaaccacagcaggcaatgctagtcagattagtgatggtgctggagctgtactgctgatgaagaggagcttggcgatgaagaagggacttcccattcttggaatattcaggagctttgctgttactggtgtggatccagctgtaatgggtatcggtccagcttacgccattcccgctgcagccaaccttgcaggactcaaagttagcgatatcgatctatttgagatcaatgaggcatttgcatctcagtatgtgtactgttgcaagaagctagagctggatgtggaaaaggtcaatgttaatggaggggccattgctattggccatcctcttggtgctacaggagctcgatgtgttgcgacattgttgcatgagatgaaacggagagggaaagactgccgctttggagttatttcaatgtgcataggcactggtatgggagccgcagctgtgtttgagagaggagactctgttgatgacttgtccaatgcgcgtgtggagactaatgggagcggtcactagaacaaggttgaataaggacaagcaatgaaagcactaagtcaaataaaaaagtgtgaagcttaaacagctctttcacattgttgaacaatgaacaatttgtcattctgagtttaaaatgtatcaactagtaacttgtgagtgaacaaagagtcaaatctaaaaagcaaagttacatctttcaccg

SEQ ID NO: 22354 - protein, 461 aa, Zea mays subsp. mays
  peptide (1)..(461): Ceres Seq. ID no. 15218857
  misc_feature (51)..(311): Pfam Name: Pfam Description:  Thiolase, N-terminal domain
  misc_feature (1)..(461): NCBI GI NO: 30695564 NR Description: acetyl-CoA C-acyltransferase 1
  misc_feature (47)..(461): NCBI GI NO: 30695561 NR Description: acetyl-CoA C-acyltransferase 1
  misc_feature (1)..(458): NCBI GI NO: 393707 NR Description: 3-ketoacyl-CoA thiolase
  misc_feature (1)..(453): NCBI GI NO: 7433647 NR Description: acetyl-CoA C-acyltransferase (EC 2
  misc_feature (1)..(458): NCBI GI NO: 15225798 NR Description: acetyl-CoA C-acyltransferase
  misc_feature (1)..(458): NCBI GI NO: 421810 NR Description: acetyl-CoA C-acyltransferase (EC 2
  misc_feature (1)..(453): NCBI GI NO: 15219797 NR Description: acetyl-CoA C-acyltransferase
  misc_feature (1)..(458): NCBI GI NO: 7433644 NR Description: acetyl-CoA C-acyltransferase (EC 2
  misc_feature (1)..(444): NCBI GI NO: 37549269 NR Description: 3-ketoacyl-CoA thiolase [Glycine max]
  misc_feature (1)..(453): NCBI GI NO: 21537268 NR Description: putative acetyl-CoA acyltransferase
MEKATERQKILIRHLNPLSSSPSLPSINDNKPTLLSAVNCAAELSPMAAFGDDVVIVAAYRTAICKAKRGGFKDTLPDDLLASVLKAVVERTSLDPSEVGDIVVGTVIAPGSQRAMECRVAAYFAGFPDSVPIRTVNRQCSSGLQAVADVAASIRAGYYDIGIGAGVESMSIDHTAGGGFHTTNPRAQEFRGARDCLLPMGITSENVAERYCVTREDQDMAAVESHKRAAAANASGKLKDEIVPVATKIVDPDTKAEKPIVVSVDDGVRPNSNMADLAKLKTVFKPNGSTTAGNASQISDGAGAVLLMKRSLAMKKGLPILGIFRSFAVTGVDPAVMGIGPAYAIPAAANLAGLKVSDIDLFEINEAFASQYVYCCKKLELDVEKVNVNGGAIAIGHPLGATGARCVATLLHEMKRRGKDCRFGVISMCIGTGMGAAAVFERGDSVDDLSNARVETNGSGH

SEQ ID NO: 22355 - protein, 415 aa, Zea mays subsp. mays
  peptide (1)..(415): Ceres Seq. ID no. 15218858
  misc_feature (5)..(265): Pfam Name: Pfam Description:  Thiolase, N-terminal domain
  misc_feature (1)..(415): NCBI GI NO: 30695564 NR Description: acetyl-CoA C-acyltransferase 1
  misc_feature (1)..(415): NCBI GI NO: 30695561 NR Description: acetyl-CoA C-acyltransferase 1
  misc_feature (1)..(412): NCBI GI NO: 393707 NR Description: 3-ketoacyl-CoA thiolase
  misc_feature (1)..(407): NCBI GI NO: 7433647 NR Description: acetyl-CoA C-acyltransferase (EC 2
  misc_feature (1)..(412): NCBI GI NO: 15225798 NR Description: acetyl-CoA C-acyltransferase
  misc_feature (1)..(412): NCBI GI NO: 421810 NR Description: acetyl-CoA C-acyltransferase (EC 2
  misc_feature (1)..(407): NCBI GI NO: 15219797 NR Description: acetyl-CoA C-acyltransferase
  misc_feature (1)..(412): NCBI GI NO: 7433644 NR Description: acetyl-CoA C-acyltransferase (EC 2
  misc_feature (1)..(398): NCBI GI NO: 37549269 NR Description: 3-ketoacyl-CoA thiolase [Glycine max]
  misc_feature (1)..(407): NCBI GI NO: 21537268 NR Description: putative acetyl-CoA acyltransferase
MAAFGDDVVIVAAYRTAICKAKRGGFKDTLPDDLLASVLKAVVERTSLDPSEVGDIVVGTVIAPGSQRAMECRVAAYFAGFPDSVPIRTVNRQCSSGLQAVADVAASIRAGYYDIGIGAGVESMSIDHTAGGGFHTTNPRAQEFRGARDCLLPMGITSENVAERYCVTREDQDMAAVESHKRAAAANASGKLKDEIVPVATKIVDPDTKAEKPIVVSVDDGVRPNSNMADLAKLKTVFKPNGSTTAGNASQISDGAGAVLLMKRSLAMKKGLPILGIFRSFAVTGVDPAVMGIGPAYAIPAAANLAGLKVSDIDLFEINEAFASQYVYCCKKLELDVEKVNVNGGAIAIGHPLGATGARCVATLLHEMKRRGKDCRFGVISMCIGTGMGAAAVFERGDSVDDLSNARVETNGSGH

SEQ ID NO: 22356 - protein, 346 aa, Zea mays subsp. mays
  peptide (1)..(346): Ceres Seq. ID no. 15218859
  misc_feature (1)..(196): Pfam Name: Pfam Description:  Thiolase, N-terminal domain
  misc_feature (1)..(346): NCBI GI NO: 30695564 NR Description: acetyl-CoA C-acyltransferase 1
  misc_feature (1)..(346): NCBI GI NO: 30695561 NR Description: acetyl-CoA C-acyltransferase 1
  misc_feature (1)..(343): NCBI GI NO: 393707 NR Description: 3-ketoacyl-CoA thiolase
  misc_feature (1)..(338): NCBI GI NO: 7433647 NR Description: acetyl-CoA C-acyltransferase (EC 2
  misc_feature (1)..(343): NCBI GI NO: 15225798 NR Description: acetyl-CoA C-acyltransferase
  misc_feature (1)..(343): NCBI GI NO: 421810 NR Description: acetyl-CoA C-acyltransferase (EC 2
  misc_feature (1)..(338): NCBI GI NO: 15219797 NR Description: acetyl-CoA C-acyltransferase
  misc_feature (1)..(343): NCBI GI NO: 7433644 NR Description: acetyl-CoA C-acyltransferase (EC 2
  misc_feature (1)..(329): NCBI GI NO: 37549269 NR Description: 3-ketoacyl-CoA thiolase [Glycine max]
  misc_feature (1)..(338): NCBI GI NO: 21537268 NR Description: putative acetyl-CoA acyltransferase
MECRVAAYFAGFPDSVPIRTVNRQCSSGLQAVADVAASIRAGYYDIGIGAGVESMSIDHTAGGGFHTTNPRAQEFRGARDCLLPMGITSENVAERYCVTREDQDMAAVESHKRAAAANASGKLKDEIVPVATKIVDPDTKAEKPIVVSVDDGVRPNSNMADLAKLKTVFKPNGSTTAGNASQISDGAGAVLLMKRSLAMKKGLPILGIFRSFAVTGVDPAVMGIGPAYAIPAAANLAGLKVSDIDLFEINEAFASQYVYCCKKLELDVEKVNVNGGAIAIGHPLGATGARCVATLLHEMKRRGKDCRFGVISMCIGTGMGAAAVFERGDSVDDLSNARVETNGSGH

SEQ ID NO: 22357 - DNA, 682 bp, Zea mays subsp. mays
  misc_feature (1)..(682): Ceres Seq. ID no. 12638425
cctaatcgaaaagatctttactttctctgtagccgtgatcgtcgccgtccccgttttctatctccggtcggattgtataaccgggagctgttgtcaccatgtttctcacgagatttatcgggaggagattcttagcggtggctgcttccacgagatcggagtccactactgcagcagctgcctcgactgttaagattgcgaaaaaccctctcgaggagttctttgagttcgacagaagccaggacgaagacaaacctgttgtctacggtcgaggttggaaagcttcagaactgcgactcaagtcatgggatgatcttcagaagctgtggtacgttcttctcaaagagaaaaacatgttgatgactcagcgtcagatgcttcaagctcagaacatgatgtttcccaaccctgaacgcattccgaaggtgaggagatcaatgtgccgcataaagcatgtgctgacagagagagcgattgaagaaccggatcccagaagatcagccgagatgaagagaatggtcaatgctatgtgatcaatcccttgtgcttcttttcgcaaccgattagagtcggtgtttgggtcttagtccaatgattgtgactgttgtccggttgttaaaatgtttgttcgggtatatgcacgtacgttttctataaaaccgtggttggtgtttatttcagc

SEQ ID NO: 22358 - protein, 144 aa, Zea mays subsp. mays
  peptide (1)..(144): Ceres Seq. ID no. 12638426
  misc_feature (1)..(144): NCBI GI NO: 15223019 NR Description: mitochondrial ribosomal protein, putative
  misc_feature (58)..(144): NCBI GI NO: 25407010 NR Description: hypothetical protein
  misc_feature (1)..(100): NCBI GI NO: 25407010 NR Description: hypothetical protein
  misc_feature (9)..(124): NCBI GI NO: 21618497 NR Description: Similar to mitochondrial ribosomal protein L47
  misc_feature (33)..(124): NCBI GI NO: 20810578 NR Description: Similar to mitochondrial ribosomal protein L47
  misc_feature (33)..(124): NCBI GI NO: 23273006 NR Description: Unknown (protein for IMAGE:4489172) [Mus musculus]
  misc_feature (33)..(124): NCBI GI NO: 20865861 NR Description: similar to CGI-204 [Mus musculus]
  misc_feature (33)..(124): NCBI GI NO: 34856796 NR Description: similar to mitochondrial ribosomal protein L47
  misc_feature (33)..(124): NCBI GI NO: 9858831 NR Description: CGI-204 [Homo sapiens]
  misc_feature (33)..(124): NCBI GI NO: 29826287 NR Description: mitochondrial ribosomal protein L47 isoform a
MFLTRFIGRRFLAVAASTRSESTTAAAASTVKIAKNPLEEFFEFDRSQDEDKPVVYGRGWKASELRLKSWDDLQKLWYVLLKEKNMLMTQRQMLQAQNMMFPNPERIPKVRRSMCRIKHVLTERAIEEPDPRRSAEMKRMVNAM

SEQ ID NO: 22359 - DNA, 751 bp, Zea mays subsp. mays
  misc_feature (1)..(751): Ceres Seq. ID no. 15226701
aatttcgggaatcgatttgtagtggggcatgtaagcttgtgggagaggaaagcagcaggagacgaaggtagacaaggaaaagtatgtcaaagaaaatgagagaacaaccttcttagcttctcctccagtctctctccaccaccgctctatctcctcggtaggaagaagagcaagcaagagaggagcaagctagctagcggtacaagggagagtgagcggcgaaggggacggacgaattgaagaacacctgccagtccgatcgagctggtggtgccgccaggataaatcgggaggtatatgatggcgtcgaattcaccgtcggcggcgttctttggtgttagggatggggaccagcaagaccaccagattaagccgctgatatcaccgcagcagcagcagcagctggcagcggcactgcccagcgtggcgtccggccaaggcgcgccgacggcggcggcgcagccaccgcccaagaagaagaggactatgcccggtaattcacgcaagtccacccccttctgactccggtcgtccatgcacactgcgtacaggtctgctgcctgccagagatctcgctcgctcgtctggatcgattggagttttatgagttggatgcttgcagcaagagcatatatcttctctcacatagtcacatgcctgcactcggtttctctttccatttcttcgtggtttcttgtctgagtattgtagttcttggtttgtgatcaccgctatatatcttcactgcgcc

SEQ ID NO: 22360 - protein, 74 aa, Zea mays subsp. mays
  peptide (1)..(74): Ceres Seq. ID no. 15226702
  misc_feature (2)..(67): NCBI GI NO: 38344265 NR Description: OSJNBa0005N02.2
MMASNSPSAAFFGVRDGDQQDHQIKPLISPQQQQQLAAALPSVASGQGAPTAAAQPPPKKKRTMPGNSRKSTPF

SEQ ID NO: 22361 - protein, 73 aa, Zea mays subsp. mays
  peptide (1)..(73): Ceres Seq. ID no. 15226703
  misc_feature (1)..(66): NCBI GI NO: 38344265 NR Description: OSJNBa0005N02.2
MASNSPSAAFFGVRDGDQQDHQIKPLISPQQQQQLAAALPSVASGQGAPTAAAQPPPKKKRTMPGNSRKSTPF

SEQ ID NO: 22362 - protein, 55 aa, Zea mays subsp. mays
  peptide (1)..(55): Ceres Seq. ID no. 15226704
MHTAYRSAACQRSRSLVWIDWSFMSWMLAARAYIFSHIVTCLHSVSLSISSWFLV

SEQ ID NO: 22363 - DNA, 796 bp, Zea mays subsp. mays
  misc_feature (1)..(796): Ceres Seq. ID no. 13587097
cccaatcccctcccgccgcgtcacatcgccgccgtcctcgtgccccgttacctctaaaaccctagcggggagccggggatgaagatccagtgcaacgcgtgcggggccgcggaggcgcgggtgctgtgctgcgcggacgaggccccgctctgcgtcgcctgcgacgaggaggtgcacgccgccaacaagctcgccgggaagcaccagcgggtgccgctcctgacggacgccgccgtcgctgccgccgcggcggccccggccgtgcccaagtgcgacatctgtcaggtcaggcacccaggccccgaggcccgagccctcgtctccgctgcctctctctccatccctgtagctcgattgggttggggtgagctggagttgtcgtgcggtagctgccactgccaggctgggaattttctactaaccgtctgatcccaagctaccagggtagtctcgcctaatgatttggctcgcgaagtgaataggcggctgaagcactgcaaagttgttgttgatgcttcgatctgtagcaaactgccttgccttaccttacctgggcagcttcccttgggatgccgagtctgtttctggagcgttggcggaattgctatacgatatacactatgttttactgatgatctgactggaccaggacagcagtgagttcaattttagctcctacaggctttccctatcccggggaaggcatcatgtgtgatctgtggctggtcctgcaggatattgtaattatgaagaaaccgactcggatgttgtactgatgtgccactcttgaggaccc

SEQ ID NO: 22364 - protein, 116 aa, Zea mays subsp. mays
  peptide (1)..(116): Ceres Seq. ID no. 13587098
  misc_feature (1)..(47): Pfam Name: Pfam Description:  B-box zinc finger
  misc_feature (1)..(69): NCBI GI NO: 7489603 NR Description: zinc-finger protein R2931 [imported] - rice
  misc_feature (1)..(69): NCBI GI NO: 17433085 NR Description: Zinc finger protein constans-like 7
  misc_feature (1)..(69): NCBI GI NO: 18412037 NR Description: CONSTANS B-box zinc finger family protein
  misc_feature (1)..(72): NCBI GI NO: 34903708 NR Description: putative zinc-finger protein
  misc_feature (1)..(69): NCBI GI NO: 3618310 NR Description: zinc finger protein
  misc_feature (1)..(69): NCBI GI NO: 3618314 NR Description: zinc finger protein
  misc_feature (1)..(69): NCBI GI NO: 38344979 NR Description: OSJNBa0011L07.9
  misc_feature (1)..(71): NCBI GI NO: 15234983 NR Description: CONSTANS B-box zinc finger family protein
  misc_feature (1)..(69): NCBI GI NO: 3618312 NR Description: zinc finger protein
  misc_feature (1)..(69): NCBI GI NO: 15221367 NR Description: salt-tolerance protein [Arabidopsis thaliana]
MKIQCNACGAAEARVLCCADEAPLCVACDEEVHAANKLAGKHQRVPLLTDAAVAAAAAAPAVPKCDICQVRHPGPEARALVSAASLSIPVARLGWGELELSCGSCHCQAGNFLLTV

SEQ ID NO: 22365 - DNA, 751 bp, Zea mays subsp. mays
  misc_feature (1)..(751): Ceres Seq. ID no. 13599401
aaaaaacgtcttgatagggaacaaaaagacatggcttcttcttcttcttttttcactttctctagtcagaccacactgcattcccatcttcacagaaacacctttctcaccaaaacccaatttccagttcccacaaaatcatcagaatctaacttctttggtctcagactctctccctccacctctcgctctccgctctctccctgttctttcaaaagctcaatctttgctaaggttaacaaggggcagagtgcaccagacttcacactaaaggatcaaaatggaaagccggtgagcttgaagaagtataaagggaagcctgttgttgtatatttctaccctgccgatgaaacccctggctgcaccaagcaggcttgtgcgttcagagactcttatgagaaattcaagaaagccggcgcagaggtcattggcataagtggtgatgattctgcttctcacaaggcctttgcaagcaaatacaagcttccttacacattgttgagtgacgaagggaatagggtgaggaaagattggggagtgccaggagatttatttggggcattgccagggagacagacttatgttctcgacaaaaacggtgtcgttcagctcatctacaacaaccagttccagcctgagaaacacattgatgagaccttaaagttcctcaaagctgcttgatcttgtattcttctcttcttcctcatctggatgactggatatttacaacaacaattcatgacgttcctct

SEQ ID NO: 22366 - protein, 226 aa, Zea mays subsp. mays
  peptide (1)..(226): Ceres Seq. ID no. 13599402
  misc_feature (81)..(220): Pfam Name: Pfam Description:  AhpC/TSA family
  misc_feature (11)..(226): NCBI GI NO: 15230982 NR Description: peroxiredoxin -related [Arabidopsis thaliana]
  misc_feature (47)..(225): NCBI GI NO: 6899842 NR Description: peroxiredoxin Q [Sedum lineare]
  misc_feature (47)..(226): NCBI GI NO: 39748708 NR Description: peroxiredoxin Q [Gentiana triflora]
  misc_feature (79)..(224): NCBI GI NO: 17230675 NR Description: bacterioferritin comigratory protein
  misc_feature (79)..(224): NCBI GI NO: 23125049 NR Description: hypothetical protein [Nostoc punctiforme]
  misc_feature (78)..(224): NCBI GI NO: 28850433 NR Description: similar to Anabaena sp
  misc_feature (78)..(224): NCBI GI NO: 23041480 NR Description: hypothetical protein
  misc_feature (79)..(224): NCBI GI NO: 15898858 NR Description: Peroxiredoxin
  misc_feature (77)..(224): NCBI GI NO: 21673494 NR Description: bacterioferritin comigratory protein
  misc_feature (79)..(224): NCBI GI NO: 16081486 NR Description: thiol-specific antioxidant related protein
KKRLDREQKDMASSSSFFTFSSQTTLHSHLHRNTFLTKTQFPVPTKSSESNFFGLRLSPSTSRSPLSPCSFKSSIFAKVNKGQSAPDFTLKDQNGKPVSLKKYKGKPVVVYFYPADETPGCTKQACAFRDSYEKFKKAGAEVIGISGDDSASHKAFASKYKLPYTLLSDEGNRVRKDWGVPGDLFGALPGRQTYVLDKNGVVQLIYNNQFQPEKHIDETLKFLKAA

SEQ ID NO: 22367 - protein, 216 aa, Zea mays subsp. mays
  peptide (1)..(216): Ceres Seq. ID no. 13599403
  misc_feature (71)..(210): Pfam Name: Pfam Description:  AhpC/TSA family
  misc_feature (1)..(216): NCBI GI NO: 15230982 NR Description: peroxiredoxin -related [Arabidopsis thaliana]
  misc_feature (37)..(215): NCBI GI NO: 6899842 NR Description: peroxiredoxin Q [Sedum lineare]
  misc_feature (37)..(216): NCBI GI NO: 39748708 NR Description: peroxiredoxin Q [Gentiana triflora]
  misc_feature (69)..(214): NCBI GI NO: 17230675 NR Description: bacterioferritin comigratory protein
  misc_feature (69)..(214): NCBI GI NO: 23125049 NR Description: hypothetical protein [Nostoc punctiforme]
  misc_feature (68)..(214): NCBI GI NO: 28850433 NR Description: similar to Anabaena sp
  misc_feature (68)..(214): NCBI GI NO: 23041480 NR Description: hypothetical protein
  misc_feature (69)..(214): NCBI GI NO: 15898858 NR Description: Peroxiredoxin
  misc_feature (67)..(214): NCBI GI NO: 21673494 NR Description: bacterioferritin comigratory protein
  misc_feature (69)..(214): NCBI GI NO: 16081486 NR Description: thiol-specific antioxidant related protein
MASSSSFFTFSSQTTLHSHLHRNTFLTKTQFPVPTKSSESNFFGLRLSPSTSRSPLSPCSFKSSIFAKVNKGQSAPDFTLKDQNGKPVSLKKYKGKPVVVYFYPADETPGCTKQACAFRDSYEKFKKAGAEVIGISGDDSASHKAFASKYKLPYTLLSDEGNRVRKDWGVPGDLFGALPGRQTYVLDKNGVVQLIYNNQFQPEKHIDETLKFLKAA

SEQ ID NO: 22368 - DNA, 750 bp, Zea mays subsp. mays
  misc_feature (1)..(750): Ceres Seq. ID no. 13599603
ctcattagacttttctactacacattcccatttcccacatcagacaacattctctccctcagagggaaagcatctcctcttcttgattcacattttgaactttaaccttctcaaactatctccaacaaaaccaaatccaagttattaaaaatgacaaagataggaggtattcttgtttgtttagtcatcgtgggattagatgtggctgctgcaatcctcggaatccaagcagaagtcgctcagaatcaggtgaagcacatgaggctttggctatttgagtgcagagagccaagccaggacgcgtacaggttaggtctaggtgcagccgcggtattggtaatggctcatgtactcatcaatttggtcggaggctgtctctgtatttgctctcaagacgagtttcaaagatcttcttccacaaagcaaatctcaatggcttgtctcgttctcacttggatcgtattcgccgttggatttggggctttagtgattgggacgatgtccaacaacaagtcaagatcctcttgtggattcacacatcaccattttctctccattggagggatcttgtgttttctacatgccctcttttgtgtcgcttattacgtttctgccacagcggctaaagacgcagctgctaagtgacaaagccatgataaggatgggtgaacacaggtgggtggtccttgtacttgactatatattccaatggtaattgtgtaacatttcatatctattaacataacatag

SEQ ID NO: 22369 - protein, 164 aa, Zea mays subsp. mays
  peptide (1)..(164): Ceres Seq. ID no. 13599604
  misc_feature (1)..(162): NCBI GI NO: 15225221 NR Description: expressed protein [Arabidopsis thaliana]
  misc_feature (1)..(158): NCBI GI NO: 15233592 NR Description: expressed protein [Arabidopsis thaliana]
  misc_feature (1)..(159): NCBI GI NO: 34393261 NR Description: unknown protein
  misc_feature (7)..(159): NCBI GI NO: 25406837 NR Description: YUP8H12.9 [imported] - Arabidopsis thaliana
  misc_feature (6)..(159): NCBI GI NO: 15220395 NR Description: expressed protein [Arabidopsis thaliana]
  misc_feature (7)..(159): NCBI GI NO: 34897938 NR Description: ESTs AU082454
  misc_feature (7)..(163): NCBI GI NO: 18418215 NR Description: expressed protein [Arabidopsis thaliana]
  misc_feature (43)..(163): NCBI GI NO: 10177066 NR Description: dbj|BAA92731
  misc_feature (25)..(102): NCBI GI NO: 26452012 NR Description: unknown protein [Arabidopsis thaliana]
MTKIGGILVCLVIVGLDVAAAILGIQAEVAQNQVKHMRLWLFECREPSQDAYRLGLGAAAVLVMAHVLINLVGGCLCICSQDEFQRSSSTKQISMACLVLTWIVFAVGFGALVIGTMSNNKSRSSCGFTHHHFLSIGGILCFLHALFCVAYYVSATAAKDAAAK

SEQ ID NO: 22370 - protein, 128 aa, Zea mays subsp. mays
  peptide (1)..(128): Ceres Seq. ID no. 13599605
  misc_feature (1)..(126): NCBI GI NO: 15225221 NR Description: expressed protein [Arabidopsis thaliana]
  misc_feature (1)..(122): NCBI GI NO: 15233592 NR Description: expressed protein [Arabidopsis thaliana]
  misc_feature (1)..(123): NCBI GI NO: 34393261 NR Description: unknown protein
  misc_feature (1)..(123): NCBI GI NO: 25406837 NR Description: YUP8H12.9 [imported] - Arabidopsis thaliana
  misc_feature (1)..(123): NCBI GI NO: 15220395 NR Description: expressed protein [Arabidopsis thaliana]
  misc_feature (1)..(123): NCBI GI NO: 34897938 NR Description: ESTs AU082454
  misc_feature (1)..(127): NCBI GI NO: 18418215 NR Description: expressed protein [Arabidopsis thaliana]
  misc_feature (7)..(127): NCBI GI NO: 10177066 NR Description: dbj|BAA92731
  misc_feature (1)..(66): NCBI GI NO: 26452012 NR Description: unknown protein [Arabidopsis thaliana]
MRLWLFECREPSQDAYRLGLGAAAVLVMAHVLINLVGGCLCICSQDEFQRSSSTKQISMACLVLTWIVFAVGFGALVIGTMSNNKSRSSCGFTHHHFLSIGGILCFLHALFCVAYYVSATAAKDAAAK

SEQ ID NO: 22371 - protein, 101 aa, Zea mays subsp. mays
  peptide (1)..(101): Ceres Seq. ID no. 13599606
  misc_feature (1)..(99): NCBI GI NO: 15225221 NR Description: expressed protein [Arabidopsis thaliana]
  misc_feature (1)..(95): NCBI GI NO: 15233592 NR Description: expressed protein [Arabidopsis thaliana]
  misc_feature (1)..(96): NCBI GI NO: 34393261 NR Description: unknown protein
  misc_feature (1)..(96): NCBI GI NO: 25406837 NR Description: YUP8H12.9 [imported] - Arabidopsis thaliana
  misc_feature (1)..(96): NCBI GI NO: 15220395 NR Description: expressed protein [Arabidopsis thaliana]
  misc_feature (1)..(96): NCBI GI NO: 34897938 NR Description: ESTs AU082454
  misc_feature (1)..(100): NCBI GI NO: 18418215 NR Description: expressed protein [Arabidopsis thaliana]
  misc_feature (1)..(100): NCBI GI NO: 10177066 NR Description: dbj|BAA92731
  misc_feature (1)..(39): NCBI GI NO: 26452012 NR Description: unknown protein [Arabidopsis thaliana]
MAHVLINLVGGCLCICSQDEFQRSSSTKQISMACLVLTWIVFAVGFGALVIGTMSNNKSRSSCGFTHHHFLSIGGILCFLHALFCVAYYVSATAAKDAAAK

SEQ ID NO: 22372 - DNA, 950 bp, Zea mays subsp. mays
  misc_feature (1)..(950): Ceres Seq. ID no. 12635836
gggaaatgggaaatggtcagatagatcctgcgagaacctaaacctaacactcgtttctttgtcatcaaaaaagattctctgtctctccgatcctcgtcgatctgaagaatctcggagaccactcacttcaatggcggaatctgtagcttctcaaactccgtcgctctccgagcaatatcatttggagaaggaagtgaagcaagacacaagtgcgaagcctgtcgaggttgcaccagaggttacttctcaagctgaagacgttagcaccgacaaagccagtgaagaatctcctgctgaggaagctgtttctgctgttgaggagaagtctgagtctcctcctgcttctgaagaggctcctcctgctgtggtagtggaagacagtgctgatgagactcctgttgcggtggaagagagtaatgacgaaaacgctagtgaagaagttgttgaggagactcctgatgagatcaagcttgagacagctcctgctgatttccgtttcccgacaactaaccaaacaaggcattgtttcacacgttacattgaatatcacagatgtgtagctgctaagggtgacgacgctccagaatgcgacaagttttcaaagttttaccgatctctttgccccggtgaatgggttgataagtggaacgagcaaagagagaatggaactttccctggtcctctttaagacactctcctgcctgaagaaaaatcttcttttgatgttaccttcatgatgtcagagctccaattacactgcagagtttaataagattttacagaaccagctcgtttggttccccttcataagatgtgagaatttaacaactataatctcaaattttttctcttttacctatatgctcatctcaagttttgaggatcttctgattttgaaatgttgttctgcctgattatatgcttttcaatggcgagcttcaatttttagt

SEQ ID NO: 22373 - protein, 228 aa, Zea mays subsp. mays
  peptide (1)..(228): Ceres Seq. ID no. 12635837
  misc_feature (154)..(227): Pfam Name: Pfam Description:  Cytochrome oxidase c subunit VIb
  misc_feature (44)..(228): NCBI GI NO: 15219886 NR Description: cytochrome c oxidase subunit, putative
  misc_feature (44)..(228): NCBI GI NO: 21554378 NR Description: cytochrome c oxidase subunit, putative
  misc_feature (50)..(228): NCBI GI NO: 4586449 NR Description: cytochrome c oxidase subunit 6b-1
  misc_feature (51)..(228): NCBI GI NO: 34906824 NR Description: putative cytochrome c oxidase subunit 6b-1
  misc_feature (67)..(228): NCBI GI NO: 22204116 NR Description: putative cytochrome c oxidase subunit
  misc_feature (153)..(228): NCBI GI NO: 18424030 NR Description: Expressed protein; protein id: At5g57815
  misc_feature (153)..(228): NCBI GI NO: 21592329 NR Description: cytochrome c oxidase subunit 6b
  misc_feature (154)..(228): NCBI GI NO: 9967162 NR Description: cytochrome c oxidase subunit 6b
  misc_feature (155)..(228): NCBI GI NO: 15234375 NR Description: putative protein; protein id: At4g28060.1
  misc_feature (156)..(226): NCBI GI NO: 38048151 NR Description: similar to Drosophila melanogaster CG14235
GNGKWSDRSCENLNLTLVSLSSKKILCLSDPRRSEESRRPLTSMAESVASQTPSLSEQYHLEKEVKQDTSAKPVEVAPEVTSQAEDVSTDKASEESPAEEAVSAVEEKSESPPASEEAPPAVVVEDSADETPVAVEESNDENASEEVVEETPDEIKLETAPADFRFPTTNQTRHCFTRYIEYHRCVAAKGDDAPECDKFSKFYRSLCPGEWVDKWNEQRENGTFPGPL

SEQ ID NO: 22374 - protein, 185 aa, Zea mays subsp. mays
  peptide (1)..(185): Ceres Seq. ID no. 12635838
  misc_feature (111)..(184): Pfam Name: Pfam Description:  Cytochrome oxidase c subunit VIb
  misc_feature (1)..(185): NCBI GI NO: 15219886 NR Description: cytochrome c oxidase subunit, putative
  misc_feature (1)..(185): NCBI GI NO: 21554378 NR Description: cytochrome c oxidase subunit, putative
  misc_feature (7)..(185): NCBI GI NO: 4586449 NR Description: cytochrome c oxidase subunit 6b-1
  misc_feature (8)..(185): NCBI GI NO: 34906824 NR Description: putative cytochrome c oxidase subunit 6b-1
  misc_feature (24)..(185): NCBI GI NO: 22204116 NR Description: putative cytochrome c oxidase subunit
  misc_feature (110)..(185): NCBI GI NO: 18424030 NR Description: Expressed protein; protein id: At5g57815
  misc_feature (110)..(185): NCBI GI NO: 21592329 NR Description: cytochrome c oxidase subunit 6b
  misc_feature (111)..(185): NCBI GI NO: 9967162 NR Description: cytochrome c oxidase subunit 6b
  misc_feature (112)..(185): NCBI GI NO: 15234375 NR Description: putative protein; protein id: At4g28060.1
  misc_feature (113)..(183): NCBI GI NO: 38048151 NR Description: similar to Drosophila melanogaster CG14235
MAESVASQTPSLSEQYHLEKEVKQDTSAKPVEVAPEVTSQAEDVSTDKASEESPAEEAVSAVEEKSESPPASEEAPPAVVVEDSADETPVAVEESNDENASEEVVEETPDEIKLETAPADFRFPTTNQTRHCFTRYIEYHRCVAAKGDDAPECDKFSKFYRSLCPGEWVDKWNEQRENGTFPGPL

SEQ ID NO: 22375 - DNA, 1005 bp, Zea mays subsp. mays
  misc_feature (1)..(1005): Ceres Seq. ID no. 13599610
atttaacgccgcggtcactacttaactcattaactggatcccagcacaaccatggaagcgtacgacaagacctaccactaccagtgctcctccatttcaccgtgctcttctcaaccgctgcgtgcagcgtgctcctagtcatagcgcccccgcccactagctgagccaccgacttgttccgggccgccgcggggcagggcatgaaagcgacgacgtggcgcggcgcgccggggaccctaccggccgccagcgccaaggagaagaggaggaagcaaaaaacgcccgcgccgcgcggcttgatgtgcggctgcggcagcaccaggtcggtctccgtcgacatctccgccgctgtcacgacggcggcgcggacgaggcgacgcgtttccacggcgggggagccagcatctgcggcaaagacgacgacgacgacaggctgcggccgcggcgctgacgaagcgagcgccaatggcacgcccagcgtggactcgcttctgcggcagctgcgggagctggagcgcggcgtccgcgcgctgggcctgggcgtccgggaacgggaggagggcggcggcgcggcatcagggacggcgacgaccgcggaaacggcggcaaggccccgccggcacgcgcggagcgcgagcgtcgtggagcggctggactacgggagcgtggcggtggtgacggagtcggcggacccgctgcgcgacttccggcgctcgatggcgcagatgatcgtggagaacggcatcaccggcggcgccgagctgcgcgagctcctgcgccggttcctcgcgctcaacgccgcgtgccaccaccacctcatcctccgcgccttcggcgacgtctgggaggagatcttcgccgccgccgccgccggccgcgatggcggtagagctagcaaacggccacgcggtcgcgctggcgctggcgctgacactctaagctagccacccacagtcgtctgtcgtctcgtccatcctactactacaataatacttactctcctcg

SEQ ID NO: 22376 - protein, 247 aa, Zea mays subsp. mays
  peptide (1)..(247): Ceres Seq. ID no. 13599611
  misc_feature (162)..(220): Pfam Name: Pfam Description:  Protein of unknown function, DUF623
  misc_feature (17)..(235): NCBI GI NO: 20330744 NR Description: Hypothetical protein
  misc_feature (31)..(220): NCBI GI NO: 37536390 NR Description: hypothetical protein
  misc_feature (150)..(228): NCBI GI NO: 32488495 NR Description: OSJNBa0011J08.2
  misc_feature (155)..(239): NCBI GI NO: 22331750 NR Description: similar to unknown protein (gb|AAB63094
  misc_feature (17)..(215): NCBI GI NO: 34908542 NR Description: P0423B08.21
  misc_feature (55)..(232): NCBI GI NO: 15224185 NR Description: expressed protein [Arabidopsis thaliana]
  misc_feature (115)..(224): NCBI GI NO: 33146440 NR Description: unknown protein
  misc_feature (117)..(220): NCBI GI NO: 15241148 NR Description: hypothetical protein [Arabidopsis thaliana]
  misc_feature (157)..(215): NCBI GI NO: 34904220 NR Description: P0443E07.26
  misc_feature (83)..(219): NCBI GI NO: 23429649 NR Description: ovate protein [Lycopersicon esculentum]
MKATTWRGAPGTLPAASAKEKRRKQKTPAPRGLMCGCGSTRSVSVDISAAVTTAARTRRRVSTAGEPASAAKTTTTTGCGRGADEASANGTPSVDSLLRQLRELERGVRALGLGVREREEGGGAASGTATTAETAARPRRHARSASVVERLDYGSVAVVTESADPLRDFRRSMAQMIVENGITGGAELRELLRRFLALNAACHHHLILRAFGDVWEEIFAAAAAGRDGGRASKRPRGRAGAGADTLS

SEQ ID NO: 22377 - protein, 214 aa, Zea mays subsp. mays
  peptide (1)..(214): Ceres Seq. ID no. 13599612
  misc_feature (129)..(187): Pfam Name: Pfam Description:  Protein of unknown function, DUF623
  misc_feature (1)..(202): NCBI GI NO: 20330744 NR Description: Hypothetical protein
  misc_feature (1)..(187): NCBI GI NO: 37536390 NR Description: hypothetical protein
  misc_feature (117)..(195): NCBI GI NO: 32488495 NR Description: OSJNBa0011J08.2
  misc_feature (122)..(206): NCBI GI NO: 22331750 NR Description: similar to unknown protein (gb|AAB63094
  misc_feature (1)..(182): NCBI GI NO: 34908542 NR Description: P0423B08.21
  misc_feature (22)..(199): NCBI GI NO: 15224185 NR Description: expressed protein [Arabidopsis thaliana]
  misc_feature (82)..(191): NCBI GI NO: 33146440 NR Description: unknown protein
  misc_feature (84)..(187): NCBI GI NO: 15241148 NR Description: hypothetical protein [Arabidopsis thaliana]
  misc_feature (124)..(182): NCBI GI NO: 34904220 NR Description: P0443E07.26
  misc_feature (50)..(186): NCBI GI NO: 23429649 NR Description: ovate protein [Lycopersicon esculentum]
MCGCGSTRSVSVDISAAVTTAARTRRRVSTAGEPASAAKTTTTTGCGRGADEASANGTPSVDSLLRQLRELERGVRALGLGVREREEGGGAASGTATTAETAARPRRHARSASVVERLDYGSVAVVTESADPLRDFRRSMAQMIVENGITGGAELRELLRRFLALNAACHHHLILRAFGDVWEEIFAAAAAGRDGGRASKRPRGRAGAGADTLS

SEQ ID NO: 22378 - DNA, 850 bp, Zea mays subsp. mays
  misc_feature (1)..(850): Ceres Seq. ID no. 13589109
ccsssctscaggaatttgcackwkayyrtgtttamcwagaacatcctaatcgaaaaaaattaaaagcgcgttttagagtttaactgccgcttgccggaggagaaaactcaactcgccgttacctaccccgaacaccagttttattcccgcctgacatccaccgcgccgtttctgaactccgattaagttgatgtcaggattcgcagctcacctagtgttgttactcctggttcttgtctctgtctccttgtcgccgtcggtcaggtgtttaggtaaagagagaacattggctatgataaagccagatggagtctctggtaactacactgaagaaatcaaaaggctcattgtcgaggctggttttaatatcgtcaaggagaggcttactcagctggagaaggaggcagcctctgcgttctacgacgagcattcgtcaaggagcttttttcctcatcttgtttcttacatgacaagtggtcctgtggtggtgatggtgttggagaaaggagacgctgtttctgattggcgtggtttaatcgggcctactgattcgcaaaaggctaagatatctcatcctcacagcatcagagcattgtgtggtaaggactctcagagaaactgtgtgcacggctccgattcaacttcatcagctgagagagaaattaactttttcttcaaggatgtagtttcaggtgacatcgcttcacaacatgatgaactataagatacaccaatatatattctcwwtgtaawsttgkaactgkwggkkgatctatctatagtcacctaaamrmaaaraaaamrargcttatcgrtaccgkcracctcgaggggrsgctccggtacccaw

SEQ ID NO: 22379 - protein, 177 aa, Zea mays subsp. mays
  peptide (1)..(177): Ceres Seq. ID no. 15220936
  misc_feature (30)..(101): Pfam Name: Pfam Description:  Nucleoside diphosphate kinase
  misc_feature (12)..(101): NCBI GI NO: 8778480 NR Description: F1L3.7 [Arabidopsis thaliana]
  misc_feature (92)..(130): NCBI GI NO: 8778480 NR Description: F1L3.7 [Arabidopsis thaliana]
  misc_feature (131)..(167): NCBI GI NO: 8778480 NR Description: F1L3.7 [Arabidopsis thaliana]
  misc_feature (35)..(172): NCBI GI NO: 15220107 NR Description: hypothetical protein [Arabidopsis thaliana]
  misc_feature (35)..(130): NCBI GI NO: 9665132 NR Description: Unknown protein [Arabidopsis thaliana]
  misc_feature (30)..(166): NCBI GI NO: 4505413 NR Description: non-metastatic cells 5, protein expressed in
  misc_feature (30)..(166): NCBI GI NO: 18079349 NR Description: RIKEN cDNA 1700019D05 [Mus musculus]
  misc_feature (30)..(166): NCBI GI NO: 32700087 NR Description: Nucleoside diphosphate kinase homolog 5
  misc_feature (29)..(162): NCBI GI NO: 38181932 NR Description: Unknown (protein for MGC:75677)
  misc_feature (26)..(162): NCBI GI NO: 18859073 NR Description: nucleoside diphosphate kinase-Z4 [Danio rerio]
MSGFAAHLVLLLLVLVSVSLSPSVRCLGKERTLAMIKPDGVSGNYTEEIKRLIVEAGFNIVKERLTQLEKEAASAFYDEHSSRSFFPHLVSYMTSGPVVVMVLEKGDAVSDWRGLIGPTDSQKAKISHPHSIRALCGKDSQRNCVHGSDSTSSAEREINFFFKDVVSGDIASQHDEL

SEQ ID NO: 22380 - protein, 143 aa, Zea mays subsp. mays
  peptide (1)..(143): Ceres Seq. ID no. 15220937
  misc_feature (1)..(67): Pfam Name: Pfam Description:  Nucleoside diphosphate kinase
  misc_feature (1)..(67): NCBI GI NO: 8778480 NR Description: F1L3.7 [Arabidopsis thaliana]
  misc_feature (58)..(96): NCBI GI NO: 8778480 NR Description: F1L3.7 [Arabidopsis thaliana]
  misc_feature (97)..(133): NCBI GI NO: 8778480 NR Description: F1L3.7 [Arabidopsis thaliana]
  misc_feature (1)..(138): NCBI GI NO: 15220107 NR Description: hypothetical protein [Arabidopsis thaliana]
  misc_feature (1)..(96): NCBI GI NO: 9665132 NR Description: Unknown protein [Arabidopsis thaliana]
  misc_feature (1)..(132): NCBI GI NO: 4505413 NR Description: non-metastatic cells 5, protein expressed in
  misc_feature (1)..(132): NCBI GI NO: 18079349 NR Description: RIKEN cDNA 1700019D05 [Mus musculus]
  misc_feature (1)..(132): NCBI GI NO: 32700087 NR Description: Nucleoside diphosphate kinase homolog 5
  misc_feature (1)..(128): NCBI GI NO: 38181932 NR Description: Unknown (protein for MGC:75677)
  misc_feature (1)..(128): NCBI GI NO: 18859073 NR Description: nucleoside diphosphate kinase-Z4 [Danio rerio]
MIKPDGVSGNYTEEIKRLIVEAGFNIVKERLTQLEKEAASAFYDEHSSRSFFPHLVSYMTSGPVVVMVLEKGDAVSDWRGLIGPTDSQKAKISHPHSIRALCGKDSQRNCVHGSDSTSSAEREINFFFKDVVSGDIASQHDEL

SEQ ID NO: 22381 - DNA, 876 bp, Zea mays subsp. mays
  misc_feature (1)..(876): Ceres Seq. ID no. 12590120
  misc_feature (501)..(501): n is a, c, t, g, unknown, or other
tcaagtatacacttctctagccttccacacgctagacaacaaacgcgaccccgcgcccctctgctctgcctgcgcccgcccgctcgctcacaggcgctgcctggcagtgccattactgcccccacccgtctctccgggcccgagcacgccagggggaaccgggttcctcctcatggccggtgaccgccgcggcgggtcgcccacgatggagcgccggcgggggatccggcgcctcctgctgccccgcggggaggtctcctcgtcctcctcgccctcggtgccgctgcctccgccggccgcagccgaggtggggcggaggaagagcttcgcctccgcggcgctgcgcgggctgggctgcacgtcggccgcggcctcgcaggcgtacgcgccaggggcgggctccgcggctgcggcggccgtgcggtcgtccgccgactggcacgggcgaaggaagaaagggaaggacaggaggaaggagaggggaggaggtggaggaggcgnccttgtgggcggagggatcggcggcgacgtgtggtgcgccccggggataccgttcgccgcggaggcgtcgtccgtggactgcgtggtggcgcgccaccagatgctggggagggggcgcggcggcgacgccgagaggccgcacagagaggtgagccgtagatgcttactggcttctttggatctgttcgcgctcacagcttgtccatttcgtaggattgcttgctgttcttggtgggtggttattctcatcagttttctcattcctcatgtgcgtccgtttttgtgctttttttgaactcgttttttgtctgttgttgaaaagaaagcgtgtgttcttctccaagtattcaggttttctggtggctgttttgctcc

SEQ ID NO: 22382 - protein, 264 aa, Zea mays subsp. mays
  peptide (1)..(264): Ceres Seq. ID no. 12590121
  misc_feature (58)..(222): NCBI GI NO: 34911396 NR Description: RING zinc finger protein-like
  misc_feature (167)..(167): Xaa is any aa, unknown or other
QVYTSLAFHTLDNKRDPAPLCSACARPLAHRRCLAVPLLPPPVSPGPSTPGGTGFLLMAGDRRGGSPTMERRRGIRRLLLPRGEVSSSSSPSVPLPPPAAAEVGRRKSFASAALRGLGCTSAAASQAYAPGAGSAAAAAVRSSADWHGRRKKGKDRRKERGGGGGGXLVGGGIGGDVWCAPGIPFAAEASSVDCVVARHQMLGRGRGGDAERPHREVSRRCLLASLDLFALTACPFRRIACCSWWVVILISFLIPHVRPFLCFF

SEQ ID NO: 22383 - protein, 207 aa, Zea mays subsp. mays
  peptide (1)..(207): Ceres Seq. ID no. 12590122
  misc_feature (1)..(165): NCBI GI NO: 34911396 NR Description: RING zinc finger protein-like
  misc_feature (110)..(110): Xaa is any aa, unknown or other
MAGDRRGGSPTMERRRGIRRLLLPRGEVSSSSSPSVPLPPPAAAEVGRRKSFASAALRGLGCTSAAASQAYAPGAGSAAAAAVRSSADWHGRRKKGKDRRKERGGGGGGXLVGGGIGGDVWCAPGIPFAAEASSVDCVVARHQMLGRGRGGDAERPHREVSRRCLLASLDLFALTACPFRRIACCSWWVVILISFLIPHVRPFLCFF

SEQ ID NO: 22384 - protein, 196 aa, Zea mays subsp. mays
  peptide (1)..(196): Ceres Seq. ID no. 12590123
  misc_feature (1)..(154): NCBI GI NO: 34911396 NR Description: RING zinc finger protein-like
  misc_feature (99)..(99): Xaa is any aa, unknown or other
MERRRGIRRLLLPRGEVSSSSSPSVPLPPPAAAEVGRRKSFASAALRGLGCTSAAASQAYAPGAGSAAAAAVRSSADWHGRRKKGKDRRKERGGGGGGXLVGGGIGGDVWCAPGIPFAAEASSVDCVVARHQMLGRGRGGDAERPHREVSRRCLLASLDLFALTACPFRRIACCSWWVVILISFLIPHVRPFLCFF

SEQ ID NO: 22385 - DNA, 763 bp, Zea mays subsp. mays
  misc_feature (1)..(763): Ceres Seq. ID no. 12635416
acctcaaccgcaccacagctcagctcccacccactcccaaaccctctcgccggagccccagcaacccgccagcaagcaagatggacggcagcaaggcgaagaaggtggcggcgaagaagttcggcgggccgaggaagaagtcggtgaccaagtccatcaaggccgggctccagttccccgtcggccgcatcgggcgctacctcaagaagggccgctacgcccagcgcgtcggctccggcgcccccgtctacctcgccgccgtcctcgagtacctcgcagcagaggtgctggagctggccgggaacgccgccaaggacaacaagaagagccgcatcgtgcccaggcacctgctgctggccatccgcaacgaccaggagctcgggaggctgctgtccggcgtcaccatcgcccacggcggcgtcatccccaacatcaacccggtgctgctccccaagaaggccgccgagaaggctgagaaggccgagaagaccgccaccaagtcgcccaagaaggccaccaagtcccccaagaaggccaccaaggcgtagatctggctccgagcgcccgtgccggtgaactggactgatggtgctccgtcagccctcgtgtgcctagtgtctctgtgttaagttagctgtggtgtgttccagagtgtgttgaagcttgttcttttgctttgccccgccatgtaaccgtgaacgaagaggaagcgtcttgcttcctctgttctgctatatcaatctggtttctaatgcagtgttgt

SEQ ID NO: 22386 - protein, 181 aa, Zea mays subsp. mays
  peptide (1)..(181): Ceres Seq. ID no. 12635417
  misc_feature (31)..(152): Pfam Name: Pfam Description:  Core histone H2A/H2B/H3/H4
  misc_feature (27)..(178): NCBI GI NO: 121974 NR Description: HISTONE H2A.2.1
  misc_feature (27)..(178): NCBI GI NO: 121982 NR Description: HISTONE H2A.2.2
  misc_feature (29)..(178): NCBI GI NO: 729671 NR Description: Histone H2A
  misc_feature (29)..(178): NCBI GI NO: 34914498 NR Description: putative histone H2A
  misc_feature (27)..(178): NCBI GI NO: 7649159 NR Description: histone H2A [Euphorbia esula]
  misc_feature (31)..(178): NCBI GI NO: 122007 NR Description: Histone H2A
  misc_feature (35)..(181): NCBI GI NO: 1076777 NR Description: histone H2A.3 - wheat
  misc_feature (27)..(171): NCBI GI NO: 122003 NR Description: HISTONE H2A
  misc_feature (35)..(177): NCBI GI NO: 1076776 NR Description: histone H2A.2 - wheat
  misc_feature (27)..(178): NCBI GI NO: 15241857 NR Description: putative protein; protein id: At5g02560
LNRTTAQLPPTPKPSRRSPSNPPASKMDGSKAKKVAAKKFGGPRKKSVTKSIKAGLQFPVGRIGRYLKKGRYAQRVGSGAPVYLAAVLEYLAAEVLELAGNAAKDNKKSRIVPRHLLLAIRNDQELGRLLSGVTIAHGGVIPNINPVLLPKKAAEKAEKAEKTATKSPKKATKSPKKATKA

SEQ ID NO: 22387 - protein, 157 aa, Zea mays subsp. mays
  peptide (1)..(157): Ceres Seq. ID no. 12635418
PQPHHSSAPTHSQTLSPEPQQPASKQDGRQQGEEGGGEEVRRAEEEVGDQVHQGRAPVPRRPHRALPQEGPLRPARRLRRPRLPRRRPRVPRSRGAGAGRERRQGQQEEPHRAQAPAAGHPQRPGAREAAVRRHHRPRRRHPQHQPGAAPQEGRREG

SEQ ID NO: 22388 - protein, 155 aa, Zea mays subsp. mays
  peptide (1)..(155): Ceres Seq. ID no. 12635419
  misc_feature (5)..(126): Pfam Name: Pfam Description:  Core histone H2A/H2B/H3/H4
  misc_feature (1)..(152): NCBI GI NO: 121974 NR Description: HISTONE H2A.2.1
  misc_feature (1)..(152): NCBI GI NO: 121982 NR Description: HISTONE H2A.2.2
  misc_feature (3)..(152): NCBI GI NO: 729671 NR Description: Histone H2A
  misc_feature (3)..(152): NCBI GI NO: 34914498 NR Description: putative histone H2A
  misc_feature (1)..(152): NCBI GI NO: 7649159 NR Description: histone H2A [Euphorbia esula]
  misc_feature (5)..(152): NCBI GI NO: 122007 NR Description: Histone H2A
  misc_feature (9)..(155): NCBI GI NO: 1076777 NR Description: histone H2A.3 - wheat
  misc_feature (1)..(145): NCBI GI NO: 122003 NR Description: HISTONE H2A
  misc_feature (9)..(151): NCBI GI NO: 1076776 NR Description: histone H2A.2 - wheat
  misc_feature (1)..(152): NCBI GI NO: 15241857 NR Description: putative protein; protein id: At5g02560
MDGSKAKKVAAKKFGGPRKKSVTKSIKAGLQFPVGRIGRYLKKGRYAQRVGSGAPVYLAAVLEYLAAEVLELAGNAAKDNKKSRIVPRHLLLAIRNDQELGRLLSGVTIAHGGVIPNINPVLLPKKAAEKAEKAEKTATKSPKKATKSPKKATKA

SEQ ID NO: 22389 - DNA, 811 bp, Zea mays subsp. mays
  misc_feature (1)..(811): Ceres Seq. ID no. 12635917
atcttcctcaattctccaattcccagatctgttagggatttcaaaaagagccatggagaatgggaaaagagacagagacgacatggaagtgcaaccctcccctagaaagccacgtgtactcctcgcagcaagcggaagcgtcgccgccatcaaattcggcaacctctgccactgcttcacagaatgggcggaagtgagagccgtcgtctcgaagtcgtctctccacttcctcgacaagctctctctcccaccggaagtgactctctacacagacgaagaagagtggtcgagctggaacaagatcggcgatcccgtgcttcacatcgagctcagacgctgggctgacgtcatggtcatcgctcctttgtctgctaacactttagccaagatagctggtgggatgtgtgataatcttctgacttgtatcataagagcttgggattatagcaaaccgctttttgttgcgccggctatgaatactttgatgtggaacaatccttttacggagaggcatcttttgtcgcttgatgagcttgggatcacactcattcctccgatcaagaagaggttggcttgtggtgactatggtaatggcgcgatggctgagccgtctcttatctattctactgttagactcttttgggagtctcagggtcatcagcaaagtggtggtggaactagttaaaaaccatggtctaatggttggttctgttttcagtgtcatagattgttctgtctgtactgctttgtgtttgtatatgttaagaacagctgtctggattgatgtctcttaactaccattttcactgtc

SEQ ID NO: 22390 - protein, 227 aa, Zea mays subsp. mays
  peptide (1)..(227): Ceres Seq. ID no. 12635918
  misc_feature (37)..(157): Pfam Name: Pfam Description:  Flavoprotein
  misc_feature (18)..(224): NCBI GI NO: 15229569 NR Description: HAL3A protein; protein id: At3g18030.1
  misc_feature (18)..(224): NCBI GI NO: 28948673 NR Description: Chain A, Ppc Decarboxylase Mutant C175s
  misc_feature (27)..(224): NCBI GI NO: 8778701 NR Description: T1N15.24 [Arabidopsis thaliana]
  misc_feature (27)..(224): NCBI GI NO: 13124308 NR Description: Halotolerance protein Hal3b
  misc_feature (38)..(211): NCBI GI NO: 9634784 NR Description: ORF FPV114 HAL3 domain [Fowlpox virus]
  misc_feature (38)..(211): NCBI GI NO: 40556079 NR Description: CNPV141 HAL3-like domain protein [Canarypox virus]
  misc_feature (19)..(216): NCBI GI NO: 37590890 NR Description: Unknown (protein for MGC:73297) [Danio rerio]
  misc_feature (100)..(211): NCBI GI NO: 12583571 NR Description: putative halotolerance protein HAL3 homolog
  misc_feature (32)..(222): NCBI GI NO: 34863489 NR Description: similar to RIKEN cDNA 8430432M10
  misc_feature (32)..(222): NCBI GI NO: 28849879 NR Description: RIKEN cDNA 8430432M10 [Mus musculus]
SSSILQFPDLLGISKRAMENGKRDRDDMEVQPSPRKPRVLLAASGSVAAIKFGNLCHCFTEWAEVRAVVSKSSLHFLDKLSLPPEVTLYTDEEEWSSWNKIGDPVLHIELRRWADVMVIAPLSANTLAKIAGGMCDNLLTCIIRAWDYSKPLFVAPAMNTLMWNNPFTERHLLSLDELGITLIPPIKKRLACGDYGNGAMAEPSLIYSTVRLFWESQGHQQSGGGTS

SEQ ID NO: 22391 - protein, 210 aa, Zea mays subsp. mays
  peptide (1)..(210): Ceres Seq. ID no. 12635919
  misc_feature (20)..(140): Pfam Name: Pfam Description:  Flavoprotein
  misc_feature (1)..(207): NCBI GI NO: 15229569 NR Description: HAL3A protein; protein id: At3g18030.1
  misc_feature (1)..(207): NCBI GI NO: 28948673 NR Description: Chain A, Ppc Decarboxylase Mutant C175s
  misc_feature (10)..(207): NCBI GI NO: 8778701 NR Description: T1N15.24 [Arabidopsis thaliana]
  misc_feature (10)..(207): NCBI GI NO: 13124308 NR Description: Halotolerance protein Hal3b
  misc_feature (21)..(194): NCBI GI NO: 9634784 NR Description: ORF FPV114 HAL3 domain [Fowlpox virus]
  misc_feature (21)..(194): NCBI GI NO: 40556079 NR Description: CNPV141 HAL3-like domain protein [Canarypox virus]
  misc_feature (2)..(199): NCBI GI NO: 37590890 NR Description: Unknown (protein for MGC:73297) [Danio rerio]
  misc_feature (83)..(194): NCBI GI NO: 12583571 NR Description: putative halotolerance protein HAL3 homolog
  misc_feature (15)..(205): NCBI GI NO: 34863489 NR Description: similar to RIKEN cDNA 8430432M10
  misc_feature (15)..(205): NCBI GI NO: 28849879 NR Description: RIKEN cDNA 8430432M10 [Mus musculus]
MENGKRDRDDMEVQPSPRKPRVLLAASGSVAAIKFGNLCHCFTEWAEVRAVVSKSSLHFLDKLSLPPEVTLYTDEEEWSSWNKIGDPVLHIELRRWADVMVIAPLSANTLAKIAGGMCDNLLTCIIRAWDYSKPLFVAPAMNTLMWNNPFTERHLLSLDELGITLIPPIKKRLACGDYGNGAMAEPSLIYSTVRLFWESQGHQQSGGGTS

SEQ ID NO: 22392 - protein, 200 aa, Zea mays subsp. mays
  peptide (1)..(200): Ceres Seq. ID no. 12635920
  misc_feature (10)..(130): Pfam Name: Pfam Description:  Flavoprotein
  misc_feature (1)..(197): NCBI GI NO: 15229569 NR Description: HAL3A protein; protein id: At3g18030.1
  misc_feature (1)..(197): NCBI GI NO: 28948673 NR Description: Chain A, Ppc Decarboxylase Mutant C175s
  misc_feature (1)..(197): NCBI GI NO: 8778701 NR Description: T1N15.24 [Arabidopsis thaliana]
  misc_feature (1)..(197): NCBI GI NO: 13124308 NR Description: Halotolerance protein Hal3b
  misc_feature (11)..(184): NCBI GI NO: 9634784 NR Description: ORF FPV114 HAL3 domain [Fowlpox virus]
  misc_feature (11)..(184): NCBI GI NO: 40556079 NR Description: CNPV141 HAL3-like domain protein [Canarypox virus]
  misc_feature (1)..(189): NCBI GI NO: 37590890 NR Description: Unknown (protein for MGC:73297) [Danio rerio]
  misc_feature (73)..(184): NCBI GI NO: 12583571 NR Description: putative halotolerance protein HAL3 homolog
  misc_feature (5)..(195): NCBI GI NO: 34863489 NR Description: similar to RIKEN cDNA 8430432M10
  misc_feature (5)..(195): NCBI GI NO: 28849879 NR Description: RIKEN cDNA 8430432M10 [Mus musculus]
MEVQPSPRKPRVLLAASGSVAAIKFGNLCHCFTEWAEVRAVVSKSSLHFLDKLSLPPEVTLYTDEEEWSSWNKIGDPVLHIELRRWADVMVIAPLSANTLAKIAGGMCDNLLTCIIRAWDYSKPLFVAPAMNTLMWNNPFTERHLLSLDELGITLIPPIKKRLACGDYGNGAMAEPSLIYSTVRLFWESQGHQQSGGGTS

SEQ ID NO: 22393 - DNA, 639 bp, Zea mays subsp. mays
  misc_feature (1)..(639): Ceres Seq. ID no. 12635845
agattgggctgatcgctcagcgagtcaagtttgattttctccgggagagagagagatcgtttgattcttccgatggaggaggagatcggagggagggaggatagatggaagggatcgttagagaacataacggagatggcttcgaatctcgattctctacagaagcttctcctcaagaaagctgtcttcgttgaagaagacactttcgctagagcttctctagtctccgaacaaggtcgagcaatcaaggtacttgagcaaagggtacaaacactagaaagagaactagatgctgccattacagctgctgctcatgctcggtctgagaaacgccacgctgagtcttctcaaaaagctgctgagtcacgtgcgcaagaggttacaaaagagcttgaaaacaccacaaaggttttcaagctgcatatggaagagctccgaggtatgcaagaacagatatccaaacgcgataacgagattaagctcttggaatctataatccaaacgctcggcgggaaagagcggttgggaaaaagcggtgtgagtggatgatgcgttttttcacttgtagaaattttgtaagcttagtttgtgagacagtttatgtatgacaatgatactcctcttccaagataaaatatt

SEQ ID NO: 22394 - protein, 158 aa, Zea mays subsp. mays
  peptide (1)..(158): Ceres Seq. ID no. 12635846
  misc_feature (1)..(158): NCBI GI NO: 15237639 NR Description: putative protein; protein id: At5g64180
  misc_feature (1)..(158): NCBI GI NO: 21553794 NR Description: unknown [Arabidopsis thaliana]
MEEEIGGREDRWKGSLENITEMASNLDSLQKLLLKKAVFVEEDTFARASLVSEQGRAIKVLEQRVQTLERELDAAITAAAHARSEKRHAESSQKAAESRAQEVTKELENTTKVFKLHMEELRGMQEQISKRDNEIKLLESIIQTLGGKERLGKSGVSG

SEQ ID NO: 22395 - protein, 137 aa, Zea mays subsp. mays
  peptide (1)..(137): Ceres Seq. ID no. 12635847
  misc_feature (1)..(137): NCBI GI NO: 15237639 NR Description: putative protein; protein id: At5g64180
  misc_feature (1)..(137): NCBI GI NO: 21553794 NR Description: unknown [Arabidopsis thaliana]
MASNLDSLQKLLLKKAVFVEEDTFARASLVSEQGRAIKVLEQRVQTLERELDAAITAAAHARSEKRHAESSQKAAESRAQEVTKELENTTKVFKLHMEELRGMQEQISKRDNEIKLLESIIQTLGGKERLGKSGVSG

SEQ ID NO: 22396 - DNA, 953 bp, Zea mays subsp. mays
  misc_feature (1)..(953): Ceres Seq. ID no. 13599613
aggaaataatatacaaaatcaaaggttaagaaaaaaaatgggtgaggagaagaatcagcagcacttcgtgctagtacatggtgcatgccacggcgcgtggtgctggaacaaggttaagccgcttctcgaggcctccggccaccgcgtaaccgccttagacctagctgcttcgggtatagacacaaccaggtctatcactgagatctccacatgcgaacaatactctgagccattgatacagctaatcgcctcattaccaagtgatgagaaggttgtgctcgttggtcatagctttggagggttcagcttagccatggccatggataagtttccagacaaaatctctgtctcagtcttcgtgactgctttcatgcccgataccaaacactcaccatcgttcgtcgtggataagtttaaacgggatacgccaccagaagcatggttgggctcggagttcaaatcatatggctcagacaattccggtgtgtcaatgtctttcagcactgagttcatgaagcacgctctctatcaactttctcctgttgaggatattgagcttggattgcttttaaagaggcccggatcattgttcatcaacgatttatccaaggtggagaacttttcggacaaagggtatggatctgttcctcgagcttacattgtgtgcaaagaggacaaaacaattacaaaagaaattcagtggtggatgatcgataattatccgacgaaagtagtgaaggagatggaggacacagatcatatgccaatgttctgcaagcctcagttactaagtgactatctcttggaaatcgcggaaaaattagcttaaattatcttgttatgaaaatgtatttggatacaaataagtgttgtcctgcaaatgggtctttctaaagatcaagacttttatcgcgttcaaatgtttgacataatttaaaataaacttaacagtc

SEQ ID NO: 22397 - protein, 275 aa, Zea mays subsp. mays
  peptide (1)..(275): Ceres Seq. ID no. 15218860
  misc_feature (47)..(268): Pfam Name: Pfam Description:  alpha/beta hydrolase fold
  misc_feature (13)..(272): NCBI GI NO: 15227863 NR Description: hydrolase, alpha/beta fold family
  misc_feature (13)..(275): NCBI GI NO: 21554666 NR Description: putative acetone-cyanohydrin lyase
  misc_feature (13)..(273): NCBI GI NO: 15227867 NR Description: esterase, putative [Arabidopsis thaliana]
  misc_feature (13)..(273): NCBI GI NO: 27754457 NR Description: putative acetone-cyanohydrin lyase
  misc_feature (15)..(275): NCBI GI NO: 15227861 NR Description: hydrolase, alpha/beta fold family
  misc_feature (13)..(275): NCBI GI NO: 15227865 NR Description: esterase, putative [Arabidopsis thaliana]
  misc_feature (19)..(275): NCBI GI NO: 14279437 NR Description: ethylene-induced esterase [Citrus sinensis]
  misc_feature (17)..(273): NCBI GI NO: 40549303 NR Description: salicylic acid-binding protein 2
  misc_feature (15)..(275): NCBI GI NO: 15227859 NR Description: hydrolase, alpha/beta fold family
  misc_feature (17)..(272): NCBI GI NO: 6651393 NR Description: polyneuridine aldehyde esterase
GNNIQNQRLRKKMGEEKNQQHFVLVHGACHGAWCWNKVKPLLEASGHRVTALDLAASGIDTTRSITEISTCEQYSEPLIQLIASLPSDEKVVLVGHSFGGFSLAMAMDKFPDKISVSVFVTAFMPDTKHSPSFVVDKFKRDTPPEAWLGSEFKSYGSDNSGVSMSFSTEFMKHALYQLSPVEDIELGLLLKRPGSLFINDLSKVENFSDKGYGSVPRAYIVCKEDKTITKEIQWWMIDNYPTKVVKEMEDTDHMPMFCKPQLLSDYLLEIAEKLA

SEQ ID NO: 22398 - protein, 263 aa, Zea mays subsp. mays
  peptide (1)..(263): Ceres Seq. ID no. 15218861
  misc_feature (35)..(256): Pfam Name: Pfam Description:  alpha/beta hydrolase fold
  misc_feature (1)..(260): NCBI GI NO: 15227863 NR Description: hydrolase, alpha/beta fold family
  misc_feature (1)..(263): NCBI GI NO: 21554666 NR Description: putative acetone-cyanohydrin lyase
  misc_feature (1)..(261): NCBI GI NO: 15227867 NR Description: esterase, putative [Arabidopsis thaliana]
  misc_feature (1)..(261): NCBI GI NO: 27754457 NR Description: putative acetone-cyanohydrin lyase
  misc_feature (3)..(263): NCBI GI NO: 15227861 NR Description: hydrolase, alpha/beta fold family
  misc_feature (1)..(263): NCBI GI NO: 15227865 NR Description: esterase, putative [Arabidopsis thaliana]
  misc_feature (7)..(263): NCBI GI NO: 14279437 NR Description: ethylene-induced esterase [Citrus sinensis]
  misc_feature (5)..(261): NCBI GI NO: 40549303 NR Description: salicylic acid-binding protein 2
  misc_feature (3)..(263): NCBI GI NO: 15227859 NR Description: hydrolase, alpha/beta fold family
  misc_feature (5)..(260): NCBI GI NO: 6651393 NR Description: polyneuridine aldehyde esterase
MGEEKNQQHFVLVHGACHGAWCWNKVKPLLEASGHRVTALDLAASGIDTTRSITEISTCEQYSEPLIQLIASLPSDEKVVLVGHSFGGFSLAMAMDKFPDKISVSVFVTAFMPDTKHSPSFVVDKFKRDTPPEAWLGSEFKSYGSDNSGVSMSFSTEFMKHALYQLSPVEDIELGLLLKRPGSLFINDLSKVENFSDKGYGSVPRAYIVCKEDKTITKEIQWWMIDNYPTKVVKEMEDTDHMPMFCKPQLLSDYLLEIAEKLA

SEQ ID NO: 22399 - protein, 171 aa, Zea mays subsp. mays
  peptide (1)..(171): Ceres Seq. ID no. 15218862
  misc_feature (1)..(164): Pfam Name: Pfam Description:  alpha/beta hydrolase fold
  misc_feature (1)..(168): NCBI GI NO: 15227863 NR Description: hydrolase, alpha/beta fold family
  misc_feature (1)..(171): NCBI GI NO: 21554666 NR Description: putative acetone-cyanohydrin lyase
  misc_feature (1)..(169): NCBI GI NO: 15227867 NR Description: esterase, putative [Arabidopsis thaliana]
  misc_feature (1)..(169): NCBI GI NO: 27754457 NR Description: putative acetone-cyanohydrin lyase
  misc_feature (1)..(171): NCBI GI NO: 15227861 NR Description: hydrolase, alpha/beta fold family
  misc_feature (1)..(171): NCBI GI NO: 15227865 NR Description: esterase, putative [Arabidopsis thaliana]
  misc_feature (1)..(171): NCBI GI NO: 14279437 NR Description: ethylene-induced esterase [Citrus sinensis]
  misc_feature (1)..(169): NCBI GI NO: 40549303 NR Description: salicylic acid-binding protein 2
  misc_feature (1)..(171): NCBI GI NO: 15227859 NR Description: hydrolase, alpha/beta fold family
  misc_feature (1)..(168): NCBI GI NO: 6651393 NR Description: polyneuridine aldehyde esterase
MAMDKFPDKISVSVFVTAFMPDTKHSPSFVVDKFKRDTPPEAWLGSEFKSYGSDNSGVSMSFSTEFMKHALYQLSPVEDIELGLLLKRPGSLFINDLSKVENFSDKGYGSVPRAYIVCKEDKTITKEIQWWMIDNYPTKVVKEMEDTDHMPMFCKPQLLSDYLLEIAEKLA

SEQ ID NO: 22400 - DNA, 699 bp, Zea mays subsp. mays
  misc_feature (1)..(699): Ceres Seq. ID no. 13599435
aaaaacacacaaagctcatcgagagaagattcagacatttcatagcttctttattccttcccgaaggggtaccctgagatcacaaaggataacaaacaatgggcaagggagttgcagtcttgaacagcagtgagggtgttaaggggactatcttcttcacccaggaaggagacggtgtgaccactgtgactggaacagtttctggacttaaacctggtctacatggtttccatgtccatgctcttggtgacaccactaacggttgcatgtccaccggtccacatttcaaccctgatggtaaacaacacggtgccccagaggatgctaatcgtcatgctggagatctaggaaacatcattgttggagatgatggaactgccaccttcacaatcactgactgccagattcctcttagtggaccaaactctattgtcggaagggctgttgttgtccacgcagaccctgatgacctcggaaagggaggccatgaactcagcttggctaccggaaacgcaggcgggcgtgttgcttgtggtattattggtcttcagggctaagtaagctgttacttatcgaggaagggagtgatgcaataaggaggtcatatacctctagacctggctagtttgtgtgtgtatctgtgtgtactgtgtgtgtggctataatctctcctttgtggctcaatacattttatttaag

SEQ ID NO: 22401 - protein, 152 aa, Zea mays subsp. mays
  peptide (1)..(152): Ceres Seq. ID no. 13599436
  misc_feature (1)..(152): Pfam Name: SODC Pfam Description: Copper/zinc superoxide dismutase
  misc_feature (1)..(152): NCBI GI NO: 24421235 NR Description: superoxide dismutase [Brassica juncea]
  misc_feature (1)..(152): NCBI GI NO: 15223944 NR Description: copper/zinc superoxidase dismutase (CSD1)
  misc_feature (1)..(152): NCBI GI NO: 12230587 NR Description: Superoxide dismutase [Cu-Zn] 2
  misc_feature (1)..(152): NCBI GI NO: 2305111 NR Description: Cu/Zn superoxide dismutase [Raphanus sativus]
  misc_feature (1)..(152): NCBI GI NO: 3288850 NR Description: cytosolic Cu/Zn superoxide dismutase
  misc_feature (1)..(152): NCBI GI NO: 12230586 NR Description: Superoxide dismutase [Cu-Zn] 1
  misc_feature (3)..(152): NCBI GI NO: 134602 NR Description: SUPEROXIDE DISMUTASE [CU-ZN]
  misc_feature (1)..(146): NCBI GI NO: 9802567 NR Description: F22O13.32 [Arabidopsis thaliana]
  misc_feature (1)..(152): NCBI GI NO: 4102861 NR Description: copper/zinc-superoxide dismutase
  misc_feature (1)..(152): NCBI GI NO: 134628 NR Description: Superoxide dismutase [Cu-Zn]
MGKGVAVLNSSEGVKGTIFFTQEGDGVTTVTGTVSGLKPGLHGFHVHALGDTTNGCMSTGPHFNPDGKQHGAPEDANRHAGDLGNIIVGDDGTATFTITDCQIPLSGPNSIVGRAVVVHADPDDLGKGGHELSLATGNAGGRVACGIIGLQG

SEQ ID NO: 22402 - protein, 96 aa, Zea mays subsp. mays
  peptide (1)..(96): Ceres Seq. ID no. 13599437
  misc_feature (1)..(96): Pfam Name: SODC Pfam Description: Copper/zinc superoxide dismutase
  misc_feature (1)..(96): NCBI GI NO: 24421235 NR Description: superoxide dismutase [Brassica juncea]
  misc_feature (1)..(96): NCBI GI NO: 15223944 NR Description: copper/zinc superoxidase dismutase (CSD1)
  misc_feature (1)..(96): NCBI GI NO: 12230587 NR Description: Superoxide dismutase [Cu-Zn] 2
  misc_feature (1)..(96): NCBI GI NO: 2305111 NR Description: Cu/Zn superoxide dismutase [Raphanus sativus]
  misc_feature (1)..(96): NCBI GI NO: 3288850 NR Description: cytosolic Cu/Zn superoxide dismutase
  misc_feature (1)..(96): NCBI GI NO: 12230586 NR Description: Superoxide dismutase [Cu-Zn] 1
  misc_feature (1)..(96): NCBI GI NO: 134602 NR Description: SUPEROXIDE DISMUTASE [CU-ZN]
  misc_feature (1)..(90): NCBI GI NO: 9802567 NR Description: F22O13.32 [Arabidopsis thaliana]
  misc_feature (1)..(96): NCBI GI NO: 4102861 NR Description: copper/zinc-superoxide dismutase
  misc_feature (1)..(96): NCBI GI NO: 134628 NR Description: Superoxide dismutase [Cu-Zn]
MSTGPHFNPDGKQHGAPEDANRHAGDLGNIIVGDDGTATFTITDCQIPLSGPNSIVGRAVVVHADPDDLGKGGHELSLATGNAGGRVACGIIGLQG

SEQ ID NO: 22403 - DNA, 387 bp, Zea mays subsp. mays
  misc_feature (1)..(387): Ceres Seq. ID no. 13587093
  misc_feature (158)..(158): n is a, c, t, g, unknown, or other
  misc_feature (22)..(22): n is a, c, t, g, unknown, or other
  misc_feature (10)..(10): n is a, c, t, g, unknown, or other
cattgtcccntcaaactcgctnctggcctcgggcccgcccgtcgtgaggtccgagctcgatgcagccgatccggcggcgscaccgaggctttgcactcctctgtctctccgccgccctcctcgctgccgccactctgctccccggcgccgccgtcgcngaaggtgtcamgccctccgaggcgcgccggctccgcgacgaggtgaaagatatgttytatcatgcgtttgatggatacatgaagtatgctttcccactcgatgagctgcggcccttaagttgccaaggtgaagactcccttggtggttatgcgctcactcttatcgattctttggatacyttggctttactgggtgatmaggagaamtttggtgctgctgtggagtggg

SEQ ID NO: 22404 - protein, 109 aa, Zea mays subsp. mays
  peptide (1)..(109): Ceres Seq. ID no. 13587094
  misc_feature (51)..(108): Pfam Name: Pfam Description:  Glycosyl hydrolase family 47
  misc_feature (1)..(108): NCBI GI NO: 34909972 NR Description: P0490D09.10
  misc_feature (13)..(108): NCBI GI NO: 15239952 NR Description: glycoside hydrolase family 47
  misc_feature (11)..(108): NCBI GI NO: 11190553 NR Description: bA42O4
  misc_feature (11)..(108): NCBI GI NO: 8922667 NR Description: chromosome 20 open reading frame 31 [Homo sapiens]
  misc_feature (11)..(108): NCBI GI NO: 17368685 NR Description: Putative alpha-mannosidase C20orf31 precursor
  misc_feature (11)..(108): NCBI GI NO: 12655043 NR Description: hypothetical protein FLJ10783 [Homo sapiens]
  misc_feature (26)..(108): NCBI GI NO: 34859116 NR Description: similar to putative alpha-mannosidase
  misc_feature (26)..(108): NCBI GI NO: 21704058 NR Description: putative alpha-mannosidase [Mus musculus]
  misc_feature (26)..(108): NCBI GI NO: 26348657 NR Description: unnamed protein product [Mus musculus]
  misc_feature (26)..(108): NCBI GI NO: 26344459 NR Description: unnamed protein product [Mus musculus]
  misc_feature (7)..(7): Xaa is any aa, unknown or other
  misc_feature (33)..(33): Xaa is any aa, unknown or other
  misc_feature (37)..(37): Xaa is any aa, unknown or other
  misc_feature (52)..(52): Xaa is any aa, unknown or other
  misc_feature (93)..(93): Xaa is any aa, unknown or other
  misc_feature (100)..(100): Xaa is any aa, unknown or other
  misc_feature (102)..(102): Xaa is any aa, unknown or other
MQPIRRXHRGFALLCLSAALLAAATLLPGAAVXEGVXPSEARRLRDEVKDMXYHAFDGYMKYAFPLDELRPLSCQGEDSLGGYALTLIDSLDXLALLGDXEXFGAAVEW

SEQ ID NO: 22405 - protein, 75 aa, Zea mays subsp. mays
  peptide (1)..(75): Ceres Seq. ID no. 13587095
  misc_feature (3)..(3): Xaa is any aa, unknown or other
  misc_feature (7)..(7): Xaa is any aa, unknown or other
  misc_feature (27)..(27): Xaa is any aa, unknown or other
  misc_feature (53)..(53): Xaa is any aa, unknown or other
  misc_feature (56)..(56): Xaa is any aa, unknown or other
  misc_feature (72)..(72): Xaa is any aa, unknown or other
IVXSNSXLASGPPVVRSELDAADPAAXPRLCTPLSLRRPPRCRHSAPRRRRRXRCXALRGAPAPRRGERYVXSCV

SEQ ID NO: 22406 - protein, 67 aa, Zea mays subsp. mays
  peptide (1)..(67): Ceres Seq. ID no. 13587096
  misc_feature (4)..(4): Xaa is any aa, unknown or other
  misc_feature (8)..(8): Xaa is any aa, unknown or other
  misc_feature (27)..(27): Xaa is any aa, unknown or other
  misc_feature (53)..(53): Xaa is any aa, unknown or other
  misc_feature (57)..(57): Xaa is any aa, unknown or other
HCPXKLAXGLGPARREVRARCSRSGGXTEALHSSVSPPPSSLPPLCSPAPPSXKVSXPPRRAGSATR

SEQ ID NO: 22407 - DNA, 962 bp, Zea mays subsp. mays
  misc_feature (1)..(962): Ceres Seq. ID no. 13599417
attttcccttgttcgagttttctcaggaaagctagtagagagagatactggttttgattcatacgatggctgccacagctattctccgatcgatccgccgacgcgacgtcgtctctgcgcctctttccgtctacaaatctcttgctggtaatgctcaaccttcattgggttcgtacactggtcagaactatgtaagtttgtgtagagctttcggatcgagagccggtgtgaatgaaaatgttgggactggttttggaactagcaacataagcaatgccgttagagaggagagagagcattcaaaagctactgtgaatgctatgggagctcatctgagagctcttggtgtgggaacaccaagacgtgtgttgtctacaatcgccgagggtatcaagatgacagaggaggaccagacttctccaaaaccccaaagctttcgccctctatctcctcacctcacggtttaccagcctcagaagaactcaatgttatccattttcaacagaatctcggggatttacttgaccggagtcttttatggcggctatcttctctacctgaagatgggtatgatctgcctcacttacccggctttctaccaagttcattaccatgtacagcagcaacttccggttatcacctcggttactgcattggccgcgctttaccatactatcaagagtattcactcgctcttgacccattgaagcaacatttcccctaagctcttttcgttgtttggttaagccaccagagtctccagtaagagtttccttgagatgcacaagatttaataaaagagagttagaaacgtttgttaaactctcattgtcttttgagaaagcaagtgtctagcttttgttttgggattttaggctttgaaaacttatgtttgttggctttttctttgttctaagaccttattgatggggttggaatgtaataaaatgtttaccagttct

SEQ ID NO: 22408 - protein, 213 aa, Zea mays subsp. mays
  peptide (1)..(213): Ceres Seq. ID no. 15218604
  misc_feature (1)..(213): NCBI GI NO: 11022654 NR Description: gene_id:MTH16
  misc_feature (1)..(213): NCBI GI NO: 15236709 NR Description: expressed protein [Arabidopsis thaliana]
  misc_feature (1)..(213): NCBI GI NO: 15242460 NR Description: expressed protein [Arabidopsis thaliana]
  misc_feature (1)..(213): NCBI GI NO: 21593777 NR Description: unknown [Arabidopsis thaliana]
  misc_feature (53)..(210): NCBI GI NO: 14861486 NR Description: succinate dehydrogenase subunit 3 [Glycine max]
  misc_feature (120)..(211): NCBI GI NO: 14861484 NR Description: succinate dehydrogenase subunit 3
  misc_feature (125)..(212): NCBI GI NO: 15004510 NR Description: succinate dehydrogenase subunit 3
  misc_feature (133)..(212): NCBI GI NO: 15004512 NR Description: succinate dehydrogenase subunit 3
  misc_feature (133)..(212): NCBI GI NO: 15004516 NR Description: succinate dehydrogenase subunit 3
  misc_feature (133)..(210): NCBI GI NO: 15004514 NR Description: succinate dehydrogenase subunit 3
MAATAILRSIRRRDVVSAPLSVYKSLAGNAQPSLGSYTGQNYVSLCRAFGSRAGVNENVGTGFGTSNISNAVREEREHSKATVNAMGAHLRALGVGTPRRVLSTIAEGIKMTEEDQTSPKPQSFRPLSPHLTVYQPQKNSMLSIFNRISGIYLTGVFYGGYLLYLKMGMICLTYPAFYQVHYHVQQQLPVITSVTALAALYHTIKSIHSLLTH

SEQ ID NO: 22409 - protein, 128 aa, Zea mays subsp. mays; identical to SEQ ID NO: 7092
  peptide (1)..(128): Ceres Seq. ID no. 15218605
  misc_feature (1)..(128): NCBI GI NO: 11022654 NR Description: gene_id:MTH16
  misc_feature (1)..(128): NCBI GI NO: 15236709 NR Description: expressed protein [Arabidopsis thaliana]
  misc_feature (1)..(128): NCBI GI NO: 15242460 NR Description: expressed protein [Arabidopsis thaliana]
  misc_feature (1)..(128): NCBI GI NO: 21593777 NR Description: unknown [Arabidopsis thaliana]
  misc_feature (1)..(125): NCBI GI NO: 14861486 NR Description: succinate dehydrogenase subunit 3 [Glycine max]
  misc_feature (35)..(126): NCBI GI NO: 14861484 NR Description: succinate dehydrogenase subunit 3
  misc_feature (40)..(127): NCBI GI NO: 15004510 NR Description: succinate dehydrogenase subunit 3
  misc_feature (48)..(127): NCBI GI NO: 15004512 NR Description: succinate dehydrogenase subunit 3
  misc_feature (48)..(127): NCBI GI NO: 15004516 NR Description: succinate dehydrogenase subunit 3
  misc_feature (48)..(125): NCBI GI NO: 15004514 NR Description: succinate dehydrogenase subunit 3

SEQ ID NO: 22410 - DNA, 982 bp, Zea mays subsp. mays
  misc_feature (1)..(982): Ceres Seq. ID no. 13624608
aattatcacaccactctctccctctcctcctttatattttagttatggccaagattggtttgaaacccgatccagttaacaataatgccaaggagattcgttacagaggcgttaggaagaggccatggggccgttatgccgcggagatccgagatccgggtaagaaaacccgggtctggcttggtactttcgataccgccgaagaggcggcgcgtgcttacgatgcggcggcgcgtgatttccgaggggccaaggctaagaccaatttccccaattttctcgagctgagtgagaagatgccggctgccggcggcggtttcgagcgtagcccaagccagagcagcacccttgactgcgattctcctccggcggcggttacgccggcgagtgctgggattgttccgccgcagctcgagcttcgcctcggcggctatcagatcccgatggcgcgtcctatttactttttggacgttatgggagtaggcaacggaggtcgtgctcagcctccggtggcgtcagcttttaggtcgccggtggcttgtgtggctcagagcgactctgattcgtcgtcggttgttgatttcgaaggtgtgatggagaagagatctcagctgtttgatctagatctaaacttgtctcctccgtcggaacaggcctgaacttatcgaaggtggtcgtggtcgtgttcatttccgacgcgcatgcgttttttttttgtttgggagctgagagaattcgtattctcgttagttttttattctctctcactctagaataattattattatcggtttaaaaaaaaaaagtttatcgggagagagaatataattttagctgacatggatcgttatgtacatattattacataactggagatctgaacttttgttgtgtgcttttttgcgacttggtttcaccttgttgttcctctatctgtagcctttaattttgttattgcaaattttatatcaataatttggtg

SEQ ID NO: 22411 - protein, 218 aa, Zea mays subsp. mays
  peptide (1)..(218): Ceres Seq. ID no. 13624609
  misc_feature (31)..(95): Pfam Name: Pfam Description:  AP2 domain
  misc_feature (15)..(218): NCBI GI NO: 15232526 NR Description: ethylene responsive element binding factor 4
  misc_feature (15)..(203): NCBI GI NO: 2281635 NR Description: AP2 domain containing protein RAP2.5
  misc_feature (15)..(216): NCBI GI NO: 20340233 NR Description: ethylene responsive element binding factor 4-like
  misc_feature (25)..(214): NCBI GI NO: 30526297 NR Description: ethylene response factor 2
  misc_feature (25)..(214): NCBI GI NO: 28274832 NR Description: ethylene response factor 3
  misc_feature (34)..(193): NCBI GI NO: 34908900 NR Description: ethylene-responsive element binding factor 3
  misc_feature (31)..(218): NCBI GI NO: 38345793 NR Description: OSJNBa0085I10.10
  misc_feature (18)..(157): NCBI GI NO: 15219215 NR Description: ethylene responsive element binding factor 8
  misc_feature (26)..(151): NCBI GI NO: 4099914 NR Description: ethylene-responsive element binding protein homolog
  misc_feature (25)..(143): NCBI GI NO: 4099921 NR Description: EREBP-3 homolog [Stylosanthes hamata]
LSHHSLPLLLYILVMAKIGLKPDPVNNNAKEIRYRGVRKRPWGRYAAEIRDPGKKTRVWLGTFDTAEEAARAYDAAARDFRGAKAKTNFPNFLELSEKMPAAGGGFERSPSQSSTLDCDSPPAAVTPASAGIVPPQLELRLGGYQIPMARPIYFLDVMGVGNGGRAQPPVASAFRSPVACVAQSDSDSSSVVDFEGVMEKRSQLFDLDLNLSPPSEQA

SEQ ID NO: 22412 - protein, 204 aa, Zea mays subsp. mays
  peptide (1)..(204): Ceres Seq. ID no. 13624610
  misc_feature (17)..(81): Pfam Name: Pfam Description:  AP2 domain
  misc_feature (1)..(204): NCBI GI NO: 15232526 NR Description: ethylene responsive element binding factor 4
  misc_feature (1)..(189): NCBI GI NO: 2281635 NR Description: AP2 domain containing protein RAP2.5
  misc_feature (1)..(202): NCBI GI NO: 20340233 NR Description: ethylene responsive element binding factor 4-like
  misc_feature (11)..(200): NCBI GI NO: 30526297 NR Description: ethylene response factor 2
  misc_feature (11)..(200): NCBI GI NO: 28274832 NR Description: ethylene response factor 3
  misc_feature (20)..(179): NCBI GI NO: 34908900 NR Description: ethylene-responsive element binding factor 3
  misc_feature (17)..(204): NCBI GI NO: 38345793 NR Description: OSJNBa0085I10.10
  misc_feature (4)..(143): NCBI GI NO: 15219215 NR Description: ethylene responsive element binding factor 8
  misc_feature (12)..(137): NCBI GI NO: 4099914 NR Description: ethylene-responsive element binding protein homolog
  misc_feature (11)..(129): NCBI GI NO: 4099921 NR Description: EREBP-3 homolog [Stylosanthes hamata]
MAKIGLKPDPVNNNAKEIRYRGVRKRPWGRYAAEIRDPGKKTRVWLGTFDTAEEAARAYDAAARDFRGAKAKTNFPNFLELSEKMPAAGGGFERSPSQSSTLDCDSPPAAVTPASAGIVPPQLELRLGGYQIPMARPIYFLDVMGVGNGGRAQPPVASAFRSPVACVAQSDSDSSSVVDFEGVMEKRSQLFDLDLNLSPPSEQA

SEQ ID NO: 22413 - protein, 120 aa, Zea mays subsp. mays
  peptide (1)..(120): Ceres Seq. ID no. 13624611
  misc_feature (1)..(120): NCBI GI NO: 15232526 NR Description: ethylene responsive element binding factor 4
  misc_feature (1)..(105): NCBI GI NO: 2281635 NR Description: AP2 domain containing protein RAP2.5
  misc_feature (1)..(118): NCBI GI NO: 20340233 NR Description: ethylene responsive element binding factor 4-like
  misc_feature (1)..(116): NCBI GI NO: 30526297 NR Description: ethylene response factor 2
  misc_feature (1)..(116): NCBI GI NO: 28274832 NR Description: ethylene response factor 3
  misc_feature (1)..(95): NCBI GI NO: 34908900 NR Description: ethylene-responsive element binding factor 3
  misc_feature (1)..(120): NCBI GI NO: 38345793 NR Description: OSJNBa0085I10.10
  misc_feature (1)..(59): NCBI GI NO: 15219215 NR Description: ethylene responsive element binding factor 8
  misc_feature (1)..(53): NCBI GI NO: 4099914 NR Description: ethylene-responsive element binding protein homolog
  misc_feature (1)..(45): NCBI GI NO: 4099921 NR Description: EREBP-3 homolog [Stylosanthes hamata]
MPAAGGGFERSPSQSSTLDCDSPPAAVTPASAGIVPPQLELRLGGYQIPMARPIYFLDVMGVGNGGRAQPPVASAFRSPVACVAQSDSDSSSVVDFEGVMEKRSQLFDLDLNLSPPSEQA

SEQ ID NO: 22414 - DNA, 1265 bp, Zea mays subsp. mays
  misc_feature (1)..(1265): Ceres Seq. ID no. 13587235
tttatgaagtggagtttaaaacgagagataaaaaatgattaagccgctagagatagcctcaccggttgcatcatcgacaatcctgtacctctgtcagtctgtatcctttgcattctctggaacatgtatttcaaacgcaatcaacaatcgtgaatcgtgtgttccaaattgaaacacctgcagctgaggaacctcctgtggcctacttcgaagcacgacgtgtacctggtgcagagctactccgtgacgcactggtctgccctgctccggagaggaagagaggttctcaacgtggccggccggttggccccgacccagaacgtgaagggggctggaccgttgtcgagggttcagatcagcgctatggctgtgaaggacaacctcatggtggccggtggcttccagggagaactcatatgcaagtacgttgatagacccggggtggcattctgcaccagcctgaccggtggcagcagttccatcacgaacgccgtcgacatccaccaggcacccagcggcgccacgcgagtgatggcggcgaacaacgactgcgtcgtcaggacgttcgacgccgagagatacagccttctcacgcagctcaccttcccgtggtccgtcaacagcacgtcggtgagccccgacggcaagctgctggcggtcctgggcgacagcacggagtgcgtgttcgccgacccgcagtcgggcaaggcgctggcgacgctgcgcgggcacctggactactccttcgcgtcggcgtggcaccccgacagccgcgtcctggcgacggggaaccaggacgcgacgtgccggctgtgggacgcgcgcagcctgtcggagccgttcgccgtgctcggggcccggatcggcgccgtccggggcctccgcttctcccccgacggcaggttcctggccgcggccgaggccgccgacttcgtgcacgtgtacgacgccgcggccgggtacgccgacgccgcgcaggaggtggacgtgttcggggaggtcgccggcgccgcgttcagccccgacggcgaggcgctgttcgtgagcgtcgccgaccgtacctacggcggcctgctcgagttccggcgccggcgggcggaccgcttcctcgacgcgtgtttcttctgagggagaggcgcgcgcgcgcgccgtcagttgtgtactgtgcatgtgcctgccggcggccggcacgtatacatacttgtgtggtgtgttgtgtagtgtaaaacgcagagttttggtgcgtatcggacagcgtactggcc

SEQ ID NO: 22415 - protein, 254 aa, Zea mays subsp. mays
  peptide (1)..(254): Ceres Seq. ID no. 13587236
  misc_feature (18)..(69): Pfam Name: Pfam Description:  WD domain, G-beta repeat
  misc_feature (1)..(253): NCBI GI NO: 21553502 NR Description: unknown [Arabidopsis thaliana]
  misc_feature (1)..(253): NCBI GI NO: 18400003 NR Description: WD-40 repeat protein family [Arabidopsis thaliana]
  misc_feature (1)..(253): NCBI GI NO: 13937195 NR Description: At1g78070/F28K19_28 [Arabidopsis thaliana]
  misc_feature (1)..(253): NCBI GI NO: 12324715 NR Description: unknown protein; 4584-7806 [Arabidopsis thaliana]
  misc_feature (1)..(251): NCBI GI NO: 18399975 NR Description: WD-40 repeat protein family [Arabidopsis thaliana]
  misc_feature (1)..(251): NCBI GI NO: 18405485 NR Description: WD-40 repeat protein family [Arabidopsis thaliana]
  misc_feature (1)..(251): NCBI GI NO: 9294540 NR Description: WD domain protein-like [Arabidopsis thaliana]
  misc_feature (1)..(251): NCBI GI NO: 9758639 NR Description: WD-repeat protein-like [Arabidopsis thaliana]
  misc_feature (1)..(251): NCBI GI NO: 18423837 NR Description: WD-40 repeat protein family [Arabidopsis thaliana]
  misc_feature (1)..(251): NCBI GI NO: 30696707 NR Description: WD-40 repeat protein family [Arabidopsis thaliana]
MAVKDNLMVAGGFQGELICKYVDRPGVAFCTSLTGGSSSITNAVDIHQAPSGATRVMAANNDCVVRTFDAERYSLLTQLTFPWSVNSTSVSPDGKLLAVLGDSTECVFADPQSGKALATLRGHLDYSFASAWHPDSRVLATGNQDATCRLWDARSLSEPFAVLGARIGAVRGLRFSPDGRFLAAAEAADFVHVYDAAAGYADAAQEVDVFGEVAGAAFSPDGEALFVSVADRTYGGLLEFRRRRADRFLDACFF

SEQ ID NO: 22416 - protein, 247 aa, Zea mays subsp. mays
  peptide (1)..(247): Ceres Seq. ID no. 13587237
  misc_feature (11)..(62): Pfam Name: Pfam Description:  WD domain, G-beta repeat
  misc_feature (1)..(246): NCBI GI NO: 21553502 NR Description: unknown [Arabidopsis thaliana]
  misc_feature (1)..(246): NCBI GI NO: 18400003 NR Description: WD-40 repeat protein family [Arabidopsis thaliana]
  misc_feature (1)..(246): NCBI GI NO: 13937195 NR Description: At1g78070/F28K19_28 [Arabidopsis thaliana]
  misc_feature (1)..(246): NCBI GI NO: 12324715 NR Description: unknown protein; 4584-7806 [Arabidopsis thaliana]
  misc_feature (1)..(244): NCBI GI NO: 18399975 NR Description: WD-40 repeat protein family [Arabidopsis thaliana]
  misc_feature (1)..(244): NCBI GI NO: 18405485 NR Description: WD-40 repeat protein family [Arabidopsis thaliana]
  misc_feature (1)..(244): NCBI GI NO: 9294540 NR Description: WD domain protein-like [Arabidopsis thaliana]
  misc_feature (1)..(244): NCBI GI NO: 9758639 NR Description: WD-repeat protein-like [Arabidopsis thaliana]
  misc_feature (1)..(244): NCBI GI NO: 30696707 NR Description: WD-40 repeat protein family [Arabidopsis thaliana]
  misc_feature (1)..(244): NCBI GI NO: 18423837 NR Description: WD-40 repeat protein family [Arabidopsis thaliana]
MVAGGFQGELICKYVDRPGVAFCTSLTGGSSSITNAVDIHQAPSGATRVMAANNDCVVRTFDAERYSLLTQLTFPWSVNSTSVSPDGKLLAVLGDSTECVFADPQSGKALATLRGHLDYSFASAWHPDSRVLATGNQDATCRLWDARSLSEPFAVLGARIGAVRGLRFSPDGRFLAAAEAADFVHVYDAAAGYADAAQEVDVFGEVAGAAFSPDGEALFVSVADRTYGGLLEFRRRRADRFLDACFF

SEQ ID NO: 22417 - protein, 198 aa, Zea mays subsp. mays
  peptide (1)..(198): Ceres Seq. ID no. 13587238
  misc_feature (1)..(197): NCBI GI NO: 21553502 NR Description: unknown [Arabidopsis thaliana]
  misc_feature (1)..(197): NCBI GI NO: 18400003 NR Description: WD-40 repeat protein family [Arabidopsis thaliana]
  misc_feature (1)..(197): NCBI GI NO: 13937195 NR Description: At1g78070/F28K19_28 [Arabidopsis thaliana]
  misc_feature (1)..(197): NCBI GI NO: 12324715 NR Description: unknown protein; 4584-7806 [Arabidopsis thaliana]
  misc_feature (1)..(195): NCBI GI NO: 18399975 NR Description: WD-40 repeat protein family [Arabidopsis thaliana]
  misc_feature (1)..(195): NCBI GI NO: 18405485 NR Description: WD-40 repeat protein family [Arabidopsis thaliana]
  misc_feature (1)..(195): NCBI GI NO: 9294540 NR Description: WD domain protein-like [Arabidopsis thaliana]
  misc_feature (1)..(195): NCBI GI NO: 9758639 NR Description: WD-repeat protein-like [Arabidopsis thaliana]
  misc_feature (1)..(195): NCBI GI NO: 18423837 NR Description: WD-40 repeat protein family [Arabidopsis thaliana]
  misc_feature (1)..(195): NCBI GI NO: 30696707 NR Description: WD-40 repeat protein family [Arabidopsis thaliana]
MAANNDCVVRTFDAERYSLLTQLTFPWSVNSTSVSPDGKLLAVLGDSTECVFADPQSGKALATLRGHLDYSFASAWHPDSRVLATGNQDATCRLWDARSLSEPFAVLGARIGAVRGLRFSPDGRFLAAAEAADFVHVYDAAAGYADAAQEVDVFGEVAGAAFSPDGEALFVSVADRTYGGLLEFRRRRADRFLDACFF

SEQ ID NO: 22418 - DNA, 789 bp, Zea mays subsp. mays
  misc_feature (1)..(789): Ceres Seq. ID no. 13599622
gaattacgcatgcatacatacgtatacgtacgcgtattaccatatactacactatccttttacaaattaaacgtactaccagtctatcacagctgtacgttgcggcttgtatgtattttacacgttgacgaagggcgcgccggtaaggtactcggtgacggcgagcgcgacgaggccgagcatggcgaggcggccgttccagagctcggcgtcggcggtcatgaaccggccgctcctgccctcggcgctctccccctggagcagcggcaccagggacgcggcggacaggacggcggcggtgtacgcgaaccacgcgaggccggcgccgttgccggcctgcgagaggatgccgtcgccgcgggtggcctcgacggcgagcgcggacacgaagcccaccatcgccagccgcccgttgatccgctccggcgcgggcccgctgaacgccagcgcgtcccagagccccagcttccgagcagccggtgccgcgctcgcgctcgtgtcggcggcagcgtcatcggcctgctgggaggccctggcgagcagcacgaggcggcgcggcggcgcggcgacacggccgcggaaccccgccggaagccgggcggcgcgcctggcgcgcgcgccgggggcggagaaggcgggggagctcgcggtcgcggaggccatcaccgtggtcgccatcggaagcgcacgttcgtacgtacgggtagttgctgggtgctgggctgctggctagctattagctgtgactgtgatactcagatcggagtagttgcggcctgcggctttttt

SEQ ID NO: 22419 - protein, 263 aa, Zea mays subsp. mays
  peptide (1)..(263): Ceres Seq. ID no. 13599623
  misc_feature (45)..(229): NCBI GI NO: 34911494 NR Description: P0454A11.22
ELRMHTYVYVRVLPYTTLSFYKLNVLPVYHSCTLRLVCILHVDEGRAGKVLGDGERDEAEHGEAAVPELGVGGHEPAAPALGALPLEQRHQGRGGQDGGGVREPREAGAVAGLREDAVAAGGLDGERGHEAHHRQPPVDPLRRGPAERQRVPEPQLPSSRCRARARVGGSVIGLLGGPGEQHEAARRRGDTAAEPRRKPGGAPGARAGGGEGGGARGRGGHHRGRHRKRTFVRTGSCWVLGCWLAISCDCDTQIGVVAACGFF

SEQ ID NO: 22420 - protein, 260 aa, Zea mays subsp. mays
  peptide (1)..(260): Ceres Seq. ID no. 13599624
  misc_feature (42)..(226): NCBI GI NO: 34911494 NR Description: P0454A11.22
MHTYVYVRVLPYTTLSFYKLNVLPVYHSCTLRLVCILHVDEGRAGKVLGDGERDEAEHGEAAVPELGVGGHEPAAPALGALPLEQRHQGRGGQDGGGVREPREAGAVAGLREDAVAAGGLDGERGHEAHHRQPPVDPLRRGPAERQRVPEPQLPSSRCRARARVGGSVIGLLGGPGEQHEAARRRGDTAAEPRRKPGGAPGARAGGGEGGGARGRGGHHRGRHRKRTFVRTGSCWVLGCWLAISCDCDTQIGVVAACGFF

SEQ ID NO: 22421 - protein, 183 aa, Zea mays subsp. mays
  peptide (1)..(183): Ceres Seq. ID no. 13599625
MARRPFQSSASAVMNRPLLPSALSPWSSGTRDAADRTAAVYANHARPAPLPACERMPSPRVASTASADTKPTIASRPLIRSGAGPLNASASQSPSFRAAGAALALVSAAASSACWEALASSTRRRGGAATRPRNPAGSRAARLARAPGAEKAGELAVAEAITVVAIGSARSYVRVVAGCWAAG

SEQ ID NO: 22422 - DNA, 851 bp, Zea mays subsp. mays
  misc_feature (1)..(851): Ceres Seq. ID no. 13599572
ctcacaacgatcggaccaaagaatcatacccatctcttttgaccattcaaactagtgaaaaatgggggtactcagaaagaaacacaataaaaaatccagaaggccgtcgtttaagagtgttttaacctcaatattagctacacaagccgcaatatttctcttattgctcgccggtgtttccctcgctggcacagccgtcgcatttatcgctagcatgccactattcgtagtattcagtccgattctcgtaccagcgggtgttgccactggtttactggccacgggtttagcagccgccggtagctccggtgcaatggctgtctccctcatcctttgggtcttcaagcgagtaacggggaaggagccgccaaaaatcatgtcaaaagtcttgaaaaaggtgtttcctggtggaggtgctgcagctaaactggcagcaaaaccagaagccgacccagcggccgcaccagcggcagcaccatcagccgcaccagcagctgcaccgagtacatgaaagcggtgggtaataagcaaaggatgatagataaataatccaactttaaaaaataaataataatatttacgtggggatggaagttaaattttcaaatatcactatactaatggatatcgtggaacaaaatagtaacaaatgtaagcatttttattgtataacattttaagaacgaagcgaagtgtcgttgacgttaattttattcaagttcaactaaaatgttattcaagttcttgttcaccaacgttgtcaaacgagacaatctataggcctcaaggaaccattgtaagttacatgtaaaatggggccataataattatggtcaagtaatgcccttttc

SEQ ID NO: 22423 - protein, 149 aa, Zea mays subsp. mays
  peptide (1)..(149): Ceres Seq. ID no. 13599573
  misc_feature (16)..(118): Pfam Name: Pfam Description:  Oleosin
  misc_feature (1)..(149): NCBI GI NO: 7488519 NR Description: anther-specific protein BNA237 - turnip
  misc_feature (1)..(148): NCBI GI NO: 1076453 NR Description: oleosin - rape
  misc_feature (1)..(148): NCBI GI NO: 1076452 NR Description: oleosin - rape
  misc_feature (58)..(149): NCBI GI NO: 7488475 NR Description: oleosin-like protein OLN8 - rape (fragment)
  misc_feature (1)..(148): NCBI GI NO: 123952 NR Description: MICROSPORE-SPECIFIC PROTEIN I3
  misc_feature (57)..(149): NCBI GI NO: 7488470 NR Description: oleosin-like protein OLN10 - rape (fragment)
  misc_feature (5)..(145): NCBI GI NO: 15240816 NR Description: glycine-rich protein GRP20 [Arabidopsis thaliana]
  misc_feature (5)..(145): NCBI GI NO: 15081213 NR Description: glycine-rich protein GRP20 [Arabidopsis thaliana]
  misc_feature (5)..(141): NCBI GI NO: 15081227 NR Description: glycine-rich protein GRP20 [Arabidopsis thaliana]
  misc_feature (5)..(145): NCBI GI NO: 15081220 NR Description: glycine-rich protein GRP20 [Arabidopsis thaliana]
MGVLRKKHNKKSRRPSFKSVLTSILATQAAIFLLLLAGVSLAGTAVAFIASMPLFVVFSPILVPAGVATGLLATGLAAAGSSGAMAVSLILWVFKRVTGKEPPKIMSKVLKKVFPGGGAAAKLAAKPEADPAAAPAAAPSAAPAAAPST

SEQ ID NO: 22424 - protein, 98 aa, Zea mays subsp. mays
  peptide (1)..(98): Ceres Seq. ID no. 13599574
  misc_feature (1)..(67): Pfam Name: Pfam Description:  Oleosin
  misc_feature (1)..(98): NCBI GI NO: 7488519 NR Description: anther-specific protein BNA237 - turnip
  misc_feature (1)..(97): NCBI GI NO: 1076453 NR Description: oleosin - rape
  misc_feature (1)..(97): NCBI GI NO: 1076452 NR Description: oleosin - rape
  misc_feature (7)..(98): NCBI GI NO: 7488475 NR Description: oleosin-like protein OLN8 - rape (fragment)
  misc_feature (1)..(97): NCBI GI NO: 123952 NR Description: MICROSPORE-SPECIFIC PROTEIN I3
  misc_feature (6)..(98): NCBI GI NO: 7488470 NR Description: oleosin-like protein OLN10 - rape (fragment)
  misc_feature (1)..(94): NCBI GI NO: 15240816 NR Description: glycine-rich protein GRP20 [Arabidopsis thaliana]
  misc_feature (1)..(94): NCBI GI NO: 15081213 NR Description: glycine-rich protein GRP20 [Arabidopsis thaliana]
  misc_feature (1)..(90): NCBI GI NO: 15081227 NR Description: glycine-rich protein GRP20 [Arabidopsis thaliana]
  misc_feature (1)..(94): NCBI GI NO: 15081220 NR Description: glycine-rich protein GRP20 [Arabidopsis thaliana]
MPLFVVFSPILVPAGVATGLLATGLAAAGSSGAMAVSLILWVFKRVTGKEPPKIMSKVLKKVFPGGGAAAKLAAKPEADPAAAPAAAPSAAPAAAPST

SEQ ID NO: 22425 - DNA, 717 bp, Zea mays subsp. mays
  misc_feature (1)..(717): Ceres Seq. ID no. 12635864
aagcaacagtactctctctcctacctcactcctctctctctctctccccctgcaaattcatggcgacggagaccgagtttgaacctcaacaatcaccaatggcggaggagcagccgagtcccttctctctcccaccgtatcctcagatgatcatggaagcgatcgaagcatcgaacgacgcgaacggttgcaacaagacggcgatcgcgaagcacatcgagtcaactcaggcctctctaccaccgtctcacatgacgctcctcagctaccacctcaaccagatgaaacagtccggccagatcgcgatggtgaagaacaactacatgaaaccagatccgcatgctccgcccaagcgcggccgtggccgtcctccgaaggcgaaacctcagggagattcaagccacgtggcggtcccggctcctgctcctcccgtttcctcgccgaggcctagaggtcgtcctcccaaggcgaaggaaccttcgtcggaggtggaaacgaaggttgcagaaccgagtggttccgggaggccacgtggacggccaccgtagaagcagaagacggaatccgaggcggttaaagccgatgttgaacctgcggaggctccggctggtactggggagcggagagggcgtggaaggccacccaaagcgaagcctgcgatggtgcctgttggttgctaaagttgacgcttaagcaaatcgaataagctttgattag

SEQ ID NO: 22426 - protein, 181 aa, Zea mays subsp. mays
  peptide (1)..(181): Ceres Seq. ID no. 12635865
  misc_feature (42)..(111): Pfam Name: Pfam Description:  linker histone H1 and H5 family
  misc_feature (20)..(181): NCBI GI NO: 6651027 NR Description: high mobility group protein I/Y [Brassica napus]
  misc_feature (34)..(181): NCBI GI NO: 15223947 NR Description: linker histone protein, putative
  misc_feature (34)..(181): NCBI GI NO: 1808590 NR Description: HMG-I/Y [Arabidopsis thaliana]
  misc_feature (49)..(181): NCBI GI NO: 21536605 NR Description: linker histone protein, putative
  misc_feature (20)..(181): NCBI GI NO: 7439646 NR Description: DNA binding protein PF1 - rice
  misc_feature (35)..(181): NCBI GI NO: 9837562 NR Description: high mobility group I/Y-2 [Zea mays]
  misc_feature (35)..(181): NCBI GI NO: 11544762 NR Description: HMGI/Y protein [Zea mays]
  misc_feature (36)..(181): NCBI GI NO: 2129885 NR Description: HMGI/Y protein - garden pea
  misc_feature (35)..(181): NCBI GI NO: 4585621 NR Description: HMGI/Y protein [Zea mays]
  misc_feature (35)..(181): NCBI GI NO: 7439663 NR Description: high mobility group protein HMGI/Y-1 - sword bean
ATVLSLLPHSSLSLSPCKFMATETEFEPQQSPMAEEQPSPFSLPPYPQMIMEAIEASNDANGCNKTAIAKHIESTQASLPPSHMTLLSYHLNQMKQSGQIAMVKNNYMKPDPHAPPKRGRGRPPKAKPQGDSSHVAVPAPAPPVSSPRPRGRPPKAKEPSSEVETKVAEPSGSGRPRGRPP

SEQ ID NO: 22427 - protein, 162 aa, Zea mays subsp. mays
  peptide (1)..(162): Ceres Seq. ID no. 12635866
  misc_feature (23)..(92): Pfam Name: Pfam Description:  linker histone H1 and H5 family
  misc_feature (1)..(162): NCBI GI NO: 6651027 NR Description: high mobility group protein I/Y [Brassica napus]
  misc_feature (15)..(162): NCBI GI NO: 15223947 NR Description: linker histone protein, putative
  misc_feature (15)..(162): NCBI GI NO: 1808590 NR Description: HMG-I/Y [Arabidopsis thaliana]
  misc_feature (30)..(162): NCBI GI NO: 21536605 NR Description: linker histone protein, putative
  misc_feature (1)..(162): NCBI GI NO: 7439646 NR Description: DNA binding protein PF1 - rice
  misc_feature (16)..(162): NCBI GI NO: 9837562 NR Description: high mobility group I/Y-2 [Zea mays]
  misc_feature (16)..(162): NCBI GI NO: 11544762 NR Description: HMGI/Y protein [Zea mays]
  misc_feature (17)..(162): NCBI GI NO: 2129885 NR Description: HMGI/Y protein - garden pea
  misc_feature (16)..(162): NCBI GI NO: 4585621 NR Description: HMGI/Y protein [Zea mays]
  misc_feature (16)..(162): NCBI GI NO: 7439663 NR Description: high mobility group protein HMGI/Y-1 - sword bean
MATETEFEPQQSPMAEEQPSPFSLPPYPQMIMEAIEASNDANGCNKTAIAKHIESTQASLPPSHMTLLSYHLNQMKQSGQIAMVKNNYMKPDPHAPPKRGRGRPPKAKPQGDSSHVAVPAPAPPVSSPRPRGRPPKAKEPSSEVETKVAEPSGSGRPRGRPP

SEQ ID NO: 22428 - protein, 149 aa, Zea mays subsp. mays
  peptide (1)..(149): Ceres Seq. ID no. 12635867
  misc_feature (10)..(79): Pfam Name: Pfam Description:  linker histone H1 and H5 family
  misc_feature (1)..(149): NCBI GI NO: 6651027 NR Description: high mobility group protein I/Y [Brassica napus]
  misc_feature (2)..(149): NCBI GI NO: 15223947 NR Description: linker histone protein, putative
  misc_feature (2)..(149): NCBI GI NO: 1808590 NR Description: HMG-I/Y [Arabidopsis thaliana]
  misc_feature (17)..(149): NCBI GI NO: 21536605 NR Description: linker histone protein, putative
  misc_feature (1)..(149): NCBI GI NO: 7439646 NR Description: DNA binding protein PF1 - rice
  misc_feature (3)..(149): NCBI GI NO: 9837562 NR Description: high mobility group I/Y-2 [Zea mays]
  misc_feature (3)..(149): NCBI GI NO: 11544762 NR Description: HMGI/Y protein [Zea mays]
  misc_feature (4)..(149): NCBI GI NO: 2129885 NR Description: HMGI/Y protein - garden pea
  misc_feature (3)..(149): NCBI GI NO: 4585621 NR Description: HMGI/Y protein [Zea mays]
  misc_feature (3)..(149): NCBI GI NO: 7439663 NR Description: high mobility group protein HMGI/Y-1 - sword bean
MAEEQPSPFSLPPYPQMIMEAIEASNDANGCNKTAIAKHIESTQASLPPSHMTLLSYHLNQMKQSGQIAMVKNNYMKPDPHAPPKRGRGRPPKAKPQGDSSHVAVPAPAPPVSSPRPRGRPPKAKEPSSEVETKVAEPSGSGRPRGRPP

SEQ ID NO: 22429 - DNA, 686 bp, Zea mays subsp. mays
  misc_feature (1)..(686): Ceres Seq. ID no. 13599473
ccattacctagaacatcctaatcgaaaaaaaacccactcacacactgtgacgctgctgatgcgcctcatcgtccccgtccccccggcagagcccacccaccctccactccaacccacgccggcgaacccagccagccgcccacgtcgcctcccggtcccggcttagaccagactcagattcagatgcacctgctcgacgacctccgccaagaccgcggcggcgcggccgcccacaccggcagccgcagtcgcaagccgcccccgccccttgccgccgccgccgccgccgccgcgggggtcccggcgggctcctccaccgccgccaccgccacccacctgggcccggaggcggcggcgctgctggcgtgcgtcacggccacgctgctgctgcttccgctggtcctgccgcccctgccgccgccgccgccgctcctcctcctcgtgcccgtcgccatcttcgccgtcctgctactcctcgtgctcctcccctccgacgcccgcgccgccgtcgccacgcccacctcctccgcctcctacttgtagcagtagcttatacgtcttgttgtacagggtactggtacctagctagctgatcgagtgagttgagtgacagagtgagtagagtggattttggtaggcgtgcatgcaaaatgtaaataaaaccaaaccccagcgcggattcttct

SEQ ID NO: 22430 - protein, 119 aa, Zea mays subsp. mays
  peptide (1)..(119): Ceres Seq. ID no. 13599474
  misc_feature (6)..(103): NCBI GI NO: 21742737 NR Description: OSJNBa0027P08.2
  misc_feature (1)..(109): NCBI GI NO: 34907496 NR Description: B1099D03.18
  misc_feature (48)..(114): NCBI GI NO: 30689607 NR Description: expressed protein [Arabidopsis thaliana]
  misc_feature (49)..(103): NCBI GI NO: 30695081 NR Description: expressed protein [Arabidopsis thaliana]
MHLLDDLRQDRGGAAAHTGSRSRKPPPPLAAAAAAAAGVPAGSSTAATATHLGPEAAALLACVTATLLLLPLVLPPLPPPPPLLLLVPVAIFAVLLLLVLLPSDARAAVATPTSSASYL

SEQ ID NO: 22431 - DNA, 1503 bp, Zea mays subsp. mays
  misc_feature (1)..(1503): Ceres Seq. ID no. 15225158
accgagtccgccgccgccgccgcccacctttcttcttctcccaaaccctagtctccggcggcgatggcccccaagcgcgccgcgaagaaggcggcacccccgcctccgcctccgcctccggctgcctcctctgaggagagcgaatcccgctcgcgctccgaggagtcggagggcgaagacgccgagtcccctccccccgcccccaccccggcccccaagagcacgccggcgcccccgcaggagggagaggaggaggaggaggagtctgaagaggaagacgaggaggagactgatgaggagcccgcccacgcggccccagccgccgccgccacccccaagaacaagcctccgccgccgcaacagggaggtgactccgattcttcttccgacgaggaggaggaggagcccaccaaggcggcccctccctccgccctgaagaaacaacccccgccgccgccgccgccgcggcagagcgaggaatcggacgcctccgacgaggaagaagaggagggtgagtccgaggaggaggcgccgccgccgccgccgccgaagcttgctccaaagcaggcgccagagggccggaagccccaggcagcggcggagaccaagaagccggccgctttcaaccgcatctggtccaccgacgacgaggtgcgtatcctcgaggcccttgctgctcaccaaaagcagcacggcacgctgccgcagccggacgccctcgtggacgcccttgcaggaaagctcgacaaccgtgcctacggcagcaaggagctccaggggaaggtcttggccctgaggcgtcgttacctccttctcagcaagaagggcgagcccccgagcaaggagcatgaccgccgggtgctggaactttccaagatggtctgggaaggcggtgacacggccgcagctgcccctgcgaaggcggcaaatggccaggagccaaaggggttcgaggagatgtgcgagctgtatccgtacctggcggagcaggtgagggagctggatgcggcgaacccgggcatcttcaagaggcagttcgggatgatggacgacgacaaggcgcgcgcgatggacgagaagatcaagaggcagagggtggcgcagatgaaggtggagctgcgccgccacgacctggccagggaggtgaccaaggcgatcatcgacctggtcgactgatcggagcgtcatgggcttacaagttagtacaaactgaaactgtatctgtgatcacctgaagttggtgcgatgaaatgcggcgttttggtggagcaagaatgtttctgaaactatgatctagagtctgcggattgggctggctcgatgcatcagacatgtggtggaactgcaaattgtgcctcctgtttgtaagaatgcttttctcgtgtggccagagcaaatgctagaaatagcaaattaggggtgtctttatagtgtaagcatgatgagacatgtgctggaactgcaaattgtgctggtggattaagaatattttccgaagtgcgc

SEQ ID NO: 22432 - protein, 370 aa, Zea mays subsp. mays
  peptide (1)..(370): Ceres Seq. ID no. 15225159
  misc_feature (1)..(162): Pfam Name: Pfam Description:  Formin Homology 2 Domain
  misc_feature (5)..(261): NCBI GI NO: 27804344 NR Description: nucleolin [Cyprinus carpio]
  misc_feature (1)..(196): NCBI GI NO: 33416846 NR Description: Unknown (protein for IMAGE:3818638) [Danio rerio]
  misc_feature (5)..(165): NCBI GI NO: 33359635 NR Description: nucleolin 3 [Cyprinus carpio]
  misc_feature (5)..(165): NCBI GI NO: 33359633 NR Description: nucleolin 2 [Cyprinus carpio]
  misc_feature (12)..(188): NCBI GI NO: 19072840 NR Description: EP-repeat protein precursor
  misc_feature (1)..(216): NCBI GI NO: 28856212 NR Description: Unknown (protein for IMAGE:3818911) [Danio rerio]
  misc_feature (1)..(203): NCBI GI NO: 39935648 NR Description: unknown protein [Rhodopseudomonas palustris]
  misc_feature (1)..(195): NCBI GI NO: 33416846 NR Description: Unknown (protein for IMAGE:3818638) [Danio rerio]
  misc_feature (1)..(184): NCBI GI NO: 12053779 NR Description: Nahoda protein [Drosophila melanogaster]
  misc_feature (1)..(196): NCBI GI NO: 28856212 NR Description: Unknown (protein for IMAGE:3818911) [Danio rerio]
MAPKRAAKKAAPPPPPPPPAASSEESESRSRSEESEGEDAESPPPAPTPAPKSTPAPPQEGEEEEEESEEEDEEETDEEPAHAAPAAAATPKNKPPPPQQGGDSDSSSDEEEEEPTKAAPPSALKKQPPPPPPPRQSEESDASDEEEEEGESEEEAPPPPPPKLAPKQAPEGRKPQAAAETKKPAAFNRIWSTDDEVRILEALAAHQKQHGTLPQPDALVDALAGKLDNRAYGSKELQGKVLALRRRYLLLSKKGEPPSKEHDRRVLELSKMVWEGGDTAAAAPAKAANGQEPKGFEEMCELYPYLAEQVRELDAANPGIFKRQFGMMDDDKARAMDEKIKRQRVAQMKVELRRHDLAREVTKAIIDLVD

SEQ ID NO: 22433 - DNA, 795 bp, Zea mays subsp. mays
  misc_feature (1)..(795): Ceres Seq. ID no. 12635868
  misc_feature (781)..(781): n is a, c, t, g, unknown, or other
attttctttacactgaaccatcactgagagagtgcgcttcacacaataaacaaaaaaaaatggctaggcaatttgctattgttgcgatctgcatcgtcctcatcgccggcgtcggaggtcaagctccgtcggcaccaccaaccaccacaccagcaccacccaccacaacaactcccccgccagcagccactcctcctcctgtctcagctcctccaccagtcacaacttctcctcctccagccaccaccgctcctcctcctgctactcctcctccagtcgcttctcctcctccggccactcctcctccagtggcaactcctcctccagcaactccccctcccgtcgcatctcctcctccagcaactcctccacccgtcgcatctcctcctccagcaacgcctcctccagctcctcttgcatctcctcccgctcaggttccagctcttgctcctacgacgccagacgctccctctacatctccgtcgtctagcccgcctctcccggccactgatggccctggaccgagcgccgaagggccaggaccttccacagattcgaatgaccagaatggagcaagcaagacagtttcaagcttggtacttggatctgttctcgtttggtttatgatctaagcgcgggagcctttcgctcggtgttccttgcatttgttttcatgttgatgtttgtttgttccattgttattactttcggaaccgtattcttttggattattatcttttggagaggatattattgagacttgagatggagatatcaggantatatttcgtttgg

SEQ ID NO: 22434 - protein, 209 aa, Zea mays subsp. mays
  peptide (1)..(209): Ceres Seq. ID no. 12635869
  misc_feature (41)..(183): Pfam Name: Pfam Description:  Formin Homology 2 Domain
  misc_feature (20)..(209): NCBI GI NO: 15226024 NR Description: arabinogalactan-protein
  misc_feature (20)..(209): NCBI GI NO: 13265426 NR Description: At2g14890 [Arabidopsis thaliana]
  misc_feature (43)..(209): NCBI GI NO: 7441828 NR Description: extensin-like cell wall protein
  misc_feature (43)..(209): NCBI GI NO: 7441829 NR Description: proline-rich cell wall protein - upland cotton
  misc_feature (24)..(209): NCBI GI NO: 7441828 NR Description: extensin-like cell wall protein
  misc_feature (24)..(209): NCBI GI NO: 7441829 NR Description: proline-rich cell wall protein - upland cotton
  misc_feature (42)..(203): NCBI GI NO: 1084362 NR Description: extensin-like protein S3 - alfalfa
  misc_feature (26)..(175): NCBI GI NO: 1084362 NR Description: extensin-like protein S3 - alfalfa
  misc_feature (20)..(201): NCBI GI NO: 5139695 NR Description: expressed in cucumber hypocotyls [Cucumis sativus]
  misc_feature (41)..(181): NCBI GI NO: 5917664 NR Description: extensin-like protein [Lycopersicon esculentum]
FLYTEPSLRECASHNKQKKMARQFAIVAICIVLIAGVGGQAPSAPPTTTPAPPTTTTPPPAATPPPVSAPPPVTTSPPPATTAPPPATPPPVASPPPATPPPVATPPPATPPPVASPPPATPPPVASPPPATPPPAPLASPPAQVPALAPTTPDAPSTSPSSSPPLPATDGPGPSAEGPGPSTDSNDQNGASKTVSSLVLGSVLVWFMI

SEQ ID NO: 22435 - protein, 190 aa, Zea mays subsp. mays
  peptide (1)..(190): Ceres Seq. ID no. 12635870
  misc_feature (22)..(164): Pfam Name: Pfam Description:  Formin Homology 2 Domain
  misc_feature (1)..(190): NCBI GI NO: 15226024 NR Description: arabinogalactan-protein
  misc_feature (1)..(190): NCBI GI NO: 13265426 NR Description: At2g14890 [Arabidopsis thaliana]
  misc_feature (24)..(190): NCBI GI NO: 7441828 NR Description: extensin-like cell wall protein
  misc_feature (24)..(190): NCBI GI NO: 7441829 NR Description: proline-rich cell wall protein - upland cotton
  misc_feature (5)..(190): NCBI GI NO: 7441828 NR Description: extensin-like cell wall protein
  misc_feature (5)..(190): NCBI GI NO: 7441829 NR Description: proline-rich cell wall protein - upland cotton
  misc_feature (23)..(184): NCBI GI NO: 1084362 NR Description: extensin-like protein S3 - alfalfa
  misc_feature (7)..(156): NCBI GI NO: 1084362 NR Description: extensin-like protein S3 - alfalfa
  misc_feature (1)..(182): NCBI GI NO: 5139695 NR Description: expressed in cucumber hypocotyls [Cucumis sativus]
  misc_feature (22)..(162): NCBI GI NO: 5917664 NR Description: extensin-like protein [Lycopersicon esculentum]
MARQFAIVAICIVLIAGVGGQAPSAPPTTTPAPPTTTTPPPAATPPPVSAPPPVTTSPPPATTAPPPATPPPVASPPPATPPPVATPPPATPPPVASPPPATPPPVASPPPATPPPAPLASPPAQVPALAPTTPDAPSTSPSSSPPLPATDGPGPSAEGPGPSTDSNDQNGASKTVSSLVLGSVLVWFMI

SEQ ID NO: 22436 - DNA, 1331 bp, Zea mays subsp. mays
  misc_feature (1)..(1331): Ceres Seq. ID no. 15224799
atctatacaaaccaaactcgcgctccagaccacagctcaccctcacctgcgacctgcgcgcattcacagccgccggcgccacacgtgcccgcgcgccgggcgccacctctctcccatccaccagccttcctctcccgggccaggcggcgcccctcaatggccgccaccttcaccgtcgccgcccgcctcccgctgcggggccccgcgcgcgctccgtcccggccggccgtcgctgctgtaacccggcttcgaagccggcaggagcggcgcggcctagcagcgacaggcgggaggggacctgcccgggttcgggccgagactttctccggtggtggaggcgtggggcggagggaccccatggcgccgccttacaatgtcctcatcaccggctctacgaaaggtataggatatgcattggcaaggaaatttctggaggctggtgataacgttataatctgctcgagatcagctcaaaaggtagaatctgtggtcggtgacttgaaggaggagtacggagagcaacatgtgtggggaactgtctgtgatgttagaaatggaaaggatgtaaaggcacttgtggagtttgcacgtgacaaacttaagcatattgatatatggatcaacaatgctggatcaaatgcatatacatacaaaccactagtggagacctctgatgaggctctcatggaaatcatcaccactaacacccttggattgatgatatgttgtcgtgaggcgataaatatgatgaggaaccaacctcgaggtggtcacatattcaaccttgatggtgctggttctgatggaaggccaactccaagatttgctgcatatggtgcaacaaagagaagtgttgtgcatcttacgaagtcacttcaggctgaattgcagatgaatgaagtgaataatgtgatggtgcacaatctatcgcctggcatggtcacaacagatcttcttatgtctggtgcaactacaaaacaagcaaaatttttcatcaatatattagctgaacctcctgatgtggttgcagactaccttgttccaaacgtcagagaaatccctaccaagcaatccatgaagccaacctacattcgtttcctcacaggcttgaaggcctactcaagaattttttctagacttgcttttggtgctaggagaaacaagtatgttactgaagattagttatgctgccagcttccaactgaagagattaggaacaattcttttcattaagcgtcacttacttttctcataagatgggatgtattacagatgtcatctcatgagaacagtgatatactcttctgtacagtagtagcaatttttttagt

SEQ ID NO: 22437 - protein, 393 aa, Zea mays subsp. mays
  peptide (1)..(393): Ceres Seq. ID no. 15224800
  misc_feature (53)..(393): NCBI GI NO: 29244639 NR Description: putative oxidoreductase protein
  misc_feature (75)..(393): NCBI GI NO: 18414726 NR Description: short-chain dehydrogenase/reductase family protein
  misc_feature (75)..(378): NCBI GI NO: 10178029 NR Description: gene_id:MUG13
  misc_feature (107)..(368): NCBI GI NO: 18413962 NR Description: short-chain dehydrogenase/reductase family protein
  misc_feature (107)..(393): NCBI GI NO: 34904226 NR Description: P0443E07.30
  misc_feature (120)..(389): NCBI GI NO: 21673969 NR Description: oxidoreductase
  misc_feature (168)..(368): NCBI GI NO: 7485669 NR Description: hypothetical protein F17N18
  misc_feature (127)..(347): NCBI GI NO: 21674585 NR Description: oxidoreductase
  misc_feature (127)..(352): NCBI GI NO: 22971619 NR Description: hypothetical protein [Chloroflexus aurantiacus]
  misc_feature (127)..(327): NCBI GI NO: 17560676 NR Description: DeHydrogenase, Short chain (dhs-13)
IYTNQTRAPDHSSPSPATCAHSQPPAPHVPARRAPPLSHPPAFLSRARRRPSMAATFTVAARLPLRGPARAPSRPAVAAVTRLRSRQERRGLAATGGRGPARVRAETFSGGGGVGRRDPMAPPYNVLITGSTKGIGYALARKFLEAGDNVIICSRSAQKVESVVGDLKEEYGEQHVWGTVCDVRNGKDVKALVEFARDKLKHIDIWINNAGSNAYTYKPLVETSDEALMEIITTNTLGLMICCREAINMMRNQPRGGHIFNLDGAGSDGRPTPRFAAYGATKRSVVHLTKSLQAELQMNEVNNVMVHNLSPGMVTTDLLMSGATTKQAKFFINILAEPPDVVADYLVPNVREIPTKQSMKPTYIRFLTGLKAYSRIFSRLAFGARRNKYVTED

SEQ ID NO: 22438 - protein, 341 aa, Zea mays subsp. mays
  peptide (1)..(341): Ceres Seq. ID no. 15224801
  misc_feature (1)..(341): NCBI GI NO: 29244639 NR Description: putative oxidoreductase protein
  misc_feature (23)..(341): NCBI GI NO: 18414726 NR Description: short-chain dehydrogenase/reductase family protein
  misc_feature (23)..(326): NCBI GI NO: 10178029 NR Description: gene_id:MUG13
  misc_feature (55)..(316): NCBI GI NO: 18413962 NR Description: short-chain dehydrogenase/reductase family protein
  misc_feature (55)..(341): NCBI GI NO: 34904226 NR Description: P0443E07.30
  misc_feature (68)..(337): NCBI GI NO: 21673969 NR Description: oxidoreductase
  misc_feature (116)..(316): NCBI GI NO: 7485669 NR Description: hypothetical protein F17N18
  misc_feature (75)..(295): NCBI GI NO: 21674585 NR Description: oxidoreductase
  misc_feature (75)..(300): NCBI GI NO: 22971619 NR Description: hypothetical protein [Chloroflexus aurantiacus]
  misc_feature (75)..(275): NCBI GI NO: 17560676 NR Description: DeHydrogenase, Short chain (dhs-13)
MAATFTVAARLPLRGPARAPSRPAVAAVTRLRSRQERRGLAATGGRGPARVRAETFSGGGGVGRRDPMAPPYNVLITGSTKGIGYALARKFLEAGDNVIICSRSAQKVESVVGDLKEEYGEQHVWGTVCDVRNGKDVKALVEFARDKLKHIDIWINNAGSNAYTYKPLVETSDEALMEIITTNTLGLMICCREAINMMRNQPRGGHIFNLDGAGSDGRPTPRFAAYGATKRSVVHLTKSLQAELQMNEVNNVMVHNLSPGMVTTDLLMSGATTKQAKFFINILAEPPDVVADYLVPNVREIPTKQSMKPTYIRFLTGLKAYSRIFSRLAFGARRNKYVTED

SEQ ID NO: 22439 - protein, 274 aa, Zea mays subsp. mays
  peptide (1)..(274): Ceres Seq. ID no. 15224802
  misc_feature (1)..(274): NCBI GI NO: 29244639 NR Description: putative oxidoreductase protein
  misc_feature (1)..(274): NCBI GI NO: 18414726 NR Description: short-chain dehydrogenase/reductase family protein
  misc_feature (1)..(259): NCBI GI NO: 10178029 NR Description: gene_id:MUG13
  misc_feature (1)..(249): NCBI GI NO: 18413962 NR Description: short-chain dehydrogenase/reductase family protein
  misc_feature (1)..(274): NCBI GI NO: 34904226 NR Description: P0443E07.30
  misc_feature (1)..(270): NCBI GI NO: 21673969 NR Description: oxidoreductase
  misc_feature (49)..(249): NCBI GI NO: 7485669 NR Description: hypothetical protein F17N18
  misc_feature (8)..(228): NCBI GI NO: 21674585 NR Description: oxidoreductase
  misc_feature (8)..(233): NCBI GI NO: 22971619 NR Description: hypothetical protein [Chloroflexus aurantiacus]
  misc_feature (8)..(208): NCBI GI NO: 17560676 NR Description: DeHydrogenase, Short chain (dhs-13)
MAPPYNVLITGSTKGIGYALARKFLEAGDNVIICSRSAQKVESVVGDLKEEYGEQHVWGTVCDVRNGKDVKALVEFARDKLKHIDIWINNAGSNAYTYKPLVETSDEALMEIITTNTLGLMICCREAINMMRNQPRGGHIFNLDGAGSDGRPTPRFAAYGATKRSVVHLTKSLQAELQMNEVNNVMVHNLSPGMVTTDLLMSGATTKQAKFFINILAEPPDVVADYLVPNVREIPTKQSMKPTYIRFLTGLKAYSRIFSRLAFGARRNKYVTED

SEQ ID NO: 22440 - DNA, 1097 bp, Zea mays subsp. mays
  misc_feature (1)..(1097): Ceres Seq. ID no. 13587656
attccattcgccgttcccgttctcctctccccctgtcgcctccatagcagcagcagctccagctcgagcaagaaagaactagtttgatctgtgaaaatgttggccatcttccagaagcaggtggcgcacgcgccgcaggagctcaacagcccgcgcggcagcaccgccaagcccaagaaccccgacgagatcctccgcgacttccacgccgcccacccctccgacgccttctccacctccttcggcggcggcgccgccctcgcctgcatcgccgcgcagccccgcaacctcgccgccggcgggtaccagaggatgttctgcgggctggacgacatctactgcgtcttcatggggacgctggacaacctgagcgcgctgatgcggcagtacggcctcacgggccgctccaccaacgaggcgctgctggtgatcgaggcctaccgcaccctgcgcgaccggggcccctaccctgctgaccaggtggtgaaggacctgtcgggctccttcgccttcgtcgtcttcgacaaccgcggccggtccggctccggggcggccgtgttcgcggcgcagagcacggacggcggcgtgccgctgcactggggcgtggcggcggacgggtcggtggtgatctgcgacgaccgcgccgtggccaaggccgggtgcgggcggtcctacgcgccgttcccgcccgggtgcatgttccacagcgagggcgggctcaagagcttcgagcaccccatgaaccggctcaaggcgctcccgcgggtggacagcgagggcgtcatgtgcggcgccaacttcaaggtcgacgccttcaccaagatcaactccatgccccgcgtcggtagcgccaccaactgggccgccacctgggacgaagccgccatctgatatagccatcgtcgctccccggcgccggcgacgctcgcctagctcgtcggacttctggatttgggcttactgcattttacttatttttttctttggcaatgtacattctgaatctgatctgatctgagccgtgtgtgggcgtgggcacgctgacacgtacggttgtttgcttgtacgatggaggaataagactttgcttccagtcc

SEQ ID NO: 22441 - protein, 264 aa, Zea mays subsp. mays
  peptide (1)..(264): Ceres Seq. ID no. 13587657
  misc_feature (1)..(262): NCBI GI NO: 542200 NR Description: hypothetical protein - garden asparagus
  misc_feature (1)..(261): NCBI GI NO: 9857931 NR Description: unknown [Glycine max]
  misc_feature (1)..(256): NCBI GI NO: 18416995 NR Description: expressed protein [Arabidopsis thaliana]
  misc_feature (1)..(256): NCBI GI NO: 18400774 NR Description: expressed protein [Arabidopsis thaliana]
  misc_feature (1)..(256): NCBI GI NO: 7486256 NR Description: hypothetical protein F27G19
  misc_feature (1)..(261): NCBI GI NO: 7489016 NR Description: hypothetical protein - tomato
  misc_feature (1)..(256): NCBI GI NO: 20340249 NR Description: aluminum-induced protein-like protein
  misc_feature (1)..(256): NCBI GI NO: 15239993 NR Description: aluminum-induced protein-related
  misc_feature (1)..(256): NCBI GI NO: 15228883 NR Description: expressed protein [Arabidopsis thaliana]
  misc_feature (1)..(256): NCBI GI NO: 30017570 NR Description: unknown protein
MLAIFQKQVAHAPQELNSPRGSTAKPKNPDEILRDFHAAHPSDAFSTSFGGGAALACIAAQPRNLAAGGYQRMFCGLDDIYCVFMGTLDNLSALMRQYGLTGRSTNEALLVIEAYRTLRDRGPYPADQVVKDLSGSFAFVVFDNRGRSGSGAAVFAAQSTDGGVPLHWGVAADGSVVICDDRAVAKAGCGRSYAPFPPGCMFHSEGGLKSFEHPMNRLKALPRVDSEGVMCGANFKVDAFTKINSMPRVGSATNWAATWDEAAI

SEQ ID NO: 22442 - protein, 192 aa, Zea mays subsp. mays
  peptide (1)..(192): Ceres Seq. ID no. 13587658
  misc_feature (1)..(190): NCBI GI NO: 542200 NR Description: hypothetical protein - garden asparagus
  misc_feature (1)..(189): NCBI GI NO: 9857931 NR Description: unknown [Glycine max]
  misc_feature (1)..(184): NCBI GI NO: 18416995 NR Description: expressed protein [Arabidopsis thaliana]
  misc_feature (1)..(184): NCBI GI NO: 18400774 NR Description: expressed protein [Arabidopsis thaliana]
  misc_feature (1)..(184): NCBI GI NO: 7486256 NR Description: hypothetical protein F27G19
  misc_feature (1)..(189): NCBI GI NO: 7489016 NR Description: hypothetical protein - tomato
  misc_feature (1)..(184): NCBI GI NO: 20340249 NR Description: aluminum-induced protein-like protein
  misc_feature (1)..(184): NCBI GI NO: 15239993 NR Description: aluminum-induced protein-related
  misc_feature (1)..(184): NCBI GI NO: 15228883 NR Description: expressed protein [Arabidopsis thaliana]
  misc_feature (1)..(184): NCBI GI NO: 30017570 NR Description: unknown protein
MFCGLDDIYCVFMGTLDNLSALMRQYGLTGRSTNEALLVIEAYRTLRDRGPYPADQVVKDLSGSFAFVVFDNRGRSGSGAAVFAAQSTDGGVPLHWGVAADGSVVICDDRAVAKAGCGRSYAPFPPGCMFHSEGGLKSFEHPMNRLKALPRVDSEGVMCGANFKVDAFTKINSMPRVGSATNWAATWDEAAI

SEQ ID NO: 22443 - protein, 180 aa, Zea mays subsp. mays
  peptide (1)..(180): Ceres Seq. ID no. 13587659
  misc_feature (1)..(178): NCBI GI NO: 542200 NR Description: hypothetical protein - garden asparagus
  misc_feature (1)..(177): NCBI GI NO: 9857931 NR Description: unknown [Glycine max]
  misc_feature (1)..(172): NCBI GI NO: 18416995 NR Description: expressed protein [Arabidopsis thaliana]
  misc_feature (1)..(172): NCBI GI NO: 18400774 NR Description: expressed protein [Arabidopsis thaliana]
  misc_feature (1)..(172): NCBI GI NO: 7486256 NR Description: hypothetical protein F27G19
  misc_feature (1)..(177): NCBI GI NO: 7489016 NR Description: hypothetical protein - tomato
  misc_feature (1)..(172): NCBI GI NO: 20340249 NR Description: aluminum-induced protein-like protein
  misc_feature (1)..(172): NCBI GI NO: 15239993 NR Description: aluminum-induced protein-related
  misc_feature (1)..(172): NCBI GI NO: 15228883 NR Description: expressed protein [Arabidopsis thaliana]
  misc_feature (1)..(172): NCBI GI NO: 30017570 NR Description: unknown protein
MGTLDNLSALMRQYGLTGRSTNEALLVIEAYRTLRDRGPYPADQVVKDLSGSFAFVVFDNRGRSGSGAAVFAAQSTDGGVPLHWGVAADGSVVICDDRAVAKAGCGRSYAPFPPGCMFHSEGGLKSFEHPMNRLKALPRVDSEGVMCGANFKVDAFTKINSMPRVGSATNWAATWDEAAI

SEQ ID NO: 22444 - DNA, 721 bp, Zea mays subsp. mays
  misc_feature (1)..(721): Ceres Seq. ID no. 12635879
aaacatcaccaccacttctaacacagcctcctcctcctcttcgatctctctctctctcgatcaaaatggctaacccaagagtcttcttcgacatgaccctcgacggcgcccccgccggccgcatcgtgatggagctttacaaagacacgaccccgaacaccgccgagaacttccgagccctctgcaccggcgagaaaggtgtcggaaagaaggggaagcctctccacttcaagggatcggccttccaccgcgtgatccccgggttcatgtgccagggaggcgatttcaccgccgggaacgggaccggcggggagtcgatctacggcgataagttcaaggacgagaacttcgcgaagaagcacaccggggcggggatcctctccatggcgaactctggtcccaacactaacggatctcagttttttatctgcaccgcggagacgtcgtggctcgatgggaagcacgtggtgtttgggaaggttgttgaaggtatggaggttgtgaaggcgatcgagaaggttggatcgtcttctgggacgacgaagaagaaggttgttgttgctgattgtggtcaggttgcttagatctgagtgatctgatgatgatgaatgttatcttttgcttttttaatgtttttttttctgatcgttcgagtttgtaaaaccctgagggttttttggatttgactgcctttgaataattatgaataactatgagcttg

SEQ ID NO: 22445 - protein, 193 aa, Zea mays subsp. mays
  peptide (1)..(193): Ceres Seq. ID no. 12635880
  misc_feature (23)..(193): NCBI GI NO: 18076088 NR Description: cyclophilin [Ricinus communis]
  misc_feature (22)..(193): NCBI GI NO: 3334157 NR Description: Peptidyl-prolyl cis-trans isomerase
  misc_feature (22)..(192): NCBI GI NO: 11270322 NR Description: peptidylprolyl isomerase (EC 5.2.1.8)
  misc_feature (22)..(192): NCBI GI NO: 11270316 NR Description: peptidylprolyl isomerase (EC 5.2.1.8)
  misc_feature (22)..(193): NCBI GI NO: 15236211 NR Description: peptidylprolyl isomerase
  misc_feature (22)..(192): NCBI GI NO: 68406 NR Description: peptidylprolyl isomerase (EC 5.2.1.8) - tomato
  misc_feature (22)..(192): NCBI GI NO: 118103 NR Description: Peptidyl-prolyl cis-trans isomerase
  misc_feature (22)..(193): NCBI GI NO: 29124975 NR Description: cyclophilin [Populus tremuloides]
  misc_feature (22)..(193): NCBI GI NO: 15234781 NR Description: peptidylprolyl isomerase ROC1
  misc_feature (22)..(193): NCBI GI NO: 18376589 NR Description: putative cyclosporin A-binding protein
TSPPLLTQPPPPLRSLSLSIKMANPRVFFDMTLDGAPAGRIVMELYKDTTPNTAENFRALCTGEKGVGKKGKPLHFKGSAFHRVIPGFMCQGGDFTAGNGTGGESIYGDKFKDENFAKKHTGAGILSMANSGPNTNGSQFFICTAETSWLDGKHVVFGKVVEGMEVVKAIEKVGSSSGTTKKKVVVADCGQVA

SEQ ID NO: 22446 - protein, 172 aa, Zea mays subsp. mays; identical to SEQ ID NO: 6911
  peptide (1)..(172): Ceres Seq. ID no. 12635881
  misc_feature (2)..(172): NCBI GI NO: 18076088 NR Description: cyclophilin [Ricinus communis]
  misc_feature (1)..(172): NCBI GI NO: 3334157 NR Description: Peptidyl-prolyl cis-trans isomerase
  misc_feature (1)..(171): NCBI GI NO: 11270322 NR Description: peptidylprolyl isomerase (EC 5.2.1.8)
  misc_feature (1)..(171): NCBI GI NO: 11270316 NR Description: peptidylprolyl isomerase (EC 5.2.1.8)
  misc_feature (1)..(172): NCBI GI NO: 15236211 NR Description: peptidylprolyl isomerase
  misc_feature (1)..(171): NCBI GI NO: 68406 NR Description: peptidylprolyl isomerase (EC 5.2.1.8) - tomato
  misc_feature (1)..(171): NCBI GI NO: 118103 NR Description: Peptidyl-prolyl cis-trans isomerase
  misc_feature (1)..(172): NCBI GI NO: 29124975 NR Description: cyclophilin [Populus tremuloides]
  misc_feature (1)..(172): NCBI GI NO: 15234781 NR Description: peptidylprolyl isomerase ROC1
  misc_feature (1)..(172): NCBI GI NO: 18376589 NR Description: putative cyclosporin A-binding protein

SEQ ID NO: 22447 - protein, 163 aa, Zea mays subsp. mays; identical to SEQ ID NO: 6912
  peptide (1)..(163): Ceres Seq. ID no. 12635882
  misc_feature (1)..(163): NCBI GI NO: 18076088 NR Description: cyclophilin [Ricinus communis]
  misc_feature (1)..(163): NCBI GI NO: 3334157 NR Description: Peptidyl-prolyl cis-trans isomerase
  misc_feature (1)..(162): NCBI GI NO: 11270322 NR Description: peptidylprolyl isomerase (EC 5.2.1.8)
  misc_feature (1)..(162): NCBI GI NO: 11270316 NR Description: peptidylprolyl isomerase (EC 5.2.1.8)
  misc_feature (1)..(163): NCBI GI NO: 15236211 NR Description: peptidylprolyl isomerase
  misc_feature (1)..(162): NCBI GI NO: 68406 NR Description: peptidylprolyl isomerase (EC 5.2.1.8) - tomato
  misc_feature (1)..(162): NCBI GI NO: 118103 NR Description: Peptidyl-prolyl cis-trans isomerase
  misc_feature (1)..(163): NCBI GI NO: 29124975 NR Description: cyclophilin [Populus tremuloides]
  misc_feature (1)..(163): NCBI GI NO: 15234781 NR Description: peptidylprolyl isomerase ROC1
  misc_feature (1)..(163): NCBI GI NO: 18376589 NR Description: putative cyclosporin A-binding protein

SEQ ID NO: 22448 - DNA, 1325 bp, Zea mays subsp. mays
  misc_feature (1)..(1325): Ceres Seq. ID no. 13599631
cactcgtcacgctccagctgccggccgcgacacgctccgcacgcgatctccactcgctccgtccatccggatccccttcctccctccccagccagccagcggccatgtcgtcctcgtcggacaaccccaacacggtcaccgaccgcggcctcttcagcaagagcagcaaggacgacggcgccgacaagaagaagaagcaggaggagaagaaagaggatggggaggagggcggcggcgggttcatcgacaaggtcaaggacttcatccacgacatcggggagaagatcgaggaggcggtggggttcggcaagcccagcgccgacgtggcccggatccacgtgccccacatcggcctccaccgcgccgacctcgtcgtcgacgtgctcatcaagaaccccaacccggtgcccatcccgctcgtcgacatcgactacctcatcgacagcgacggccggaagctcgtcgcggggctcatcccggacgccggcaccatccgcgcgcacggcgaggagacggtcaaggtgcccatcacgctcgacttcgacgacatccggagcacctacgcggacatcaagccgggcagcatcatcccctacctgctccgggtcatcttcctcgtggacgtgcccgtcttcggccgcatcaagatcccgctggacaagtccggggagatccccatcccgtacaagcccgacgtggacgtggacaagatcaagttccaccacttctccttcgaggagaccacggccaccatccacctgagcctggagaacaagaacgacttcgacctcgggctcaacctgctccagtacgagatgtggctcggcgacgacagcgtggtggaggcggagctcaccgactccaccaggatcgagaagcaggggatcaccaagatgcagatccccttcaccttcaggcccaaggacctgggatctgccgtctgggacatgatcaggggcaggggcaccggctacagcatcaagggcaagatcgatgtcgacaccccctttggcaacatgaagctgcccatcgacaaagtcggcggaaccactcgcctcaagaaggacgacgacgatgacgatgagtgaagtgctgttactgaacatacaagatagtcaagcagggagccagggaggatccagctgaactctttactctagcttatggtatctttgttgatggcatcatccgaacatcgtcagcgtttttatgtttcggtgctcagtgttctttgcgggaactcatccagtgtgtattctttctgtgttaactttgtcaagtggaaacagacctgaaaataaattccatcgcccctttcttgtttg

SEQ ID NO: 22449 - protein, 361 aa, Zea mays subsp. mays
  peptide (1)..(361): Ceres Seq. ID no. 13599632
  misc_feature (78)..(233): Pfam Name: Pfam Description:  Late embryogenesis abundant protein
  misc_feature (35)..(361): NCBI GI NO: 15224810 NR Description: late embryogenesis abundant proteins -related
  misc_feature (35)..(361): NCBI GI NO: 21592483 NR Description: similar to late embryogenesis abundant proteins
  misc_feature (54)..(361): NCBI GI NO: 34394536 NR Description: late embryogenesis abundant proteins-like
  misc_feature (107)..(361): NCBI GI NO: 3264769 NR Description: late embryogenesis-like protein [Prunus armeniaca]
LVTLQLPAATRSARDLHSLRPSGSPSSLPSQPAAMSSSSDNPNTVTDRGLFSKSSKDDGADKKKKQEEKKEDGEEGGGGFIDKVKDFIHDIGEKIEEAVGFGKPSADVARIHVPHIGLHRADLVVDVLIKNPNPVPIPLVDIDYLIDSDGRKLVAGLIPDAGTIRAHGEETVKVPITLDFDDIRSTYADIKPGSIIPYLLRVIFLVDVPVFGRIKIPLDKSGEIPIPYKPDVDVDKIKFHHFSFEETTATIHLSLENKNDFDLGLNLLQYEMWLGDDSVVEAELTDSTRIEKQGITKMQIPFTFRPKDLGSAVWDMIRGRGTGYSIKGKIDVDTPFGNMKLPIDKVGGTTRLKKDDDDDDE

SEQ ID NO: 22450 - protein, 358 aa, Zea mays subsp. mays
  peptide (1)..(358): Ceres Seq. ID no. 13599633
  misc_feature (28)..(329): Pfam Name: Pfam Description:  High molecular weight glutenin subunit
TRHAPAAGRDTLRTRSPLAPSIRIPFLPPQPASGHVVLVGQPQHGHRPRPLQQEQQGRRRRQEEEAGGEERGWGGGRRRVHRQGQGLHPRHRGEDRGGGGVRQAQRRRGPDPRAPHRPPPRRPRRRRAHQEPQPGAHPARRHRLPHRQRRPEARRGAHPGRRHHPRARRGDGQGAHHARLRRHPEHLRGHQAGQHHPLPAPGHLPRGRARLRPHQDPAGQVRGDPHPVQARRGRGQDQVPPLLLRGDHGHHPPEPGEQERLRPRAQPAPVRDVARRRQRGGGGAHRLHQDREAGDHQDADPLHLQAQGPGICRLGHDQGQGHRLQHQGQDRCRHPLWQHEAAHRQSRRNHSPQEGRRR

SEQ ID NO: 22451 - protein, 327 aa, Zea mays subsp. mays
  peptide (1)..(327): Ceres Seq. ID no. 13599634
  misc_feature (44)..(199): Pfam Name: Pfam Description:  Late embryogenesis abundant protein
  misc_feature (1)..(327): NCBI GI NO: 15224810 NR Description: late embryogenesis abundant proteins -related
  misc_feature (1)..(327): NCBI GI NO: 21592483 NR Description: similar to late embryogenesis abundant proteins
  misc_feature (20)..(327): NCBI GI NO: 34394536 NR Description: late embryogenesis abundant proteins-like
  misc_feature (73)..(327): NCBI GI NO: 3264769 NR Description: late embryogenesis-like protein [Prunus armeniaca]
MSSSSDNPNTVTDRGLFSKSSKDDGADKKKKQEEKKEDGEEGGGGFIDKVKDFIHDIGEKIEEAVGFGKPSADVARIHVPHIGLHRADLVVDVLIKNPNPVPIPLVDIDYLIDSDGRKLVAGLIPDAGTIRAHGEETVKVPITLDFDDIRSTYADIKPGSIIPYLLRVIFLVDVPVFGRIKIPLDKSGEIPIPYKPDVDVDKIKFHHFSFEETTATIHLSLENKNDFDLGLNLLQYEMWLGDDSVVEAELTDSTRIEKQGITKMQIPFTFRPKDLGSAVWDMIRGRGTGYSIKGKIDVDTPFGNMKLPIDKVGGTTRLKKDDDDDDE

SEQ ID NO: 22452 - DNA, 939 bp, Zea mays subsp. mays
  misc_feature (1)..(939): Ceres Seq. ID no. 13599628
ttgcttatctctaggatatgcttcttgccctccaagtcatgtactcctatatattctccctagaggcttaatgcaatacatcccacacattatacgcattctctccttcaggttctggtccagtatctgaaattgcaaccctgagtattataaaagaattgatatatgagtcatgacatttttctttttaatgagtgtgccttctatcattggccaatcaattgttgaggcacttgtagctttaaagattggagctaagggtcaaatgtggaatctggagacagatgggtcatacagtctttgatggtacatcgctaattatagtttttatttcatgttcaaggttcgtcttatcaaggagctctacgggaaccaaattggcgagctgttccatagtcttccttataatatgatagagtttgtattggaggattttgagtgcaaggttacaatcagtatccgatattcggatctactgcagaccctgccgagtcaggcaagggtcttggcttggccacttcgctcggccaagaaaatatctacaagaagcagcagtgcatcagctgcgcaaccagtaccctttcacctttcatatgccgaggaagcactcaaaaccttgtgtctaccagaagcatacgcagacattgtgctggagctaccccatgctttgaagaggattttatcctctcgggacagtgactaaatcgtgacctcaagatgtccagttttgttgtgcataagattcacatcttaatcgtggggcatgtttttgaagatattgttcagaatcttgtggtagtatagcctgcagttgtggactgcaattcctgtgaaagcaaggcagacatttgcgtgggccgctcgaaatattccggctacagttcctgttaaaagaatcaaaatcctaggaaggccttatggtcgaggcataatcttgcc

SEQ ID NO: 22453 - protein, 122 aa, Zea mays subsp. mays
  peptide (1)..(122): Ceres Seq. ID no. 13599629
  misc_feature (3)..(122): NCBI GI NO: 38346430 NR Description: OSJNBa0019J05.15
  misc_feature (3)..(121): NCBI GI NO: 10129649 NR Description: putative protein [Arabidopsis thaliana]
  misc_feature (3)..(121): NCBI GI NO: 13430738 NR Description: unknown protein [Arabidopsis thaliana]
  misc_feature (3)..(121): NCBI GI NO: 18416357 NR Description: expressed protein [Arabidopsis thaliana]
MFKVRLIKELYGNQIGELFHSLPYNMIEFVLEDFECKVTISIRYSDLLQTLPSQARVLAWPLRSAKKISTRSSSASAAQPVPFHLSYAEEALKTLCLPEAYADIVLELPHALKRILSSRDSD

SEQ ID NO: 22454 - protein, 97 aa, Zea mays subsp. mays
  peptide (1)..(97): Ceres Seq. ID no. 13599630
  misc_feature (1)..(97): NCBI GI NO: 38346430 NR Description: OSJNBa0019J05.15
  misc_feature (1)..(96): NCBI GI NO: 10129649 NR Description: putative protein [Arabidopsis thaliana]
  misc_feature (1)..(96): NCBI GI NO: 18416357 NR Description: expressed protein [Arabidopsis thaliana]
  misc_feature (1)..(96): NCBI GI NO: 13430738 NR Description: unknown protein [Arabidopsis thaliana]
MIEFVLEDFECKVTISIRYSDLLQTLPSQARVLAWPLRSAKKISTRSSSASAAQPVPFHLSYAEEALKTLCLPEAYADIVLELPHALKRILSSRDSD

SEQ ID NO: 22455 - DNA, 795 bp, Zea mays subsp. mays
  misc_feature (1)..(795): Ceres Seq. ID no. 12635883
gtagacgttgataattgtttggtagacccttaagaatcttaggtgtatctctttagtttgaaggttagattcagaatctgtagatttagtagcttctcttctctttctgttgtgtatatagttttcaaattgttttagcttgtgaaggtgaagtccttggtatggatatgaagaagcagattatggatgagtctgagaacttgtgcttcaagaagtccttgacgccgccgcctcctcctcctccaccgcttcctccatctccaggatatggatcaagaaagatcgagggagacagcataaccaataaacagatcaagaagttctggaggcagaagcagatcattgaagaggagcatctctttgctgctattaaggctgcagctcgtgtcagagcccgtaatctctctgatgaggactacaaacgctttgaagaaagcttggacatggaggatccagaaaccgaagttgacgagggaattaaagactggtggatgaagagtaagtacgcgtacttgaaccagcctgctcttggatctgcagattcactcaagagaaagaggttttcgtcttatgtaccaaactatttctcattcaagccttgcattcctctctatgcaacttcgcttaatgtcttttaactatgtgcaaattgtcttgcgtatatgtctacatatgtgtgtgtgtgtttgtgtctttgtacattcatgtgtaattgtgttccgtgttaatggatctggactttggtgtgtggttgtttggtttgtaagtgttgaataaaattcaatcttactatgg

SEQ ID NO: 22456 - protein, 158 aa, Zea mays subsp. mays
  peptide (1)..(158): Ceres Seq. ID no. 12635884
  misc_feature (1)..(158): NCBI GI NO: 18398508 NR Description: expressed protein; protein id: At2g17710
  misc_feature (3)..(158): NCBI GI NO: 21618216 NR Description: unknown [Arabidopsis thaliana]
  misc_feature (8)..(158): NCBI GI NO: 25371275 NR Description: hypothetical protein At2g17710
  misc_feature (45)..(107): NCBI GI NO: 38345846 NR Description: OSJNBa0084K11.10
  misc_feature (100)..(146): NCBI GI NO: 38345846 NR Description: OSJNBa0084K11.10
MDMKKQIMDESENLCFKKSLTPPPPPPPPLPPSPGYGSRKIEGDSITNKQIKKFWRQKQIIEEEHLFAAIKAAARVRARNLSDEDYKRFEESLDMEDPETEVDEGIKDWWMKSKYAYLNQPALGSADSLKRKRFSSYVPNYFSFKPCIPLYATSLNVF

SEQ ID NO: 22457 - protein, 156 aa, Zea mays subsp. mays
  peptide (1)..(156): Ceres Seq. ID no. 12635885
  misc_feature (1)..(156): NCBI GI NO: 18398508 NR Description: expressed protein; protein id: At2g17710
  misc_feature (1)..(156): NCBI GI NO: 21618216 NR Description: unknown [Arabidopsis thaliana]
  misc_feature (6)..(156): NCBI GI NO: 25371275 NR Description: hypothetical protein At2g17710
  misc_feature (43)..(105): NCBI GI NO: 38345846 NR Description: OSJNBa0084K11.10
  misc_feature (98)..(144): NCBI GI NO: 38345846 NR Description: OSJNBa0084K11.10
MKKQIMDESENLCFKKSLTPPPPPPPPLPPSPGYGSRKIEGDSITNKQIKKFWRQKQIIEEEHLFAAIKAAARVRARNLSDEDYKRFEESLDMEDPETEVDEGIKDWWMKSKYAYLNQPALGSADSLKRKRFSSYVPNYFSFKPCIPLYATSLNVF

SEQ ID NO: 22458 - protein, 151 aa, Zea mays subsp. mays
  peptide (1)..(151): Ceres Seq. ID no. 12635886
  misc_feature (1)..(151): NCBI GI NO: 18398508 NR Description: expressed protein; protein id: At2g17710
  misc_feature (1)..(151): NCBI GI NO: 21618216 NR Description: unknown [Arabidopsis thaliana]
  misc_feature (1)..(151): NCBI GI NO: 25371275 NR Description: hypothetical protein At2g17710
  misc_feature (38)..(100): NCBI GI NO: 38345846 NR Description: OSJNBa0084K11.10
  misc_feature (93)..(139): NCBI GI NO: 38345846 NR Description: OSJNBa0084K11.10
MDESENLCFKKSLTPPPPPPPPLPPSPGYGSRKIEGDSITNKQIKKFWRQKQIIEEEHLFAAIKAAARVRARNLSDEDYKRFEESLDMEDPETEVDEGIKDWWMKSKYAYLNQPALGSADSLKRKRFSSYVPNYFSFKPCIPLYATSLNVF

SEQ ID NO: 22459 - DNA, 672 bp, Zea mays subsp. mays
  misc_feature (1)..(672): Ceres Seq. ID no. 13599418
agatctcccccatttctcctccacgctgccccctccgcatttcccgtgctcctctcgttccggcatggcggagcagacgcagccacaaggggaaggcggcgctagccccaagcacgagtccctgatggagaagctcgccgacaagctccacgtcggcggcggcaaggccgactcctcctcctcctcggactccgacagtgacgagcggccccgcccctcggcaccgcctgccgacgagctcaagcagccctccttctccgacgccgccgccacggcggccgccgaggccaaagccaaggtgttccgccttttcggccgcgagcagcccatccacaaggccctcggtggcggcaagcgtatggttctgtttcccacgctcccgatgctgcttgctattaggcttgagatttctagatcggatctgggtgggcctcggtgctcgggttgcgggctactagatctgactgctggagtacgttttatggaatgcgctagctagggtgttaagaacgaactggccgtttggatcacagattgggatcttgcctgctttgacaaatggaggcgactagtatgcttgatcactctaacgcttgcttcaaatttgatcaatccaagtcagtgcacttgggtacttatctgaactgtatgctgctaatatttctcaatgtt

SEQ ID NO: 22460 - protein, 165 aa, Zea mays subsp. mays
  peptide (1)..(165): Ceres Seq. ID no. 13599419
  misc_feature (22)..(123): NCBI GI NO: 34904202 NR Description: P0492F05.25
  misc_feature (37)..(123): NCBI GI NO: 15236556 NR Description: expressed protein [Arabidopsis thaliana]
DLPHFSSTLPPPHFPCSSRSGMAEQTQPQGEGGASPKHESLMEKLADKLHVGGGKADSSSSSDSDSDERPRPSAPPADELKQPSFSDAAATAAAEAKAKVFRLFGREQPIHKALGGGKRMVLFPTLPMLLAIRLEISRSDLGGPRCSGCGLLDLTAGVRFMECAS

SEQ ID NO: 22461 - protein, 144 aa, Zea mays subsp. mays
  peptide (1)..(144): Ceres Seq. ID no. 13599420
  misc_feature (1)..(102): NCBI GI NO: 34904202 NR Description: P0492F05.25
  misc_feature (16)..(102): NCBI GI NO: 15236556 NR Description: expressed protein [Arabidopsis thaliana]
MAEQTQPQGEGGASPKHESLMEKLADKLHVGGGKADSSSSSDSDSDERPRPSAPPADELKQPSFSDAAATAAAEAKAKVFRLFGREQPIHKALGGGKRMVLFPTLPMLLAIRLEISRSDLGGPRCSGCGLLDLTAGVRFMECAS

SEQ ID NO: 22462 - protein, 124 aa, Zea mays subsp. mays
  peptide (1)..(124): Ceres Seq. ID no. 13599421
  misc_feature (1)..(82): NCBI GI NO: 34904202 NR Description: P0492F05.25
  misc_feature (1)..(82): NCBI GI NO: 15236556 NR Description: expressed protein [Arabidopsis thaliana]
MEKLADKLHVGGGKADSSSSSDSDSDERPRPSAPPADELKQPSFSDAAATAAAEAKAKVFRLFGREQPIHKALGGGKRMVLFPTLPMLLAIRLEISRSDLGGPRCSGCGLLDLTAGVRFMECAS

SEQ ID NO: 22463 - DNA, 943 bp, Zea mays subsp. mays
  misc_feature (1)..(943): Ceres Seq. ID no. 12635560
cctttctttcttgaggccgccgctccgcatctcgctcgccgcggaagccgctgtcgccgatgtccgccgcctccccgctcatgggcggcccctcctccgccgacgcgcccaccgacggcgagcaccggatgggcaccaccatcgtcggggtctgctacgccggcggcgtcgtcctcgccgccgactccaggaccagcaccggaatgtatgtggcaaaccgtgcttcggacaagattagtcagctcactgataatgtttatgtctgccgctctggatctgctgcggatacacaaattatctcagattatgtacgctattttctccaccaacacacaattcagcttgggcaaccagctaccgtgaaagttgcatctaacttggttaggttgctggcctatcagaacaagagcatgttacaagctgggatgatagttggtggatgggataagtatgagggaggccaaatttactcagtccctcttggtggaacgattctgaggcaaccattcgcaattggaggatctggttccagctatctgtatggattgatggaccatgaatggaaagaggggatgacccaggaagaagctgagaagtttgtggtgaaggtggtttcccttgctattgcacgtgatggtgctagtggaggggttgttcgcaccgttactataaatgaggagggcgttaagaggagcttccatcctggtgacaagctgccactgtggcatgaggagatggagccccagaactcgctcctcgacattctcgcggccgggagctctgatgccatggcccagtgagtttgctgaatgttgacttgtacctgatgatgacttgttctagatttgagccggatgttgttaagaaattgtgccgaattgttccacaccagcttattttcctccttgttattacgaattaatactagtacattccttgttcg

SEQ ID NO: 22464 - protein, 246 aa, Zea mays subsp. mays
  peptide (1)..(246): Ceres Seq. ID no. 12635561
  misc_feature (22)..(204): Pfam Name: Pfam Description:  Proteasome A-type and B-type
  misc_feature (7)..(246): NCBI GI NO: 8671502 NR Description: beta 1 subunit of 20S proteasome
  misc_feature (15)..(245): NCBI GI NO: 15235889 NR Description: 20S proteasome beta subunit A
  misc_feature (24)..(245): NCBI GI NO: 21592365 NR Description: multicatalytic endopeptidase complex
  misc_feature (19)..(240): NCBI GI NO: 3024440 NR Description: Proteasome subunit beta type 6 precursor
  misc_feature (20)..(213): NCBI GI NO: 19113087 NR Description: proteasome component precursor
  misc_feature (1)..(220): NCBI GI NO: 17380261 NR Description: Proteasome subunit beta type 6 precursor
  misc_feature (3)..(225): NCBI GI NO: 2055301 NR Description: proteasome subunit Y [Lethenteron japonicum]
  misc_feature (1)..(220): NCBI GI NO: 26347247 NR Description: unnamed protein product [Mus musculus]
  misc_feature (10)..(220): NCBI GI NO: 23110925 NR Description: proteasome beta 6 subunit
  misc_feature (1)..(220): NCBI GI NO: 464446 NR Description: Proteasome subunit beta type 6 precursor
MSAASPLMGGPSSADAPTDGEHRMGTTIVGVCYAGGVVLAADSRTSTGMYVANRASDKISQLTDNVYVCRSGSAADTQIISDYVRYFLHQHTIQLGQPATVKVASNLVRLLAYQNKSMLQAGMIVGGWDKYEGGQIYSVPLGGTILRQPFAIGGSGSSYLYGLMDHEWKEGMTQEEAEKFVVKVVSLAIARDGASGGVVRTVTINEEGVKRSFHPGDKLPLWHEEMEPQNSLLDILAAGSSDAMAQ

SEQ ID NO: 22465 - protein, 239 aa, Zea mays subsp. mays
  peptide (1)..(239): Ceres Seq. ID no. 12635562
  misc_feature (15)..(197): Pfam Name: Pfam Description:  Proteasome A-type and B-type
  misc_feature (1)..(239): NCBI GI NO: 8671502 NR Description: beta 1 subunit of 20S proteasome
  misc_feature (8)..(238): NCBI GI NO: 15235889 NR Description: 20S proteasome beta subunit A
  misc_feature (17)..(238): NCBI GI NO: 21592365 NR Description: multicatalytic endopeptidase complex
  misc_feature (12)..(233): NCBI GI NO: 3024440 NR Description: Proteasome subunit beta type 6 precursor
  misc_feature (13)..(206): NCBI GI NO: 19113087 NR Description: proteasome component precursor
  misc_feature (1)..(213): NCBI GI NO: 17380261 NR Description: Proteasome subunit beta type 6 precursor
  misc_feature (1)..(218): NCBI GI NO: 2055301 NR Description: proteasome subunit Y [Lethenteron japonicum]
  misc_feature (1)..(213): NCBI GI NO: 26347247 NR Description: unnamed protein product [Mus musculus]
  misc_feature (3)..(213): NCBI GI NO: 23110925 NR Description: proteasome beta 6 subunit
  misc_feature (1)..(213): NCBI GI NO: 464446 NR Description: Proteasome subunit beta type 6 precursor
MGGPSSADAPTDGEHRMGTTIVGVCYAGGVVLAADSRTSTGMYVANRASDKISQLTDNVYVCRSGSAADTQIISDYVRYFLHQHTIQLGQPATVKVASNLVRLLAYQNKSMLQAGMIVGGWDKYEGGQIYSVPLGGTILRQPFAIGGSGSSYLYGLMDHEWKEGMTQEEAEKFVVKVVSLAIARDGASGGVVRTVTINEEGVKRSFHPGDKLPLWHEEMEPQNSLLDILAAGSSDAMAQ

SEQ ID NO: 22466 - protein, 223 aa, Zea mays subsp. mays
  peptide (1)..(223): Ceres Seq. ID no. 12635563
  misc_feature (1)..(181): Pfam Name: Pfam Description:  Proteasome A-type and B-type
  misc_feature (1)..(223): NCBI GI NO: 8671502 NR Description: beta 1 subunit of 20S proteasome
  misc_feature (1)..(222): NCBI GI NO: 15235889 NR Description: 20S proteasome beta subunit A
  misc_feature (1)..(222): NCBI GI NO: 21592365 NR Description: multicatalytic endopeptidase complex
  misc_feature (1)..(217): NCBI GI NO: 3024440 NR Description: Proteasome subunit beta type 6 precursor
  misc_feature (1)..(190): NCBI GI NO: 19113087 NR Description: proteasome component precursor
  misc_feature (1)..(197): NCBI GI NO: 17380261 NR Description: Proteasome subunit beta type 6 precursor
  misc_feature (1)..(202): NCBI GI NO: 2055301 NR Description: proteasome subunit Y [Lethenteron japonicum]
  misc_feature (1)..(197): NCBI GI NO: 26347247 NR Description: unnamed protein product [Mus musculus]
  misc_feature (1)..(197): NCBI GI NO: 23110925 NR Description: proteasome beta 6 subunit
  misc_feature (1)..(197): NCBI GI NO: 464446 NR Description: Proteasome subunit beta type 6 precursor
MGTTIVGVCYAGGVVLAADSRTSTGMYVANRASDKISQLTDNVYVCRSGSAADTQIISDYVRYFLHQHTIQLGQPATVKVASNLVRLLAYQNKSMLQAGMIVGGWDKYEGGQIYSVPLGGTILRQPFAIGGSGSSYLYGLMDHEWKEGMTQEEAEKFVVKVVSLAIARDGASGGVVRTVTINEEGVKRSFHPGDKLPLWHEEMEPQNSLLDILAAGSSDAMAQ

SEQ ID NO: 22467 - DNA, 684 bp, Zea mays subsp. mays
  misc_feature (1)..(684): Ceres Seq. ID no. 12635564
tcaaaccacatcaaccaaccccaccgaatccacctctcgccggagtcccagcaaggagcgagcaagccaggaagatggacgccagcaagctgaagaaggtggccgggaagaagttcggcgggccgaggaagaagtcggtgaccaggtccgtcaaggccggcctccagttccccgtcggccgcatcgggcgctacctcaagaagggccgctacgcccagcgcgtcggctccggcgcccccgtctacctcgccgccgtcctcgagtacctcgccgccgaggtgctggagctggccgggaacgccgccaaggacaacaagaagacccgcatcgtgcccaggcacctgctgctggccatccgcaacgaccaggagctcgggaggctgctgtccggcgtcaccatcgcgcacggcggcgtcatccccaacatcaacccggtgctgctccccaagaagaccgccgagaaggccgagaagaccgccgccaagtcgcccaagaaggccaccaagtcccccaagaaggccaccaaggcctagatcgtagtagtgcggtgtgctgatggttccagtttggttagatgtagtagctgtttcactctgtatcctgcgcccctgatgtaatcggaatcaaaggggaagccgcttgcttcctcttgacttatgaattagtatcaactaagcgtttctg

SEQ ID NO: 22468 - protein, 184 aa, Zea mays subsp. mays
  peptide (1)..(184): Ceres Seq. ID no. 12635565
QTTSTNPTESTSRRSPSKERASQEDGRQQAEEGGREEVRRAEEEVGDQVRQGRPPVPRRPHRALPQEGPLRPARRLRRPRLPRRRPRVPRRRGAGAGRERRQGQQEDPHRAQAPAAGHPQRPGAREAAVRRHHRARRRHPQHQPGAAPQEDRREGREDRRQVAQEGHQVPQEGHQGLDRSSAVC

SEQ ID NO: 22469 - protein, 176 aa, Zea mays subsp. mays
  peptide (1)..(176): Ceres Seq. ID no. 12635566
  misc_feature (29)..(150): Pfam Name: Pfam Description:  Core histone H2A/H2B/H3/H4
  misc_feature (25)..(173): NCBI GI NO: 121982 NR Description: HISTONE H2A.2.2
  misc_feature (25)..(173): NCBI GI NO: 121974 NR Description: HISTONE H2A.2.1
  misc_feature (27)..(173): NCBI GI NO: 122007 NR Description: Histone H2A
  misc_feature (31)..(173): NCBI GI NO: 729671 NR Description: Histone H2A
  misc_feature (29)..(173): NCBI GI NO: 34914498 NR Description: putative histone H2A
  misc_feature (33)..(176): NCBI GI NO: 1076777 NR Description: histone H2A.3 - wheat
  misc_feature (25)..(173): NCBI GI NO: 7649159 NR Description: histone H2A [Euphorbia esula]
  misc_feature (33)..(176): NCBI GI NO: 2130104 NR Description: histone H2A.9 - wheat
  misc_feature (33)..(176): NCBI GI NO: 1076776 NR Description: histone H2A.2 - wheat
  misc_feature (34)..(176): NCBI GI NO: 121965 NR Description: HISTONE H2A.1
KPHQPTPPNPPLAGVPARSEQARKMDASKLKKVAGKKFGGPRKKSVTRSVKAGLQFPVGRIGRYLKKGRYAQRVGSGAPVYLAAVLEYLAAEVLELAGNAAKDNKKTRIVPRHLLLAIRNDQELGRLLSGVTIAHGGVIPNINPVLLPKKTAEKAEKTAAKSPKKATKSPKKATKA

SEQ ID NO: 22470 - protein, 152 aa, Zea mays subsp. mays
  peptide (1)..(152): Ceres Seq. ID no. 12635567
  misc_feature (5)..(126): Pfam Name: Pfam Description:  Core histone H2A/H2B/H3/H4
  misc_feature (1)..(149): NCBI GI NO: 121982 NR Description: HISTONE H2A.2.2
  misc_feature (1)..(149): NCBI GI NO: 121974 NR Description: HISTONE H2A.2.1
  misc_feature (3)..(149): NCBI GI NO: 122007 NR Description: Histone H2A
  misc_feature (7)..(149): NCBI GI NO: 729671 NR Description: Histone H2A
  misc_feature (5)..(149): NCBI GI NO: 34914498 NR Description: putative histone H2A
  misc_feature (9)..(152): NCBI GI NO: 1076777 NR Description: histone H2A.3 - wheat
  misc_feature (1)..(149): NCBI GI NO: 7649159 NR Description: histone H2A [Euphorbia esula]
  misc_feature (9)..(152): NCBI GI NO: 2130104 NR Description: histone H2A.9 - wheat
  misc_feature (9)..(152): NCBI GI NO: 1076776 NR Description: histone H2A.2 - wheat
  misc_feature (10)..(152): NCBI GI NO: 121965 NR Description: HISTONE H2A.1
MDASKLKKVAGKKFGGPRKKSVTRSVKAGLQFPVGRIGRYLKKGRYAQRVGSGAPVYLAAVLEYLAAEVLELAGNAAKDNKKTRIVPRHLLLAIRNDQELGRLLSGVTIAHGGVIPNINPVLLPKKTAEKAEKTAAKSPKKATKSPKKATKA

SEQ ID NO: 22471 - DNA, 972 bp, Zea mays subsp. mays
  misc_feature (1)..(972): Ceres Seq. ID no. 12635897
ctctcggtctcgctagggttttgggattttagcctccagcgccgccgccgccgcccagcgaattcgacaagcccccgagctcgccggatccgatggccgtcacgttctccgacctccacaccgccgacgggctcaaggccctcgaggcgcacctcgccggcaagacctacatctccggcgatgggatcaccaaggacgacgttaaggtgttcgcggcggtgcccgtgaagcccagcgccgagttcctgaacgctgcccgctggtacgacgccgtcgccgcggccgtttcttcaaggttccctggccaggcctctggggtgagtgcatcctcggctcctgctgcagctgctcctgctgcttccaaggatgaagatgatgacgatgacatggatctgttcggcgatgagaccgaggaggacaagaaagcagcagctgagcgtgaggctgccaagcctgcaaagaagaaagaaagtggcaaatcctccgtcctcatggacatcaagccatgggacgatgagactgacatgaagaagttggaggaggctgtccgcagtgttcaaatggagggtctcacctggggtgcatctaagcttatgcctgtgggttatggcatcaagaagctccagatcatgctgacgatcatcgacgaccttgtgtctgtcgacacccttattgaggaagtgctctgtgaggcgcccatcaacgagtatgtccagtcgtgtgacatcgttgccttcaacaagatctagaatctttgttcgcccacctgttgctgctggattcttggtactgggattggttgatctggaaaacattatgtcgtcccatttagttacccctcttacagaaatgctactggttttgtttttgagtgatgccctggtcttgaatgcctgctacctttaaatagttgaattgctgagcggtttgtaatggcgaaacatctatcatgtggagtaaaatcagtctttg

SEQ ID NO: 22472 - protein, 218 aa, Zea mays subsp. mays
  peptide (1)..(218): Ceres Seq. ID no. 12635898
  misc_feature (129)..(218): Pfam Name: Pfam Description:  EF-1 guanine nucleotide exchange domain
  misc_feature (1)..(218): NCBI GI NO: 232033 NR Description: ELONGATION FACTOR 1-BETA' (EF-1-BETA')
  misc_feature (1)..(218): NCBI GI NO: 38175744 NR Description: putative translation elongation factor eEF-1 beta'chain
  misc_feature (1)..(218): NCBI GI NO: 232031 NR Description: ELONGATION FACTOR 1-BETA' (EF-1-BETA')
  misc_feature (1)..(218): NCBI GI NO: 34899162 NR Description: putative translation elongation factor eEF-1 beta'chain
  misc_feature (1)..(218): NCBI GI NO: 30687350 NR Description: elongation factor 1B alpha-subunit
  misc_feature (1)..(218): NCBI GI NO: 15239877 NR Description: elongation factor 1B alpha-subunit(emb|CAB64729
  misc_feature (1)..(218): NCBI GI NO: 6015063 NR Description: ELONGATION FACTOR 1-BETA (EF-1-BETA)
  misc_feature (20)..(218): NCBI GI NO: 27754711 NR Description: putative elongation factor 1B alpha-subunit
  misc_feature (1)..(218): NCBI GI NO: 38232568 NR Description: translational elongation factor 1 subunit Bbeta
  misc_feature (1)..(218): NCBI GI NO: 3894214 NR Description: elongation factor 1 beta 2
MAVTFSDLHTADGLKALEAHLAGKTYISGDGITKDDVKVFAAVPVKPSAEFLNAARWYDAVAAAVSSRFPGQASGVSASSAPAAAAPAASKDEDDDDDMDLFGDETEEDKKAAAEREAAKPAKKKESGKSSVLMDIKPWDDETDMKKLEEAVRSVQMEGLTWGASKLMPVGYGIKKLQIMLTIIDDLVSVDTLIEEVLCEAPINEYVQSCDIVAFNKI

SEQ ID NO: 22473 - protein, 120 aa, Zea mays subsp. mays
  peptide (1)..(120): Ceres Seq. ID no. 12635899
  misc_feature (31)..(120): Pfam Name: Pfam Description:  EF-1 guanine nucleotide exchange domain
  misc_feature (1)..(120): NCBI GI NO: 232033 NR Description: ELONGATION FACTOR 1-BETA' (EF-1-BETA')
  misc_feature (1)..(120): NCBI GI NO: 38175744 NR Description: putative translation elongation factor eEF-1 beta'chain
  misc_feature (1)..(120): NCBI GI NO: 232031 NR Description: ELONGATION FACTOR 1-BETA' (EF-1-BETA')
  misc_feature (1)..(120): NCBI GI NO: 34899162 NR Description: putative translation elongation factor eEF-1 beta'chain
  misc_feature (1)..(120): NCBI GI NO: 30687350 NR Description: elongation factor 1B alpha-subunit
  misc_feature (1)..(120): NCBI GI NO: 15239877 NR Description: elongation factor 1B alpha-subunit(emb|CAB64729
  misc_feature (1)..(120): NCBI GI NO: 6015063 NR Description: ELONGATION FACTOR 1-BETA (EF-1-BETA)
  misc_feature (1)..(120): NCBI GI NO: 27754711 NR Description: putative elongation factor 1B alpha-subunit
  misc_feature (1)..(120): NCBI GI NO: 38232568 NR Description: translational elongation factor 1 subunit Bbeta
  misc_feature (1)..(120): NCBI GI NO: 3894214 NR Description: elongation factor 1 beta 2
MDLFGDETEEDKKAAAEREAAKPAKKKESGKSSVLMDIKPWDDETDMKKLEEAVRSVQMEGLTWGASKLMPVGYGIKKLQIMLTIIDDLVSVDTLIEEVLCEAPINEYVQSCDIVAFNKI

SEQ ID NO: 22474 - DNA, 1446 bp, Zea mays subsp. mays
  misc_feature (1)..(1446): Ceres Seq. ID no. 13599626
ctagaacatcctaatcgaaaaacagtcacagactcacagcacacgcagccaccgaggactgcattgctagcatccatcgccatcagtcgccatatcgatctgcatggatcgggtgccgccgccggtctccatgcaggtggctgcgatgcagcgacatcagcagcagcagcagttcgtccaccacctgcagcaggtccaccagcaaggtacgcagcacgagcaaccgccgccaccgcaccagaacggcagcagcagcagcggcaggaccggcggcggccgcaagtgctgcccgctgcggcggtcgcgcaaggggtgcatgaagggcaagggcgggccggacaaccagcagtgccccttccgcggcgtccggcagcgcacctggggcaagtgggtggccgagatccgcgagcccaaccgcggcgcgcgcctctggctcggcaccttcggcagcgcgctcgaggccgcgcgcgcctacgacgccgcggccaggacgctctacggcgactgcgctcgcctaaacctgcagctagtgcctccgtcggcggctgcggcagccgccggaggaggaggaccggcggtcgtcgcgtctccgtcccctgacaccgtggctggccctgctgctgctggtggtggtggtggacacaactgccatcaccagtacctgcagcagcagcacgccatggcggcgcctatgatgatgatgcactcctcctgctgctccgccgacgggtcgtcgtcaaactccgattccatttccaactcctgctcgtcaccggtgaccacggcggcctcgccagcctacagccaccaccagacgacgttccaggcacctgcaccgccgccgtcatgcggcgcaatgacgatggcggccgctgcgccgcatgtgcagggcttccacgtcggcgacgacgacactaccaccgcgatggcgatgcaccgtcatcagcagatgatgcgcgagctggcggaggcgcctctgcaccaggaggcagacgacttcgaggacttcgtgacgcggctgcccaaggcggaggacttcggcctgcagggcttccaggaggtggccctcgaggtgttcgacgacgccgccggcatctgggaccacgcggccgcctgggagccccccaccatgatgatcgactctggcgcccagccccagcagcagctcgtcgtccctctttgactcgctcgtcgatgacgccgcgcgccctgcaccagctactgcttcgttcccagctgcatcgaactggccggtgtacgtggcggagtgatacgacgcgcgcgccatgcatgacaccactgcacaggtggttcctgcatgtgttgcttacgcctcgagacgtacgtacataataccagtatgtatgtaccggatggttactctgatatgactgtatttctcctagttattcgtgagtttcatttggataatgtttcaggttttgt

SEQ ID NO: 22475 - protein, 359 aa, Zea mays subsp. mays
  peptide (1)..(359): Ceres Seq. ID no. 15218863
  misc_feature (83)..(140): Pfam Name: Pfam Description:  AP2 domain
  misc_feature (46)..(193): NCBI GI NO: 28071316 NR Description: P0705A05.24
  misc_feature (57)..(140): NCBI GI NO: 8346773 NR Description: AP2-domain DNA-binding protein
  misc_feature (63)..(169): NCBI GI NO: 25992100 NR Description: dehydration responsive element binding protein
  misc_feature (57)..(238): NCBI GI NO: 15488459 NR Description: AP2-containing protein [Triticum aestivum]
  misc_feature (57)..(172): NCBI GI NO: 38099059 NR Description: dehydration-responsive element binding protein 2
  misc_feature (56)..(144): NCBI GI NO: 15226661 NR Description: AP2 domain transcription factor, putative (DREB2)
  misc_feature (67)..(167): NCBI GI NO: 9369375 NR Description: F10A5.29 [Arabidopsis thaliana]
  misc_feature (67)..(167): NCBI GI NO: 15222261 NR Description: DRE binding transcription factor, putative
  misc_feature (59)..(168): NCBI GI NO: 22594971 NR Description: DRE binding protein 2 [Oryza sativa]
  misc_feature (59)..(168): NCBI GI NO: 25989383 NR Description: DREB1 [Oryza sativa]
MDRVPPPVSMQVAAMQRHQQQQQFVHHLQQVHQQGTQHEQPPPPHQNGSSSSGRTGGGRKCCPLRRSRKGCMKGKGGPDNQQCPFRGVRQRTWGKWVAEIREPNRGARLWLGTFGSALEAARAYDAAARTLYGDCARLNLQLVPPSAAAAAAGGGGPAVVASPSPDTVAGPAAAGGGGGHNCHHQYLQQQHAMAAPMMMMHSSCCSADGSSSNSDSISNSCSSPVTTAASPAYSHHQTTFQAPAPPPSCGAMTMAAAAPHVQGFHVGDDDTTTAMAMHRHQQMMRELAEAPLHQEADDFEDFVTRLPKAEDFGLQGFQEVALEVFDDAAGIWDHAAAWEPPTMMIDSGAQPQQQLVVPL

SEQ ID NO: 22476 - protein, 350 aa, Zea mays subsp. mays
  peptide (1)..(350): Ceres Seq. ID no. 15218864
  misc_feature (74)..(131): Pfam Name: Pfam Description:  AP2 domain
  misc_feature (37)..(184): NCBI GI NO: 28071316 NR Description: P0705A05.24
  misc_feature (48)..(131): NCBI GI NO: 8346773 NR Description: AP2-domain DNA-binding protein
  misc_feature (54)..(160): NCBI GI NO: 25992100 NR Description: dehydration responsive element binding protein
  misc_feature (48)..(229): NCBI GI NO: 15488459 NR Description: AP2-containing protein [Triticum aestivum]
  misc_feature (48)..(163): NCBI GI NO: 38099059 NR Description: dehydration-responsive element binding protein 2
  misc_feature (47)..(135): NCBI GI NO: 15226661 NR Description: AP2 domain transcription factor, putative (DREB2)
  misc_feature (58)..(158): NCBI GI NO: 9369375 NR Description: F10A5.29 [Arabidopsis thaliana]
  misc_feature (58)..(158): NCBI GI NO: 15222261 NR Description: DRE binding transcription factor, putative
  misc_feature (50)..(159): NCBI GI NO: 22594971 NR Description: DRE binding protein 2 [Oryza sativa]
  misc_feature (50)..(159): NCBI GI NO: 25989383 NR Description: DREB1 [Oryza sativa]
MQVAAMQRHQQQQQFVHHLQQVHQQGTQHEQPPPPHQNGSSSSGRTGGGRKCCPLRRSRKGCMKGKGGPDNQQCPFRGVRQRTWGKWVAEIREPNRGARLWLGTFGSALEAARAYDAAARTLYGDCARLNLQLVPPSAAAAAAGGGGPAVVASPSPDTVAGPAAAGGGGGHNCHHQYLQQQHAMAAPMMMMHSSCCSADGSSSNSDSISNSCSSPVTTAASPAYSHHQTTFQAPAPPPSCGAMTMAAAAPHVQGFHVGDDDTTTAMAMHRHQQMMRELAEAPLHQEADDFEDFVTRLPKAEDFGLQGFQEVALEVFDDAAGIWDHAAAWEPPTMMIDSGAQPQQQLVVPL

SEQ ID NO: 22477 - protein, 345 aa, Zea mays subsp. mays
  peptide (1)..(345): Ceres Seq. ID no. 15218865
  misc_feature (69)..(126): Pfam Name: Pfam Description:  AP2 domain
  misc_feature (32)..(179): NCBI GI NO: 28071316 NR Description: P0705A05.24
  misc_feature (43)..(126): NCBI GI NO: 8346773 NR Description: AP2-domain DNA-binding protein
  misc_feature (49)..(155): NCBI GI NO: 25992100 NR Description: dehydration responsive element binding protein
  misc_feature (43)..(224): NCBI GI NO: 15488459 NR Description: AP2-containing protein [Triticum aestivum]
  misc_feature (43)..(158): NCBI GI NO: 38099059 NR Description: dehydration-responsive element binding protein 2
  misc_feature (42)..(130): NCBI GI NO: 15226661 NR Description: AP2 domain transcription factor, putative (DREB2)
  misc_feature (53)..(153): NCBI GI NO: 9369375 NR Description: F10A5.29 [Arabidopsis thaliana]
  misc_feature (53)..(153): NCBI GI NO: 15222261 NR Description: DRE binding transcription factor, putative
  misc_feature (45)..(154): NCBI GI NO: 22594971 NR Description: DRE binding protein 2 [Oryza sativa]
  misc_feature (45)..(154): NCBI GI NO: 25989383 NR Description: DREB1 [Oryza sativa]
MQRHQQQQQFVHHLQQVHQQGTQHEQPPPPHQNGSSSSGRTGGGRKCCPLRRSRKGCMKGKGGPDNQQCPFRGVRQRTWGKWVAEIREPNRGARLWLGTFGSALEAARAYDAAARTLYGDCARLNLQLVPPSAAAAAAGGGGPAVVASPSPDTVAGPAAAGGGGGHNCHHQYLQQQHAMAAPMMMMHSSCCSADGSSSNSDSISNSCSSPVTTAASPAYSHHQTTFQAPAPPPSCGAMTMAAAAPHVQGFHVGDDDTTTAMAMHRHQQMMRELAEAPLHQEADDFEDFVTRLPKAEDFGLQGFQEVALEVFDDAAGIWDHAAAWEPPTMMIDSGAQPQQQLVVPL

SEQ ID NO: 22478 - DNA, 1090 bp, Zea mays subsp. mays
  misc_feature (1)..(1090): Ceres Seq. ID no. 13599627
agctagcttacacagaagggcgattcgatcgaggccgccgccccgccgccgccgccgccggagacgatcccctgcagtcagttagttaagctacaaaatggcctcgctggacaccgtcagaggagatcttggcctggttgttttgtacctaagcaaggctgaggcaagagataagatctgtagagctatacaatatggatccaagttcctgagcaacggacaaccarggacctgcacagaatgtcgacaaatcaactagtctagctcggaaagttttccgactgtttaagtttgttaatgatctccaagctctgattagcccccctgccaaaggaactccacttccgctgatcttacttggaaagtcgaagaacgcgatgctgtcaactttcctctttctggaccaaattgtttgggctgggagaacaggagtatacaagaacaaggagcgagcagagtttcttggcaggatagcattttattgctttctcggatccaatacctgtactactatcatcgagctagccgagcttcagcggctttccaaatcgatgaagaagttagagaaggacctcaagcaccaagagctgtacaagaacgagcagtatcggatgaagctgaagaagtccaacgagaggctgctcgccctcatcaaatcgagcctcgacatagtcgtcgccgtggggctgctgcaactggcaccaaaaaaggtcactcctcgcgtcacgggtgcgtttgggttcgctagctcgctcatcgcctgttaccagttgcttccagccccagccaaatccaagtgatctgcctgcccacctcgggccaggcagctggtgcattgattggtgaaacggcggttgctgtcgccccttgttgtcgctgatactgataagaaataaatctggaccgaactgtccgtccccgtaggatataaccaaggattattgctgtgcatgctggcattgccgagggccatctcatagcctggttgatctgccttgccttagacttgatcatgtagcacgcttgtatttgtatggtccggtgtgccactatcatactacaactgttgcgaaataattagaaatttcat

SEQ ID NO: 22479 - protein, 140 aa, Zea mays subsp. mays; identical to SEQ ID NO: 14637
  peptide (1)..(140): Ceres Seq. ID no. 15218866
  misc_feature (1)..(133): Pfam Name: PEX11 Pfam Description: Peroxisomal biogenesis factor 11
  misc_feature (1)..(140): NCBI GI NO: 25553559 NR Description: OSJNBa0038F22.7
  misc_feature (1)..(136): NCBI GI NO: 34898026 NR Description: ESTs AU064537
  misc_feature (1)..(140): NCBI GI NO: 18406877 NR Description: expressed protein [Arabidopsis thaliana]
  misc_feature (1)..(132): NCBI GI NO: 7486466 NR Description: hypothetical protein At2g45740
  misc_feature (1)..(140): NCBI GI NO: 18378887 NR Description: expressed protein [Arabidopsis thaliana]
  misc_feature (1)..(140): NCBI GI NO: 8489788 NR Description: unknown [Lycopersicon esculentum]
  misc_feature (1)..(140): NCBI GI NO: 30695340 NR Description: expressed protein [Arabidopsis thaliana]
  misc_feature (1)..(140): NCBI GI NO: 11358250 NR Description: hypothetical protein T27I15_160 - Arabidopsisthaliana
  misc_feature (38)..(140): NCBI GI NO: 14335058 NR Description: At2g45740/F4I18.28 [Arabidopsis thaliana]

SEQ ID NO: 22480 - protein, 82 aa, Zea mays subsp. mays
  peptide (1)..(82): Ceres Seq. ID no. 15218867
  misc_feature (1)..(75): Pfam Name: PEX11 Pfam Description: Peroxisomal biogenesis factor 11
  misc_feature (1)..(82): NCBI GI NO: 25553559 NR Description: OSJNBa0038F22.7
  misc_feature (1)..(78): NCBI GI NO: 34898026 NR Description: ESTs AU064537
  misc_feature (1)..(82): NCBI GI NO: 18406877 NR Description: expressed protein [Arabidopsis thaliana]
  misc_feature (1)..(74): NCBI GI NO: 7486466 NR Description: hypothetical protein At2g45740
  misc_feature (1)..(82): NCBI GI NO: 18378887 NR Description: expressed protein [Arabidopsis thaliana]
  misc_feature (1)..(82): NCBI GI NO: 8489788 NR Description: unknown [Lycopersicon esculentum]
  misc_feature (1)..(82): NCBI GI NO: 30695340 NR Description: expressed protein [Arabidopsis thaliana]
  misc_feature (1)..(82): NCBI GI NO: 11358250 NR Description: hypothetical protein T27I15_160 - Arabidopsisthaliana
  misc_feature (1)..(82): NCBI GI NO: 14335058 NR Description: At2g45740/F4I18.28 [Arabidopsis thaliana]
MKKLEKDLKHQELYKNEQYRMKLKKSNERLLALIKSSLDIVVAVGLLQLAPKKVTPRVTGAFGFASSLIACYQLLPAPAKSK

SEQ ID NO: 22481 - DNA, 778 bp, Zea mays subsp. mays
  misc_feature (1)..(778): Ceres Seq. ID no. 13623093
attttcctttctcctccgttttttctctgccctttctctcctctcttatctcctgcggtagaagaaccatggcttcaaccaccgatttcacaaagtctttactatctcccttctcccaacatggctttaattcccagagaggaagtagcagacagaacaagaacgcgacatggccgaatcagcacaagcccaataggtctcttcgtgtgaacgggttgttcggaggtggaaacaacaaagataataataatactgaggatggacagtcaaaggcaggaggaatctttggtaatatgcagaatatgtatgagactgtcaagaaagctcaaatggttgttcaagttgaggcggttcgtgttcaaaaagagttagctgccgcagagtttgatggttattgtgaaggcgagcttgtcaaggttacgttatcaggtaaccagcaaccgatccgaactgatataacagaggcagcaatggagttaggctctgagaaactttcactgttggtcacggaggcttacaaggacgcgcacgcgaagagtgtcgtggctatgaaagaaagaatgagtgaccttgcgcagagcttaggcatgccacctggcctcagcgaaggaatgaagtaaagaaactgtttttgttgtttgtcacgactcaagtttcagttgtgagtttttctctatttatcatcagtcaggcagagaagcaaaaacctttgtactaatactattatggaatcagatatttttctcattaccctgagtatggtctataatttcaacgc

SEQ ID NO: 22482 - protein, 205 aa, Zea mays subsp. mays
  peptide (1)..(205): Ceres Seq. ID no. 13623094
  misc_feature (105)..(197): Pfam Name: Pfam Description:  Uncharacterised BCR, YbaB family COG0718
  misc_feature (22)..(205): NCBI GI NO: 18400436 NR Description: expressed protein [Arabidopsis thaliana]
  misc_feature (23)..(205): NCBI GI NO: 25412184 NR Description: hypothetical protein At2g24020
  misc_feature (24)..(205): NCBI GI NO: 15234797 NR Description: expressed protein [Arabidopsis thaliana]
  misc_feature (24)..(205): NCBI GI NO: 21553866 NR Description: unknown [Arabidopsis thaliana]
  misc_feature (49)..(199): NCBI GI NO: 28207763 NR Description: CR084 protein [Chlamydomonas reinhardtii]
  misc_feature (75)..(200): NCBI GI NO: 24414799 NR Description: hypothetical protein [Synechococcus sp. PCC 7942]
  misc_feature (84)..(197): NCBI GI NO: 17232559 NR Description: hypothetical protein [Nostoc sp. PCC 7120]
  misc_feature (84)..(197): NCBI GI NO: 23124992 NR Description: hypothetical protein [Nostoc punctiforme]
  misc_feature (82)..(197): NCBI GI NO: 23040346 NR Description: hypothetical protein
  misc_feature (87)..(200): NCBI GI NO: 22298265 NR Description: ORF_ID:tlr0723~hypothetical protein
FPFSSVFSLPFLSSLISCGRRTMASTTDFTKSLLSPFSQHGFNSQRGSSRQNKNATWPNQHKPNRSLRVNGLFGGGNNKDNNNTEDGQSKAGGIFGNMQNMYETVKKAQMVVQVEAVRVQKELAAAEFDGYCEGELVKVTLSGNQQPIRTDITEAAMELGSEKLSLLVTEAYKDAHAKSVVAMKERMSDLAQSLGMPPGLSEGMK

SEQ ID NO: 22483 - protein, 183 aa, Zea mays subsp. mays
  peptide (1)..(183): Ceres Seq. ID no. 13623095
  misc_feature (83)..(175): Pfam Name: Pfam Description:  Uncharacterised BCR, YbaB family COG0718
  misc_feature (1)..(183): NCBI GI NO: 18400436 NR Description: expressed protein [Arabidopsis thaliana]
  misc_feature (1)..(183): NCBI GI NO: 25412184 NR Description: hypothetical protein At2g24020
  misc_feature (2)..(183): NCBI GI NO: 15234797 NR Description: expressed protein [Arabidopsis thaliana]
  misc_feature (2)..(183): NCBI GI NO: 21553866 NR Description: unknown [Arabidopsis thaliana]
  misc_feature (27)..(177): NCBI GI NO: 28207763 NR Description: CR084 protein [Chlamydomonas reinhardtii]
  misc_feature (53)..(178): NCBI GI NO: 24414799 NR Description: hypothetical protein [Synechococcus sp. PCC 7942]
  misc_feature (62)..(175): NCBI GI NO: 17232559 NR Description: hypothetical protein [Nostoc sp. PCC 7120]
  misc_feature (62)..(175): NCBI GI NO: 23124992 NR Description: hypothetical protein [Nostoc punctiforme]
  misc_feature (60)..(175): NCBI GI NO: 23040346 NR Description: hypothetical protein
  misc_feature (65)..(178): NCBI GI NO: 22298265 NR Description: ORF_ID:tlr0723~hypothetical protein
MASTTDFTKSLLSPFSQHGFNSQRGSSRQNKNATWPNQHKPNRSLRVNGLFGGGNNKDNNNTEDGQSKAGGIFGNMQNMYETVKKAQMVVQVEAVRVQKELAAAEFDGYCEGELVKVTLSGNQQPIRTDITEAAMELGSEKLSLLVTEAYKDAHAKSVVAMKERMSDLAQSLGMPPGLSEGMK

SEQ ID NO: 22484 - protein, 108 aa, Zea mays subsp. mays
  peptide (1)..(108): Ceres Seq. ID no. 13623096
  misc_feature (8)..(100): Pfam Name: Pfam Description:  Uncharacterised BCR, YbaB family COG0718
  misc_feature (1)..(108): NCBI GI NO: 18400436 NR Description: expressed protein [Arabidopsis thaliana]
  misc_feature (1)..(108): NCBI GI NO: 25412184 NR Description: hypothetical protein At2g24020
  misc_feature (1)..(108): NCBI GI NO: 15234797 NR Description: expressed protein [Arabidopsis thaliana]
  misc_feature (1)..(108): NCBI GI NO: 21553866 NR Description: unknown [Arabidopsis thaliana]
  misc_feature (1)..(102): NCBI GI NO: 28207763 NR Description: CR084 protein [Chlamydomonas reinhardtii]
  misc_feature (1)..(103): NCBI GI NO: 24414799 NR Description: hypothetical protein [Synechococcus sp. PCC 7942]
  misc_feature (1)..(100): NCBI GI NO: 17232559 NR Description: hypothetical protein [Nostoc sp. PCC 7120]
  misc_feature (1)..(100): NCBI GI NO: 23124992 NR Description: hypothetical protein [Nostoc punctiforme]
  misc_feature (1)..(100): NCBI GI NO: 23040346 NR Description: hypothetical protein
  misc_feature (1)..(103): NCBI GI NO: 22298265 NR Description: ORF_ID:tlr0723~hypothetical protein
MQNMYETVKKAQMVVQVEAVRVQKELAAAEFDGYCEGELVKVTLSGNQQPIRTDITEAAMELGSEKLSLLVTEAYKDAHAKSVVAMKERMSDLAQSLGMPPGLSEGMK

SEQ ID NO: 22485 - DNA, 2512 bp, Zea mays subsp. mays
  misc_feature (1)..(2512): Ceres Seq. ID no. 13623192
gtccccccccccccccaacgggtggaaaattagaattatgtgttgtttgtgaataaagataggcatataaagggacaaaattaacgaatctctctgataatccagtatcattgaatattatgctatatatctgaaagcagaggtcagaaaaaatcaatcgataacgtttctctcgtggatatcttgcttttactttttttaatttggctggaacttctgctcgcactttttaactcttcctgcctctagcacaatctctatatcctgtcgcaagtactacatataccattgatcattgccttcaatgcatcgtggtccaaaataaatggatctatgtgcatcattgaaattcaacgaccatgtgaatggtagtcagttggcagatataacttggagcagactgccttgctaacagttccatgtgaagttcaagtttggattctgtgtagattgttactatgaaatacaggcagtagcttttttcatataactttttcctggcacttccttttgccattataatgaagtgagaaagaggtctttggcctcttttaaatttgaactcttgtttctatttttgggtgctgcgtctcctgttaatttgtttagccctttgctgattagtgatttcttagttccctagtaatatatgttttggatgttgcagatagagtctctttctttaacattccatggacacgaccttattgtggattctgatttggagctgaactacggaaggtaaacacataaatacataatgctaccattcagttacgagctggtatgctcttggagcatgtcacttgtaccttttatctgttatatttttatttgatatatcaggcgatacggtttgcttgggttgaatggctgtggaaaatctactcttctcacagcaataggctgcagagaacttcctatccctgaacacatggacatataccatctaagccatgagattgaagcttctgacatgtctgcactgcaagccattgttagttgtgacgaagaaagagtgaagttggaaaaggaagctgaaattttggctgcacaggatgatggtggtggtgaagcattggagcgtgtttatgagcgtctagatgcaatggatgctggaactgcagaaaagcgagctgctgaaattttatttggtctgggttttgacaaacaaatgcaagcaaagaaaactaaagatttctctggaggttggcgtatgaggattgctttagcaagagcactgtttatgaatccaacaatccttttgcttgatgagcccacaaaccatctagatcttgaggcttgtgtctggttggaagagacactgaagaaatttgaccgcatacttgttgtcatatcacactcccaagattttctaaatggagtgtgtactaacattatccatatgcaaaacaagaagctcaagttatacaccggtaactacgatcagtatgttcaaactcgctccgatcttgaagagaatcaaatgaagcagtacaaatgggagcaggaacagattgcttcaatgaaggagtacattgctcgcttcggtcatggttctgcaaagcttgctcgtcaggctcagagcaaagagaaaactcttgcaaagatggagcgaggtggtctcaccgagaaggttgttagggacagagttctagtgttcaggtttacagatgttggcaaacttcctccacctgtgctgcagtttgttgaagtcaagtttgggtatacaccagataatctcatatacaagagtcttgactttggagttgatcttgactctagaatcgcattggttggtcccaatggtgcagggaagagcactcttctgaagcttatgactggtgaccttgctccattagatggcatggttcggcgccacaatcacctgcgcattgcacagtaccatcagcatcttgcggacaagctggatctggacatgccggctctggcttacatgatgaaggaataccctgggaccgaagaagagaagatgcgagctgctgttggcaggtttggcctatcaggaaaggcgcaggtgatgccaatgaggaatctttctgatgggcaaaggagccgtgtcatctttgcatggttggcatataggcagccgcaactgctactgctcgatgagccgacaaatcatttggacattgagaccattgactccctggcggaggcactgaatgagtgggatggtggtttggtcttggtgagccatgatttcaggctgatcaaccaggttgctcaagagatttgggtgtgtgagaatcaggcggtgacaaggtgggaaggtgatatcatggatttcaaggcacacttgaagagcaaggctggtttatctgattagagggctttttccagcaaccatgagctttttaactctgtatcacgaagtcccagttttccaatagcgaactatcagagtactttattgtatcggatttcttttgacttgcattgcaacctgattaccttatactacctggaatatttatttatatatcttttg

SEQ ID NO: 22486 - protein, 471 aa, Zea mays subsp. mays
  peptide (1)..(471): Ceres Seq. ID no. 13623193
  misc_feature (1)..(161): Pfam Name: Pfam Description:  ABC transporter
  misc_feature (1)..(471): NCBI GI NO: 28071305 NR Description: putative ABC transporter
  misc_feature (1)..(471): NCBI GI NO: 15239436 NR Description: ABC transporter family protein
  misc_feature (1)..(422): NCBI GI NO: 7573600 NR Description: ABC transporter homolog [Populus nigra]
  misc_feature (1)..(468): NCBI GI NO: 28436765 NR Description: Similar to ATP-binding cassette, sub-family F
  misc_feature (1)..(466): NCBI GI NO: 27707592 NR Description: similar to ATP-binding cassette
  misc_feature (1)..(466): NCBI GI NO: 3005931 NR Description: ABC transporter [Homo sapiens]
  misc_feature (1)..(466): NCBI GI NO: 10947137 NR Description: ATP-binding cassette
  misc_feature (1)..(466): NCBI GI NO: 10179834 NR Description: iron inhibited ABC transporter 2 [Homo sapiens]
  misc_feature (1)..(466): NCBI GI NO: 27881506 NR Description: ATP-binding cassette
  misc_feature (1)..(466): NCBI GI NO: 23956078 NR Description: ATP-binding cassette, sub-family F
MDIYHLSHEIEASDMSALQAIVSCDEERVKLEKEAEILAAQDDGGGEALERVYERLDAMDAGTAEKRAAEILFGLGFDKQMQAKKTKDFSGGWRMRIALARALFMNPTILLLDEPTNHLDLEACVWLEETLKKFDRILVVISHSQDFLNGVCTNIIHMQNKKLKLYTGNYDQYVQTRSDLEENQMKQYKWEQEQIASMKEYIARFGHGSAKLARQAQSKEKTLAKMERGGLTEKVVRDRVLVFRFTDVGKLPPPVLQFVEVKFGYTPDNLIYKSLDFGVDLDSRIALVGPNGAGKSTLLKLMTGDLAPLDGMVRRHNHLRIAQYHQHLADKLDLDMPALAYMMKEYPGTEEEKMRAAVGRFGLSGKAQVMPMRNLSDGQRSRVIFAWLAYRQPQLLLLDEPTNHLDIETIDSLAEALNEWDGGLVLVSHDFRLINQVAQEIWVCENQAVTRWEGDIMDFKAHLKSKAGLSD

SEQ ID NO: 22487 - protein, 457 aa, Zea mays subsp. mays
  peptide (1)..(457): Ceres Seq. ID no. 13623194
  misc_feature (1)..(147): Pfam Name: Pfam Description:  ABC transporter
  misc_feature (1)..(457): NCBI GI NO: 28071305 NR Description: putative ABC transporter
  misc_feature (1)..(457): NCBI GI NO: 15239436 NR Description: ABC transporter family protein
  misc_feature (1)..(408): NCBI GI NO: 7573600 NR Description: ABC transporter homolog [Populus nigra]
  misc_feature (1)..(454): NCBI GI NO: 28436765 NR Description: Similar to ATP-binding cassette, sub-family F
  misc_feature (1)..(452): NCBI GI NO: 27707592 NR Description: similar to ATP-binding cassette
  misc_feature (1)..(452): NCBI GI NO: 3005931 NR Description: ABC transporter [Homo sapiens]
  misc_feature (1)..(452): NCBI GI NO: 10947137 NR Description: ATP-binding cassette
  misc_feature (1)..(452): NCBI GI NO: 27881506 NR Description: ATP-binding cassette
  misc_feature (1)..(452): NCBI GI NO: 10179834 NR Description: iron inhibited ABC transporter 2 [Homo sapiens]
  misc_feature (1)..(452): NCBI GI NO: 23956078 NR Description: ATP-binding cassette, sub-family F
MSALQAIVSCDEERVKLEKEAEILAAQDDGGGEALERVYERLDAMDAGTAEKRAAEILFGLGFDKQMQAKKTKDFSGGWRMRIALARALFMNPTILLLDEPTNHLDLEACVWLEETLKKFDRILVVISHSQDFLNGVCTNIIHMQNKKLKLYTGNYDQYVQTRSDLEENQMKQYKWEQEQIASMKEYIARFGHGSAKLARQAQSKEKTLAKMERGGLTEKVVRDRVLVFRFTDVGKLPPPVLQFVEVKFGYTPDNLIYKSLDFGVDLDSRIALVGPNGAGKSTLLKLMTGDLAPLDGMVRRHNHLRIAQYHQHLADKLDLDMPALAYMMKEYPGTEEEKMRAAVGRFGLSGKAQVMPMRNLSDGQRSRVIFAWLAYRQPQLLLLDEPTNHLDIETIDSLAEALNEWDGGLVLVSHDFRLINQVAQEIWVCENQAVTRWEGDIMDFKAHLKSKAGLSD

SEQ ID NO: 22488 - protein, 413 aa, Zea mays subsp. mays
  peptide (1)..(413): Ceres Seq. ID no. 13623195
  misc_feature (1)..(103): Pfam Name: Pfam Description:  ABC transporter
  misc_feature (1)..(413): NCBI GI NO: 28071305 NR Description: putative ABC transporter
  misc_feature (1)..(413): NCBI GI NO: 15239436 NR Description: ABC transporter family protein
  misc_feature (1)..(364): NCBI GI NO: 7573600 NR Description: ABC transporter homolog [Populus nigra]
  misc_feature (1)..(410): NCBI GI NO: 28436765 NR Description: Similar to ATP-binding cassette, sub-family F
  misc_feature (1)..(408): NCBI GI NO: 27707592 NR Description: similar to ATP-binding cassette
  misc_feature (1)..(408): NCBI GI NO: 3005931 NR Description: ABC transporter [Homo sapiens]
  misc_feature (1)..(408): NCBI GI NO: 10179834 NR Description: iron inhibited ABC transporter 2 [Homo sapiens]
  misc_feature (1)..(408): NCBI GI NO: 27881506 NR Description: ATP-binding cassette
  misc_feature (1)..(408): NCBI GI NO: 10947137 NR Description: ATP-binding cassette
  misc_feature (1)..(408): NCBI GI NO: 23956078 NR Description: ATP-binding cassette, sub-family F
MDAGTAEKRAAEILFGLGFDKQMQAKKTKDFSGGWRMRIALARALFMNPTILLLDEPTNHLDLEACVWLEETLKKFDRILVVISHSQDFLNGVCTNIIHMQNKKLKLYTGNYDQYVQTRSDLEENQMKQYKWEQEQIASMKEYIARFGHGSAKLARQAQSKEKTLAKMERGGLTEKVVRDRVLVFRFTDVGKLPPPVLQFVEVKFGYTPDNLIYKSLDFGVDLDSRIALVGPNGAGKSTLLKLMTGDLAPLDGMVRRHNHLRIAQYHQHLADKLDLDMPALAYMMKEYPGTEEEKMRAAVGRFGLSGKAQVMPMRNLSDGQRSRVIFAWLAYRQPQLLLLDEPTNHLDIETIDSLAEALNEWDGGLVLVSHDFRLINQVAQEIWVCENQAVTRWEGDIMDFKAHLKSKAGLSD

SEQ ID NO: 22489 - DNA, 1707 bp, Zea mays subsp. mays
  misc_feature (1)..(1707): Ceres Seq. ID no. 13623196
tagtgcaactgaaataaaggaggggcaaaatgtggaatttatatggtttagtcccctttagtcaccccttgagggactagagactaaaacaatttagtccatgttttagtcccgccgtttggcaatttagagactaaatatgactaaaatgaagggactaatctttagtccctcaaaccaaacgggacctaaaaaactaaagagttcctagtgttttacgtagtcaactttgatcatgaattatgtgggatcacatgtaatctcccccatttctattttttttagaattttgggaagtatgtggaaagtgcataggtttaaaccaggtggaacagccaataaactgctcaatttaaaaggctaattctattgcagcttaaaagcattcgagtttgtgggcctagatattggcctcaggtgataaaacttgcacctgaaggtatagtacttatcctgaatacttcacaacttgtcaaaaaaagttgcattatattcttatcataattctcaaatagacaagccatggtggagatctggagacaagacaaatccattcaatgggggagtactctacataaagcgaaaagttggatcttgctcctactctgacgatccaattggatgtcaatcgttaatttcacgggcaatgcatgaggtttatgtttttttacaactgbtgttatatcttagtttattgactatgtgttatattgacttataattttacttttcttacatgaaacttcaggtctgtgatgcaccatctgctagttgcagtaatcaaccaaacagcactaatggtagctacttcagagttgatcagctagtaagcactttctcggccaatccaagcttgattgcttttgcaaaactctgctccgtgtcatggaagagcagatgcaatagcaattttcaggagttctgttctcaagtgctatatgaatgtatgagcaaagatagaccatcactgttacaggcctatatcagtttttacacaacaatagagttaatgtgggagcatttgaagactgggaattttcctttttataattcccttttccttcccaacttgaaggtcgctttggcctacaacgaagcattagttgattctagaatcacaaatggaggaattattcattcgacattcttggagtcacttatgaagcgagtgggagacatctttgcggagctgccaaacctcaaggacaacctccaccgatacttgagcacgggcacatggcctgacacacaaaacgacgtggtggttctctcgtggtacctccaatggtacaatataccacctgcccatgttgtggcttctgcagttgagaaggtcagaccgagagtccctgccggtgtatctatgctcccactgctttcgcatcctgctgccaaccacacaccttgtgggactgatggagatcgagaaggtacagattgtcatggaatgctaaaggatgagcgtggaaaattcaatcaaccttctctgcatgcgggttacttgtgatgaacggtagcaagtattgcttagtgcacttgtgatgaaatctgccagggactaagctgttctgaattaagtttgagacaaaagaatcccataatttttattgtgctttgctttagattcatattttvtgcatgaattgtttcgattctacccaygagaagtactccctctgtccttatcagaggtcaaacactctaagt

SEQ ID NO: 22490 - protein, 256 aa, Zea mays subsp. mays
  peptide (1)..(256): Ceres Seq. ID no. 15219311
  misc_feature (113)..(214): NCBI GI NO: 15239171 NR Description: E3 ubiquitin ligase APC1, putative
  misc_feature (27)..(53): NCBI GI NO: 15239171 NR Description: E3 ubiquitin ligase APC1, putative
MKLQVCDAPSASCSNQPNSTNGSYFRVDQLVSTFSANPSLIAFAKLCSVSWKSRCNSNFQEFCSQVLYECMSKDRPSLLQAYISFYTTIELMWEHLKTGNFPFYNSLFLPNLKVALAYNEALVDSRITNGGIIHSTFLESLMKRVGDIFAELPNLKDNLHRYLSTGTWPDTQNDVVVLSWYLQWYNIPPAHVVASAVEKVRPRVPAGVSMLPLLSHPAANHTPCGTDGDREGTDCHGMLKDERGKFNQPSLHAGYL

SEQ ID NO: 22491 - protein, 186 aa, Zea mays subsp. mays
  peptide (1)..(186): Ceres Seq. ID no. 15219312
  misc_feature (43)..(144): NCBI GI NO: 15239171 NR Description: E3 ubiquitin ligase APC1, putative
MSKDRPSLLQAYISFYTTIELMWEHLKTGNFPFYNSLFLPNLKVALAYNEALVDSRITNGGIIHSTFLESLMKRVGDIFAELPNLKDNLHRYLSTGTWPDTQNDVVVLSWYLQWYNIPPAHVVASAVEKVRPRVPAGVSMLPLLSHPAANHTPCGTDGDREGTDCHGMLKDERGKFNQPSLHAGYL

SEQ ID NO: 22492 - protein, 165 aa, Zea mays subsp. mays
  peptide (1)..(165): Ceres Seq. ID no. 15219313
  misc_feature (22)..(123): NCBI GI NO: 15239171 NR Description: E3 ubiquitin ligase APC1, putative
MWEHLKTGNFPFYNSLFLPNLKVALAYNEALVDSRITNGGIIHSTFLESLMKRVGDIFAELPNLKDNLHRYLSTGTWPDTQNDVVVLSWYLQWYNIPPAHVVASAVEKVRPRVPAGVSMLPLLSHPAANHTPCGTDGDREGTDCHGMLKDERGKFNQPSLHAGYL

SEQ ID NO: 22493 - DNA, 2008 bp, Zea mays subsp. mays
  misc_feature (1)..(2008): Ceres Seq. ID no. 15224811
ttccagtaccggcgccgctggccgactcccgtggcgacaacctgagaccggagcgccataatcctccggattcgagacaccgagcgcaccgcgagctttatctgctgtgtttggagctgaaaatgagtgaggcgaatactactcagcttgaccttgagaaaggattttctcaagtgtctaatgataatgattcgagtagccctgcgaccatgcacaagatgaaagttgagacagaagatggtggaagtgagattgaatcacccactccagaaaaacgtgaatctagaagcaaaagggtcgttgtgagttcactggcaaggaatttgcttgcagagaggtacagagacagattttcaaatcagctggtggaagatgagggtcagacagatgatgaagactataatggaagtgtttcgcctagtggtagccaatcacttttttcagaaagcattgaactgcttgataaacacaaggatttgctgagtcttttcaatagaatggagagttctattagattgcttcacctgcgtaagaagatggctacatttaataatattgccacccaggtggagattctcacaaaaaggaagttattatacagtcatttggcccagatgaagcatttattgccagaggcaatccagataaagaggatactagtacatgatgagaagagcctatgcatgtatgctgatatggaaatcacacttttaatggatgttgtggaatgcacaagtcctgatcagtctccatccatgacaatttgtgaggctttttactcaaagctattgagttttttggatgctcatcataagggtgcagacattcctgaggcaatcctaccggaactctttaattcaaagccaagggagaagttatatcttgaggcagtacacaatggatatgctgctgagtcacctctgcagggtgccactgaggagagattcataaatgcttcccactttccacaatcttttcgaaaactcatgtcgcagaaaatcattgctgatggaattcaaaagactcaattgctgtctgatccagcagatttgagttctgtgattgcttatggtacaaaagggtcaaacggaaaccctaaaaaggaagatgaacatgctccagttccagggaagtatgaaatttctgctactccaagccgccatttgatctcttgttgtcaagagggtacgccaaaacaagggacctcagagtcaccattgttctctggaacacctgtaatgcagacaccaaaaaggcaattgccgacttcacttgacaaacccaaggccacatgtggacacattagtgaaccatgttcagccagttctgcccgcagatcactaaatacattgttaaagtttgaagtaggaagcccttattatgatggagtggaacatacggatacaactaaaaagggcatgatctcagaagactcatcgtattttaacaagtcatttgaggaagatagtcctgtcttatttattgataaagacaaaatcgacgaagtagactcagtggatagccaggaaaagatagcttcgctacataccacatttgacatagtctgcgacatttctcatcctaccaagaattcacttatcacgaaacaggaacttttccataatattcttgccaacaacttggagatagaagaaattggggagatagaagagcagctgaatattttagaggatctggctcctgatttgatatcaaagaagatgataaatggaggagaaatactttatagcatccaacctatatcagatcaaaattcagttcgggctaggcttgtagaacctgtatgagatagctacagttggttcaaagctgaagaaattctttatatgtatgtaccactgatgaaacccacattagctaattaacatcatggaagcatctgcatcagcagcatcgctcttgtctgattggacttgaaatctatattttttgttgaccctgctcaatgctgaaattttaatgaaacttaaatttgcactagctgctc

SEQ ID NO: 22494 - protein, 601 aa, Zea mays subsp. mays
  peptide (1)..(601): Ceres Seq. ID no. 15224812
  misc_feature (41)..(601): NCBI GI NO: 40539114 NR Description: expressed protein
  misc_feature (85)..(597): NCBI GI NO: 38344618 NR Description: OSJNBb0003A12.4
  misc_feature (82)..(599): NCBI GI NO: 15224645 NR Description: expressed protein [Arabidopsis thaliana]
  misc_feature (82)..(599): NCBI GI NO: 38567811 NR Description: CDT1a protein [Arabidopsis thaliana]
  misc_feature (82)..(599): NCBI GI NO: 22530894 NR Description: hypothetical protein [Arabidopsis thaliana]
  misc_feature (380)..(599): NCBI GI NO: 15232570 NR Description: hypothetical protein [Arabidopsis thaliana]
  misc_feature (142)..(354): NCBI GI NO: 15232570 NR Description: hypothetical protein [Arabidopsis thaliana]
PVPAPLADSRGDNLRPERHNPPDSRHRAHRELYLLCLELKMSEANTTQLDLEKGFSQVSNDNDSSSPATMHKMKVETEDGGSEIESPTPEKRESRSKRVVVSSLARNLLAERYRDRFSNQLVEDEGQTDDEDYNGSVSPSGSQSLFSESIELLDKHKDLLSLFNRMESSIRLLHLRKKMATFNNIATQVEILTKRKLLYSHLAQMKHLLPEAIQIKRILVHDEKSLCMYADMEITLLMDVVECTSPDQSPSMTICEAFYSKLLSFLDAHHKGADIPEAILPELFNSKPREKLYLEAVHNGYAAESPLQGATEERFINASHFPQSFRKLMSQKIIADGIQKTQLLSDPADLSSVIAYGTKGSNGNPKKEDEHAPVPGKYEISATPSRHLISCCQEGTPKQGTSESPLFSGTPVMQTPKRQLPTSLDKPKATCGHISEPCSASSARRSLNTLLKFEVGSPYYDGVEHTDTTKKGMISEDSSYFNKSFEEDSPVLFIDKDKIDEVDSVDSQEKIASLHTTFDIVCDISHPTKNSLITKQELFHNILANNLEIEEIGEIEEQLNILEDLAPDLISKKMINGGEILYSIQPISDQNSVRARLVEPV

SEQ ID NO: 22495 - protein, 561 aa, Zea mays subsp. mays
  peptide (1)..(561): Ceres Seq. ID no. 15224813
  misc_feature (1)..(561): NCBI GI NO: 40539114 NR Description: expressed protein
  misc_feature (45)..(557): NCBI GI NO: 38344618 NR Description: OSJNBb0003A12.4
  misc_feature (42)..(559): NCBI GI NO: 15224645 NR Description: expressed protein [Arabidopsis thaliana]
  misc_feature (42)..(559): NCBI GI NO: 38567811 NR Description: CDT1a protein [Arabidopsis thaliana]
  misc_feature (42)..(559): NCBI GI NO: 22530894 NR Description: hypothetical protein [Arabidopsis thaliana]
  misc_feature (340)..(559): NCBI GI NO: 15232570 NR Description: hypothetical protein [Arabidopsis thaliana]
  misc_feature (102)..(314): NCBI GI NO: 15232570 NR Description: hypothetical protein [Arabidopsis thaliana]
MSEANTTQLDLEKGFSQVSNDNDSSSPATMHKMKVETEDGGSEIESPTPEKRESRSKRVVVSSLARNLLAERYRDRFSNQLVEDEGQTDDEDYNGSVSPSGSQSLFSESIELLDKHKDLLSLFNRMESSIRLLHLRKKMATFNNIATQVEILTKRKLLYSHLAQMKHLLPEAIQIKRILVHDEKSLCMYADMEITLLMDVVECTSPDQSPSMTICEAFYSKLLSFLDAHHKGADIPEAILPELFNSKPREKLYLEAVHNGYAAESPLQGATEERFINASHFPQSFRKLMSQKIIADGIQKTQLLSDPADLSSVIAYGTKGSNGNPKKEDEHAPVPGKYEISATPSRHLISCCQEGTPKQGTSESPLFSGTPVMQTPKRQLPTSLDKPKATCGHISEPCSASSARRSLNTLLKFEVGSPYYDGVEHTDTTKKGMISEDSSYFNKSFEEDSPVLFIDKDKIDEVDSVDSQEKIASLHTTFDIVCDISHPTKNSLITKQELFHNILANNLEIEEIGEIEEQLNILEDLAPDLISKKMINGGEILYSIQPISDQNSVRARLVEPV

SEQ ID NO: 22496 - protein, 532 aa, Zea mays subsp. mays
  peptide (1)..(532): Ceres Seq. ID no. 15224814
  misc_feature (1)..(532): NCBI GI NO: 40539114 NR Description: expressed protein
  misc_feature (16)..(528): NCBI GI NO: 38344618 NR Description: OSJNBb0003A12.4
  misc_feature (13)..(530): NCBI GI NO: 15224645 NR Description: expressed protein [Arabidopsis thaliana]
  misc_feature (13)..(530): NCBI GI NO: 38567811 NR Description: CDT1a protein [Arabidopsis thaliana]
  misc_feature (13)..(530): NCBI GI NO: 22530894 NR Description: hypothetical protein [Arabidopsis thaliana]
  misc_feature (311)..(530): NCBI GI NO: 15232570 NR Description: hypothetical protein [Arabidopsis thaliana]
  misc_feature (73)..(285): NCBI GI NO: 15232570 NR Description: hypothetical protein [Arabidopsis thaliana]
MHKMKVETEDGGSEIESPTPEKRESRSKRVVVSSLARNLLAERYRDRFSNQLVEDEGQTDDEDYNGSVSPSGSQSLFSESIELLDKHKDLLSLFNRMESSIRLLHLRKKMATFNNIATQVEILTKRKLLYSHLAQMKHLLPEAIQIKRILVHDEKSLCMYADMEITLLMDVVECTSPDQSPSMTICEAFYSKLLSFLDAHHKGADIPEAILPELFNSKPREKLYLEAVHNGYAAESPLQGATEERFINASHFPQSFRKLMSQKIIADGIQKTQLLSDPADLSSVIAYGTKGSNGNPKKEDEHAPVPGKYEISATPSRHLISCCQEGTPKQGTSESPLFSGTPVMQTPKRQLPTSLDKPKATCGHISEPCSASSARRSLNTLLKFEVGSPYYDGVEHTDTTKKGMISEDSSYFNKSFEEDSPVLFIDKDKIDEVDSVDSQEKIASLHTTFDIVCDISHPTKNSLITKQELFHNILANNLEIEEIGEIEEQLNILEDLAPDLISKKMINGGEILYSIQPISDQNSVRARLVEPV

SEQ ID NO: 22497 - DNA, 1645 bp, Zea mays subsp. mays
  misc_feature (1)..(1645): Ceres Seq. ID no. 15224641
agatgtgaggctaacattttcaaatgctatgaagtataatcctccaggcaatgatgtgcatatttttgctaaagaattgaatgaaatgtttgattcagaatgggaatcagtagaaaggaaatttagaggccgaaaccttggtcaagaccagcagacaatgaaggccataaaagttcgagctatgatggattcaaagtctacagttgctagagggccggttgcatgctcaaaccctaaaactttggttgctagaggtccagtagcttgctcaaattcgattgcaaagaagacactgacagatgcattatcctccaaagtaaaaatcaaattttccgtgcgcagctctgcgcatacctcttccaaagatatactcgttcaagcagctggtagcaaagaggggtccttaaatcactctgtccctactggcaacaaagaggcatcttcaaattgtactattcctatcgctaaggaggctaaaatatcaagggcacgagaaattgagcgctgctctggttcaattggaaaacaatcatggtcttgcaatgacacttctacttcacctctcgcttcctctgtgcaaggtgaggaaagttaccttcatgatgaacctttgtcaccaagcagggctcttcgtgcagcaatgctcaggagtcgttttgctgggactatagtgaaggctcaacagaaggcacttctagatcatgggaagaatatagaccctgtgaaattgcaattggaaaaggagaggctggaaaagaggcagcaagaagagaaagcaaggatcgaggcccaggtgaaggctgctgaagcagctgcacaacaaaagtttgaggaagaaatgaggatgaagagaaagcaggaaagggaggcagcacgcctggcactacgcatgatgaagaagactgttgatattgacaacagtgacttcctaaaggagctggagaacttcagcaaaacatggcaggcaaatccacctggcaaattaatcgtggattttatcagtggggacttgccaccggggttagggagtccgctggagaggctcggcctcttcatgaaggaagatttcgaggatgaggtagaacaggaaatggaggacagagtgtcaccctcaatggatgttgacatcaggaaagatttccaggaagacttaggacatgaaatgcaggacagtgcatcacccgtgactgtcattggcacaaagaatgacgtacagggagtggcaggacatgaaatggaggacagcggatcaccagccacagtcattgacacgaagaaagaagagacagaacatgagatggtggacagcgtatcacctttgatggatgttgacaaggaggaaggggagatcagctgctgacggtagctacacctctcttcacccgcataatttattgaggcagacatccttgcttggttgttagattaggcaatttcataagcagagtgatgcagaaacattagttttatctgctttcatcgtagaaccatgtggtgtggagaacatgtctcagacgaaatgacgagtggttttggatttgctgcggattttaattttcgtggtcttgtcagtctggcaagagtatgatgactctgtatgttgaatttgacctcccccgctggatgacatgtataaaaggatgag

SEQ ID NO: 22498 - protein, 452 aa, Zea mays subsp. mays
  peptide (1)..(452): Ceres Seq. ID no. 15224642
  misc_feature (78)..(378): NCBI GI NO: 33146482 NR Description: putative RING3 protein
  misc_feature (1)..(169): NCBI GI NO: 33146482 NR Description: putative RING3 protein
  misc_feature (352)..(451): NCBI GI NO: 33146482 NR Description: putative RING3 protein
  misc_feature (115)..(436): NCBI GI NO: 9294219 NR Description: gb|AAF01563
  misc_feature (1)..(72): NCBI GI NO: 9294219 NR Description: gb|AAF01563
  misc_feature (113)..(436): NCBI GI NO: 15232127 NR Description: DNA-binding protein family [Arabidopsis thaliana]
  misc_feature (1)..(72): NCBI GI NO: 15232127 NR Description: DNA-binding protein family [Arabidopsis thaliana]
  misc_feature (189)..(378): NCBI GI NO: 11358472 NR Description: kinase-like protein - Arabidopsis thaliana
  misc_feature (1)..(173): NCBI GI NO: 11358472 NR Description: kinase-like protein - Arabidopsis thaliana
  misc_feature (189)..(375): NCBI GI NO: 6016737 NR Description: hypothetical protein [Arabidopsis thaliana]
DVRLTFSNAMKYNPPGNDVHIFAKELNEMFDSEWESVERKFRGRNLGQDQQTMKAIKVRAMMDSKSTVARGPVACSNPKTLVARGPVACSNSIAKKTLTDALSSKVKIKFSVRSSAHTSSKDILVQAAGSKEGSLNHSVPTGNKEASSNCTIPIAKEAKISRAREIERCSGSIGKQSWSCNDTSTSPLASSVQGEESYLHDEPLSPSRALRAAMLRSRFAGTIVKAQQKALLDHGKNIDPVKLQLEKERLEKRQQEEKARIEAQVKAAEAAAQQKFEEEMRMKRKQEREAARLALRMMKKTVDIDNSDFLKELENFSKTWQANPPGKLIVDFISGDLPPGLGSPLERLGLFMKEDFEDEVEQEMEDRVSPSMDVDIRKDFQEDLGHEMQDSASPVTVIGTKNDVQGVAGHEMEDSGSPATVIDTKKEETEHEMVDSVSPLMDVDKEEGEISC

SEQ ID NO: 22499 - protein, 443 aa, Zea mays subsp. mays
  peptide (1)..(443): Ceres Seq. ID no. 15224643
  misc_feature (69)..(369): NCBI GI NO: 33146482 NR Description: putative RING3 protein
  misc_feature (1)..(160): NCBI GI NO: 33146482 NR Description: putative RING3 protein
  misc_feature (343)..(442): NCBI GI NO: 33146482 NR Description: putative RING3 protein
  misc_feature (106)..(427): NCBI GI NO: 9294219 NR Description: gb|AAF01563
  misc_feature (1)..(63): NCBI GI NO: 9294219 NR Description: gb|AAF01563
  misc_feature (104)..(427): NCBI GI NO: 15232127 NR Description: DNA-binding protein family [Arabidopsis thaliana]
  misc_feature (1)..(63): NCBI GI NO: 15232127 NR Description: DNA-binding protein family [Arabidopsis thaliana]
  misc_feature (180)..(369): NCBI GI NO: 11358472 NR Description: kinase-like protein - Arabidopsis thaliana
  misc_feature (1)..(164): NCBI GI NO: 11358472 NR Description: kinase-like protein - Arabidopsis thaliana
  misc_feature (180)..(366): NCBI GI NO: 6016737 NR Description: hypothetical protein [Arabidopsis thaliana]
MKYNPPGNDVHIFAKELNEMFDSEWESVERKFRGRNLGQDQQTMKAIKVRAMMDSKSTVARGPVACSNPKTLVARGPVACSNSIAKKTLTDALSSKVKIKFSVRSSAHTSSKDILVQAAGSKEGSLNHSVPTGNKEASSNCTIPIAKEAKISRAREIERCSGSIGKQSWSCNDTSTSPLASSVQGEESYLHDEPLSPSRALRAAMLRSRFAGTIVKAQQKALLDHGKNIDPVKLQLEKERLEKRQQEEKARIEAQVKAAEAAAQQKFEEEMRMKRKQEREAARLALRMMKKTVDIDNSDFLKELENFSKTWQANPPGKLIVDFISGDLPPGLGSPLERLGLFMKEDFEDEVEQEMEDRVSPSMDVDIRKDFQEDLGHEMQDSASPVTVIGTKNDVQGVAGHEMEDSGSPATVIDTKKEETEHEMVDSVSPLMDVDKEEGEISC

SEQ ID NO: 22500 - protein, 424 aa, Zea mays subsp. mays
  peptide (1)..(424): Ceres Seq. ID no. 15224644
  misc_feature (50)..(350): NCBI GI NO: 33146482 NR Description: putative RING3 protein
  misc_feature (1)..(141): NCBI GI NO: 33146482 NR Description: putative RING3 protein
  misc_feature (324)..(423): NCBI GI NO: 33146482 NR Description: putative RING3 protein
  misc_feature (87)..(408): NCBI GI NO: 9294219 NR Description: gb|AAF01563
  misc_feature (1)..(44): NCBI GI NO: 9294219 NR Description: gb|AAF01563
  misc_feature (85)..(408): NCBI GI NO: 15232127 NR Description: DNA-binding protein family [Arabidopsis thaliana]
  misc_feature (1)..(44): NCBI GI NO: 15232127 NR Description: DNA-binding protein family [Arabidopsis thaliana]
  misc_feature (161)..(350): NCBI GI NO: 11358472 NR Description: kinase-like protein - Arabidopsis thaliana
  misc_feature (1)..(145): NCBI GI NO: 11358472 NR Description: kinase-like protein - Arabidopsis thaliana
  misc_feature (161)..(347): NCBI GI NO: 6016737 NR Description: hypothetical protein [Arabidopsis thaliana]
MFDSEWESVERKFRGRNLGQDQQTMKAIKVRAMMDSKSTVARGPVACSNPKTLVARGPVACSNSIAKKTLTDALSSKVKIKFSVRSSAHTSSKDILVQAAGSKEGSLNHSVPTGNKEASSNCTIPIAKEAKISRAREIERCSGSIGKQSWSCNDTSTSPLASSVQGEESYLHDEPLSPSRALRAAMLRSRFAGTIVKAQQKALLDHGKNIDPVKLQLEKERLEKRQQEEKARIEAQVKAAEAAAQQKFEEEMRMKRKQEREAARLALRMMKKTVDIDNSDFLKELENFSKTWQANPPGKLIVDFISGDLPPGLGSPLERLGLFMKEDFEDEVEQEMEDRVSPSMDVDIRKDFQEDLGHEMQDSASPVTVIGTKNDVQGVAGHEMEDSGSPATVIDTKKEETEHEMVDSVSPLMDVDKEEGEISC

SEQ ID NO: 22501 - DNA, 3495 bp, Zea mays subsp. mays
  misc_feature (1)..(3495): Ceres Seq. ID no. 14308925
tcgtcgtttgtgccgagtgggttggttatcgagagcgtaagtggttcatctgactagactattttagctgtccgatcgaaagcggtgatggccgagtgcccgctgtgcgggacggcgtcgcgccgaattcatagccgatacgccagacaagtcgcggacctgccctgcgcgggtaggcagatacgtctgtgggtgatcgcgcgacggttcctgtgcgagattccgcattgtcgtcggagaattttcgccgagcggttcggtcaggatgtcgtcccggtgcagtcacgccgaacagccaggttggaatgcatcgtcgtcgccggcattgatgattgggccttccggaacaaccattgctacggaacaatcgtttgcgatctggagcgacggcggatcgtgaggttgctgctcaatcgcgagattgcaacggtgcaggcttggctatccgaccatcccgggatcaaaataagtatcgcgcgatcgtggcggcggctatggcgaggctgccgcaaaggcgctgcctgaggtcatccaggttgccgatcgctggcacctgatggaaaacgcgagcgcagccttcctcggtgccgtgcgccggtcgatgcgcgtgatctgtacggcaatcggcgctacgatgatcaatccagagttgctcacctgtgcggaacgactgcaatataacggctatctgcggcgcgaggagaccaacgccgcgatcatggcgctcgtcaaggatggcgtgccgcttaaggagatcgtccgtcgaaccgggtacagccgtaaactcactcgtcaggtcagtcgaggcgagagcacggatatcttccgaacgcggcagagcacgctcaacgcgcacttacccttcatcgatgcccaatgggctacgggctgccgtaacggcgcggagctctggcgtcgtctgcaggctcacggcttccgaggctagttacgtgtcgtcagcgaatggacgacacggcggcgacgtgcggagaaggcaaccaacaaacaactgcaaaaggtgccttctgcgcgaacgatcgtacgattgacaaggaagggcaggcgcaagggttcgaccccaagagattgatggtcggcacaagcgcctttcactctcgaaaatgaagctgttgtttcgggcgggagatcgaagcgactgcgcgatcgacgcggcaaaagcgccagactgatcagacgcgacgtagctctgtgcttcgcgatgagaagctttttccgccccctcaacccggttgctatcagcattgagccacgaaggaagctttcaacataggcaagggagtgataagcctacattgcgaaattccctgacagctggcccagcatcggtctcgatgacgaggaattgcgtgtttaattccgcaacggcatgacaagggcatgggacatgggcttaggttggtgccgaacccaagagtgatttcgacccccttcggacaatatgtttgggaaggacaagcagattctggttcttataccattagagaggaaaaagacccggagcagctcattcctaggggaactcgccttactctctatctcaagtgtgatgataagggttttgctcaccctgagaggattcaaaaacttctaaagacttactctcagtttgtttcctttcccatttacacatgggaagagaaaggcttcacaaaagaggtcgaggttgatgaagatccagcggaagcccaaaaaaaaggtgatgattcagcggaaaccaaaactgagcctaagaaaaagaccaaaactgttattgagaagtattgggattgggagctttcaaatgagacacaacctatttggcttcggaaccccaaagaggtttcaactgaggaatacaatgattttttcaagaaaaccttcaatgagtacttgggccctttggcatcatcacacttcactacagagggtgaggtagaatttaggtcaattctttttgttcctgctacaaggaaggaagatgtaactgctgatagtaggaagaccaagaatatcagactatatgttaagcgtgtattcatatcagatgactttgatggagaattgttcccaagatatttgagctttgtgaagggtgttgttgactcaaatgaccttccattgaatgtttctcgtgagaatcttcaagaaagtcgaattgttcgtataatgagaaaaaggctggtgcggaaagcctttgatatgatacttggcatttcttgcagtgaaaatagagatgattatgaaaggttctgggagaactttggaaaatttttaaagctgggtgccatggaagataaggaaaatcacaagagaattgctcctttgttgcgcttcttctcttctcaaagcaacaatgaattaattagcttggatgaatatgtggaaaacatgaaacctgagcagaaggacatttacttcattgctgcagatagtatgagcagtgccataaatgctcctttcttagagagactaacagaaaaagactatgaggttctacttttggtcgaccctatggatgaattggctatccagaatctgagctcctacaaggataagaaatttgtggacattagcaaagaagatttggatttaggtgataacaatgaggaaagagagaaggagataaagcaggagttcagccaagcctgtgactggataaagaatcgcttgggtgacaaggttgcacgtgttgacatatctaatcgtctcaggtcatcgccatgtgttcttgttgcagcgaagtttggttggtcagccaatatggaaaggctgatgagagcacagtctatgggtgatacagcctctttggatttcatgcgttcgaggaaagtttttgaaataaacccagagcatgagataatcaaggccttgaatgtggcatgcaggaataaccctgatgatcctgaagccctaaaggctctggatgttctctttgaaactgctatgatttcaagtggcttttcgcctgacaacccggcggagctcagtgggaagatttacgagatgatgacctctgccatcgctggcaaatggtcctcacagccacaggcgcaggcgcaacctgccgacccaatcccacagcacgacgcacctgtgaggtcagacgagccgcttgaagctcaagtggtggaggcagagcccgttgaggctggtcagcagaagtgagggcctgttcgtgcagaatctttgtacggagtagttttgaaccgttgtgcacaacatggctgagaatttcgagtatatgttttgacggcctgtatctgtgtcatgagctgttactggtaatgtaagacgtattggttagaaattagatgattaggaataattgggtagctggactacttgaactggttcctgaaccatcaggagggttatggactcatggttagcttctactgcgtccttgggggcagtagtaattttgaagccaattcgttgttttgtaggctctatttctgtttggctttaatacttatcggtttctactgtttctac

SEQ ID NO: 22502 - protein, 588 aa, Zea mays subsp. mays
  peptide (1)..(588): Ceres Seq. ID no. 14308926
  misc_feature (61)..(542): Pfam Name: Pfam Description:  Hsp90 protein
  misc_feature (1)..(588): NCBI GI NO: 15231505 NR Description: heat shock protein -related [Arabidopsis thaliana]
  misc_feature (1)..(580): NCBI GI NO: 15228059 NR Description: heat shock protein, putative
  misc_feature (1)..(580): NCBI GI NO: 20453106 NR Description: At2g04030/F3C11.14 [Arabidopsis thaliana]
  misc_feature (1)..(554): NCBI GI NO: 1076758 NR Description: heat-shock protein, 82K, precursor - rye
  misc_feature (20)..(580): NCBI GI NO: 1906830 NR Description: heat shock protein [Arabidopsis thaliana]
  misc_feature (1)..(580): NCBI GI NO: 30678090 NR Description: heat shock protein, putative
  misc_feature (1)..(537): NCBI GI NO: 1708314 NR Description: Heat shock protein 83
  misc_feature (1)..(537): NCBI GI NO: 33326375 NR Description: heat shock protein [Hevea brasiliensis]
  misc_feature (1)..(537): NCBI GI NO: 15237214 NR Description: heat shock protein 81-1
  misc_feature (1)..(537): NCBI GI NO: 26454635 NR Description: Heat shock protein 81-1
MGHGLRLVPNPRVISTPFGQYVWEGQADSGSYTIREEKDPEQLIPRGTRLTLYLKCDDKGFAHPERIQKLLKTYSQFVSFPIYTWEEKGFTKEVEVDEDPAEAQKKGDDSAETKTEPKKKTKTVIEKYWDWELSNETQPIWLRNPKEVSTEEYNDFFKKTFNEYLGPLASSHFTTEGEVEFRSILFVPATRKEDVTADSRKTKNIRLYVKRVFISDDFDGELFPRYLSFVKGVVDSNDLPLNVSRENLQESRIVRIMRKRLVRKAFDMILGISCSENRDDYERFWENFGKFLKLGAMEDKENHKRIAPLLRFFSSQSNNELISLDEYVENMKPEQKDIYFIAADSMSSAINAPFLERLTEKDYEVLLLVDPMDELAIQNLSSYKDKKFVDISKEDLDLGDNNEEREKEIKQEFSQACDWIKNRLGDKVARVDISNRLRSSPCVLVAAKFGWSANMERLMRAQSMGDTASLDFMRSRKVFEINPEHEIIKALNVACRNNPDDPEALKALDVLFETAMISSGFSPDNPAELSGKIYEMMTSAIAGKWSSQPQAQAQPADPIPQHDAPVRSDEPLEAQVVEAEPVEAGQQK

SEQ ID NO: 22503 - protein, 332 aa, Zea mays subsp. mays
  peptide (1)..(332): Ceres Seq. ID no. 14308927
  misc_feature (1)..(286): Pfam Name: Pfam Description:  Hsp90 protein
  misc_feature (1)..(332): NCBI GI NO: 15231505 NR Description: heat shock protein -related [Arabidopsis thaliana]
  misc_feature (1)..(324): NCBI GI NO: 15228059 NR Description: heat shock protein, putative
  misc_feature (1)..(324): NCBI GI NO: 20453106 NR Description: At2g04030/F3C11.14 [Arabidopsis thaliana]
  misc_feature (1)..(298): NCBI GI NO: 1076758 NR Description: heat-shock protein, 82K, precursor - rye
  misc_feature (1)..(324): NCBI GI NO: 1906830 NR Description: heat shock protein [Arabidopsis thaliana]
  misc_feature (1)..(324): NCBI GI NO: 30678090 NR Description: heat shock protein, putative
  misc_feature (1)..(281): NCBI GI NO: 1708314 NR Description: Heat shock protein 83
  misc_feature (1)..(281): NCBI GI NO: 33326375 NR Description: heat shock protein [Hevea brasiliensis]
  misc_feature (1)..(281): NCBI GI NO: 15237214 NR Description: heat shock protein 81-1
  misc_feature (1)..(281): NCBI GI NO: 26454635 NR Description: Heat shock protein 81-1
MRKRLVRKAFDMILGISCSENRDDYERFWENFGKFLKLGAMEDKENHKRIAPLLRFFSSQSNNELISLDEYVENMKPEQKDIYFIAADSMSSAINAPFLERLTEKDYEVLLLVDPMDELAIQNLSSYKDKKFVDISKEDLDLGDNNEEREKEIKQEFSQACDWIKNRLGDKVARVDISNRLRSSPCVLVAAKFGWSANMERLMRAQSMGDTASLDFMRSRKVFEINPEHEIIKALNVACRNNPDDPEALKALDVLFETAMISSGFSPDNPAELSGKIYEMMTSAIAGKWSSQPQAQAQPADPIPQHDAPVRSDEPLEAQVVEAEPVEAGQQK

SEQ ID NO: 22504 - protein, 321 aa, Zea mays subsp. mays
  peptide (1)..(321): Ceres Seq. ID no. 14308928
  misc_feature (1)..(275): Pfam Name: Pfam Description:  Hsp90 protein
  misc_feature (1)..(321): NCBI GI NO: 15231505 NR Description: heat shock protein -related [Arabidopsis thaliana]
  misc_feature (1)..(313): NCBI GI NO: 15228059 NR Description: heat shock protein, putative
  misc_feature (1)..(313): NCBI GI NO: 20453106 NR Description: At2g04030/F3C11.14 [Arabidopsis thaliana]
  misc_feature (1)..(287): NCBI GI NO: 1076758 NR Description: heat-shock protein, 82K, precursor - rye
  misc_feature (1)..(313): NCBI GI NO: 1906830 NR Description: heat shock protein [Arabidopsis thaliana]
  misc_feature (1)..(313): NCBI GI NO: 30678090 NR Description: heat shock protein, putative
  misc_feature (1)..(270): NCBI GI NO: 1708314 NR Description: Heat shock protein 83
  misc_feature (1)..(270): NCBI GI NO: 33326375 NR Description: heat shock protein [Hevea brasiliensis]
  misc_feature (1)..(270): NCBI GI NO: 15237214 NR Description: heat shock protein 81-1
  misc_feature (1)..(270): NCBI GI NO: 26454635 NR Description: Heat shock protein 81-1
MILGISCSENRDDYERFWENFGKFLKLGAMEDKENHKRIAPLLRFFSSQSNNELISLDEYVENMKPEQKDIYFIAADSMSSAINAPFLERLTEKDYEVLLLVDPMDELAIQNLSSYKDKKFVDISKEDLDLGDNNEEREKEIKQEFSQACDWIKNRLGDKVARVDISNRLRSSPCVLVAAKFGWSANMERLMRAQSMGDTASLDFMRSRKVFEINPEHEIIKALNVACRNNPDDPEALKALDVLFETAMISSGFSPDNPAELSGKIYEMMTSAIAGKWSSQPQAQAQPADPIPQHDAPVRSDEPLEAQVVEAEPVEAGQQK

SEQ ID NO: 22505 - DNA, 1949 bp, Zea mays subsp. mays
  misc_feature (1)..(1949): Ceres Seq. ID no. 15226156
gccgaccgccgactcccgccgcgaaatcctgcgtcagaagcgccgattctcggacgtcctccggatctgagacaccgagcgcactacgagctgtagctgtagtgacctgaaaatgagtgagggggatgctactcagcttgcccttgagaaaggattaccacaagtgtctaatgatgatggttcgagtagtcctgcaactatgcacaagttgaaagttgacacagaagatgctggaagcaaaattgaatcacccactccagagaagcttgaatctagaagcaaaggggttgttgtgagttcgttggcaaggaatttacttgcagagaggtacaaagatagatttgcaaatcagttcctggaagatgagggtgacatagatgatgaagactataatgacagtatttcgccaggcatgagccgatctcagagatcaagaagcattgaacttctggagaagcacaaggatttactgaatctttttaatagaatggagagttctataaggttgctgcgcctacggaagaggatggctacatttaataatattgccacccaggtggaaatactcgcaaaaaggaagttatcgtactgtcatttggcccaaatgaagtatttgtttccagaagcaatccagattaagagggtacttctacatgacgagaaaagcctatgcatgtatgctgatatggaaatcatacttgtaatggatgttgtggaatacacaagtcctgatcactctccatccatggcaatttgcgatgctttttactcgaagcttttgacatttttggatgctcatcataagggtacagacattccagaggcaatcttaccagaaccctttaacttgaggtcaaggggccagttaaatcttgaggcatcaaataatggacatgctgctgagccacatctgcaaggcaccactaaggatggattctcaaatgcttcccacttcccacaatcttttcgaaagctaatgtcccagaaagtcattactgatggagctgaaagaactcaattgctacttgatccaacaaaactgagctctgtgagtgcttatgatacagaaggaacaaacagaagccctaaaaagcaagacaaacatgcttcagttacagtgaactctgaaatttctgctactccaagccgtcatttgatctctcgttgtcaagagggtacgccaaaacaagagacctcagaatcaccattgttggctcaaacaccagcaactcagacacccaaaaggcaattgcccactccacttgagaaacttgaggccacatgtggacacatttctgaaccacgttcagctagttctgcccgcagatcactaaatacatctttaaaatttgaagggggaagcccttcttatcatgatagaatggaacatgtggctacatctaaaattggaattttctcagaagattcatctagtttcaacaagtcattagaggagaatggtcctgtcttctttactgatagagagaaaatcaatctggcagacccagtgggtgtccaggaaaagatggcttcgttacgttccacatttggcatcgtctgcgatatttctcattctatcaagaattcgctaattacaaaacaggagcttttccataatattcttgccaacaacttggagatagaacagatgggagagatagaagagcagctacatattttagaggatctggctcccgattggatatctaaggtgataaatggaggagaaatattttacagctttgaaactatagcagatcagaattcagtgtgggaaaggcttgtagaagctgtgtgaggtgtggaatagctgggattggtttaaagctaaagaatcagccacatagtactatgtatgtaacgctaacggaacccatcaaacagccacattttctcataatggaatcctcaggattgctcttgtcttattcaatttcaattttttcttc

SEQ ID NO: 22506 - protein, 561 aa, Zea mays subsp. mays
  peptide (1)..(561): Ceres Seq. ID no. 15226157
  misc_feature (1)..(561): NCBI GI NO: 40539114 NR Description: expressed protein
  misc_feature (57)..(560): NCBI GI NO: 38344618 NR Description: OSJNBb0003A12.4
  misc_feature (42)..(559): NCBI GI NO: 15224645 NR Description: expressed protein [Arabidopsis thaliana]
  misc_feature (42)..(559): NCBI GI NO: 38567811 NR Description: CDT1a protein [Arabidopsis thaliana]
  misc_feature (42)..(559): NCBI GI NO: 22530894 NR Description: hypothetical protein [Arabidopsis thaliana]
  misc_feature (302)..(560): NCBI GI NO: 15232570 NR Description: hypothetical protein [Arabidopsis thaliana]
  misc_feature (102)..(249): NCBI GI NO: 15232570 NR Description: hypothetical protein [Arabidopsis thaliana]
MSEGDATQLALEKGLPQVSNDDGSSSPATMHKLKVDTEDAGSKIESPTPEKLESRSKGVVVSSLARNLLAERYKDRFANQFLEDEGDIDDEDYNDSISPGMSRSQRSRSIELLEKHKDLLNLFNRMESSIRLLRLRKRMATFNNIATQVEILAKRKLSYCHLAQMKYLFPEAIQIKRVLLHDEKSLCMYADMEIILVMDVVEYTSPDHSPSMAICDAFYSKLLTFLDAHHKGTDIPEAILPEPFNLRSRGQLNLEASNNGHAAEPHLQGTTKDGFSNASHFPQSFRKLMSQKVITDGAERTQLLLDPTKLSSVSAYDTEGTNRSPKKQDKHASVTVNSEISATPSRHLISRCQEGTPKQETSESPLLAQTPATQTPKRQLPTPLEKLEATCGHISEPRSASSARRSLNTSLKFEGGSPSYHDRMEHVATSKIGIFSEDSSSFNKSLEENGPVFFTDREKINLADPVGVQEKMASLRSTFGIVCDISHSIKNSLITKQELFHNILANNLEIEQMGEIEEQLHILEDLAPDWISKVINGGEIFYSFETIADQNSVWERLVEAV

SEQ ID NO: 22507 - protein, 532 aa, Zea mays subsp. mays
  peptide (1)..(532): Ceres Seq. ID no. 15226158
  misc_feature (1)..(532): NCBI GI NO: 40539114 NR Description: expressed protein
  misc_feature (28)..(531): NCBI GI NO: 38344618 NR Description: OSJNBb0003A12.4
  misc_feature (13)..(530): NCBI GI NO: 15224645 NR Description: expressed protein [Arabidopsis thaliana]
  misc_feature (13)..(530): NCBI GI NO: 38567811 NR Description: CDT1a protein [Arabidopsis thaliana]
  misc_feature (13)..(530): NCBI GI NO: 22530894 NR Description: hypothetical protein [Arabidopsis thaliana]
  misc_feature (273)..(531): NCBI GI NO: 15232570 NR Description: hypothetical protein [Arabidopsis thaliana]
  misc_feature (73)..(220): NCBI GI NO: 15232570 NR Description: hypothetical protein [Arabidopsis thaliana]
MHKLKVDTEDAGSKIESPTPEKLESRSKGVVVSSLARNLLAERYKDRFANQFLEDEGDIDDEDYNDSISPGMSRSQRSRSIELLEKHKDLLNLFNRMESSIRLLRLRKRMATFNNIATQVEILAKRKLSYCHLAQMKYLFPEAIQIKRVLLHDEKSLCMYADMEIILVMDVVEYTSPDHSPSMAICDAFYSKLLTFLDAHHKGTDIPEAILPEPFNLRSRGQLNLEASNNGHAAEPHLQGTTKDGFSNASHFPQSFRKLMSQKVITDGAERTQLLLDPTKLSSVSAYDTEGTNRSPKKQDKHASVTVNSEISATPSRHLISRCQEGTPKQETSESPLLAQTPATQTPKRQLPTPLEKLEATCGHISEPRSASSARRSLNTSLKFEGGSPSYHDRMEHVATSKIGIFSEDSSSFNKSLEENGPVFFTDREKINLADPVGVQEKMASLRSTFGIVCDISHSIKNSLITKQELFHNILANNLEIEQMGEIEEQLHILEDLAPDWISKVINGGEIFYSFETIADQNSVWERLVEAV

SEQ ID NO: 22508 - protein, 461 aa, Zea mays subsp. mays
  peptide (1)..(461): Ceres Seq. ID no. 15226159
  misc_feature (1)..(461): NCBI GI NO: 40539114 NR Description: expressed protein
  misc_feature (1)..(460): NCBI GI NO: 38344618 NR Description: OSJNBb0003A12.4
  misc_feature (1)..(459): NCBI GI NO: 15224645 NR Description: expressed protein [Arabidopsis thaliana]
  misc_feature (1)..(459): NCBI GI NO: 38567811 NR Description: CDT1a protein [Arabidopsis thaliana]
  misc_feature (1)..(459): NCBI GI NO: 22530894 NR Description: hypothetical protein [Arabidopsis thaliana]
  misc_feature (202)..(460): NCBI GI NO: 15232570 NR Description: hypothetical protein [Arabidopsis thaliana]
  misc_feature (2)..(149): NCBI GI NO: 15232570 NR Description: hypothetical protein [Arabidopsis thaliana]
MSRSQRSRSIELLEKHKDLLNLFNRMESSIRLLRLRKRMATFNNIATQVEILAKRKLSYCHLAQMKYLFPEAIQIKRVLLHDEKSLCMYADMEIILVMDVVEYTSPDHSPSMAICDAFYSKLLTFLDAHHKGTDIPEAILPEPFNLRSRGQLNLEASNNGHAAEPHLQGTTKDGFSNASHFPQSFRKLMSQKVITDGAERTQLLLDPTKLSSVSAYDTEGTNRSPKKQDKHASVTVNSEISATPSRHLISRCQEGTPKQETSESPLLAQTPATQTPKRQLPTPLEKLEATCGHISEPRSASSARRSLNTSLKFEGGSPSYHDRMEHVATSKIGIFSEDSSSFNKSLEENGPVFFTDREKINLADPVGVQEKMASLRSTFGIVCDISHSIKNSLITKQELFHNILANNLEIEQMGEIEEQLHILEDLAPDWISKVINGGEIFYSFETIADQNSVWERLVEAV

SEQ ID NO: 22509 - DNA, 2398 bp, Zea mays subsp. mays
  misc_feature (1)..(2398): Ceres Seq. ID no. 15226167
atggtatagatcgagccacagaggttagataaaagatcaacactaaaggcagtaattacatgatgccatgatcatataagcaaagattaatttaatctactatgaagcagcaaaaacgagtgtttattccaagaatttgtagggaggtattaaaaaatacataaaatatatatgcttagtcgataaagaagctttttatacttataaaatatttatacctagattggttttgtctaggtttgtcctcagccaaacctttttagcttttactgtcgacatctaaaattttacatagattgacaatacaagcaaggttgttgacattcctaaattcattgtgaaaactacttttatgatatataactcttccattgaatataatatatttttatggatgctgccagacaaaattagagtagctagtttgagtttggacaaacttagatggacctacatctgtgatcggatgaagtaatttattcaatctttacattgaatttcacttattatttcaactatagctgagttggactccttttcttttttttaaaaaaaaacattgactaaatttggatttcacctttttattctattaacttatatgtaccaaatattacagctcctggatgacagagcagataagaagcgtgcaggcttcatcgttctcatttcggatggtctagacggccagttcaaatggggagatgagagtatcacccccacggatcccatccgaggcctcctccgaaagtacccagtccacacctttggtttgggcaaggctcacgacccaagggcactgcactatatcgctaacatatcctacggaatctattcctccatcaccgacaacctcgagaacaagatcatagaggcatttgccgtctgcttagctgggttcaagaccgtagtagccgtcgacgtctgtgttgacatcaggtcaagcagtttgctgataacaaagatcgactctgggggttacatactccgggggagtaccggaggcatcttggttggcacactctatgctggggaggtgaaggacttcattgtctacttttcatatcataccgggagttggtcgagtggttaccatacaactttgaatgggattgctgctagtgtcacgtacaaggaagcgccgggcaggcagtcaactgccactgactcttgctcagtgtcactcccgattcacgtgaccgacaccgtgtatcctcctgaaaacccctgcccaccctaccccatggtcctgcagcagatggtgcggttcaaggtgctagacttgcttataagcgtcctgaaagaattcctggtcctgaagggggaggctgctagtgccgtccacgggaaggaaggaggagatgacccggtcttgcaggccatcgcagcgagcttgctgcagaggaagtggaaagagttcaagcagtccgatgaatcctggaaagaagccccgaggaacttccttgacctgggaggcatcgacaaggacatcaacaccatggtggatatcctggagcagggcttgggtgttggatgcatccactcatggctgtcgagctatcagatgcagcgcgcgacaattacaggcttgccaggatctcacatggttgcaaccggccaattccgcacgccagcgatgaacgcaatggtccaggaggcccataggcatttggccaaggaagcatctgcccaagatgcggggacgtcaattgtctgcaagcgcgccgttgagcttctagatggggtcaacaagcgattcgacctctggtgcaagctggaccatgacttgccgcgcactaaccaaccgtcatcgcaccaagaagaaggccatgagtcccgcgacatcaccgacgtcctgcatgggaacatcaaccgagcgaggcagcatgacatatacatggtacgtatatacatatctatggatctgaattcattaaggtcccattctgtgtttgtcttggatgcaggctgccgatcacgcgatcaagcaatggcggagcttcctcacatccgtggagaagacacatggccatgggccggacaagtaggcgcatgatgaggccaccggcagctaccacaaaccccagaacacagcgtgagtggtgttgtgtcgatgcagactcagacatactacaccatataaataaataaatttaatgagcgagaggccctgacaccagtgcctccgccgactccctccgatcctgagaataatatttgtgcgtactgtccctccgtcctcatggccattatattggtcatttgatttcccgtgtgttcactactgttgttctctaattactagtcctgatcagttccggacgactaagctgtaataatgtatcttttattttcttttttatattaatataaaagaccatatgtgtatgcgtcggtc

SEQ ID NO: 22510 - protein, 484 aa, Zea mays subsp. mays
  peptide (1)..(484): Ceres Seq. ID no. 15226168
  misc_feature (6)..(293): NCBI GI NO: 37535178 NR Description: unknown protein
  misc_feature (6)..(200): NCBI GI NO: 15223093 NR Description: zinc finger
  misc_feature (6)..(200): NCBI GI NO: 27754463 NR Description: unknown protein [Arabidopsis thaliana]
  misc_feature (6)..(151): NCBI GI NO: 15239414 NR Description: zinc finger
  misc_feature (6)..(151): NCBI GI NO: 21539497 NR Description: putative protein [Arabidopsis thaliana]
  misc_feature (6)..(195): NCBI GI NO: 37535182 NR Description: hypothetical protein
  misc_feature (5)..(151): NCBI GI NO: 32489531 NR Description: OSJNBa0043L24.22
  misc_feature (6)..(151): NCBI GI NO: 28393354 NR Description: unknown protein [Arabidopsis thaliana]
  misc_feature (6)..(151): NCBI GI NO: 11358375 NR Description: hypothetical protein T5N23
  misc_feature (6)..(151): NCBI GI NO: 30694117 NR Description: zinc finger
MYQILQLLDDRADKKRAGFIVLISDGLDGQFKWGDESITPTDPIRGLLRKYPVHTFGLGKAHDPRALHYIANISYGIYSSITDNLENKIIEAFAVCLAGFKTVVAVDVCVDIRSSSLLITKIDSGGYILRGSTGGILVGTLYAGEVKDFIVYFSYHTGSWSSGYHTTLNGIAASVTYKEAPGRQSTATDSCSVSLPIHVTDTVYPPENPCPPYPMVLQQMVRFKVLDLLISVLKEFLVLKGEAASAVHGKEGGDDPVLQAIAASLLQRKWKEFKQSDESWKEAPRNFLDLGGIDKDINTMVDILEQGLGVGCIHSWLSSYQMQRATITGLPGSHMVATGQFRTPAMNAMVQEAHRHLAKEASAQDAGTSIVCKRAVELLDGVNKRFDLWCKLDHDLPRTNQPSSHQEEGHESRDITDVLHGNINRARQHDIYMVRIYISMDLNSLRSHSVFVLDAGCRSRDQAMAELPHIRGEDTWPWAGQVGA

SEQ ID NO: 22511 - protein, 270 aa, Zea mays subsp. mays
  peptide (1)..(270): Ceres Seq. ID no. 15226169
  misc_feature (1)..(79): NCBI GI NO: 37535178 NR Description: unknown protein
MVLQQMVRFKVLDLLISVLKEFLVLKGEAASAVHGKEGGDDPVLQAIAASLLQRKWKEFKQSDESWKEAPRNFLDLGGIDKDINTMVDILEQGLGVGCIHSWLSSYQMQRATITGLPGSHMVATGQFRTPAMNAMVQEAHRHLAKEASAQDAGTSIVCKRAVELLDGVNKRFDLWCKLDHDLPRTNQPSSHQEEGHESRDITDVLHGNINRARQHDIYMVRIYISMDLNSLRSHSVFVLDAGCRSRDQAMAELPHIRGEDTWPWAGQVGA

SEQ ID NO: 22512 - protein, 265 aa, Zea mays subsp. mays
  peptide (1)..(265): Ceres Seq. ID no. 15226170
  misc_feature (1)..(74): NCBI GI NO: 37535178 NR Description: unknown protein
MVRFKVLDLLISVLKEFLVLKGEAASAVHGKEGGDDPVLQAIAASLLQRKWKEFKQSDESWKEAPRNFLDLGGIDKDINTMVDILEQGLGVGCIHSWLSSYQMQRATITGLPGSHMVATGQFRTPAMNAMVQEAHRHLAKEASAQDAGTSIVCKRAVELLDGVNKRFDLWCKLDHDLPRTNQPSSHQEEGHESRDITDVLHGNINRARQHDIYMVRIYISMDLNSLRSHSVFVLDAGCRSRDQAMAELPHIRGEDTWPWAGQVGA

SEQ ID NO: 22513 - DNA, 614 bp, Zea mays subsp. mays
  misc_feature (1)..(614): Ceres Seq. ID no. 13623460
gcgcctgccgccggccaagttttgtccctctccctcgtccggttcggatcgtcgtcgccagccaggtgctggatccgtagcggcggcggcggccatggacaagagcatgctcggcgacctggatggcctccccgaggaggacaagatgtggatggccgccatgatcgaccagctccagatccacgacaggttcatgctataccaacgcatctcgtgggtggagcagggccgctgcttcgtggtgtggaagcccgtggagctggcgcgcgacctcctcccgctccacttcaagcactacaacttctcctttgtccgccagctcaacacctacgtgagtacatcaaaaacacactcgtccatctatacatcatatgttctgttggtgactgagattgttgttgcaaaacaaaggtctgctttggttcgatcagtgtgtcttttgtttatgtccaatgaaactgatggaagaaaaaagcctctcgatcggcggtgtcagagttgcctgtgacgatgtaaaaaacatgctagatgtagcaatgactaaacctgtgatgatggcatagttgtgcagaaagatttgacagggttgtgggatgttaatcttaatggaaagg

SEQ ID NO: 22514 - protein, 168 aa, Zea mays subsp. mays
  peptide (1)..(168): Ceres Seq. ID no. 13623461
  misc_feature (68)..(110): NCBI GI NO: 33591096 NR Description: heat shock factor RHSF1
  misc_feature (68)..(110): NCBI GI NO: 38344369 NR Description: OSJNBb0032E06.3
  misc_feature (32)..(79): NCBI GI NO: 12230181 NR Description: Mitochondrial import inner membrane translocase subunit Tim9
  misc_feature (70)..(110): NCBI GI NO: 6624618 NR Description: heat shock factor 7 [Arabidopsis thaliana]
  misc_feature (70)..(110): NCBI GI NO: 30697614 NR Description: heat shock transcription factor 6 (HSF6)
  misc_feature (70)..(110): NCBI GI NO: 15234264 NR Description: heat shock factor protein 7 (HSF7)
  misc_feature (70)..(110): NCBI GI NO: 15227413 NR Description: heat shock transcription factor family
  misc_feature (70)..(110): NCBI GI NO: 2129612 NR Description: heat shock transcription factor HSF4
  misc_feature (70)..(110): NCBI GI NO: 15234583 NR Description: heat shock transcription factor 4 (HSF4)
  misc_feature (68)..(110): NCBI GI NO: 2129831 NR Description: heat shock transcription factor HSF34 - soybean
RLPPAKFCPSPSSGSDRRRQPGAGSVAAAAAMDKSMLGDLDGLPEEDKMWMAAMIDQLQIHDRFMLYQRISWVEQGRCFVVWKPVELARDLLPLHFKHYNFSFVRQLNTYVSTSKTHSSIYTSYVLLVTEIVVAKQRSALVRSVCLLFMSNETDGRKKPLDRRCQSCL

SEQ ID NO: 22515 - protein, 137 aa, Zea mays subsp. mays
  peptide (1)..(137): Ceres Seq. ID no. 13623462
  misc_feature (37)..(79): NCBI GI NO: 33591096 NR Description: heat shock factor RHSF1
  misc_feature (37)..(79): NCBI GI NO: 38344369 NR Description: OSJNBb0032E06.3
  misc_feature (1)..(48): NCBI GI NO: 12230181 NR Description: Mitochondrial import inner membrane translocase subunit Tim9
  misc_feature (39)..(79): NCBI GI NO: 6624618 NR Description: heat shock factor 7 [Arabidopsis thaliana]
  misc_feature (39)..(79): NCBI GI NO: 30697614 NR Description: heat shock transcription factor 6 (HSF6)
  misc_feature (39)..(79): NCBI GI NO: 15234264 NR Description: heat shock factor protein 7 (HSF7)
  misc_feature (39)..(79): NCBI GI NO: 15227413 NR Description: heat shock transcription factor family
  misc_feature (39)..(79): NCBI GI NO: 2129612 NR Description: heat shock transcription factor HSF4
  misc_feature (39)..(79): NCBI GI NO: 15234583 NR Description: heat shock transcription factor 4 (HSF4)
  misc_feature (37)..(79): NCBI GI NO: 2129831 NR Description: heat shock transcription factor HSF34 - soybean
MDKSMLGDLDGLPEEDKMWMAAMIDQLQIHDRFMLYQRISWVEQGRCFVVWKPVELARDLLPLHFKHYNFSFVRQLNTYVSTSKTHSSIYTSYVLLVTEIVVAKQRSALVRSVCLLFMSNETDGRKKPLDRRCQSCL

SEQ ID NO: 22516 - protein, 133 aa, Zea mays subsp. mays
  peptide (1)..(133): Ceres Seq. ID no. 13623463
  misc_feature (33)..(75): NCBI GI NO: 33591096 NR Description: heat shock factor RHSF1
  misc_feature (33)..(75): NCBI GI NO: 38344369 NR Description: OSJNBb0032E06.3
  misc_feature (1)..(44): NCBI GI NO: 12230181 NR Description: Mitochondrial import inner membrane translocase subunit Tim9
  misc_feature (35)..(75): NCBI GI NO: 6624618 NR Description: heat shock factor 7 [Arabidopsis thaliana]
  misc_feature (35)..(75): NCBI GI NO: 30697614 NR Description: heat shock transcription factor 6 (HSF6)
  misc_feature (35)..(75): NCBI GI NO: 15234264 NR Description: heat shock factor protein 7 (HSF7)
  misc_feature (35)..(75): NCBI GI NO: 15227413 NR Description: heat shock transcription factor family
  misc_feature (35)..(75): NCBI GI NO: 2129612 NR Description: heat shock transcription factor HSF4
  misc_feature (35)..(75): NCBI GI NO: 15234583 NR Description: heat shock transcription factor 4 (HSF4)
  misc_feature (33)..(75): NCBI GI NO: 2129831 NR Description: heat shock transcription factor HSF34 - soybean
MLGDLDGLPEEDKMWMAAMIDQLQIHDRFMLYQRISWVEQGRCFVVWKPVELARDLLPLHFKHYNFSFVRQLNTYVSTSKTHSSIYTSYVLLVTEIVVAKQRSALVRSVCLLFMSNETDGRKKPLDRRCQSCL

SEQ ID NO: 22517 - DNA, 2581 bp, Zea mays subsp. mays
  misc_feature (1)..(2581): Ceres Seq. ID no. 13599779
ccccccccatttcccgcccgccccactgccattgtgcgcccccggaatggcgtcacgcggaggagatccggtaaaccaactctagctgaagtgacgagtggcagcattgttcaaccgtgcggcttctgcttgactggaattgtgatggatccagaaaaacaaaatgaaatgagcttgatggacaagagacaactagtatacgaagttgcaagatggccgcaaggtgccgtggagattcttaagtgctggactcgaagggaacttcttgagcttatctgtgttgagctgggcaaagagaggaagtataccaatgtcccaaaagctaagatgatcgcttatctcttgaaattagtttcacgaaagagtggaaagaatgggcaactcaaggatgataatgcaaatgttatgttattagagcaggataacaaagatgaaacacaaatgaaggaatctgaggaacaatcacgaccactcaaaactgcaaactctgactcatcaatacgtagagaggctcatgcctgttgttcagtggtgtgcagcaatgttgcatgccaagccacacggaatgcaggagataattattgcaaacgttgctcttgctgcatttgcaataaatatgatgataacaaagaccctagcttgtggttggtttgcagctctgataatccatacagtggttgttcatgtggtgtctcttgtcacctaaactgtgctctaaagaataaaaaggctggcattgtcaataatggctgcaacaagttagactgtagtttctactgtgttagctgtgggaaaatcaactggctaatgaggagtttgcagaaacaacttgcaattgctagggaggcaagaagagttgatgtgctttgtgagaggctgtcattgagccataaaatggtaaaaggatctgaacgttataaggaaataacgagcataatcagctcagctgcgaaaacacttgaaaaagaagttggtggtgcattagatcaggtttctgcgatcaccgggcgtggcattgttaaccggcttacttgtggtgctgaagttcagaagctttgttcaagtgcattagaaattgtagactctacagtggatagcatcttggagttcgagtcgaataatagtccaaaactcttaggtccccagccccaaatcctttttgatgagatcactccattttctgtggtaattgtgttgaactatcaggatagcatcggtaaggagcaggttgatggttccaaagtttggcaccgaagtgccaaggtttgcaaatattcatcggagcccacatgccacatactgaggccaaatactaggagcctggtttctggtctgagcccttcaactgaatacttcttcaaggttttgccttttagcagcgtacaggggtttactgagtgggaggcaaaatgcagtacacgcagcctggaccatggcagcagccagtgctcaactcagaactctgagagcatgtgcctcaaagaggatccaatgaagcatcagaaaaaggatttgaatgtgcagaatcatcagagaaccattcaatatgattcacctaaggggtctacaaattcaagtgagaacaatttattatgtgaccggtattccaagcgggctaaggttgcaaggctagatggtgcaagtgacaacgacgaaagccagttgccgccaacttctgaagttttaccgtttgcaagctccaactactctccttccgaagctccaagtaaacctgacttgcttattggcaccccagattcggcctccaagaactatgtggagcagcagtacgagtactgtgtgaaggtggtcagatggttggagcatgaagggcacatggacaatgacttccgtgtgaagttcctcacttggttcagcctgaaggcaacatcgcaggacaggcgaatcgtgggtgccttagtagatgttcttatcggtgatcctgcaagcttggttgcccaactggttgatgcattcaaggatatcatctacaccaaggagaagccctttcaaacacaacagaaggatgcacgctgcaagatttggcactagaaaccttcataactgctctgtgtcgctgtgtgacatcatttttctggtaattttctggcgactgaatgatgaactattgaagttatatcacctagcagattgcgtgcggattctgttgagatggatattgtgcactctcttaaaggttataagatgctgtagatgctccatttggcattcaggtccatcagatctctcatttattcattcaaattcagtccgtaggcagactattaatccatgaagacaatcatggtggaaccatgtgctggtaatcatgaaccggttctgagtttaggtttcaactagtaagtagttgaagcttgttagcagacaagcaactgtattcatatgtggaatgctatggtggatctgcaagctaactattgtgaattcatatcatgacttaaaaaaaaaaaaaaaaaaaaaaaaaaaaaaaaaaaaaaaaaaaaaaaaaargaaaaaaaaaaaaaaaaaaaactcgagggggggcccggwacccaattcccccaatagggagccgaataac

SEQ ID NO: 22518 - protein, 683 aa, Zea mays subsp. mays
  peptide (1)..(683): Ceres Seq. ID no. 15219245
  misc_feature (199)..(265): Pfam Name: Pfam Description:  PHD-finger
  misc_feature (49)..(683): NCBI GI NO: 38637254 NR Description: putative coiled-coil protein
  misc_feature (44)..(391): NCBI GI NO: 15234667 NR Description: coiled-coil protein [Arabidopsis thaliana]
  misc_feature (384)..(555): NCBI GI NO: 15234667 NR Description: coiled-coil protein [Arabidopsis thaliana]
  misc_feature (544)..(683): NCBI GI NO: 15234667 NR Description: coiled-coil protein [Arabidopsis thaliana]
  misc_feature (57)..(555): NCBI GI NO: 30688585 NR Description: coiled-coil protein [Arabidopsis thaliana]
  misc_feature (544)..(683): NCBI GI NO: 30688585 NR Description: coiled-coil protein [Arabidopsis thaliana]
  misc_feature (155)..(683): NCBI GI NO: 15242117 NR Description: hypothetical protein [Arabidopsis thaliana]
  misc_feature (53)..(124): NCBI GI NO: 15242117 NR Description: hypothetical protein [Arabidopsis thaliana]
  misc_feature (176)..(477): NCBI GI NO: 15230113 NR Description: expressed protein [Arabidopsis thaliana]
  misc_feature (586)..(666): NCBI GI NO: 15230113 NR Description: expressed protein [Arabidopsis thaliana]
PPPFPARPTAIVRPRNGVTRRRSGKPTLAEVTSGSIVQPCGFCLTGIVMDPEKQNEMSLMDKRQLVYEVARWPQGAVEILKCWTRRELLELICVELGKERKYTNVPKAKMIAYLLKLVSRKSGKNGQLKDDNANVMLLEQDNKDETQMKESEEQSRPLKTANSDSSIRREAHACCSVVCSNVACQATRNAGDNYCKRCSCCICNKYDDNKDPSLWLVCSSDNPYSGCSCGVSCHLNCALKNKKAGIVNNGCNKLDCSFYCVSCGKINWLMRSLQKQLAIAREARRVDVLCERLSLSHKMVKGSERYKEITSIISSAAKTLEKEVGGALDQVSAITGRGIVNRLTCGAEVQKLCSSALEIVDSTVDSILEFESNNSPKLLGPQPQILFDEITPFSVVIVLNYQDSIGKEQVDGSKVWHRSAKVCKYSSEPTCHILRPNTRSLVSGLSPSTEYFFKVLPFSSVQGFTEWEAKCSTRSLDHGSSQCSTQNSESMCLKEDPMKHQKKDLNVQNHQRTIQYDSPKGSTNSSENNLLCDRYSKRAKVARLDGASDNDESQLPPTSEVLPFASSNYSPSEAPSKPDLLIGTPDSASKNYVEQQYEYCVKVVRWLEHEGHMDNDFRVKFLTWFSLKATSQDRRIVGALVDVLIGDPASLVAQLVDAFKDIIYTKEKPFQTQQKDARCKIWH

SEQ ID NO: 22519 - protein, 635 aa, Zea mays subsp. mays
  peptide (1)..(635): Ceres Seq. ID no. 15219246
  misc_feature (151)..(217): Pfam Name: Pfam Description:  PHD-finger
  misc_feature (1)..(635): NCBI GI NO: 38637254 NR Description: putative coiled-coil protein
  misc_feature (1)..(343): NCBI GI NO: 15234667 NR Description: coiled-coil protein [Arabidopsis thaliana]
  misc_feature (336)..(507): NCBI GI NO: 15234667 NR Description: coiled-coil protein [Arabidopsis thaliana]
  misc_feature (496)..(635): NCBI GI NO: 15234667 NR Description: coiled-coil protein [Arabidopsis thaliana]
  misc_feature (9)..(507): NCBI GI NO: 30688585 NR Description: coiled-coil protein [Arabidopsis thaliana]
  misc_feature (496)..(635): NCBI GI NO: 30688585 NR Description: coiled-coil protein [Arabidopsis thaliana]
  misc_feature (107)..(635): NCBI GI NO: 15242117 NR Description: hypothetical protein [Arabidopsis thaliana]
  misc_feature (5)..(76): NCBI GI NO: 15242117 NR Description: hypothetical protein [Arabidopsis thaliana]
  misc_feature (128)..(429): NCBI GI NO: 15230113 NR Description: expressed protein [Arabidopsis thaliana]
  misc_feature (538)..(618): NCBI GI NO: 15230113 NR Description: expressed protein [Arabidopsis thaliana]
MDPEKQNEMSLMDKRQLVYEVARWPQGAVEILKCWTRRELLELICVELGKERKYTNVPKAKMIAYLLKLVSRKSGKNGQLKDDNANVMLLEQDNKDETQMKESEEQSRPLKTANSDSSIRREAHACCSVVCSNVACQATRNAGDNYCKRCSCCICNKYDDNKDPSLWLVCSSDNPYSGCSCGVSCHLNCALKNKKAGIVNNGCNKLDCSFYCVSCGKINWLMRSLQKQLAIAREARRVDVLCERLSLSHKMVKGSERYKEITSIISSAAKTLEKEVGGALDQVSAITGRGIVNRLTCGAEVQKLCSSALEIVDSTVDSILEFESNNSPKLLGPQPQILFDEITPFSVVIVLNYQDSIGKEQVDGSKVWHRSAKVCKYSSEPTCHILRPNTRSLVSGLSPSTEYFFKVLPFSSVQGFTEWEAKCSTRSLDHGSSQCSTQNSESMCLKEDPMKHQKKDLNVQNHQRTIQYDSPKGSTNSSENNLLCDRYSKRAKVARLDGASDNDESQLPPTSEVLPFASSNYSPSEAPSKPDLLIGTPDSASKNYVEQQYEYCVKVVRWLEHEGHMDNDFRVKFLTWFSLKATSQDRRIVGALVDVLIGDPASLVAQLVDAFKDIIYTKEKPFQTQQKDARCKIWH

SEQ ID NO: 22520 - protein, 627 aa, Zea mays subsp. mays
  peptide (1)..(627): Ceres Seq. ID no. 15219247
  misc_feature (143)..(209): Pfam Name: Pfam Description:  PHD-finger
  misc_feature (1)..(627): NCBI GI NO: 38637254 NR Description: putative coiled-coil protein
  misc_feature (1)..(335): NCBI GI NO: 15234667 NR Description: coiled-coil protein [Arabidopsis thaliana]
  misc_feature (328)..(499): NCBI GI NO: 15234667 NR Description: coiled-coil protein [Arabidopsis thaliana]
  misc_feature (488)..(627): NCBI GI NO: 15234667 NR Description: coiled-coil protein [Arabidopsis thaliana]
  misc_feature (1)..(499): NCBI GI NO: 30688585 NR Description: coiled-coil protein [Arabidopsis thaliana]
  misc_feature (488)..(627): NCBI GI NO: 30688585 NR Description: coiled-coil protein [Arabidopsis thaliana]
  misc_feature (99)..(627): NCBI GI NO: 15242117 NR Description: hypothetical protein [Arabidopsis thaliana]
  misc_feature (1)..(68): NCBI GI NO: 15242117 NR Description: hypothetical protein [Arabidopsis thaliana]
  misc_feature (120)..(421): NCBI GI NO: 15230113 NR Description: expressed protein [Arabidopsis thaliana]
  misc_feature (530)..(610): NCBI GI NO: 15230113 NR Description: expressed protein [Arabidopsis thaliana]
MSLMDKRQLVYEVARWPQGAVEILKCWTRRELLELICVELGKERKYTNVPKAKMIAYLLKLVSRKSGKNGQLKDDNANVMLLEQDNKDETQMKESEEQSRPLKTANSDSSIRREAHACCSVVCSNVACQATRNAGDNYCKRCSCCICNKYDDNKDPSLWLVCSSDNPYSGCSCGVSCHLNCALKNKKAGIVNNGCNKLDCSFYCVSCGKINWLMRSLQKQLAIAREARRVDVLCERLSLSHKMVKGSERYKEITSIISSAAKTLEKEVGGALDQVSAITGRGIVNRLTCGAEVQKLCSSALEIVDSTVDSILEFESNNSPKLLGPQPQILFDEITPFSVVIVLNYQDSIGKEQVDGSKVWHRSAKVCKYSSEPTCHILRPNTRSLVSGLSPSTEYFFKVLPFSSVQGFTEWEAKCSTRSLDHGSSQCSTQNSESMCLKEDPMKHQKKDLNVQNHQRTIQYDSPKGSTNSSENNLLCDRYSKRAKVARLDGASDNDESQLPPTSEVLPFASSNYSPSEAPSKPDLLIGTPDSASKNYVEQQYEYCVKVVRWLEHEGHMDNDFRVKFLTWFSLKATSQDRRIVGALVDVLIGDPASLVAQLVDAFKDIIYTKEKPFQTQQKDARCKIWH

SEQ ID NO: 22521 - DNA, 2143 bp, Zea mays subsp. mays
  misc_feature (1)..(2143): Ceres Seq. ID no. 14303282
gagagagagagagagcatagtagtccccccccccccacgatcccccagtcccctcccctcacggctgcatgcccgcatccggattccggtccatccggcagccagacgctgccgccgtaaattccccttccgcgtctgtctggccggtggccgctgtggttttgtaggctagtgcgtgccgtcctcggacctctcctctcgtcctccaccaccatgactgaggcccagtctccactatccgccaccatggcgaaggaggcccagtcgtcgccgtccgccaccgtagcgcaggcgacggctctgccgcagctcgtattattcaactccttgacgaagagggaggagcccttccagccccgggtggaggggaaggtagggatgtacgtctgtggcgtcactccctacgactttagccacatcggccacgcgcgtgcctacgtcgccttcgacgtcctctacaggtacctgaaattcttggggtatgaagttgaatatgtccgtaatttcacggatatcgacgacaagattattaagcgtgcaaatgaacgcggtgaaacagttacaagtttgagtagccggtttatcaatgaatttcttcttgatatgactgagctccagtgtttacctcctacctgtgagccacgtgtaacagagcacattgagcatattatagagttgataaccaagataatggagaatgacaaagcctatgctatggaaggagatgtttacttttcagtcgaaagttttcctgaatatctcagtttatctggaagaaaattcgatcaaaatcaggcaggggcacgggttgcttttgatacacgaaagcgtaatcctgcagactttgcactctggaaggctgcaaaggagggcgaacctttttgggatagcccttggggccgtggaagaccgggatggcatattgaatgcagcgcaatgagtgctcactatttaggacatctattcgatattcatggtggggggaaagatttgatttttcctcatcatgagaatgagcttgcacaaagccgagctgcttatcctgagagtgaggtgaagtgctggatgcataatggctttgttaacaaggatgataaaaaaatggcaaaatcagataataactttttcacgattagagatatcactgctctttaccatccattggctttaagatttttcttgatgcgcactcattatagatcagatgtgaaccattctgatcaagcacttgagattgcatctgatcgtgtctattacatttttcagactctatatgactgcgaggaagtattagctacatatcgtgaagagggtatttctctctcagtgccgttcgaggagcaaaatctgattgataagcaccattcagaattcttgaaatatatgtcgaatgatcttaaaaccacagatgttctggatcgttgcttcatggagctgctgaaggccataaacagcagtttgaatgatttgaagaaactgcaacagaaaatagaacagcaaaagaagaaacagcaacagcagaagaagcagcaacagaagcaacagcaattgcaaaaacagccagaacattatattcaagctctgattgcactggaaatagaacttaaaaataaactgtctatacttggtctgatgccatcttcatctttggcagaggtactgaagcaattgaaggacaaagcactaaagagagcggggctgactgaagaaaaattgcaagagcagattgagcagagaaacgttgcaaggaagaataaacagtttgagatatctgatggaatcaggaaaaaccttgctaccaagggcatcgccctgatggatgaaccttctggtacagtgtggagaccatgcgaaccagaggggccgcacccactcaacaaatgatggtaaaatgagatttttgcctgagggcagctacacattttgaactaacaaaatcaccatctctggatgcagtattcttcactcaggggtagggggtccaggttgactcgccagtcgccagttgaaacttgcatttctggttgtgtaagaagcaatggaccccatatatatactttactccttgcgaggtttgagttttggttttggatataagacttggcaattccatttcaatgaaacagatgaaattttgcttggt

SEQ ID NO: 22522 - protein, 556 aa, Zea mays subsp. mays
  peptide (1)..(556): Ceres Seq. ID no. 14303283
  misc_feature (63)..(173): Pfam Name: I, L, M and V Pfam Description: tRNA synthetases class I
  misc_feature (12)..(444): NCBI GI NO: 37535144 NR Description: putative cysteinyl-tRNA synthetase
  misc_feature (414)..(549): NCBI GI NO: 37535144 NR Description: putative cysteinyl-tRNA synthetase
  misc_feature (32)..(431): NCBI GI NO: 25293240 NR Description: probable cysteinyl-tRNA synthetase
  misc_feature (455)..(548): NCBI GI NO: 25293240 NR Description: probable cysteinyl-tRNA synthetase
  misc_feature (39)..(431): NCBI GI NO: 18402580 NR Description: cysteinyl-tRNA synthetase -related
  misc_feature (455)..(548): NCBI GI NO: 18402580 NR Description: cysteinyl-tRNA synthetase -related
  misc_feature (32)..(511): NCBI GI NO: 15241557 NR Description: cysteine-tRNA ligase -related protein
  misc_feature (31)..(347): NCBI GI NO: 15228880 NR Description: cysteine-tRNA ligase-related protein
  misc_feature (418)..(548): NCBI GI NO: 15228880 NR Description: cysteine-tRNA ligase-related protein
  misc_feature (32)..(511): NCBI GI NO: 9758060 NR Description: cysteine-tRNA ligase [Arabidopsis thaliana]
MTEAQSPLSATMAKEAQSSPSATVAQATALPQLVLFNSLTKREEPFQPRVEGKVGMYVCGVTPYDFSHIGHARAYVAFDVLYRYLKFLGYEVEYVRNFTDIDDKIIKRANERGETVTSLSSRFINEFLLDMTELQCLPPTCEPRVTEHIEHIIELITKIMENDKAYAMEGDVYFSVESFPEYLSLSGRKFDQNQAGARVAFDTRKRNPADFALWKAAKEGEPFWDSPWGRGRPGWHIECSAMSAHYLGHLFDIHGGGKDLIFPHHENELAQSRAAYPESEVKCWMHNGFVNKDDKKMAKSDNNFFTIRDITALYHPLALRFFLMRTHYRSDVNHSDQALEIASDRVYYIFQTLYDCEEVLATYREEGISLSVPFEEQNLIDKHHSEFLKYMSNDLKTTDVLDRCFMELLKAINSSLNDLKKLQQKIEQQKKKQQQQKKQQQKQQQLQKQPEHYIQALIALEIELKNKLSILGLMPSSSLAEVLKQLKDKALKRAGLTEEKLQEQIEQRNVARKNKQFEISDGIRKNLATKGIALMDEPSGTVWRPCEPEGPHPLNK

SEQ ID NO: 22523 - protein, 545 aa, Zea mays subsp. mays
  peptide (1)..(545): Ceres Seq. ID no. 14303284
  misc_feature (52)..(162): Pfam Name: I, L, M and V Pfam Description: tRNA synthetases class I
  misc_feature (1)..(433): NCBI GI NO: 37535144 NR Description: putative cysteinyl-tRNA synthetase
  misc_feature (403)..(538): NCBI GI NO: 37535144 NR Description: putative cysteinyl-tRNA synthetase
  misc_feature (21)..(420): NCBI GI NO: 25293240 NR Description: probable cysteinyl-tRNA synthetase
  misc_feature (444)..(537): NCBI GI NO: 25293240 NR Description: probable cysteinyl-tRNA synthetase
  misc_feature (28)..(420): NCBI GI NO: 18402580 NR Description: cysteinyl-tRNA synthetase -related
  misc_feature (444)..(537): NCBI GI NO: 18402580 NR Description: cysteinyl-tRNA synthetase -related
  misc_feature (21)..(500): NCBI GI NO: 15241557 NR Description: cysteine-tRNA ligase -related protein
  misc_feature (20)..(336): NCBI GI NO: 15228880 NR Description: cysteine-tRNA ligase-related protein
  misc_feature (407)..(537): NCBI GI NO: 15228880 NR Description: cysteine-tRNA ligase-related protein
  misc_feature (21)..(500): NCBI GI NO: 9758060 NR Description: cysteine-tRNA ligase [Arabidopsis thaliana]
MAKEAQSSPSATVAQATALPQLVLFNSLTKREEPFQPRVEGKVGMYVCGVTPYDFSHIGHARAYVAFDVLYRYLKFLGYEVEYVRNFTDIDDKIIKRANERGETVTSLSSRFINEFLLDMTELQCLPPTCEPRVTEHIEHIIELITKIMENDKAYAMEGDVYFSVESFPEYLSLSGRKFDQNQAGARVAFDTRKRNPADFALWKAAKEGEPFWDSPWGRGRPGWHIECSAMSAHYLGHLFDIHGGGKDLIFPHHENELAQSRAAYPESEVKCWMHNGFVNKDDKKMAKSDNNFFTIRDITALYHPLALRFFLMRTHYRSDVNHSDQALEIASDRVYYIFQTLYDCEEVLATYREEGISLSVPFEEQNLIDKHHSEFLKYMSNDLKTTDVLDRCFMELLKAINSSLNDLKKLQQKIEQQKKKQQQQKKQQQKQQQLQKQPEHYIQALIALEIELKNKLSILGLMPSSSLAEVLKQLKDKALKRAGLTEEKLQEQIEQRNVARKNKQFEISDGIRKNLATKGIALMDEPSGTVWRPCEPEGPHPLNK

SEQ ID NO: 22524 - protein, 501 aa, Zea mays subsp. mays
  peptide (1)..(501): Ceres Seq. ID no. 14303285
  misc_feature (8)..(118): Pfam Name: I, L, M and V Pfam Description: tRNA synthetases class I
  misc_feature (1)..(389): NCBI GI NO: 37535144 NR Description: putative cysteinyl-tRNA synthetase
  misc_feature (359)..(494): NCBI GI NO: 37535144 NR Description: putative cysteinyl-tRNA synthetase
  misc_feature (1)..(376): NCBI GI NO: 25293240 NR Description: probable cysteinyl-tRNA synthetase
  misc_feature (400)..(493): NCBI GI NO: 25293240 NR Description: probable cysteinyl-tRNA synthetase
  misc_feature (1)..(376): NCBI GI NO: 18402580 NR Description: cysteinyl-tRNA synthetase -related
  misc_feature (400)..(493): NCBI GI NO: 18402580 NR Description: cysteinyl-tRNA synthetase -related
  misc_feature (1)..(456): NCBI GI NO: 15241557 NR Description: cysteine-tRNA ligase -related protein
  misc_feature (1)..(292): NCBI GI NO: 15228880 NR Description: cysteine-tRNA ligase-related protein
  misc_feature (363)..(493): NCBI GI NO: 15228880 NR Description: cysteine-tRNA ligase-related protein
  misc_feature (1)..(456): NCBI GI NO: 9758060 NR Description: cysteine-tRNA ligase [Arabidopsis thaliana]
MYVCGVTPYDFSHIGHARAYVAFDVLYRYLKFLGYEVEYVRNFTDIDDKIIKRANERGETVTSLSSRFINEFLLDMTELQCLPPTCEPRVTEHIEHIIELITKIMENDKAYAMEGDVYFSVESFPEYLSLSGRKFDQNQAGARVAFDTRKRNPADFALWKAAKEGEPFWDSPWGRGRPGWHIECSAMSAHYLGHLFDIHGGGKDLIFPHHENELAQSRAAYPESEVKCWMHNGFVNKDDKKMAKSDNNFFTIRDITALYHPLALRFFLMRTHYRSDVNHSDQALEIASDRVYYIFQTLYDCEEVLATYREEGISLSVPFEEQNLIDKHHSEFLKYMSNDLKTTDVLDRCFMELLKAINSSLNDLKKLQQKIEQQKKKQQQQKKQQQKQQQLQKQPEHYIQALIALEIELKNKLSILGLMPSSSLAEVLKQLKDKALKRAGLTEEKLQEQIEQRNVARKNKQFEISDGIRKNLATKGIALMDEPSGTVWRPCEPEGPHPLNK

SEQ ID NO: 22525 - DNA, 701 bp, Zea mays subsp. mays
  misc_feature (1)..(701): Ceres Seq. ID no. 13666107
  misc_feature (601)..(601): n is a, c, t, g, unknown, or other
  misc_feature (602)..(602): n is a, c, t, g, unknown, or other
agaagcaggaaccgaaagttcgacaaatggtcaccaagctgggaaggcccttacaggatcacacaggtaatagctggtaatgcctacatgcttcaaactttgcaaggtgaggacctacctaagacgctaaatggtcgtttcttgaagcaataccatcctagtatgtggcaagatgcttaagaaagctgatgttgtcatatcgagttgattccaaccgcaccagtgcttttgtttcgctcagcgtccccaaaaggcagagggcatgtgttgagcacctattgtggcactgggcgcagtcggacggttcggccttgaggcccggacggtctgcaataggattagatcatgcggttaagctcctttctcctcgtgtgtttatccttctaaactcgtgggagctgttggagaacgcataggaacgggttcagacctccccttatatatttgaaggggtacggctgattgcgggcatccacaatcgaaccaatcaatatacttgtcgttcttctacctttcatgccctaggagtagcagtaacttagccttcgcatctctactttcacctctgtgcgactctacgtcgtatggagacgtcttgggnngtattgttgatcccaagaaaatcctaggatctctcctccctgactagggatggcagcaagtcgggttgtgttcgggtatgataataccgacccgatatc

SEQ ID NO: 22526 - protein, 75 aa, Zea mays subsp. mays
  peptide (1)..(75): Ceres Seq. ID no. 13666108
MLSYRVDSNRTSAFVSLSVPKRQRACVEHLLWHWAQSDGSALRPGRSAIGLDHAVKLLSPRVFILLNSWELLENA

SEQ ID NO: 22527 - protein, 59 aa, Zea mays subsp. mays
  peptide (1)..(59): Ceres Seq. ID no. 13666109
  misc_feature (2)..(59): NCBI GI NO: 34896510 NR Description: putative integrase
  misc_feature (2)..(59): NCBI GI NO: 38347560 NR Description: OSJNBb0093G06.1
  misc_feature (2)..(59): NCBI GI NO: 39546230 NR Description: OSJNBa0029L02.20
  misc_feature (2)..(58): NCBI GI NO: 34015263 NR Description: putative integrase
  misc_feature (2)..(59): NCBI GI NO: 19881654 NR Description: putative pol polyprotein [Oryza sativa]
  misc_feature (2)..(59): NCBI GI NO: 37532418 NR Description: putative retroelement
  misc_feature (2)..(59): NCBI GI NO: 34900196 NR Description: similar to retrotransposon
  misc_feature (2)..(59): NCBI GI NO: 34913608 NR Description: retrotransposon-like protein
  misc_feature (2)..(59): NCBI GI NO: 34901308 NR Description: OSJNBb0015I22.3
  misc_feature (2)..(59): NCBI GI NO: 37991877 NR Description: putative polyprotein
RSRNRKFDKWSPSWEGPYRITQVIAGNAYMLQTLQGEDLPKTLNGRFLKQYHPSMWQDA

SEQ ID NO: 22528 - DNA, 1208 bp, Zea mays subsp. mays
  misc_feature (1)..(1208): Ceres Seq. ID no. 15226728
gctcactagtcccccccccccgatcttcttaataagttggcgcaaggatacgaaggaagcactgaagaaagccagtttgaagacatgaaggattctgatccagttatggatgagttctatcgtagttgtgaattcccatcggttcctgacagtgaacctgagaccgtgtcttctgcgaaaccatactgctcagcgcccatccaagatgtgttacatgtacaaacagaagaacctcctagtaaaatagtgaaatccgattctagttcatcggatgagattaagaggataatggatggttcaaaccattatgaagttttgggtgtgcctcgtaatagaagcattgaccaaaaggccctgaaaaaagaatatcacagaatggtcctgcttgtacatcctgataaaaatatgggaaatccattggcttgtgaatctttcaaaaagcttcagtcagcttatgaggtcctctctgatttcacaaagaaaaacagctatgatcagcaactgaggaaagaagaatcacagaaaatgaccccaagatcacgtgctgtctcgcaacagagtggtgtagagtttctctcagaagagtccagacgcatacagtgcactaagtgtggtaatttccatatatggatatgcacgaagagaagcaaaacaaaagcaagattctgtcagggctgcgatcggtttcatcaagccaaggatggagatggatgggttgaaaccagattttcatcctccatcaagatggaaataccacgagcctttgtttgtgccgagagcaaaatatttgatgtgtctgagtgggctacctgccagggaatggagtgtaagcctaacactcacggtccaacttttatggtaaacatggtcggcgcagataggatgcctcagagatcctacagttcccggtatcccttcagcttggacgcagagatgatccccgacgatgaattcgagatgtggcttcagcaggcactggcgtcaggcgtcttcgctgacagcccgaagcgcaggaaaagctggagcccgttcaaactgcctcaaaagggaattaaaagttggcgaaggtcgtcatgagggtgtggcattatgcagcagctggggtctaggcggctacagcattggaaagaaggcgacaatacaaggcttcatgggtgtaaatagactgaccaacaatttgcctggatggataactaatttttgttccg

SEQ ID NO: 22529 - protein, 330 aa, Zea mays subsp. mays
  peptide (1)..(330): Ceres Seq. ID no. 15226729
  misc_feature (73)..(140): Pfam Name: Pfam Description:  DnaJ domain
  misc_feature (126)..(330): NCBI GI NO: 7487909 NR Description: hypothetical protein YUP8H12R
  misc_feature (1)..(159): NCBI GI NO: 7487909 NR Description: hypothetical protein YUP8H12R
  misc_feature (1)..(330): NCBI GI NO: 6069485 NR Description: S-locus protein 5 [Brassica rapa]
  misc_feature (1)..(321): NCBI GI NO: 15219309 NR Description: S-locus protein, putative [Arabidopsis thaliana]
  misc_feature (1)..(321): NCBI GI NO: 25518299 NR Description: hypothetical protein F19K19
  misc_feature (152)..(330): NCBI GI NO: 32400881 NR Description: s-locus protein 5 [Triticum aestivum]
  misc_feature (1)..(159): NCBI GI NO: 30699386 NR Description: S-locus protein, putative [Arabidopsis thaliana]
  misc_feature (49)..(215): NCBI GI NO: 31249740 NR Description: putative heat shock protein
  misc_feature (57)..(212): NCBI GI NO: 15240510 NR Description: DnaJ protein family [Arabidopsis thaliana]
  misc_feature (126)..(315): NCBI GI NO: 29371958 NR Description: DNAJ-like protein
MKDSDPVMDEFYRSCEFPSVPDSEPETVSSAKPYCSAPIQDVLHVQTEEPPSKIVKSDSSSSDEIKRIMDGSNHYEVLGVPRNRSIDQKALKKEYHRMVLLVHPDKNMGNPLACESFKKLQSAYEVLSDFTKKNSYDQQLRKEESQKMTPRSRAVSQQSGVEFLSEESRRIQCTKCGNFHIWICTKRSKTKARFCQGCDRFHQAKDGDGWVETRFSSSIKMEIPRAFVCAESKIFDVSEWATCQGMECKPNTHGPTFMVNMVGADRMPQRSYSSRYPFSLDAEMIPDDEFEMWLQQALASGVFADSPKRRKSWSPFKLPQKGIKSWRRSS

SEQ ID NO: 22530 - protein, 323 aa, Zea mays subsp. mays
  peptide (1)..(323): Ceres Seq. ID no. 15226730
  misc_feature (66)..(133): Pfam Name: Pfam Description:  DnaJ domain
  misc_feature (119)..(323): NCBI GI NO: 7487909 NR Description: hypothetical protein YUP8H12R
  misc_feature (1)..(152): NCBI GI NO: 7487909 NR Description: hypothetical protein YUP8H12R
  misc_feature (1)..(323): NCBI GI NO: 6069485 NR Description: S-locus protein 5 [Brassica rapa]
  misc_feature (1)..(314): NCBI GI NO: 15219309 NR Description: S-locus protein, putative [Arabidopsis thaliana]
  misc_feature (1)..(314): NCBI GI NO: 25518299 NR Description: hypothetical protein F19K19
  misc_feature (145)..(323): NCBI GI NO: 32400881 NR Description: s-locus protein 5 [Triticum aestivum]
  misc_feature (1)..(152): NCBI GI NO: 30699386 NR Description: S-locus protein, putative [Arabidopsis thaliana]
  misc_feature (42)..(208): NCBI GI NO: 31249740 NR Description: putative heat shock protein
  misc_feature (50)..(205): NCBI GI NO: 15240510 NR Description: DnaJ protein family [Arabidopsis thaliana]
  misc_feature (119)..(308): NCBI GI NO: 29371958 NR Description: DNAJ-like protein
MDEFYRSCEFPSVPDSEPETVSSAKPYCSAPIQDVLHVQTEEPPSKIVKSDSSSSDEIKRIMDGSNHYEVLGVPRNRSIDQKALKKEYHRMVLLVHPDKNMGNPLACESFKKLQSAYEVLSDFTKKNSYDQQLRKEESQKMTPRSRAVSQQSGVEFLSEESRRIQCTKCGNFHIWICTKRSKTKARFCQGCDRFHQAKDGDGWVETRFSSSIKMEIPRAFVCAESKIFDVSEWATCQGMECKPNTHGPTFMVNMVGADRMPQRSYSSRYPFSLDAEMIPDDEFEMWLQQALASGVFADSPKRRKSWSPFKLPQKGIKSWRRSS

SEQ ID NO: 22531 - protein, 262 aa, Zea mays subsp. mays
  peptide (1)..(262): Ceres Seq. ID no. 15226731
  misc_feature (5)..(72): Pfam Name: Pfam Description:  DnaJ domain
  misc_feature (58)..(262): NCBI GI NO: 7487909 NR Description: hypothetical protein YUP8H12R
  misc_feature (1)..(91): NCBI GI NO: 7487909 NR Description: hypothetical protein YUP8H12R
  misc_feature (1)..(262): NCBI GI NO: 6069485 NR Description: S-locus protein 5 [Brassica rapa]
  misc_feature (1)..(253): NCBI GI NO: 15219309 NR Description: S-locus protein, putative [Arabidopsis thaliana]
  misc_feature (1)..(253): NCBI GI NO: 25518299 NR Description: hypothetical protein F19K19
  misc_feature (84)..(262): NCBI GI NO: 32400881 NR Description: s-locus protein 5 [Triticum aestivum]
  misc_feature (1)..(91): NCBI GI NO: 30699386 NR Description: S-locus protein, putative [Arabidopsis thaliana]
  misc_feature (1)..(147): NCBI GI NO: 31249740 NR Description: putative heat shock protein
  misc_feature (1)..(144): NCBI GI NO: 15240510 NR Description: DnaJ protein family [Arabidopsis thaliana]
  misc_feature (58)..(247): NCBI GI NO: 29371958 NR Description: DNAJ-like protein
MDGSNHYEVLGVPRNRSIDQKALKKEYHRMVLLVHPDKNMGNPLACESFKKLQSAYEVLSDFTKKNSYDQQLRKEESQKMTPRSRAVSQQSGVEFLSEESRRIQCTKCGNFHIWICTKRSKTKARFCQGCDRFHQAKDGDGWVETRFSSSIKMEIPRAFVCAESKIFDVSEWATCQGMECKPNTHGPTFMVNMVGADRMPQRSYSSRYPFSLDAEMIPDDEFEMWLQQALASGVFADSPKRRKSWSPFKLPQKGIKSWRRSS

SEQ ID NO: 22532 - DNA, 738 bp, Zea mays subsp. mays
  misc_feature (1)..(738): Ceres Seq. ID no. 13623344
ggcgacgacttggcggtccccgctgccgccgtgcccaggcctctacttcgggagttcgggaccttcaccggcgacgagcacccatcgggttgcttcgcaaaacttccaacatccaggatacaattaattacgattccttcaactttatctcgatttataggaggttgcacagagcccatccaacagggtgtctcagacatactgatggatggggtgcccaatatccttgagaaatcatcacatgaatgcatgtactcttggtacttcaccagggaagaactagagaaattttctccatcaaggaaagatggtattactgaaaacaaggaatcagaaattcggcatttatattgttcatttatccgggatgttggcatcaggctgaagctacctcagatgacactagcaacagcagtcatgctttgccatcgcttctatttacaccagtcccttgccaaaaatggatggcagacagttgcaacagtatgtgtatttctggcgtcgaaagttgaagatactccttgtcccctggaccatgtagttagagtggcctatgaaacaatgtataggcgggacactgctgcggctcaaaggatccgtcagaaggatgtttttgagaagcagaaagcgctcattttgatcggagagagattgcttcttacaactattcgatttgatttcaacattcagcatccttatagaccacttcttgatgccatgcaaaatcttggcatcaat

SEQ ID NO: 22533 - protein, 246 aa, Zea mays subsp. mays
  peptide (1)..(246): Ceres Seq. ID no. 13623345
  misc_feature (87)..(228): Pfam Name: Pfam Description:  Cyclin, N-terminal domain
  misc_feature (78)..(245): NCBI GI NO: 30694715 NR Description: cyclin family [Arabidopsis thaliana]
  misc_feature (87)..(245): NCBI GI NO: 30684822 NR Description: cyclin family [Arabidopsis thaliana]
  misc_feature (78)..(245): NCBI GI NO: 9759604 NR Description: contains similarity to cyclin~gene_id:K18C1.7
  misc_feature (74)..(243): NCBI GI NO: 15217663 NR Description: cyclin family [Arabidopsis thaliana]
  misc_feature (74)..(243): NCBI GI NO: 21618277 NR Description: putative cyclin [Arabidopsis thaliana]
  misc_feature (87)..(245): NCBI GI NO: 7486085 NR Description: hypothetical protein F24J7
  misc_feature (86)..(238): NCBI GI NO: 15219592 NR Description: cyclin family [Arabidopsis thaliana]
  misc_feature (87)..(241): NCBI GI NO: 15235087 NR Description: cyclin family [Arabidopsis thaliana]
  misc_feature (139)..(243): NCBI GI NO: 6693016 NR Description: T22C5.8 [Arabidopsis thaliana]
  misc_feature (87)..(241): NCBI GI NO: 2981196 NR Description: cyclin T1 [Homo sapiens]
GDDLAVPAAAVPRPLLREFGTFTGDEHPSGCFAKLPTSRIQLITIPSTLSRFIGGCTEPIQQGVSDILMDGVPNILEKSSHECMYSWYFTREELEKFSPSRKDGITENKESEIRHLYCSFIRDVGIRLKLPQMTLATAVMLCHRFYLHQSLAKNGWQTVATVCVFLASKVEDTPCPLDHVVRVAYETMYRRDTAAAQRIRQKDVFEKQKALILIGERLLLTTIRFDFNIQHPYRPLLDAMQNLGIN

SEQ ID NO: 22534 - protein, 178 aa, Zea mays subsp. mays
  peptide (1)..(178): Ceres Seq. ID no. 13623346
  misc_feature (19)..(160): Pfam Name: Pfam Description:  Cyclin, N-terminal domain
  misc_feature (10)..(177): NCBI GI NO: 30694715 NR Description: cyclin family [Arabidopsis thaliana]
  misc_feature (19)..(177): NCBI GI NO: 30684822 NR Description: cyclin family [Arabidopsis thaliana]
  misc_feature (10)..(177): NCBI GI NO: 9759604 NR Description: contains similarity to cyclin~gene_id:K18C1.7
  misc_feature (6)..(175): NCBI GI NO: 15217663 NR Description: cyclin family [Arabidopsis thaliana]
  misc_feature (6)..(175): NCBI GI NO: 21618277 NR Description: putative cyclin [Arabidopsis thaliana]
  misc_feature (19)..(177): NCBI GI NO: 7486085 NR Description: hypothetical protein F24J7
  misc_feature (18)..(170): NCBI GI NO: 15219592 NR Description: cyclin family [Arabidopsis thaliana]
  misc_feature (19)..(173): NCBI GI NO: 15235087 NR Description: cyclin family [Arabidopsis thaliana]
  misc_feature (71)..(175): NCBI GI NO: 6693016 NR Description: T22C5.8 [Arabidopsis thaliana]
  misc_feature (19)..(173): NCBI GI NO: 2981196 NR Description: cyclin T1 [Homo sapiens]
MDGVPNILEKSSHECMYSWYFTREELEKFSPSRKDGITENKESEIRHLYCSFIRDVGIRLKLPQMTLATAVMLCHRFYLHQSLAKNGWQTVATVCVFLASKVEDTPCPLDHVVRVAYETMYRRDTAAAQRIRQKDVFEKQKALILIGERLLLTTIRFDFNIQHPYRPLLDAMQNLGIN

SEQ ID NO: 22535 - protein, 163 aa, Zea mays subsp. mays
  peptide (1)..(163): Ceres Seq. ID no. 13623347
  misc_feature (4)..(145): Pfam Name: Pfam Description:  Cyclin, N-terminal domain
  misc_feature (1)..(162): NCBI GI NO: 30694715 NR Description: cyclin family [Arabidopsis thaliana]
  misc_feature (4)..(162): NCBI GI NO: 30684822 NR Description: cyclin family [Arabidopsis thaliana]
  misc_feature (1)..(162): NCBI GI NO: 9759604 NR Description: contains similarity to cyclin~gene_id:K18C1.7
  misc_feature (1)..(160): NCBI GI NO: 15217663 NR Description: cyclin family [Arabidopsis thaliana]
  misc_feature (1)..(160): NCBI GI NO: 21618277 NR Description: putative cyclin [Arabidopsis thaliana]
  misc_feature (4)..(162): NCBI GI NO: 7486085 NR Description: hypothetical protein F24J7
  misc_feature (3)..(155): NCBI GI NO: 15219592 NR Description: cyclin family [Arabidopsis thaliana]
  misc_feature (4)..(158): NCBI GI NO: 15235087 NR Description: cyclin family [Arabidopsis thaliana]
  misc_feature (56)..(160): NCBI GI NO: 6693016 NR Description: T22C5.8 [Arabidopsis thaliana]
  misc_feature (4)..(158): NCBI GI NO: 2981196 NR Description: cyclin T1 [Homo sapiens]
MYSWYFTREELEKFSPSRKDGITENKESEIRHLYCSFIRDVGIRLKLPQMTLATAVMLCHRFYLHQSLAKNGWQTVATVCVFLASKVEDTPCPLDHVVRVAYETMYRRDTAAAQRIRQKDVFEKQKALILIGERLLLTTIRFDFNIQHPYRPLLDAMQNLGIN

SEQ ID NO: 22536 - DNA, 1761 bp, Zea mays subsp. mays
  misc_feature (1)..(1761): Ceres Seq. ID no. 13624708
  misc_feature (1593)..(1593): n is a, c, t, g, unknown, or other
  misc_feature (1594)..(1594): n is a, c, t, g, unknown, or other
  misc_feature (1595)..(1595): n is a, c, t, g, unknown, or other
ccccccccccccccaataataagagccttgataagcacctttctgatatggctgcagcagttccagaaccacaagtgggtgatctcaccaatttgttcatttaaatgttcctatacagctgaatctcatggggttgagtggcatatcagatatgagataatcaaaggaatttgccatggtttgcattaccttcacacagattgccaaattgtccatttggacctaaagcctgagaatatattgctagatgacaacatggagccaaaaattacagattttggtatgtccaggctctttggtctacaacaatccaaaatcatcaccaaaacttgtggaggaacacttggatacatggcaccagaatacttactaaaagggttgatttcagtgaaggccgacatattcagtttgggcgttataatcatagaggtgatgaccggaggccggaattatcccacttgtgaaaaatcttgcgagcaattcgctgttgatgtggttggacgttggaggaagaggttattggaggaggcaggaaggtacacacccttggaaaaatacgttgagcaagtagagacatgcatcttgataggattgatgtgtgtcgatgatgatcctaacaaaaggcccacgacattggacattatcgaaaggcttaccaaagtagatgtcacgaacacggacagagggccacccaaaactctggaggccgcgacagggcttacaggccaccccaacctcgcaactagatcatttcttgacaggttccgccgaaccatcgtgatagggatgctgaagaaggccctgaaaatccaggacgtatcgcagttggagcagctcctggccaaggaggtgctgctggagctccacaaaatcggcacgaatgcaactggaaacagatcgttcctggagaggctccacgcaagcatcaccatggctacgctggttcaggcgctgcattccttggacttggatccatcggcggcgctgcgtatggaggtgctgttcttggcgctggagaatatgcgtggaaaaaacaactcaaggcgaagaagcgaggacgtccttgagctggaggagcggccagagcagatccggtcggtgctggaggctggcaccagggccaggctcagtgatgaggaacacatgccgtcggtgtctgtgcaggctgaagaccaggcctttcccaaaccgaagttggccaaagtacgcgccaccgccccggtgtgcgtgtcagcagtgtggttggcggccggcataggattcctgtgtggattcaccctaggagagatgaggggattaaggcggacgagggtccacgaacgcacgtgatgccaatgtgcccacatgacatggccagaaaatgtcactgcggtggaccatgcatgcacgaattaaggagcaccagttagaatacgtattctagattcattttacaaattctgtatttaaaaggaacttgtgcattgtgacagaggcggcggactggatcaggttgtattgtttctgctggtgtcctggcgtatgtataagccacggagtgtatcggatgaaattgaacagagaaatgtgcaatatagaaccgtgttgagggcnnnaaaaaaaaaaaaaaaaaaaaaaaaaaaaaaaaaaaaaaaaaaaaaaaaaaaaaaaaaaaaaaaaaaaaaaaaaaaaaaaaaaaaaaaaaaaaaaaaaaaaaaccccgggggggggcccggaacccaattcccccaaaaggggggcgaaaaaaaattcccggggcgg

SEQ ID NO: 22537 - protein, 442 aa, Zea mays subsp. mays
  peptide (1)..(442): Ceres Seq. ID no. 13624709
  misc_feature (41)..(218): NCBI GI NO: 37532178 NR Description: putative receptor-like protein kinase
  misc_feature (41)..(222): NCBI GI NO: 38344521 NR Description: OSJNBa0016N04.14
  misc_feature (39)..(230): NCBI GI NO: 21724199 NR Description: stem rust resistance protein
  misc_feature (45)..(249): NCBI GI NO: 34395235 NR Description: putative serine/threonine kinase
  misc_feature (41)..(226): NCBI GI NO: 34395229 NR Description: putative serine/threonine kinase -related protein
  misc_feature (45)..(277): NCBI GI NO: 33146545 NR Description: putative receptor-like protein kinase 4
  misc_feature (39)..(239): NCBI GI NO: 34394941 NR Description: putative serine/threonine-specific proteinkinase
  misc_feature (45)..(249): NCBI GI NO: 34393202 NR Description: putative serine/threonine-specific protein kinase
  misc_feature (39)..(230): NCBI GI NO: 21929729 NR Description: barley stem rust resistance protein
  misc_feature (39)..(230): NCBI GI NO: 21728344 NR Description: stem rust resistance protein Rpg1
PPPPPIIRALISTFLIWLQQFQNHKWVISPICSFKCSYTAESHGVEWHIRYEIIKGICHGLHYLHTDCQIVHLDLKPENILLDDNMEPKITDFGMSRLFGLQQSKIITKTCGGTLGYMAPEYLLKGLISVKADIFSLGVIIIEVMTGGRNYPTCEKSCEQFAVDVVGRWRKRLLEEAGRYTPLEKYVEQVETCILIGLMCVDDDPNKRPTTLDIIERLTKVDVTNTDRGPPKTLEAATGLTGHPNLATRSFLDRFRRTIVIGMLKKALKIQDVSQLEQLLAKEVLLELHKIGTNATGNRSFLERLHASITMATLVQALHSLDLDPSAALRMEVLFLALENMRGKNNSRRRSEDVLELEERPEQIRSVLEAGTRARLSDEEHMPSVSVQAEDQAFPKPKLAKVRATAPVCVSAVWLAAGIGFLCGFTLGEMRGLRRTRVHERT

SEQ ID NO: 22538 - protein, 357 aa, Zea mays subsp. mays
  peptide (1)..(357): Ceres Seq. ID no. 13624710
  misc_feature (1)..(133): NCBI GI NO: 37532178 NR Description: putative receptor-like protein kinase
  misc_feature (1)..(137): NCBI GI NO: 38344521 NR Description: OSJNBa0016N04.14
  misc_feature (1)..(145): NCBI GI NO: 21724199 NR Description: stem rust resistance protein
  misc_feature (1)..(164): NCBI GI NO: 34395235 NR Description: putative serine/threonine kinase
  misc_feature (1)..(141): NCBI GI NO: 34395229 NR Description: putative serine/threonine kinase -related protein
  misc_feature (1)..(192): NCBI GI NO: 33146545 NR Description: putative receptor-like protein kinase 4
  misc_feature (1)..(154): NCBI GI NO: 34394941 NR Description: putative serine/threonine-specific proteinkinase
  misc_feature (1)..(164): NCBI GI NO: 34393202 NR Description: putative serine/threonine-specific protein kinase
  misc_feature (1)..(145): NCBI GI NO: 21929729 NR Description: barley stem rust resistance protein
  misc_feature (1)..(145): NCBI GI NO: 21728344 NR Description: stem rust resistance protein Rpg1
MEPKITDFGMSRLFGLQQSKIITKTCGGTLGYMAPEYLLKGLISVKADIFSLGVIIIEVMTGGRNYPTCEKSCEQFAVDVVGRWRKRLLEEAGRYTPLEKYVEQVETCILIGLMCVDDDPNKRPTTLDIIERLTKVDVTNTDRGPPKTLEAATGLTGHPNLATRSFLDRFRRTIVIGMLKKALKIQDVSQLEQLLAKEVLLELHKIGTNATGNRSFLERLHASITMATLVQALHSLDLDPSAALRMEVLFLALENMRGKNNSRRRSEDVLELEERPEQIRSVLEAGTRARLSDEEHMPSVSVQAEDQAFPKPKLAKVRATAPVCVSAVWLAAGIGFLCGFTLGEMRGLRRTRVHERT

SEQ ID NO: 22539 - protein, 348 aa, Zea mays subsp. mays
  peptide (1)..(348): Ceres Seq. ID no. 13624711
  misc_feature (1)..(124): NCBI GI NO: 37532178 NR Description: putative receptor-like protein kinase
  misc_feature (1)..(128): NCBI GI NO: 38344521 NR Description: OSJNBa0016N04.14
  misc_feature (1)..(136): NCBI GI NO: 21724199 NR Description: stem rust resistance protein
  misc_feature (1)..(155): NCBI GI NO: 34395235 NR Description: putative serine/threonine kinase
  misc_feature (1)..(132): NCBI GI NO: 34395229 NR Description: putative serine/threonine kinase -related protein
  misc_feature (1)..(183): NCBI GI NO: 33146545 NR Description: putative receptor-like protein kinase 4
  misc_feature (1)..(145): NCBI GI NO: 34394941 NR Description: putative serine/threonine-specific proteinkinase
  misc_feature (1)..(155): NCBI GI NO: 34393202 NR Description: putative serine/threonine-specific protein kinase
  misc_feature (1)..(136): NCBI GI NO: 21929729 NR Description: barley stem rust resistance protein
  misc_feature (1)..(136): NCBI GI NO: 21728344 NR Description: stem rust resistance protein Rpg1
MSRLFGLQQSKIITKTCGGTLGYMAPEYLLKGLISVKADIFSLGVIIIEVMTGGRNYPTCEKSCEQFAVDVVGRWRKRLLEEAGRYTPLEKYVEQVETCILIGLMCVDDDPNKRPTTLDIIERLTKVDVTNTDRGPPKTLEAATGLTGHPNLATRSFLDRFRRTIVIGMLKKALKIQDVSQLEQLLAKEVLLELHKIGTNATGNRSFLERLHASITMATLVQALHSLDLDPSAALRMEVLFLALENMRGKNNSRRRSEDVLELEERPEQIRSVLEAGTRARLSDEEHMPSVSVQAEDQAFPKPKLAKVRATAPVCVSAVWLAAGIGFLCGFTLGEMRGLRRTRVHERT

SEQ ID NO: 22540 - DNA, 2289 bp, Zea mays subsp. mays
  misc_feature (1)..(2289): Ceres Seq. ID no. 15226012
cccccccccccccccccccctttttcatctttgattttatctgaacagagacttgaactcgctatcaactttcagtagacctgctaaggagcgatctctgtccaattatcaaccagtgaatttatgccctgtaccatgaatagagatagtcaagaaattagactatttcaagttcagcgagagggactatatggcactggaggcgtctttcttagagtgattgaaaatacaatctacctcaaaactaataacatcgtcagagggaggaagatcagcttgcgtattggtgaagagaggatccttggttgaaagtgatgtttctccatatctttataaggttaaggaagagcagttggggttcttgtgaaacgtagattgtatgaggtctataaatttttatgctctatcattacttgaatgaatcatgtatcactggcaagcaacttcagctcatactctgtaggaattctaattcacattgcattctatttaattgtttgttttatgttccgttcacacgaccatgatttttgtttgcacaaatcactatatatatcctcgttgaattaaaagtccagcttttgtgtcataagcatattgtctatttccccttttggctattgcaaatagcaagtatagtttgttgtttaaatgttagtctattctgtttcaagaaaaaaagaatgcgccatcgctggggatgggtacgatgatcaagatcgtcgaacgacgaagggcaccgaggtgttcgtcagcgggttgccaatgtcgaccacggaaagcatgctcctctctcatctccacaccgtgcagtagctgctgcccgtagcatgtaatgcaatggaatgagttatcaaggcaactaacactgaacatagttcttgggctccttggcagcgtcgaggcatggtatctgcccacgccattgtcagggcctcctgagggtacccatgctcgacctacttcatcaaagatgtggtatggacaaatatacatgccactttccagatgaagtgaagagaccaaatgtggatgtcaatcaatctctagatgaaggaatgaaaggaaggagctaagttattgcactggatgtacggggtctagaaaaggtgtcactttgatgccatttattagtgctgttgtacaaaagaaaaggttgaattgatgaattcatgggctaccttataaaataaaactatattgaattcatgtgatcttgtgattttatgtaagactatcctataaataaaaactatgatttcactgtcttctctatgttgtagctagcagtgcaagcatagaacctatgaaacatggatacttggttacaaaattcaactttcagtcaagttttgttcaacaagggtctgattgagacttccatgaaactgatcgatttgtcgttgctgtcatgtatgtgaacttatggtttagaagcagctaagtttccaacatgttacatggtagggaatgtatttgctaacactatttgctagcactacaagttccgtatgccctatgtgatagatggaaagattgaatgaagggctgtcattatttgatgcaatactgattgttccaatgtttcaaattgtttggaccttcttctctatttgtacaggatttgtttactttcaagaatatcaagtatttgatacgctcaggataattatgtgtgtgttaggcatgacatttgtctttgttgggatctccttgctagcacccgatgacagtaaaggaaagatggttcaagcacctccgaggactccataattgacatagacagaaatggaaagatgccgatggaggagacagacacagatgatagcatctcctttgttacttctgtaaaatctgcatgctccatgtcccttggccttggggagagcaccataagcgcttcatcggtgcttgccatgcttatggtctcgtcaagaacgaacaaccggcttcagaggaatcggaaatgaccgtccaaagtatgcccctttaagaaccactgattggagtaacctatagccgatggtaatatataggtacacaggaaaggtctttgttttttatgttgcctagcgaatggcagtgaagtttttttgttgcttccaaaggcacaactgtttgttgtgatcgtagctagctataacacgagtgtatagttcaccgttgtacccttcaaaacactgtccatacctagctgcatatacatgtgtaagttttagaatacaacaaatttttggaagattaagattagatggagtagcatttgtcagcttttagcttgttgctact

SEQ ID NO: 22541 - protein, 81 aa, Zea mays subsp. mays
  peptide (1)..(81): Ceres Seq. ID no. 15226013
  misc_feature (1)..(71): Pfam Name: DUF803 Pfam Description: Protein of unknown function
  misc_feature (1)..(71): NCBI GI NO: 15231596 NR Description: expressed protein [Arabidopsis thaliana]
MERLNEGLSLFDAILIVPMFQIVWTFFSICTGFVYFQEYQVFDTLRIIMCVLGMTFVFVGISLLAPDDSKGKMVQAPPRTP

SEQ ID NO: 22542 - protein, 63 aa, Zea mays subsp. mays
  peptide (1)..(63): Ceres Seq. ID no. 15226014
  misc_feature (1)..(53): Pfam Name: DUF803 Pfam Description: Protein of unknown function
  misc_feature (1)..(53): NCBI GI NO: 15231596 NR Description: expressed protein [Arabidopsis thaliana]
MFQIVWTFFSICTGFVYFQEYQVFDTLRIIMCVLGMTFVFVGISLLAPDDSKGKMVQAPPRTP

SEQ ID NO: 22543 - protein, 61 aa, Zea mays subsp. mays
  peptide (1)..(61): Ceres Seq. ID no. 15226015
MPCTMNRDSQEIRLFQVQREGLYGTGGVFLRVIENTIYLKTNNIVRGRKISLRIGEERILG

SEQ ID NO: 22544 - protein, 54 aa, Zea mays subsp. mays
  peptide (1)..(54): Ceres Seq. ID no. 15226016
MLVYSVSRKKECAIAGDGYDDQDRRTTKGTEVFVSGLPMSTTESMLLSHLHTVQ

SEQ ID NO: 22545 - DNA, 2517 bp, Zea mays subsp. mays
  misc_feature (1)..(2517): Ceres Seq. ID no. 13623350
atcctgtcatccaccctcgcccaaccgacggctaccggttgtaagattggaatcgtttgatggccgccgccgccgcttcgcctccggttcctttaggacccgatgcctccgatctactggacggggatctccgtctcaagcccgctgtggcaatctcatgggattccgaagcactacacagccatgcagaaaggtgtgagatagagtcaaaagtgtgtgtcattgatccttctctgcttccagctctagatgatttattgcaggacatctatgaatcattgcaaccacagccagtggactatgaacaccgaaaccttatggttaatgttttcaacaaaattgttggagaaatttttggtaaaaataatgagcttccaattgtggaaccatttggatctttcacaatggatctatttactcctcaaagtgacctggacctctctgtgaacttcaatactgatgcaaatgatcagtatcctcgcaagaacaagatttctgctattaggaagcttgcacatgttctattttctcatcagcgtcatggtcgctgttatggtgtttcacctattgtgactgctagagttcctgtactgaaggttattgataagggaactggtgtagagtgtgatatttcagtagaaaacaaagacggcatgtcaagatcagccatatttaaatttatttcatcaattgataaaagattccggatactttgttatctgatgaagttctgggctaaggtacatgatgtgaactgccccaaagatcgaacaatgagctctatggcaattatttctttagtttcttttcatttacagactcggtgtcctccaatattacctgcattttctgccgtattgaaagatggtacagattttgcaagtattgagaagaatgtatcactattccagggttttgggcacagcaataaagagtctattgctgaactttttgtatcactaatgagtaaactagtgtcagtggagggtttatgggagcaagggctctgtgctagcaattttgaagggacatggatatcgaagacctgggcgaagggtgttggcaacttgaatgttgaggacttcttggaccgatctcagaattttgccagatcggtaggggtgaaggagatgcagaaaatatgtgaatgcctaagggctagcgtttctgatttgagcaagttttctaagggtgaaattgctgcgcccaagctaaaggccctgttgtttaagcctttgaaccaggttaacccagtcattaaaccccatcagaaaactattaagaggaagcgtactaatccaaataagaccagaactaaccctattcagaaaaatgctaagaaaaagaaggcccttgagcaggataaattagccatttctcctggtcagaaagatggtaagaagacccttgatcaagagaagtcagttagttctcccattcagaaaggtgctaagaagaccaaaccccttaaccaggataagttagtcatttctcccggccaggaagatgacaagaagccccttgtgcaggatgagccaatagtagtgtctcccatccagaagaataacaataagtatgttgatcaggagaagtcccttcagcaggagaagcaaatcatctctcccggacagaaagatgataagaagagcagcaaggtgggacctgactcagcatgtaatcatgtgcaacagaagaaagtgaaggctactgtatctaccggccgtgctgctaatactcatgtttctagttccaggcctcgctctgtttttatcccccaagcacattggcccagccagccaattgttgatcggtttgcgcatatacctgagcacctgatcagcccttctgcttttagttatgggttgccacaaccacttatgcatccagcctatcctcatcctcattctcatcagggattggtaggtcaaggacagggtaatttccttcatttcaatcctggtattgagctgcagcatcaaggccaggctttcttcggtcctccagctgtctaccaccccatggtgaatgggtttcacccattcggtatcaatggtgctcagcaagtgcagtacatcgacaataggatggtgcagaggccaccatatggttttggcccaggtttctggggatgatggttgcagcctgaggaaaggttggttgctaactagtgggggtttgaggtgaaagttgtcagttcaaagaaaaaaaaagctgttgtgtctaatatactcaaagatttagctttaaataggggccagtggaaaatagctaaccatgtgtctgaaccttgatttgtggtttttgttcggtttcagctctagcttaccttagaagtaaaatgttctgttgatgttggattttaactctagcctatcctgggattaaaaggttttgttgttgttgttgtaagttgtaattgtaactgttaggtttgtactctagtctgatttaaaagtaaaaaggctatattgttgttgttgtatctagacctgtacaaggagaaataatcaaataagg

SEQ ID NO: 22546 - protein, 690 aa, Zea mays subsp. mays
  peptide (1)..(690): Ceres Seq. ID no. 13623351
  misc_feature (111)..(206): Pfam Name: Pfam Description:  Nucleotidyltransferase domain
  misc_feature (55)..(406): NCBI GI NO: 30793987 NR Description: unknown protein [Arabidopsis thaliana]
  misc_feature (55)..(406): NCBI GI NO: 15231229 NR Description: expressed protein [Arabidopsis thaliana]
  misc_feature (48)..(221): NCBI GI NO: 15231232 NR Description: hypothetical protein [Arabidopsis thaliana]
  misc_feature (337)..(409): NCBI GI NO: 15231232 NR Description: hypothetical protein [Arabidopsis thaliana]
  misc_feature (61)..(319): NCBI GI NO: 15225547 NR Description: expressed protein [Arabidopsis thaliana]
  misc_feature (63)..(317): NCBI GI NO: 34908258 NR Description: P0446B05.18
  misc_feature (70)..(353): NCBI GI NO: 18406841 NR Description: expressed protein [Arabidopsis thaliana]
  misc_feature (55)..(490): NCBI GI NO: 37539639 NR Description: similar to KIAA1711 protein [Homo sapiens]
  misc_feature (1)..(488): NCBI GI NO: 23956302 NR Description: hypothetical protein MGC38585 [Mus musculus]
  misc_feature (55)..(356): NCBI GI NO: 16550803 NR Description: unnamed protein product [Homo sapiens]
MAAAAASPPVPLGPDASDLLDGDLRLKPAVAISWDSEALHSHAERCEIESKVCVIDPSLLPALDDLLQDIYESLQPQPVDYEHRNLMVNVFNKIVGEIFGKNNELPIVEPFGSFTMDLFTPQSDLDLSVNFNTDANDQYPRKNKISAIRKLAHVLFSHQRHGRCYGVSPIVTARVPVLKVIDKGTGVECDISVENKDGMSRSAIFKFISSIDKRFRILCYLMKFWAKVHDVNCPKDRTMSSMAIISLVSFHLQTRCPPILPAFSAVLKDGTDFASIEKNVSLFQGFGHSNKESIAELFVSLMSKLVSVEGLWEQGLCASNFEGTWISKTWAKGVGNLNVEDFLDRSQNFARSVGVKEMQKICECLRASVSDLSKFSKGEIAAPKLKALLFKPLNQVNPVIKPHQKTIKRKRTNPNKTRTNPIQKNAKKKKALEQDKLAISPGQKDGKKTLDQEKSVSSPIQKGAKKTKPLNQDKLVISPGQEDDKKPLVQDEPIVVSPIQKNNNKYVDQEKSLQQEKQIISPGQKDDKKSSKVGPDSACNHVQQKKVKATVSTGRAANTHVSSSRPRSVFIPQAHWPSQPIVDRFAHIPEHLISPSAFSYGLPQPLMHPAYPHPHSHQGLVGQGQGNFLHFNPGIELQHQGQAFFGPPAVYHPMVNGFHPFGINGAQQVQYIDNRMVQRPPYGFGPGFWG

SEQ ID NO: 22547 - protein, 604 aa, Zea mays subsp. mays
  peptide (1)..(604): Ceres Seq. ID no. 13623352
  misc_feature (25)..(120): Pfam Name: Pfam Description:  Nucleotidyltransferase domain
  misc_feature (1)..(320): NCBI GI NO: 30793987 NR Description: unknown protein [Arabidopsis thaliana]
  misc_feature (1)..(320): NCBI GI NO: 15231229 NR Description: expressed protein [Arabidopsis thaliana]
  misc_feature (1)..(135): NCBI GI NO: 15231232 NR Description: hypothetical protein [Arabidopsis thaliana]
  misc_feature (251)..(323): NCBI GI NO: 15231232 NR Description: hypothetical protein [Arabidopsis thaliana]
  misc_feature (1)..(233): NCBI GI NO: 15225547 NR Description: expressed protein [Arabidopsis thaliana]
  misc_feature (1)..(231): NCBI GI NO: 34908258 NR Description: P0446B05.18
  misc_feature (1)..(267): NCBI GI NO: 18406841 NR Description: expressed protein [Arabidopsis thaliana]
  misc_feature (1)..(404): NCBI GI NO: 37539639 NR Description: similar to KIAA1711 protein [Homo sapiens]
  misc_feature (1)..(402): NCBI GI NO: 23956302 NR Description: hypothetical protein MGC38585 [Mus musculus]
  misc_feature (1)..(270): NCBI GI NO: 16550803 NR Description: unnamed protein product [Homo sapiens]
MVNVFNKIVGEIFGKNNELPIVEPFGSFTMDLFTPQSDLDLSVNFNTDANDQYPRKNKISAIRKLAHVLFSHQRHGRCYGVSPIVTARVPVLKVIDKGTGVECDISVENKDGMSRSAIFKFISSIDKRFRILCYLMKFWAKVHDVNCPKDRTMSSMAIISLVSFHLQTRCPPILPAFSAVLKDGTDFASIEKNVSLFQGFGHSNKESIAELFVSLMSKLVSVEGLWEQGLCASNFEGTWISKTWAKGVGNLNVEDFLDRSQNFARSVGVKEMQKICECLRASVSDLSKFSKGEIAAPKLKALLFKPLNQVNPVIKPHQKTIKRKRTNPNKTRTNPIQKNAKKKKALEQDKLAISPGQKDGKKTLDQEKSVSSPIQKGAKKTKPLNQDKLVISPGQEDDKKPLVQDEPIVVSPIQKNNNKYVDQEKSLQQEKQIISPGQKDDKKSSKVGPDSACNHVQQKKVKATVSTGRAANTHVSSSRPRSVFIPQAHWPSQPIVDRFAHIPEHLISPSAFSYGLPQPLMHPAYPHPHSHQGLVGQGQGNFLHFNPGIELQHQGQAFFGPPAVYHPMVNGFHPFGINGAQQVQYIDNRMVQRPPYGFGPGFWG

SEQ ID NO: 22548 - protein, 575 aa, Zea mays subsp. mays
  peptide (1)..(575): Ceres Seq. ID no. 13623353
  misc_feature (1)..(91): Pfam Name: Pfam Description:  Nucleotidyltransferase domain
  misc_feature (1)..(291): NCBI GI NO: 30793987 NR Description: unknown protein [Arabidopsis thaliana]
  misc_feature (1)..(291): NCBI GI NO: 15231229 NR Description: expressed protein [Arabidopsis thaliana]
  misc_feature (1)..(106): NCBI GI NO: 15231232 NR Description: hypothetical protein [Arabidopsis thaliana]
  misc_feature (222)..(294): NCBI GI NO: 15231232 NR Description: hypothetical protein [Arabidopsis thaliana]
  misc_feature (1)..(204): NCBI GI NO: 15225547 NR Description: expressed protein [Arabidopsis thaliana]
  misc_feature (1)..(202): NCBI GI NO: 34908258 NR Description: P0446B05.18
  misc_feature (1)..(238): NCBI GI NO: 18406841 NR Description: expressed protein [Arabidopsis thaliana]
  misc_feature (1)..(375): NCBI GI NO: 37539639 NR Description: similar to KIAA1711 protein [Homo sapiens]
  misc_feature (1)..(373): NCBI GI NO: 23956302 NR Description: hypothetical protein MGC38585 [Mus musculus]
  misc_feature (1)..(241): NCBI GI NO: 16550803 NR Description: unnamed protein product [Homo sapiens]
MDLFTPQSDLDLSVNFNTDANDQYPRKNKISAIRKLAHVLFSHQRHGRCYGVSPIVTARVPVLKVIDKGTGVECDISVENKDGMSRSAIFKFISSIDKRFRILCYLMKFWAKVHDVNCPKDRTMSSMAIISLVSFHLQTRCPPILPAFSAVLKDGTDFASIEKNVSLFQGFGHSNKESIAELFVSLMSKLVSVEGLWEQGLCASNFEGTWISKTWAKGVGNLNVEDFLDRSQNFARSVGVKEMQKICECLRASVSDLSKFSKGEIAAPKLKALLFKPLNQVNPVIKPHQKTIKRKRTNPNKTRTNPIQKNAKKKKALEQDKLAISPGQKDGKKTLDQEKSVSSPIQKGAKKTKPLNQDKLVISPGQEDDKKPLVQDEPIVVSPIQKNNNKYVDQEKSLQQEKQIISPGQKDDKKSSKVGPDSACNHVQQKKVKATVSTGRAANTHVSSSRPRSVFIPQAHWPSQPIVDRFAHIPEHLISPSAFSYGLPQPLMHPAYPHPHSHQGLVGQGQGNFLHFNPGIELQHQGQAFFGPPAVYHPMVNGFHPFGINGAQQVQYIDNRMVQRPPYGFGPGFWG

SEQ ID NO: 22549 - DNA, 1912 bp, Zea mays subsp. mays
  misc_feature (1)..(1912): Ceres Seq. ID no. 15225748
tcacctgtacgggcgacttcacctgcacgggcgcatccttcagccgatccgaagacaccatgcctccagggaggaagggaatacgaagcacaagggaacccccaccagaaatcacttctactgagtatgagaaacaaagggcagcaaatgtgatgaggaacaatcagatgttccaacggcttgggattaatcagttacgcacaatgatgactgctacaagagtaaagagcaaatatgatggtccagaggaatcagggtctttgtttgatggcgaggatagtgaaggctctgagccagaggaggattcccatgttgcacaaggtgtacgtagccacaacccaactcatgttgctgacaaacctacacaacaaacacgaggttctaaaagggttgtggcccctgatgttcatggacaacagattagattcactaggcaaaggagtgctgccataaatcaacaatcctccctaagcctaactactactacacaagctggttcaagagccaccacaaaccaagaatccacccaaaacttggctgctgcaacacaatttacttcaagtgttgccactgagcaagattacaccgcaggcctgactactactgcacaacctacttctcccacacaagctgaggtcactgaccacaatagagatgaagaattggtaccaaggcaaagaagtaggggcaaacaacttgaatccttgagcagagggttaggcactaagattccaatccaaatctctaatgggaagcgaaggccagagccacctattcaggctgcaaagtttgcatcggagggtgggatcatattgaggcaacacattccaatatttccgcactggaaggagtacaagaagcaagagaacgagggtaaaattacagactacattgggaagcttgctggtcaattcaccatggatgttgagagtaatgcagtaaaagatgcatgtgttgatatgctaaagggtggacagcgccaaatgaggtataggctgaaaaaaaagtacttcactggagttcctgcaaatcaagtgaggactacatcacctgtttcatgtatgactgatgatcaatggagagagttggtacaaatgtggtctagcccaaaccacaagaacaattgtgtgaagaacaaacttaatcgtgagaaggtgcaatttccacagtgcacaggatctcaatcatatgttgcaaaagcttatgtagtgagacaagaaaaatataaagatgtcgaacctagtgcaattgatcttttcaaggagatgcattgcagcaagaaaaaaggatttagtgaagttgttcagaaagccataggtgatatggaagcaatggtggcaacaccagctgaagatggacagcttgcaaagtctgcaacagaagttgtttccaatgtactgccgggttcaagtaaatttcttcacaatgctggccttttgccctcctccaagagaagcaacacagggactgtttcagcaagaatgcaagagcttcagtctcaattggacaatgagaggcgagaaaaagatggacttcgagaagatatggataccttaaaagccaagtcacaatcatctgaggcaaccattgctaatcaatcaactgagattgcagatttaaagaagtccttagcagaaaatagcatcctacttcgacagatattaagtattagtcgtgatcagctgaatccttaagcatgcttgctaagatgctggtgtcaaccatcctgaatacacatctcacaaaactgtggacctctttttatccttatgtttgctatatggaactgcaacttacagtctattatatgtgttctcttgctatagagttttagtacttgtctggttaaagaattatgaaccatgttcctttgtgtgttggacatattatgcttgaaatatatggatgttgg

SEQ ID NO: 22550 - protein, 563 aa, Zea mays subsp. mays
  peptide (1)..(563): Ceres Seq. ID no. 15225749
  misc_feature (298)..(553): NCBI GI NO: 37531906 NR Description: hypothetical protein
  misc_feature (298)..(543): NCBI GI NO: 37806218 NR Description: hypothetical protein
  misc_feature (303)..(562): NCBI GI NO: 34905050 NR Description: P0686C03.7
  misc_feature (203)..(301): NCBI GI NO: 34905050 NR Description: P0686C03.7
  misc_feature (214)..(397): NCBI GI NO: 32487860 NR Description: OSJNBb0061C13.10
  misc_feature (218)..(341): NCBI GI NO: 38344559 NR Description: OSJNBa0065B15.5
  misc_feature (325)..(555): NCBI GI NO: 38344559 NR Description: OSJNBa0065B15.5
TCTGDFTCTGASFSRSEDTMPPGRKGIRSTREPPPEITSTEYEKQRAANVMRNNQMFQRLGINQLRTMMTATRVKSKYDGPEESGSLFDGEDSEGSEPEEDSHVAQGVRSHNPTHVADKPTQQTRGSKRVVAPDVHGQQIRFTRQRSAAINQQSSLSLTTTTQAGSRATTNQESTQNLAAATQFTSSVATEQDYTAGLTTTAQPTSPTQAEVTDHNRDEELVPRQRSRGKQLESLSRGLGTKIPIQISNGKRRPEPPIQAAKFASEGGIILRQHIPIFPHWKEYKKQENEGKITDYIGKLAGQFTMDVESNAVKDACVDMLKGGQRQMRYRLKKKYFTGVPANQVRTTSPVSCMTDDQWRELVQMWSSPNHKNNCVKNKLNREKVQFPQCTGSQSYVAKAYVVRQEKYKDVEPSAIDLFKEMHCSKKKGFSEVVQKAIGDMEAMVATPAEDGQLAKSATEVVSNVLPGSSKFLHNAGLLPSSKRSNTGTVSARMQELQSQLDNERREKDGLREDMDTLKAKSQSSEATIANQSTEIADLKKSLAENSILLRQILSISRDQLNP

SEQ ID NO: 22551 - protein, 544 aa, Zea mays subsp. mays
  peptide (1)..(544): Ceres Seq. ID no. 15225750
  misc_feature (279)..(534): NCBI GI NO: 37531906 NR Description: hypothetical protein
  misc_feature (279)..(524): NCBI GI NO: 37806218 NR Description: hypothetical protein
  misc_feature (284)..(543): NCBI GI NO: 34905050 NR Description: P0686C03.7
  misc_feature (184)..(282): NCBI GI NO: 34905050 NR Description: P0686C03.7
  misc_feature (195)..(378): NCBI GI NO: 32487860 NR Description: OSJNBb0061C13.10
  misc_feature (199)..(322): NCBI GI NO: 38344559 NR Description: OSJNBa0065B15.5
  misc_feature (306)..(536): NCBI GI NO: 38344559 NR Description: OSJNBa0065B15.5
MPPGRKGIRSTREPPPEITSTEYEKQRAANVMRNNQMFQRLGINQLRTMMTATRVKSKYDGPEESGSLFDGEDSEGSEPEEDSHVAQGVRSHNPTHVADKPTQQTRGSKRVVAPDVHGQQIRFTRQRSAAINQQSSLSLTTTTQAGSRATTNQESTQNLAAATQFTSSVATEQDYTAGLTTTAQPTSPTQAEVTDHNRDEELVPRQRSRGKQLESLSRGLGTKIPIQISNGKRRPEPPIQAAKFASEGGIILRQHIPIFPHWKEYKKQENEGKITDYIGKLAGQFTMDVESNAVKDACVDMLKGGQRQMRYRLKKKYFTGVPANQVRTTSPVSCMTDDQWRELVQMWSSPNHKNNCVKNKLNREKVQFPQCTGSQSYVAKAYVVRQEKYKDVEPSAIDLFKEMHCSKKKGFSEVVQKAIGDMEAMVATPAEDGQLAKSATEVVSNVLPGSSKFLHNAGLLPSSKRSNTGTVSARMQELQSQLDNERREKDGLREDMDTLKAKSQSSEATIANQSTEIADLKKSLAENSILLRQILSISRDQLNP

SEQ ID NO: 22552 - protein, 513 aa, Zea mays subsp. mays
  peptide (1)..(513): Ceres Seq. ID no. 15225751
  misc_feature (248)..(503): NCBI GI NO: 37531906 NR Description: hypothetical protein
  misc_feature (248)..(493): NCBI GI NO: 37806218 NR Description: hypothetical protein
  misc_feature (253)..(512): NCBI GI NO: 34905050 NR Description: P0686C03.7
  misc_feature (153)..(251): NCBI GI NO: 34905050 NR Description: P0686C03.7
  misc_feature (164)..(347): NCBI GI NO: 32487860 NR Description: OSJNBb0061C13.10
  misc_feature (168)..(291): NCBI GI NO: 38344559 NR Description: OSJNBa0065B15.5
  misc_feature (275)..(505): NCBI GI NO: 38344559 NR Description: OSJNBa0065B15.5
MRNNQMFQRLGINQLRTMMTATRVKSKYDGPEESGSLFDGEDSEGSEPEEDSHVAQGVRSHNPTHVADKPTQQTRGSKRVVAPDVHGQQIRFTRQRSAAINQQSSLSLTTTTQAGSRATTNQESTQNLAAATQFTSSVATEQDYTAGLTTTAQPTSPTQAEVTDHNRDEELVPRQRSRGKQLESLSRGLGTKIPIQISNGKRRPEPPIQAAKFASEGGIILRQHIPIFPHWKEYKKQENEGKITDYIGKLAGQFTMDVESNAVKDACVDMLKGGQRQMRYRLKKKYFTGVPANQVRTTSPVSCMTDDQWRELVQMWSSPNHKNNCVKNKLNREKVQFPQCTGSQSYVAKAYVVRQEKYKDVEPSAIDLFKEMHCSKKKGFSEVVQKAIGDMEAMVATPAEDGQLAKSATEVVSNVLPGSSKFLHNAGLLPSSKRSNTGTVSARMQELQSQLDNERREKDGLREDMDTLKAKSQSSEATIANQSTEIADLKKSLAENSILLRQILSISRDQLNP

SEQ ID NO: 22553 - DNA, 2323 bp, Zea mays subsp. mays
  misc_feature (1)..(2323): Ceres Seq. ID no. 15224688
aatgggtgtgggcaagggacggtttggtacgctgagtgttttagccgactgcttctgagtggtaatgcgatgggacggctagtgtaatcatatcctttgcactgttgactggagtcccaatgggtgtagtgttgcatgaaacggcgtccgccgtctgacgtgtctttggatgggtgggagtgcttattgaatgccttgcgactgttcagtgaccgcggttggaagtgagcggttgcctttctcctctataaataacccctttgcttctctggttttttcacacctcttcgctgctctttactgccttcttctcctcccttctgtctgcttccaccatgggcaagaacaacaagcgcaagcgtgagccgactcctccatcggaggagtttggtgattcggaatactcagaggaggagttctccactgagtccgaggggtctccggctcccatccccctgcgcgagtcgtctgatgactcagacgactcccaggggcttgcggcggaggtctggacgtacatccgggccgtcgagcgctccgggctcgagggctcggatgagtccgagttctcctcggacgaggaggactcggacggcggtgagggcgaggatgacgacgacgacgacggcgacgacgacgacggtggcgacggcgacggtgatggcggcaacggcggcggaggcagcggcggcaaggacggcaccaagggcggcagcagcgtgggcagcaccggaggcaacggcggcaagggcagcggcggcagggccagtggctaaacgccactggtcttttagatattagtatagttagaataatgtagtagtaattagtgtagtttagtagtagtagtaatgtagagtagtatagtgtagtttagtagtagtagtaatgtagagtagaagtagggaagcaccaactcgcgaagagttggtttgtaaactcattaacttccctttaatcaagaactgtcgttgaccctcctttttcgatgactcgtcgttgcttttcctgaatgttgaactgattcttttgatatagtagaaacaacgccgagcgatgtgaaggttgatatcagcgttttaagagtaacaccaagcaattgaacacaagaccagcgttttagaggcaatgccgaatgatagaaggtcggcatcggcactttagaagtaatgctgagcgattgaacacgtggttggcgtgttagagggcacgccgagtgattggaggtcggcgtcggcattttagaggcaacgccgagcgattgaacacgtggtcggcgttttagaggcaacgccgagtgattggaggtcggcgtcggcattttagaagtaatgccgagcgattgaacacgtggtcggcgtgttagaggacacgccgagtgattggaggtcggcgtcggcattttagaagtaatgccgagcgattgaacacgtggtcggcgtgttagaggacacgccgagtggttggaggtcggcgtcggcattttagaggtaacgccgagcgattgaacacgtggtcggcgttttagaggcaacgccgagtgatagccagcttcacgagttactttgaggataataaccgagtgatgaagtggcacatcggctttcttggaaataactgtcggatatccacgtggcatgctgggatttcggaaataaccgccgggtgatgactgggcactttttgaaagggtatctggttcaggaatatcccttaagagtcgcgcttttagccgcctttgctttccgtgccctagttcttgcatttccgcatctgaatcttctccgccactcgcctcctactctgtttgccagcgagaagcaagatggcgcccaagaggaagactgcgaactcgtctgccgcagtgatccccgccatcgaccccaacagtcagttacccttcgcaggtaaccatatgtctgttatttccgaagctgagctcctccgtcttgtctccatcggggttcttcctccgcgggaactctgttcttggcgggtttgccacgggactactgtcccaaccgaagatacccacgagtcagtagtttacgctcctttccttctccgcggcctcggccttcccatatctccttttttccgtggcctcctcgatttttatcacatcaacctgactcatttgaaccctaattccattctccaaatctccattttcgttcacctttgcgaagcttatctcggcgtgctgccgcattttggtttatggaagtatctgtatcactgccgtcctgggatggccggggggcaacatcagttggtcgggggtgccagtttggagatgcgtcgtgggcggaagaccgagtat

SEQ ID NO: 22554 - protein, 166 aa, Zea mays subsp. mays
  peptide (1)..(166): Ceres Seq. ID no. 15224689
  misc_feature (1)..(165): NCBI GI NO: 33113962 NR Description: putative gypsy-type retrotransposon [Zea mays]
  misc_feature (32)..(165): NCBI GI NO: 34906434 NR Description: putative gypsy-type retrotransposon RIRE2 orf3
  misc_feature (32)..(165): NCBI GI NO: 34906278 NR Description: putative gypsy-type retrotransposon RIRE2 orf3
  misc_feature (26)..(165): NCBI GI NO: 34894224 NR Description: putative gypsy-type retrotransposon RIRE2 orf3
  misc_feature (32)..(165): NCBI GI NO: 34914172 NR Description: putative RIRE2 orf3
  misc_feature (32)..(165): NCBI GI NO: 5902448 NR Description: orf3 [Oryza sativa (japonica cultivar-group)]
  misc_feature (32)..(165): NCBI GI NO: 29126375 NR Description: putative gypsy-type retrotransposon protein
  misc_feature (32)..(165): NCBI GI NO: 32488247 NR Description: OSJNBa0089E12.5
  misc_feature (32)..(165): NCBI GI NO: 38346603 NR Description: OSJNBa0071G03.7
  misc_feature (32)..(165): NCBI GI NO: 34904810 NR Description: Putative gypsy-type retrotransposon RIRE2 protein
MAPKRKTANSSAAVIPAIDPNSQLPFAGNHMSVISEAELLRLVSIGVLPPRELCSWRVCHGTTVPTEDTHESVVYAPFLLRGLGLPISPFFRGLLDFYHINLTHLNPNSILQISIFVHLCEAYLGVLPHFGLWKYLYHCRPGMAGGQHQLVGGASLEMRRGRKTEY

SEQ ID NO: 22555 - protein, 146 aa, Zea mays subsp. mays
  peptide (1)..(146): Ceres Seq. ID no. 15224690
  misc_feature (68)..(142): Pfam Name: LMP1 Pfam Description: Herpesvirus latent membrane protein 1
  misc_feature (1)..(146): NCBI GI NO: 1076786 NR Description: transposable retroelement homolog
  misc_feature (1)..(146): NCBI GI NO: 18568237 NR Description: putative orf1 [Zea mays]
  misc_feature (1)..(146): NCBI GI NO: 1617471 NR Description: ORFI [Zea diploperennis]
  misc_feature (73)..(141): NCBI GI NO: 18568237 NR Description: putative orf1 [Zea mays]
  misc_feature (1)..(118): NCBI GI NO: 29244064 NR Description: hypothetical protein 4933409G03 [Mus musculus]
  misc_feature (1)..(145): NCBI GI NO: 16506142 NR Description: MSP-1 [Mizuhopecten yessoensis]
  misc_feature (1)..(145): NCBI GI NO: 16506142 NR Description: MSP-1 [Mizuhopecten yessoensis]
  misc_feature (1)..(145): NCBI GI NO: 16506142 NR Description: MSP-1 [Mizuhopecten yessoensis]
MGKNNKRKREPTPPSEEFGDSEYSEEEFSTESEGSPAPIPLRESSDDSDDSQGLAAEVWTYIRAVERSGLEGSDESEFSSDEEDSDGGEGEDDDDDDGDDDDGGDGDGDGGNGGGGSGGKDGTKGGSSVGSTGGNGGKGSGGRASG

SEQ ID NO: 22556 - protein, 136 aa, Zea mays subsp. mays
  peptide (1)..(136): Ceres Seq. ID no. 15224691
  misc_feature (1)..(135): NCBI GI NO: 33113962 NR Description: putative gypsy-type retrotransposon [Zea mays]
  misc_feature (2)..(135): NCBI GI NO: 34906434 NR Description: putative gypsy-type retrotransposon RIRE2 orf3
  misc_feature (2)..(135): NCBI GI NO: 34906278 NR Description: putative gypsy-type retrotransposon RIRE2 orf3
  misc_feature (1)..(135): NCBI GI NO: 34894224 NR Description: putative gypsy-type retrotransposon RIRE2 orf3
  misc_feature (2)..(135): NCBI GI NO: 34914172 NR Description: putative RIRE2 orf3
  misc_feature (2)..(135): NCBI GI NO: 5902448 NR Description: orf3 [Oryza sativa (japonica cultivar-group)]
  misc_feature (2)..(135): NCBI GI NO: 29126375 NR Description: putative gypsy-type retrotransposon protein
  misc_feature (2)..(135): NCBI GI NO: 32488247 NR Description: OSJNBa0089E12.5
  misc_feature (2)..(135): NCBI GI NO: 38346603 NR Description: OSJNBa0071G03.7
  misc_feature (2)..(135): NCBI GI NO: 34904810 NR Description: Putative gypsy-type retrotransposon RIRE2 protein
MSVISEAELLRLVSIGVLPPRELCSWRVCHGTTVPTEDTHESVVYAPFLLRGLGLPISPFFRGLLDFYHINLTHLNPNSILQISIFVHLCEAYLGVLPHFGLWKYLYHCRPGMAGGQHQLVGGASLEMRRGRKTEY

SEQ ID NO: 22557 - DNA, 2172 bp, Zea mays subsp. mays
  misc_feature (1)..(2172): Ceres Seq. ID no. 13599720
gtttatctccacccatgcgtccctgctctcctctagttgagctcaatcccaagtgctcgcttaagctgtgtggccaggttccctttcctggtcgccgtcgatggaagccctgccatcgatatcgcatgatattggttgttttcttcgaccacgtcaatgcctcacaggatttggacaccttgtcgacactcgaccatgtgttcgctcgttaccacgccatcttcagcatcatggttctataaaactctgcgcactcgtcggcacccgtctgtcaatctccaccacgcagcgctgcatcggacttaccctgtatgatgttcgacgacaagcccgaaccagtatttatcagcattctcgcgagtagtgagtcacgtttgatgctggtacgataattactcgcgtgatgcggaagacgacccaagtcgaccccaagcgcgggctaatccgcaggataaagcggatgaactaatctgaagacggatagatgaaacaagtatcacaacaaggataatcatcaagtggacgtcgtctaacaacactaacctagtgttactcaggttctaactttgtgctgttgttgatggtgttaagtgccggtgggctcggccttcttataagtctaactttaccgatcacgtgcctcttccccttcttgtatttcatggtaagggacttccgcgtcgctgaaacagaggaagacatcggattctatgctggttttcttgctgcgtcgtacatggtgggcagaggcttctcttccatcttctggggcgtcatcgccgaccgcgttggacggaagcctgtcatcacgttttcgatactgtccgtggtcgtattcagcgcgctgtttggtctgagcacgacgtactggatggcgatcgccacgaggctcgtgctgggcgctctcaacggcctgctcgccccgataaaggcgtactgcgttgaagtttgccagacccagcaccaggcgcttggactctcgcttgtgaacacggcatgggctctgggtctcattgttggtccagctcttggaggctacctttcgcagccagctgagaaatatcctcacgtgttttccaaagactctgtatttggcagatttccataccttttgccctgtctaagtgtatcagcgtttgctacacttgtcctgataagctgtgagtggcttccggagactatacacaagcataaggttcccgaaatggacaccaaagcattcaaagccctgtcgtcaaaagagggctattgcgatccacctcgcaagaagaagagcttgctccagaacaggccttggatatcaaccctgctaccttactgctttttcagtcttcatgacacagcatatagtgagatactttccttatgggctgtgagcgaccggaagtatggcggccttagcttctcgactgaagatactggtcaggttcttgctatggcaggcgctagtcttctagtgtaccagcttgtcatttatcgctgggtccatagaattcttgggacagtcaactcagcacgaattgcatctgctgtgtccatacttgttcttgcaacttatccctttatgacatacctatcgggagtgaaactttccttggctctttgttccgcagccatgatgagaagtgctcttgcgatcactgtcaccacaggaatttcacttctacagaataatgctgtgtgccaagaacaaagaggcaccgcaaatggtatatcgacaactgcaatgtcattcttcaagtcaattgctccagtaggtgcaggggctctattctcatgggcacaaaaacgtcaagatgttgctttcctgccaggtgatcaagtggtgttcatggtgctgaatttggtgcagcttctcgggctgatatccacctttgagccctttctagtgttacctgcactaccagagtagtagtgtttaaggctagaagacattatgaaaataaatgtaccttggcacatagttacagttgatcgagtgcaagacagaaggaacatgattgtagccacttgttacactactaaagatgtctgattagcccaagattcaaaaagaagaatgttttattaattagcaaacttgatctattgtaatatcactgttccccaaaaaaaaaaaaaaaaaaaaaaaaaaaaaaaaaaaaaaaaaaaaacctcgggggggggcccggt

SEQ ID NO: 22558 - protein, 443 aa, Zea mays subsp. mays
  peptide (1)..(443): Ceres Seq. ID no. 13599721
  misc_feature (12)..(439): NCBI GI NO: 23452823 NR Description: major facilitator superfamily antiporter
  misc_feature (53)..(439): NCBI GI NO: 23452819 NR Description: major facilitator superfamily antiporter
  misc_feature (10)..(436): NCBI GI NO: 30684565 NR Description: transporter-related protein [Arabidopsis thaliana]
  misc_feature (15)..(439): NCBI GI NO: 23452821 NR Description: major facilitator superfamily antiporter
  misc_feature (10)..(436): NCBI GI NO: 20260160 NR Description: transporter-like protein [Arabidopsis thaliana]
  misc_feature (10)..(436): NCBI GI NO: 22326785 NR Description: transporter - related [Arabidopsis thaliana]
  misc_feature (10)..(413): NCBI GI NO: 10177340 NR Description: transporter-like protein [Arabidopsis thaliana]
  misc_feature (24)..(436): NCBI GI NO: 15229781 NR Description: transporter - related [Arabidopsis thaliana]
  misc_feature (53)..(436): NCBI GI NO: 30684567 NR Description: transporter-related protein [Arabidopsis thaliana]
  misc_feature (53)..(436): NCBI GI NO: 21555230 NR Description: transporter-like protein [Arabidopsis thaliana]
MVLSAGGLGLLISLTLPITCLFPFLYFMVRDFRVAETEEDIGFYAGFLAASYMVGRGFSSIFWGVIADRVGRKPVITFSILSVVVFSALFGLSTTYWMAIATRLVLGALNGLLAPIKAYCVEVCQTQHQALGLSLVNTAWALGLIVGPALGGYLSQPAEKYPHVFSKDSVFGRFPYLLPCLSVSAFATLVLISCEWLPETIHKHKVPEMDTKAFKALSSKEGYCDPPRKKKSLLQNRPWISTLLPYCFFSLHDTAYSEILSLWAVSDRKYGGLSFSTEDTGQVLAMAGASLLVYQLVIYRWVHRILGTVNSARIASAVSILVLATYPFMTYLSGVKLSLALCSAAMMRSALAITVTTGISLLQNNAVCQEQRGTANGISTTAMSFFKSIAPVGAGALFSWAQKRQDVAFLPGDQVVFMVLNLVQLLGLISTFEPFLVLPALPE

SEQ ID NO: 22559 - protein, 416 aa, Zea mays subsp. mays
  peptide (1)..(416): Ceres Seq. ID no. 13599722
  misc_feature (1)..(412): NCBI GI NO: 23452823 NR Description: major facilitator superfamily antiporter
  misc_feature (26)..(412): NCBI GI NO: 23452819 NR Description: major facilitator superfamily antiporter
  misc_feature (1)..(409): NCBI GI NO: 30684565 NR Description: transporter-related protein [Arabidopsis thaliana]
  misc_feature (1)..(412): NCBI GI NO: 23452821 NR Description: major facilitator superfamily antiporter
  misc_feature (1)..(409): NCBI GI NO: 20260160 NR Description: transporter-like protein [Arabidopsis thaliana]
  misc_feature (1)..(409): NCBI GI NO: 22326785 NR Description: transporter - related [Arabidopsis thaliana]
  misc_feature (1)..(386): NCBI GI NO: 10177340 NR Description: transporter-like protein [Arabidopsis thaliana]
  misc_feature (1)..(409): NCBI GI NO: 15229781 NR Description: transporter - related [Arabidopsis thaliana]
  misc_feature (26)..(409): NCBI GI NO: 30684567 NR Description: transporter-related protein [Arabidopsis thaliana]
  misc_feature (26)..(409): NCBI GI NO: 21555230 NR Description: transporter-like protein [Arabidopsis thaliana]
MVRDFRVAETEEDIGFYAGFLAASYMVGRGFSSIFWGVIADRVGRKPVITFSILSVVVFSALFGLSTTYWMAIATRLVLGALNGLLAPIKAYCVEVCQTQHQALGLSLVNTAWALGLIVGPALGGYLSQPAEKYPHVFSKDSVFGRFPYLLPCLSVSAFATLVLISCEWLPETIHKHKVPEMDTKAFKALSSKEGYCDPPRKKKSLLQNRPWISTLLPYCFFSLHDTAYSEILSLWAVSDRKYGGLSFSTEDTGQVLAMAGASLLVYQLVIYRWVHRILGTVNSARIASAVSILVLATYPFMTYLSGVKLSLALCSAAMMRSALAITVTTGISLLQNNAVCQEQRGTANGISTTAMSFFKSIAPVGAGALFSWAQKRQDVAFLPGDQVVFMVLNLVQLLGLISTFEPFLVLPALPE

SEQ ID NO: 22560 - protein, 391 aa, Zea mays subsp. mays
  peptide (1)..(391): Ceres Seq. ID no. 13599723
  misc_feature (1)..(387): NCBI GI NO: 23452823 NR Description: major facilitator superfamily antiporter
  misc_feature (1)..(387): NCBI GI NO: 23452819 NR Description: major facilitator superfamily antiporter
  misc_feature (1)..(384): NCBI GI NO: 30684565 NR Description: transporter-related protein [Arabidopsis thaliana]
  misc_feature (1)..(387): NCBI GI NO: 23452821 NR Description: major facilitator superfamily antiporter
  misc_feature (1)..(384): NCBI GI NO: 20260160 NR Description: transporter-like protein [Arabidopsis thaliana]
  misc_feature (1)..(384): NCBI GI NO: 22326785 NR Description: transporter - related [Arabidopsis thaliana]
  misc_feature (1)..(361): NCBI GI NO: 10177340 NR Description: transporter-like protein [Arabidopsis thaliana]
  misc_feature (1)..(384): NCBI GI NO: 15229781 NR Description: transporter - related [Arabidopsis thaliana]
  misc_feature (1)..(384): NCBI GI NO: 30684567 NR Description: transporter-related protein [Arabidopsis thaliana]
  misc_feature (1)..(384): NCBI GI NO: 21555230 NR Description: transporter-like protein [Arabidopsis thaliana]
MVGRGFSSIFWGVIADRVGRKPVITFSILSVVVFSALFGLSTTYWMAIATRLVLGALNGLLAPIKAYCVEVCQTQHQALGLSLVNTAWALGLIVGPALGGYLSQPAEKYPHVFSKDSVFGRFPYLLPCLSVSAFATLVLISCEWLPETIHKHKVPEMDTKAFKALSSKEGYCDPPRKKKSLLQNRPWISTLLPYCFFSLHDTAYSEILSLWAVSDRKYGGLSFSTEDTGQVLAMAGASLLVYQLVIYRWVHRILGTVNSARIASAVSILVLATYPFMTYLSGVKLSLALCSAAMMRSALAITVTTGISLLQNNAVCQEQRGTANGISTTAMSFFKSIAPVGAGALFSWAQKRQDVAFLPGDQVVFMVLNLVQLLGLISTFEPFLVLPALPE

SEQ ID NO: 22561 - DNA, 1575 bp, Zea mays subsp. mays
  misc_feature (1)..(1575): Ceres Seq. ID no. 13599832
gaggagagagagagctcactagtcccccccccccccccccccccgatggattaagaagcagtgattgttggttgctgttgaaggaagttgctttgggtggagaaaccatggattttccacctgagttgcaagaggttgcaggaactcttgttgcaatggtgaagggttcacctttagctgctaaagctattgggcaaatggcaaggagcaccaggagcacacggaaatggagaaccctggtgaacacagaaattagtaatgatatcattatctcttcatccaactcagttataaacacttgccaggtcatctccagcgctgctttgcatactgcagcatatttccatcaacttggaggttcagtcgctctcagttggtcaatatgtggatagctctcggtttcattcaatcatcagcagaagggaaagggctggaagaattagggcaaaaatactttgatgatctcctatcacgatccttctttggtactgcaaataaagaccagcaaacatattacttccttgatgacctaatgcacattttggcacagcacttctctgctcatgattgtatgaaaatcaacgagggcatccctgttgtgattccaccaacagttcgtcatctgtctgtttcaaccgattatttaccacagctgaagagcaaatacaggttgggaaggcttcaaacattgttagtcctcagaagctcgtcattatcttcaggtcatttgcctagaaaacttctggccaaatttaagaacttgcgggtcctggatctgagtggatctgatattgtagaattgccagaaagcattaatcagttggtacatcttcattacctagctatctgcagtataactaacaaacttcccaagactatatacatgcttaaacatcttgaggtgtgtgatatacctatattcttatttcatgatgatcatcctagaggtgttggtaaatctgttacagttaaacgtctcaaaacatgctgtggcaagcaggcaagatcagttaagtccttgattgatgtgtaaggactgttataggaattggattaaccttcacgacttattagtcattcgatcagccgatgtctgactttcagaatcaaattttacagtaatcccagcagcaggcatgaagtgcaatttttcttttcaattcgacaccttcaagctctagaatccatttctactcagcctgtttatgtgatttggtgtcagaataactccagtttggtggatcaagaatctggttgtgttggtttgtttgatagtcccaggttggtactttgcaacctttcaagccctctttattgcaggactacttggctgttttgcctatccgcaacttatgtatagttattttatttttacttttattttttttatttccatttgtaaggtattccattttggttttcactgccaactggtgcaaacaagaccgttgcaacagggaaaaaatagactatgataccataactaaaaaaaaaaaaaaaaaaactcgagggggggcccggtacccaattcgccctwkttaaacacaataaagttggaactggaggggtgaaagg

SEQ ID NO: 22562 - protein, 216 aa, Zea mays subsp. mays
  peptide (1)..(216): Ceres Seq. ID no. 15218626
  misc_feature (1)..(199): NCBI GI NO: 38345280 NR Description: OSJNBb0060M15.6
  misc_feature (1)..(199): NCBI GI NO: 6606266 NR Description: Vrga1 [Aegilops ventricosa]
  misc_feature (1)..(177): NCBI GI NO: 34896592 NR Description: putative resistance protein [Oryza sativa]
  misc_feature (1)..(174): NCBI GI NO: 38373627 NR Description: NBS-LRR type disease resistance protein Hom-F
  misc_feature (1)..(200): NCBI GI NO: 34909106 NR Description: putative NBS-LRR type resistance protein
  misc_feature (1)..(174): NCBI GI NO: 22652532 NR Description: NBS-LRR-like protein
  misc_feature (1)..(174): NCBI GI NO: 38373629 NR Description: NBS-LRR type disease resistance protein Hom-B
  misc_feature (1)..(173): NCBI GI NO: 7489501 NR Description: NBS-LRR type resistance protein - rice (fragment)
  misc_feature (1)..(174): NCBI GI NO: 4234955 NR Description: NBS-LRR-like protein cD8 [Phaseolus vulgaris]
  misc_feature (1)..(172): NCBI GI NO: 14348619 NR Description: NBS-LRR resistance-like protein J71
MWIALGFIQSSAEGKGLEELGQKYFDDLLSRSFFGTANKDQQTYYFLDDLMHILAQHFSAHDCMKINEGIPVVIPPTVRHLSVSTDYLPQLKSKYRLGRLQTLLVLRSSSLSSGHLPRKLLAKFKNLRVLDLSGSDIVELPESINQLVHLHYLAICSITNKLPKTIYMLKHLEVCDIPIFLFHDDHPRGVGKSVTVKRLKTCCGKQARSVKSLIDV

SEQ ID NO: 22563 - protein, 166 aa, Zea mays subsp. mays
  peptide (1)..(166): Ceres Seq. ID no. 15218627
  misc_feature (1)..(149): NCBI GI NO: 38345280 NR Description: OSJNBb0060M15.6
  misc_feature (1)..(149): NCBI GI NO: 6606266 NR Description: Vrga1 [Aegilops ventricosa]
  misc_feature (1)..(127): NCBI GI NO: 34896592 NR Description: putative resistance protein [Oryza sativa]
  misc_feature (1)..(124): NCBI GI NO: 38373627 NR Description: NBS-LRR type disease resistance protein Hom-F
  misc_feature (1)..(150): NCBI GI NO: 34909106 NR Description: putative NBS-LRR type resistance protein
  misc_feature (1)..(124): NCBI GI NO: 22652532 NR Description: NBS-LRR-like protein
  misc_feature (1)..(124): NCBI GI NO: 38373629 NR Description: NBS-LRR type disease resistance protein Hom-B
  misc_feature (1)..(123): NCBI GI NO: 7489501 NR Description: NBS-LRR type resistance protein - rice (fragment)
  misc_feature (1)..(124): NCBI GI NO: 4234955 NR Description: NBS-LRR-like protein cD8 [Phaseolus vulgaris]
  misc_feature (1)..(122): NCBI GI NO: 14348619 NR Description: NBS-LRR resistance-like protein J71
MHILAQHFSAHDCMKINEGIPVVIPPTVRHLSVSTDYLPQLKSKYRLGRLQTLLVLRSSSLSSGHLPRKLLAKFKNLRVLDLSGSDIVELPESINQLVHLHYLAICSITNKLPKTIYMLKHLEVCDIPIFLFHDDHPRGVGKSVTVKRLKTCCGKQARSVKSLIDV

SEQ ID NO: 22564 - protein, 153 aa, Zea mays subsp. mays
  peptide (1)..(153): Ceres Seq. ID no. 15218628
  misc_feature (1)..(136): NCBI GI NO: 38345280 NR Description: OSJNBb0060M15.6
  misc_feature (1)..(136): NCBI GI NO: 6606266 NR Description: Vrga1 [Aegilops ventricosa]
  misc_feature (1)..(114): NCBI GI NO: 34896592 NR Description: putative resistance protein [Oryza sativa]
  misc_feature (1)..(111): NCBI GI NO: 38373627 NR Description: NBS-LRR type disease resistance protein Hom-F
  misc_feature (1)..(137): NCBI GI NO: 34909106 NR Description: putative NBS-LRR type resistance protein
  misc_feature (1)..(111): NCBI GI NO: 22652532 NR Description: NBS-LRR-like protein
  misc_feature (1)..(111): NCBI GI NO: 38373629 NR Description: NBS-LRR type disease resistance protein Hom-B
  misc_feature (1)..(110): NCBI GI NO: 7489501 NR Description: NBS-LRR type resistance protein - rice (fragment)
  misc_feature (1)..(111): NCBI GI NO: 4234955 NR Description: NBS-LRR-like protein cD8 [Phaseolus vulgaris]
  misc_feature (1)..(109): NCBI GI NO: 14348619 NR Description: NBS-LRR resistance-like protein J71
MKINEGIPVVIPPTVRHLSVSTDYLPQLKSKYRLGRLQTLLVLRSSSLSSGHLPRKLLAKFKNLRVLDLSGSDIVELPESINQLVHLHYLAICSITNKLPKTIYMLKHLEVCDIPIFLFHDDHPRGVGKSVTVKRLKTCCGKQARSVKSLIDV

SEQ ID NO: 22565 - DNA, 1985 bp, Zea mays subsp. mays
  misc_feature (1)..(1985): Ceres Seq. ID no. 15227157
ctagtccccccccccccccattaaaccctaaccctaaaataacggtttgttttgctctctcggtttccatgggtgtggctgagaccaagtctctcagtggccgaaaccctagatttagtgttagttaaaccctaacccgagagatctaaaattcttaaatctggtttgtttatttttctgcatctgaaccactgcagggagttcaggagttttgtgtctagattcttaaatctgaataaacaagttgaatatattaactgcaatgaaaacatatagatgtcatctgccacctatctccacgcacagtctggctcgacatcacctgcccttctcgtgatatctgattactgttttgctagtgctagctatcgatgctgttcggggattagtagtgttctatttcatcctcttaatgtgttcgcatcagatagatatatgttcatatgatttaaggatatcctgtcagcagcttacacatttgtctatctccatgcttcctttctttagttggagactggattattttttgttgggataaacttagtacattatcagagcatcttaactctggatatgggtgcctttaagggatatccaataaacaaaatttgaacacatttggtttgtcgtataggtacaaagccagcacatgcttgggcaggtttgatcagtttcactaggaactgttcactaattgactgtctcagtaatacaattgaatagcctgcaactcagttaaccatgactttcttcgtcatagtttctttagctgaattattttgcacatattacatggatgtgcactacccatgttgttcaatatcccacatcaatatcgaattgagtatgatgactgatgacaactaccagttattgtttcttgaattggcaacaacttggtctgtgagtcattcccactttgcccctacccttgctgagtagtgtcattcttttaggcataccttatagatgaatgattttttacattactgccttccccagtccccatcccaccccatttttttgtatcttagaaaatgtgacttggacaataagatgttgcttgagttacttacatttcttaaaagtattgattagtcttgcatctggatgcaggagctctgcagtaaaggaagtgtgtagtcaccatggtccatttcaagaataggtacatggtggtggagatctttatagatgcaggtagaggtgaacaggaccctgtaatcctcacccaatttaatataacaaaagttataaaagacagcattcagctcaactttggagagtgtggcctagctggatctcttggatcattgcaagttaagtatgttaatcctgtaacgaagctctgcatcgtccgcttgtctcgcgaagaccaccaaaaagtttgggctgctatgacgatggtgcggtgcattgggaagatccccgtttcgttcaacttgctcgacatgagtggaagcatcagggcttgcaagaaagctgcactggagtgcgatgaagcgaaatttgagcaatacaagctggctgcaggtgattgtatcacggcagagatcatccagtctgtagagaagtgctttgagaagatcagaggactagagagctaagcagaagaattgacatcacgtccacccaccctcggatcctaaaacctgctgaccctgcaccgcatccgtgatcacgtcacaccacaagctgtgtgtcctggctccagcgcccaccacggcaacggcctctcgccacttgctgccagcagcctccgtgcctccatcagctctcctttccaaggaaaagtctgaagtctgcaaccaaacaagtgttctgcagctgctctttgccgttggttgaagtctgcaaccaaacaaatgttatgcagctgctctttgccgttggttggagttctcggctccacactttcagaaagaattcatgtatacataaaatttattatatagagagtttgcttcgtatattagtaatttttt

SEQ ID NO: 22566 - protein, 152 aa, Zea mays subsp. mays
  peptide (1)..(152): Ceres Seq. ID no. 15227158
  misc_feature (7)..(94): Pfam Name: Pfam Description:  Rpp14 family
  misc_feature (1)..(152): NCBI GI NO: 38343977 NR Description: OSJNBa0041M21.1
  misc_feature (6)..(152): NCBI GI NO: 38568007 NR Description: OSJNBb0068N06.26
  misc_feature (1)..(152): NCBI GI NO: 22329330 NR Description: Probable lipoate-protein ligase B -related
  misc_feature (1)..(94): NCBI GI NO: 3122357 NR Description: Probable lipoate-protein ligase
  misc_feature (1)..(126): NCBI GI NO: 19075979 NR Description: putative pre-tRNA/pre-rRNA processing protein
  misc_feature (1)..(115): NCBI GI NO: 20270249 NR Description: RNase MRP/RNase P protein-like isoform a
MVHFKNRYMVVEIFIDAGRGEQDPVILTQFNITKVIKDSIQLNFGECGLAGSLGSLQVKYVNPVTKLCIVRLSREDHQKVWAAMTMVRCIGKIPVSFNLLDMSGSIRACKKAALECDEAKFEQYKLAAGDCITAEIIQSVEKCFEKIRGLES

SEQ ID NO: 22567 - protein, 144 aa, Zea mays subsp. mays
  peptide (1)..(144): Ceres Seq. ID no. 15227159
  misc_feature (1)..(86): Pfam Name: Pfam Description:  Rpp14 family
  misc_feature (1)..(144): NCBI GI NO: 38343977 NR Description: OSJNBa0041M21.1
  misc_feature (1)..(144): NCBI GI NO: 38568007 NR Description: OSJNBb0068N06.26
  misc_feature (1)..(144): NCBI GI NO: 22329330 NR Description: Probable lipoate-protein ligase B -related
  misc_feature (1)..(86): NCBI GI NO: 3122357 NR Description: Probable lipoate-protein ligase
  misc_feature (1)..(118): NCBI GI NO: 19075979 NR Description: putative pre-tRNA/pre-rRNA processing protein
  misc_feature (1)..(107): NCBI GI NO: 20270249 NR Description: RNase MRP/RNase P protein-like isoform a
MVVEIFIDAGRGEQDPVILTQFNITKVIKDSIQLNFGECGLAGSLGSLQVKYVNPVTKLCIVRLSREDHQKVWAAMTMVRCIGKIPVSFNLLDMSGSIRACKKAALECDEAKFEQYKLAAGDCITAEIIQSVEKCFEKIRGLES

SEQ ID NO: 22568 - DNA, 2120 bp, Zea mays subsp. mays
  misc_feature (1)..(2120): Ceres Seq. ID no. 13599881
taaatggcttacgcccgaggggcttattcttccttatcatggtatgatataattatcatacaaaaatgttacactgcttttacagggtgtacctcatctatttgcttgtacaattcatcttactactgctttgacaaacattggtctgcactgctttggtctgtgctttaggattctgtttcattgggagaaacaaatgcccttgcttacttttatttatgcttttctgaataattaagaagactagcctcatgttggaatcttcagcgttatatataatacaaaaaaagaggtttgcaatgaaaagttaaaaaggggacttttctccaatacaaggaatcatcttgacagaatataaaacttttcttctaaacatagcatacaatggttttagctgattattgtgtatttcagaagatggtgaattgtgtgaatacttccctagccctttttgctacatcgaggtcttcaggaggaaccttgcttttgacaccaggaatgttgtaagcattacagtatgcaattagttccttctttattaccatatatatgaacttaggtgttcctctactgaccaggcttcagaccaatctggagaagtgtcaggtcatacccatccagttatccatggtcaaacttgcctttgtacaggagattttcagctgtcagattgctcctttcccctgccactacttaggtgttcctctctcaatctacaagcctaaacacagtaaggattaaggagcagccgttgtatacttgtatataattgtggatagaattcccacttggatgggcaacatgctaaatttagctgggcgagctaccttggtgaaggtcacacactctgcaattccgatattcatctccattgacacctgtttgtcggtatgggccattgaacagattgatctgtcaccctactgagcttggtagggtatgccctcatattaaggtgggaatggcttcacataactgacccatatcgtacttggattgatcttctgagtctggcttgatggttcctcaattaagcatgtggctgatctgtgcaactgtgggtagataaattcattggatttttttttgctgaggttgctttttttgcatccgtgtctatgtcgacatagaggcatcattatggtgcatgataataaaaactatttgtaaacctttgttgtacatgcccagattggggaagactttacagtcgataactttactatatacccttctttgtcaaggctttgatgataagccaatggttaaaagggttgtcattgtaacccccacaagcttagttagcaactgggaatctgagataattaagtggttgaaaggcagagtgcaggtgctggccatctgtgaaagcacacgtgctgatgttctttccggaattgaaagtttcttaaaacccttgagccgtctccatgttttcttttgcttactaattatttgttaatatacactatactaaatgaaaatgtagctgcaagttaatgacaatttctgtggtgcatgaataatcttcaggtacttatcatatcttatgagactttccgcatgcattcttcatgcgcgcaccaagtgcgcgcagtgccataccgtggagcgaggtggcgcgcacaggcaggggcccaacctgcacggcctcttcggtcgtcagtcaggcaccaccctcggctaagcctactccacgaccaacaagaacatggtcatcgtctgggaggagggcaccctgtacgactacctcttcaaccccaagaagtacattctaggcacaaagatggtcttcccggggctcaagaagcccaaggaacgaaccgatctcatcgcctacttgacctatcgacgcaacaggggatactcacactgtcatccttagctctgtggcaataagtcgttcgtctgcaacacagccgacagaaaactgagcatgtgcttcagagaccaggcattattgaactttgctgccactaatttacattagatgaactgagttacagcagaatgaatttcctggatcctaaatgcagagaataaataaataaaaatatataaaaggaaaaaaaaaaaaaaaaaaaaaaaaaaaaaaaaaaaaacctcgagggggggcccgg

SEQ ID NO: 22569 - protein, 126 aa, Zea mays subsp. mays
  peptide (1)..(126): Ceres Seq. ID no. 13599882
  misc_feature (4)..(19): NCBI GI NO: 22331177 NR Description: DNA repair protein RAD54, putative
  misc_feature (4)..(19): NCBI GI NO: 9294624 NR Description: DNA repair protein RAD54-like
MNNLQVLIISYETFRMHSSCAHQVRAVPYRGARWRAQAGAQPARPLRSSVRHHPRLSLLHDQQEHGHRLGGGHPVRLPLQPQEVHSRHKDGLPGAQEAQGTNRSHRLLDLSTQQGILTLSSLALWQ

SEQ ID NO: 22570 - protein, 111 aa, Zea mays subsp. mays
  peptide (1)..(111): Ceres Seq. ID no. 13599883
MHSSCAHQVRAVPYRGARWRAQAGAQPARPLRSSVRHHPRLSLLHDQQEHGHRLGGGHPVRLPLQPQEVHSRHKDGLPGAQEAQGTNRSHRLLDLSTQQGILTLSSLALWQ

SEQ ID NO: 22571 - protein, 104 aa, Zea mays subsp. mays
  peptide (1)..(104): Ceres Seq. ID no. 13599884
  misc_feature (16)..(96): Pfam Name: Pfam Description:  SNF2 family N-terminal domain
  misc_feature (16)..(96): NCBI GI NO: 22331177 NR Description: DNA repair protein RAD54, putative
  misc_feature (16)..(96): NCBI GI NO: 9294624 NR Description: DNA repair protein RAD54-like
  misc_feature (16)..(94): NCBI GI NO: 3329473 NR Description: RAD54 DNA repair protein [Drosophila melanogaster]
  misc_feature (16)..(94): NCBI GI NO: 1765914 NR Description: RAD54 [Drosophila melanogaster]
  misc_feature (16)..(94): NCBI GI NO: 27819922 NR Description: LD35220p [Drosophila melanogaster]
  misc_feature (16)..(87): NCBI GI NO: 23482686 NR Description: DNA repair protein RAD54-like-related
  misc_feature (16)..(87): NCBI GI NO: 23612971 NR Description: DNA repair protein rad54, putative
  misc_feature (16)..(88): NCBI GI NO: 28277973 NR Description: Similar to RAD54-like (S. cerevisiae)
  misc_feature (16)..(88): NCBI GI NO: 26353994 NR Description: unnamed protein product [Mus musculus]
  misc_feature (16)..(88): NCBI GI NO: 26326753 NR Description: unnamed protein product [Mus musculus]
MIIKTICKPLLYMPRLGKTLQSITLLYTLLCQGFDDKPMVKRVVIVTPTSLVSNWESEIIKWLKGRVQVLAICESTRADVLSGIESFLKPLSRLHVFFCLLIIC

SEQ ID NO: 22572 - DNA, 875 bp, Zea mays subsp. mays
  misc_feature (1)..(875): Ceres Seq. ID no. 13599820
gtccccccccccccccccgcgacgcctccgatgcggatgaggatgtgccttcggaggaaggcgaggatatggacgaagatgacaatgacgacggtgatgatgaggagaagcagataagaatacttcaggagacgaccggaatgcccagagaagccttcgatggaaagactcgaagcttaagcatgtcattatttctgaacatgtagataagaagactgaaaagtatttggtaaggaaactgcctttcccttacacttcgaaagatgtgtatgagcagagcattcgaatgcctattgggcctgatttcaacccagcgatatcagtttctgctctcaatcgacctgcgattgttaagaagcctggtgttatcattaaaccaatacaatacgaggaggttaatccccatgagaagctcgatgaaacaacgtgtcattcagagagcaaccccaaaccggaatgcaaagaaagcctttgccaaacaaggaaaaagcgtaacttcacaaaagagaaagtgacgagacagtcatcttctcgtcaatggcttcatttggacaaaggagagctcatccgaattttgttgcccccgccgaatttgcacatgcatggctccaggtgtgtgcagtgattcttccctttatgaaagttcccgcttcggcgcatgacccatgggcaaaaggtttcacaccactggtttatgagagcagagaaattttggtacaagtagttctgtatttgttatttattgcattcgccacgcatcgtccaaatgagacggatgctatatttcagttctgatgatggccactggttaactaaaaaaaaaaaaaaaaaaaagaaaaaaaaaaaaaaaaaaaactcgagggggggcccggtac

SEQ ID NO: 22573 - protein, 112 aa, Zea mays subsp. mays
  peptide (1)..(112): Ceres Seq. ID no. 15218895
  misc_feature (1)..(55): NCBI GI NO: 15242319 NR Description: hypothetical protein [Arabidopsis thaliana]
  misc_feature (1)..(68): NCBI GI NO: 30679129 NR Description: expressed protein [Arabidopsis thaliana]
  misc_feature (1)..(68): NCBI GI NO: 7487011 NR Description: hypothetical protein T14P8
  misc_feature (1)..(68): NCBI GI NO: 23599203 NR Description: RIKEN cDNA 2700066J21 [Mus musculus]
  misc_feature (1)..(33): NCBI GI NO: 6323546 NR Description: part of small
  misc_feature (1)..(33): NCBI GI NO: 19114287 NR Description: hypothetical coiled-coil protein
  misc_feature (1)..(68): NCBI GI NO: 34881594 NR Description: similar to KIAA0266 gene product
MPIGPDFNPAISVSALNRPAIVKKPGVIIKPIQYEEVNPHEKLDETTCHSESNPKPECKESLCQTRKKRNFTKEKVTRQSSSRQWLHLDKGELIRILLPPPNLHMHGSRCVQ

SEQ ID NO: 22574 - protein, 85 aa, Zea mays subsp. mays
  peptide (1)..(85): Ceres Seq. ID no. 15218896
MASFGQRRAHPNFVAPAEFAHAWLQVCAVILPFMKVPASAHDPWAKGFTPLVYESREILVQVVLYLLFIAFATHRPNETDAIFQF

SEQ ID NO: 22575 - protein, 83 aa, Zea mays subsp. mays
  peptide (1)..(83): Ceres Seq. ID no. 15218897
MCMSRAFECLLGLISTQRYQFLLSIDLRLLRSLVLSLNQYNTRRLIPMRSSMKQRVIQRATPNRNAKKAFAKQGKSVTSQKRK

SEQ ID NO: 22576 - DNA, 1832 bp, Zea mays subsp. mays
  misc_feature (1)..(1832): Ceres Seq. ID no. 15225188
aagatgttcttaaggttggaccccactattctgaatatgcatgtcgtagcaggcaaagacgatctctaagtagagattctacaattcatggtgatgaatctgatccgatgtccacagataatgaagaaaatatggtagttgaacgtgagatacatgtaaattatgaggaaccaattaatggtactgctgtgacatatacatctgggcagtcacaacatcctacaagtcttgactatgaactagatgcaataggtgtactagataccagttctgcagtccctttcagtaataaaaagtctctttctcctgctggacaggaccagcaagtgcttaagatgaccacaacagcactagataactgccttcttgtgcctaatctcgatgatttgatgcctaagcatgagcaaattgaataccatcaagctgatgattacccagccacttatgatcctcatatagcatcagattctcctgaggagattaatcaccacctaggggatgtcagtgaaaccctttgtattctacctgatgtattagaatcgccagcgaactccaaccaaaagatgaccagcaaagtccmaatgtctgttcttgaatcttccatggacggagaagatgtttactctggggattttgagaagatcagtgcagatctccaagagctcagattgcaacttgggcttctgaagagggagactacagacactagagatggcagcgagctttctatattgagtgatgacgagacagcacgtcgatcacttcctgagacgggggaatcccatgcttttaggaatacggaagaaagggacttctcctacgtgttcgatatgcttgttgctctgggcattcacgcggccaacgaggatgacctccttgacaactgctacttactggagtgctctgcaggccttgatttatacgatgacctcgaacagaagtacgacagcctcattttatggactgtgcatgagaggaagctcttgtttgatatcacgaatgctgttcttggggacatgatcacctccgtgatgaacggctgctcgaagggactgatggcgaggtgctcgcctggatggaatcgggaagagtttgctgagctcgtgtggcaaagggtggtgcagctccggcaagagatagagttcaaccaggaagccctgctgttgagcgtagagtgggctggctctgaagatggcgccagtctggtcgggcgcgatatcgggaatatgttgcaagatgatctcgtacaggaaattatagctgactttctgggggcaactaaatccgccaagctccgtggctagaattgccagtgtttgcacccgaggccattggaagcatatgcatatggattggtcgctggtgaactctagtggacgatgagccttcgatgaattgcttaacgaggggactgtaattcaaggaattcacctcatggctactgaagacatgagctaagatggcttaggtgatggtggggcatcaaacagcagtgtcgaagtttgacctggttgtgtcatgctcgtcagctcatcaccattggctccgaactcagcaatagcgtacaactggatgatttcccccctctgaactctgaaaagcaattttttttcattaggttatcataatgctggaatatagatgcacaattttggtgtaaaataatctctggcggattttagtttgtttatcatgggatgcaataagggcagtgtcagttgagacatctttatctgccaaaaaaaaaaaaaaaaaaaaaaaaagaaaaaaaaaaaaaaaaaaactcgagggggggcccggaacccaattcgcccaatagggagccgaataac

SEQ ID NO: 22577 - protein, 433 aa, Zea mays subsp. mays
  peptide (1)..(433): Ceres Seq. ID no. 15225189
  misc_feature (263)..(421): NCBI GI NO: 29124124 NR Description: hypothetical protein
  misc_feature (149)..(419): NCBI GI NO: 21928151 NR Description: AT3g53540/F4P12_240 [Arabidopsis thaliana]
  misc_feature (163)..(423): NCBI GI NO: 34897354 NR Description: hypothetical protein [Oryza sativa]
  misc_feature (193)..(193): Xaa is any aa, unknown or other
DVLKVGPHYSEYACRSRQRRSLSRDSTIHGDESDPMSTDNEENMVVEREIHVNYEEPINGTAVTYTSGQSQHPTSLDYELDAIGVLDTSSAVPFSNKKSLSPAGQDQQVLKMTTTALDNCLLVPNLDDLMPKHEQIEYHQADDYPATYDPHIASDSPEEINHHLGDVSETLCILPDVLESPANSNQKMTSKVXMSVLESSMDGEDVYSGDFEKISADLQELRLQLGLLKRETTDTRDGSELSILSDDETARRSLPETGESHAFRNTEERDFSYVFDMLVALGIHAANEDDLLDNCYLLECSAGLDLYDDLEQKYDSLILWTVHERKLLFDITNAVLGDMITSVMNGCSKGLMARCSPGWNREEFAELVWQRVVQLRQEIEFNQEALLLSVEWAGSEDGASLVGRDIGNMLQDDLVQEIIADFLGATKSAKLRG

SEQ ID NO: 22578 - protein, 398 aa, Zea mays subsp. mays
  peptide (1)..(398): Ceres Seq. ID no. 15225190
  misc_feature (228)..(386): NCBI GI NO: 29124124 NR Description: hypothetical protein
  misc_feature (114)..(384): NCBI GI NO: 21928151 NR Description: AT3g53540/F4P12_240 [Arabidopsis thaliana]
  misc_feature (128)..(388): NCBI GI NO: 34897354 NR Description: hypothetical protein [Oryza sativa]
  misc_feature (158)..(158): Xaa is any aa, unknown or other
MSTDNEENMVVEREIHVNYEEPINGTAVTYTSGQSQHPTSLDYELDAIGVLDTSSAVPFSNKKSLSPAGQDQQVLKMTTTALDNCLLVPNLDDLMPKHEQIEYHQADDYPATYDPHIASDSPEEINHHLGDVSETLCILPDVLESPANSNQKMTSKVXMSVLESSMDGEDVYSGDFEKISADLQELRLQLGLLKRETTDTRDGSELSILSDDETARRSLPETGESHAFRNTEERDFSYVFDMLVALGIHAANEDDLLDNCYLLECSAGLDLYDDLEQKYDSLILWTVHERKLLFDITNAVLGDMITSVMNGCSKGLMARCSPGWNREEFAELVWQRVVQLRQEIEFNQEALLLSVEWAGSEDGASLVGRDIGNMLQDDLVQEIIADFLGATKSAKLRG

SEQ ID NO: 22579 - protein, 390 aa, Zea mays subsp. mays
  peptide (1)..(390): Ceres Seq. ID no. 15225191
  misc_feature (220)..(378): NCBI GI NO: 29124124 NR Description: hypothetical protein
  misc_feature (106)..(376): NCBI GI NO: 21928151 NR Description: AT3g53540/F4P12_240 [Arabidopsis thaliana]
  misc_feature (120)..(380): NCBI GI NO: 34897354 NR Description: hypothetical protein [Oryza sativa]
  misc_feature (150)..(150): Xaa is any aa, unknown or other
MVVEREIHVNYEEPINGTAVTYTSGQSQHPTSLDYELDAIGVLDTSSAVPFSNKKSLSPAGQDQQVLKMTTTALDNCLLVPNLDDLMPKHEQIEYHQADDYPATYDPHIASDSPEEINHHLGDVSETLCILPDVLESPANSNQKMTSKVXMSVLESSMDGEDVYSGDFEKISADLQELRLQLGLLKRETTDTRDGSELSILSDDETARRSLPETGESHAFRNTEERDFSYVFDMLVALGIHAANEDDLLDNCYLLECSAGLDLYDDLEQKYDSLILWTVHERKLLFDITNAVLGDMITSVMNGCSKGLMARCSPGWNREEFAELVWQRVVQLRQEIEFNQEALLLSVEWAGSEDGASLVGRDIGNMLQDDLVQEIIADFLGATKSAKLRG

SEQ ID NO: 22580 - DNA, 2498 bp, Zea mays subsp. mays
  misc_feature (1)..(2498): Ceres Seq. ID no. 13574538
  misc_feature (457)..(457): n is a, c, t, g, unknown, or other
  misc_feature (458)..(458): n is a, c, t, g, unknown, or other
agactggtgagagcaagaggatggatcaggagcttgagccccaggaggggagcagtttgagcggatgcccaccaggaacaatgtttcctagatcacgatgtttgggccacttttggaagaggtcagggatgacatgttttcaagcttggaggacatcaccaacgcaacatatgcagatctgctctctattaattcaatgaggaaaggaaaggggtcatagaaattagtcttggcagatggaggggaacgtctcaatgactgaggcacatttttactaaattatccctaaaacatttgtattttttaaaataacatgtaatcttgttgatctggtttacttaagctgcatcgagtttgtacttggagaagaatcctggagttattttacttgtttccttgatttgtagagacatgccagtgaggagcagtttagtcggyycyyscyttatgaagtggnngcaattagaaagacgtacgagcgggccaacatctcgcggtggctcgccttgggcaatcggacctgcccgaccacgatgcaggagctctaggacgacgccctcacccccaacgccactctccgacaactcatcgccgcctggttctcccgcctggttctgcattttgttttcttatctgtcaatcatgtttttccatattactgcaggtgggtctgattaattatttaaatgtagtttatcttagatattgtttgaacgtatgggatgttggaggacagaagacaatcatgtcttactggagaaattactttgagcagactaatgggttagtttggtttgctgatagttcagacataaggaggcttgatgattgccgtgctgaactccacaacctcttgaaagaagaggataaaggtttacctatctaggcagtgttctattgttgatttttgcaaataagcaagacatgcaaggagctctaaaaccaactgaaatcgtgaaggtaagcgaacttcagtcatttattatatgcattagagacatgttttcctgtctatgacatcatttttaacttgtactgtgtttttccggtcctcatggttgccaagattttacttagttcgatgtgggagcaaaaggatatgccaaattgaatgtagtttcatcagttatgctctattatggatgttcagaggcatccaatttcagtgtgtactgcaatacttgggtccacctgcacgtggtagatgttctgcattttgttttcttataaattagatttggcttccattatgttgttctcttttggaacagagtcactctccgacagctcatcgccgcttggttctcccgtcggtacacaaggtttaagaagcgctacgcggacttccacggccgcgctgccgatctcgtccatggcctccggggcacggcgatgcccaggagacaggccctcgaggaagagcaatgtacagaagagaaaggtatctcgactattccaaagcacaagtatgcatccaaagcctgttccccaaaaggaacctttatctgcagctctctctacgcttactcttgttgtgcaatttaatgggtggctatcatttttcctcttgctttattataaacttcctctgcggccagaaactcacaagacatactatgaatacactggcttgtggcacatctatgggctccttgccatgaattcatggttctggagtgccatatatcacagttgtgacacaatttggacagaaaaagctatatttttcatcagatgctgcctttctagggtattccctcattttgatgatagttggtgagcatgtagtagcaagtttcatgggctctggtagattaactgacctttgtgtgttccattagcctgtgaagttcgaaactggtcatattgctaagaattctaggaggttactattagggcccagagtaaatgactacatgctgatgaaaatctgttcagattaatcattctggaacttgtactaacaattgaagcaagtggaggcatagcaccaattgtgtcagtgctgcagctctggatgtcagtagacaagaggtgtatcagagagaagcacttcaaggttaatttgagcaaattggagatgctggattttgtattttggttgctcatgggtggtgaatgatctgacgacttcagaagaggatagatctgagattacctttcatgcatgtcaaggaagttaagtagctgatgccatcaaagcaatggagaaacgtcaggtgaaccgcgagcagaattctgtggcgcatttgttagcgcagttagttaggactctgttcatacaactgttcgattaagccaaatacctaatttagttttatattggttgttgtcaaagaatttgtgaaatattgaggttgataatatatgtggcgttcgtttttatgtaatcattgttcactaatattttgtcgaatattttatattatatagacattactwaggaaaaaaaaaaaaaaaaaaaaaaaaaaaaaaaaaacctcgggggggggcccggt

SEQ ID NO: 22581 - protein, 191 aa, Zea mays subsp. mays
  peptide (1)..(191): Ceres Seq. ID no. 15222595
  misc_feature (97)..(174): Pfam Name: Pfam Description:  Per1-like
  misc_feature (97)..(174): NCBI GI NO: 37536224 NR Description: unknown protein
  misc_feature (97)..(171): NCBI GI NO: 15219283 NR Description: expressed protein [Arabidopsis thaliana]
  misc_feature (97)..(163): NCBI GI NO: 20260110 NR Description: unknown protein [Arabidopsis thaliana]
  misc_feature (97)..(171): NCBI GI NO: 10176931 NR Description: gene_id:MTG10.16~unknown protein
  misc_feature (97)..(171): NCBI GI NO: 18424554 NR Description: expressed protein [Arabidopsis thaliana]
MFCILFSYKLDLASIMLFSFGTESLSDSSSPLGSPVGTQGLRSATRTSTAALPISSMASGARRCPGDRPSRKSNVQKRKVSRLFQSTSMHPKPVPQKEPLSAALSTLTLVVQFNGWLSFFLLLYYKLPLRPETHKTYYEYTGLWHIYGLLAMNSWFWSAIYHSCDTIWTEKAIFFIRCCLSRVFPHFDDSW

SEQ ID NO: 22582 - protein, 176 aa, Zea mays subsp. mays
  peptide (1)..(176): Ceres Seq. ID no. 15222596
  misc_feature (82)..(159): Pfam Name: Pfam Description:  Per1-like
  misc_feature (82)..(159): NCBI GI NO: 37536224 NR Description: unknown protein
  misc_feature (82)..(156): NCBI GI NO: 15219283 NR Description: expressed protein [Arabidopsis thaliana]
  misc_feature (82)..(148): NCBI GI NO: 20260110 NR Description: unknown protein [Arabidopsis thaliana]
  misc_feature (82)..(156): NCBI GI NO: 10176931 NR Description: gene_id:MTG10.16~unknown protein
  misc_feature (82)..(156): NCBI GI NO: 18424554 NR Description: expressed protein [Arabidopsis thaliana]
MLFSFGTESLSDSSSPLGSPVGTQGLRSATRTSTAALPISSMASGARRCPGDRPSRKSNVQKRKVSRLFQSTSMHPKPVPQKEPLSAALSTLTLVVQFNGWLSFFLLLYYKLPLRPETHKTYYEYTGLWHIYGLLAMNSWFWSAIYHSCDTIWTEKAIFFIRCCLSRVFPHFDDSW

SEQ ID NO: 22583 - protein, 135 aa, Zea mays subsp. mays
  peptide (1)..(135): Ceres Seq. ID no. 15222597
  misc_feature (41)..(118): Pfam Name: Pfam Description:  Per1-like
  misc_feature (41)..(118): NCBI GI NO: 37536224 NR Description: unknown protein
  misc_feature (41)..(115): NCBI GI NO: 15219283 NR Description: expressed protein [Arabidopsis thaliana]
  misc_feature (41)..(107): NCBI GI NO: 20260110 NR Description: unknown protein [Arabidopsis thaliana]
  misc_feature (41)..(115): NCBI GI NO: 10176931 NR Description: gene_id:MTG10.16~unknown protein
  misc_feature (41)..(115): NCBI GI NO: 18424554 NR Description: expressed protein [Arabidopsis thaliana]
MASGARRCPGDRPSRKSNVQKRKVSRLFQSTSMHPKPVPQKEPLSAALSTLTLVVQFNGWLSFFLLLYYKLPLRPETHKTYYEYTGLWHIYGLLAMNSWFWSAIYHSCDTIWTEKAIFFIRCCLSRVFPHFDDSW

SEQ ID NO: 22584 - DNA, 692 bp, Zea mays subsp. mays
  misc_feature (1)..(692): Ceres Seq. ID no. 13624575
gtccacgacgctagggttgctgcagtacggcttcggagctagcgcgaccatggagacggcttctgcgcctgtgccccttgctgcgtcgctgggaaccactgcgagcgtggcgaccgctgggctcacagctttgcctgcaagtactaatgctgttgtcgtcaactatgatctgctgcaaggctgaagttcaaggacaaaatatcacctggctaactctgcatgctcttcagcaagtattaactgatgatgttgatttcgatgtgatgttttcttttctagaattctatgagactcttctaggatttgtgaacttcaaactctatcatttaataaatgtaaattatcctcctattctggatccacgtctggaagctttagctgctgagctctatgcattgtgccgatacatgtctgctggttctagaagaatgattgggaattcacaaactgacgaagtaatggaagataaggatgagaaaagtaaagctgaggaagtaattgaggaagaaaaggttgtgaagaataaagcaagctcaaaagcagatgaatcacatgcaaatggcctgctttatcattttgatggtggattgagtttataatgttagtaaaatacttccacctctgtaattatccttgcgtccaccaccaccatagccaccacctagaaaattagattcttgtccaattttatt

SEQ ID NO: 22585 - protein, 150 aa, Zea mays subsp. mays
  peptide (1)..(150): Ceres Seq. ID no. 13624576
  misc_feature (11)..(123): NCBI GI NO: 28273368 NR Description: pescadillo-like protein
  misc_feature (11)..(117): NCBI GI NO: 15241421 NR Description: pescadillo - like protein [Arabidopsis thaliana]
  misc_feature (3)..(134): NCBI GI NO: 32409249 NR Description: hypothetical protein [Neurospora crassa]
  misc_feature (3)..(134): NCBI GI NO: 19113335 NR Description: hypothetical protein [Schizosaccharomyces pombe]
  misc_feature (3)..(126): NCBI GI NO: 40739902 NR Description: hypothetical protein AN3827.2
  misc_feature (1)..(136): NCBI GI NO: 7657455 NR Description: pescadillo homolog 1, containing BRCT domain
  misc_feature (1)..(136): NCBI GI NO: 27881805 NR Description: similar to pescadillo [Xenopus laevis]
  misc_feature (1)..(142): NCBI GI NO: 40787689 NR Description: Unknown (protein for MGC:76219)
  misc_feature (1)..(136): NCBI GI NO: 12584984 NR Description: pescadillo homolog 1, containing BRCT domain
  misc_feature (11)..(116): NCBI GI NO: 32398682 NR Description: conserved BRCA1 domain protein
MLLSSTMICCKAEVQGQNITWLTLHALQQVLTDDVDFDVMFSFLEFYETLLGFVNFKLYHLINVNYPPILDPRLEALAAELYALCRYMSAGSRRMIGNSQTDEVMEDKDEKSKAEEVIEEEKVVKNKASSKADESHANGLLYHFDGGLSL

SEQ ID NO: 22586 - protein, 144 aa, Zea mays subsp. mays
  peptide (1)..(144): Ceres Seq. ID no. 13624577
  misc_feature (5)..(117): NCBI GI NO: 28273368 NR Description: pescadillo-like protein
  misc_feature (5)..(111): NCBI GI NO: 15241421 NR Description: pescadillo - like protein [Arabidopsis thaliana]
  misc_feature (1)..(128): NCBI GI NO: 32409249 NR Description: hypothetical protein [Neurospora crassa]
  misc_feature (1)..(128): NCBI GI NO: 19113335 NR Description: hypothetical protein [Schizosaccharomyces pombe]
  misc_feature (1)..(120): NCBI GI NO: 40739902 NR Description: hypothetical protein AN3827.2
  misc_feature (1)..(130): NCBI GI NO: 7657455 NR Description: pescadillo homolog 1, containing BRCT domain
  misc_feature (1)..(130): NCBI GI NO: 27881805 NR Description: similar to pescadillo [Xenopus laevis]
  misc_feature (1)..(136): NCBI GI NO: 40787689 NR Description: Unknown (protein for MGC:76219)
  misc_feature (1)..(130): NCBI GI NO: 12584984 NR Description: pescadillo homolog 1, containing BRCT domain
  misc_feature (5)..(110): NCBI GI NO: 32398682 NR Description: conserved BRCA1 domain protein
MICCKAEVQGQNITWLTLHALQQVLTDDVDFDVMFSFLEFYETLLGFVNFKLYHLINVNYPPILDPRLEALAAELYALCRYMSAGSRRMIGNSQTDEVMEDKDEKSKAEEVIEEEKVVKNKASSKADESHANGLLYHFDGGLSL

SEQ ID NO: 22587 - protein, 111 aa, Zea mays subsp. mays
  peptide (1)..(111): Ceres Seq. ID no. 13624578
  misc_feature (1)..(84): NCBI GI NO: 28273368 NR Description: pescadillo-like protein
  misc_feature (1)..(78): NCBI GI NO: 15241421 NR Description: pescadillo - like protein [Arabidopsis thaliana]
  misc_feature (1)..(95): NCBI GI NO: 32409249 NR Description: hypothetical protein [Neurospora crassa]
  misc_feature (1)..(95): NCBI GI NO: 19113335 NR Description: hypothetical protein [Schizosaccharomyces pombe]
  misc_feature (1)..(87): NCBI GI NO: 40739902 NR Description: hypothetical protein AN3827.2
  misc_feature (1)..(97): NCBI GI NO: 7657455 NR Description: pescadillo homolog 1, containing BRCT domain
  misc_feature (1)..(97): NCBI GI NO: 27881805 NR Description: similar to pescadillo [Xenopus laevis]
  misc_feature (1)..(103): NCBI GI NO: 40787689 NR Description: Unknown (protein for MGC:76219)
  misc_feature (1)..(97): NCBI GI NO: 12584984 NR Description: pescadillo homolog 1, containing BRCT domain
  misc_feature (1)..(77): NCBI GI NO: 32398682 NR Description: conserved BRCA1 domain protein
MFSFLEFYETLLGFVNFKLYHLINVNYPPILDPRLEALAAELYALCRYMSAGSRRMIGNSQTDEVMEDKDEKSKAEEVIEEEKVVKNKASSKADESHANGLLYHFDGGLSL

SEQ ID NO: 22588 - DNA, 2036 bp, Zea mays subsp. mays
  misc_feature (1)..(2036): Ceres Seq. ID no. 13623250
ggggacaaattcgcagttggattcagcatatgcattttttatgctgacataggatgtgctcaaccatccgtggactccctctagttgcacaaaccacctcagtgctctctctttcttcgaatcgggctaataatgggcagtgcttgccaagctggcacagacgggccttcccgcaaggatgtgttagggatagggaatgccgccttagagaatggccaccatcaggctgaagctgacgcagatgaatggagggaaaaggaagaggacttggccaacgggcacagtgcgccaccgccaggcatgcagcaggtggatgagcataaggaggaacaaagacaaagcattcactgggagaggttcctacctgtgaagacactgagagtcttgctggtggagaatgatgactctactcgtcaggtggtcagtgccctgctccgtaagtgctgctatgaagttattcctgctgaaaatggtttgcatgcatggcgatatcttgaagatctgcagaacaacatcgaccttgtattgactgaggttttcatgacttgtctatctggtatcggtctgcttagcaaaatcacaagtcacaaaatttgcaaagacattcctgtgattatgatgtctacgaatgattctatgagtatggtgtttaagtgtttgtcgaagggagcagttgatttcttggtaaaaccactacgtaagaatgagcttaagaacctttggcagcatgtttggaggcgatgccacagttccagtggaagtgaaagtggcatccagacacagaagtgtgccaaactaaatactggcgacgagtatgagaacggcagtgacagcaatcatgatgatgaagaaaatgatgacggcgacgatgacgacttcagtgttggactcaatgctagggatggaagtgacaatggcagtggtactcaaagctcatggacaaagcgtgctgtggagattgacagcccacaacctatatctcccgatcaactagttgatccacctgatagtacatgtgcacaagtaattcaccctagatcagagatatgcagtaacaagtggttaccgacagcaaacaaaaggaatgtcaagaaacagaaggagaataaagatgaatctatgggaagatacttaggaataggtgctcctaggaactcaagtgcagaatatcaatcatctctcaatgatgtatctgttaatccaatagaaaaaggacatgagaatcacatgtccaaatgcaaatctaaaaaggaaacaatggcagaagatgattgtacaaacatgcctagtgcaacaaatgctgaaactgctgatttgattagctcaatagccagaaacacagaaggccaacaagcagtacaagccgttgacgcaccagatggcccttccaaaatggctaatggaaatgataagaatcatgattctcatatcgaagtgacaccccatgagttgggtttgaagagatcgagaacaaatggagctacagcggaaatccatgatgagcgaaatattctgaaaagatcagatcagtcagccttcaccaggtaccatacatctgtggcttccaatcaaggtggagcaagatatggggaaagctcttcaccacaagataacagttctgaggccatgaaaacggactctacatgcaagatgaagtcaaattcagatgctgctccaataaagcagggctccaatggcagtagcaataacgatgtgggatccagtacaaagaatgttgctgcaaggccttcgggtgacagggagagagtagcgtcaccattagccatcaaatctacccagcatgcctcagcatttcatactatacagaatcaaacgtcaccagctaatctgattggggaagacaaagctgatgaaggaatttccaatgcagtgaaaatgagccacccaacagaggttccacaagggtgcgtccagcatcatcatcatgtgcattattacctccatgttatgacacagaaacagccatcaacagcccgtggatgtttaaacacaataaagtgggaactggagggggg

SEQ ID NO: 22589 - protein, 634 aa, Zea mays subsp. mays
  peptide (1)..(634): Ceres Seq. ID no. 13623251
  misc_feature (82)..(205): Pfam Name: Pfam Description:  Response regulator receiver domain
  misc_feature (223)..(623): NCBI GI NO: 24796813 NR Description: putative pseudo-response regulator
  misc_feature (1)..(268): NCBI GI NO: 24796813 NR Description: putative pseudo-response regulator
  misc_feature (73)..(611): NCBI GI NO: 34394035 NR Description: putative pseudo-response regulator
  misc_feature (45)..(559): NCBI GI NO: 18414032 NR Description: pseudo-response regulator, APRR7
  misc_feature (45)..(559): NCBI GI NO: 11357905 NR Description: hypothetical protein F9G14
  misc_feature (25)..(376): NCBI GI NO: 18424319 NR Description: pseudo-response regulator, APRR3
  misc_feature (56)..(467): NCBI GI NO: 18407171 NR Description: pseudo-response regulator, APRR9
  misc_feature (56)..(467): NCBI GI NO: 7485762 NR Description: hypothetical protein At2g46790
  misc_feature (52)..(357): NCBI GI NO: 9758535 NR Description: contains similarity to two-component responseregulator protein~gene_id:T31K7
  misc_feature (52)..(357): NCBI GI NO: 18420797 NR Description: pseudo-response regulator, APRR5
MGSACQAGTDGPSRKDVLGIGNAALENGHHQAEADADEWREKEEDLANGHSAPPPGMQQVDEHKEEQRQSIHWERFLPVKTLRVLLVENDDSTRQVVSALLRKCCYEVIPAENGLHAWRYLEDLQNNIDLVLTEVFMTCLSGIGLLSKITSHKICKDIPVIMMSTNDSMSMVFKCLSKGAVDFLVKPLRKNELKNLWQHVWRRCHSSSGSESGIQTQKCAKLNTGDEYENGSDSNHDDEENDDGDDDDFSVGLNARDGSDNGSGTQSSWTKRAVEIDSPQPISPDQLVDPPDSTCAQVIHPRSEICSNKWLPTANKRNVKKQKENKDESMGRYLGIGAPRNSSAEYQSSLNDVSVNPIEKGHENHMSKCKSKKETMAEDDCTNMPSATNAETADLISSIARNTEGQQAVQAVDAPDGPSKMANGNDKNHDSHIEVTPHELGLKRSRTNGATAEIHDERNILKRSDQSAFTRYHTSVASNQGGARYGESSSPQDNSSEAMKTDSTCKMKSNSDAAPIKQGSNGSSNNDVGSSTKNVAARPSGDRERVASPLAIKSTQHASAFHTIQNQTSPANLIGEDKADEGISNAVKMSHPTEVPQGCVQHHHHVHYYLHVMTQKQPSTARGCLNTIKWELEG

SEQ ID NO: 22590 - protein, 578 aa, Zea mays subsp. mays
  peptide (1)..(578): Ceres Seq. ID no. 13623252
  misc_feature (26)..(149): Pfam Name: Pfam Description:  Response regulator receiver domain
  misc_feature (167)..(567): NCBI GI NO: 24796813 NR Description: putative pseudo-response regulator
  misc_feature (1)..(212): NCBI GI NO: 24796813 NR Description: putative pseudo-response regulator
  misc_feature (17)..(555): NCBI GI NO: 34394035 NR Description: putative pseudo-response regulator
  misc_feature (1)..(503): NCBI GI NO: 18414032 NR Description: pseudo-response regulator, APRR7
  misc_feature (1)..(503): NCBI GI NO: 11357905 NR Description: hypothetical protein F9G14
  misc_feature (1)..(320): NCBI GI NO: 18424319 NR Description: pseudo-response regulator, APRR3
  misc_feature (1)..(411): NCBI GI NO: 18407171 NR Description: pseudo-response regulator, APRR9
  misc_feature (1)..(411): NCBI GI NO: 7485762 NR Description: hypothetical protein At2g46790
  misc_feature (1)..(301): NCBI GI NO: 9758535 NR Description: contains similarity to two-component responseregulator protein~gene_id:T31K7
  misc_feature (1)..(301): NCBI GI NO: 18420797 NR Description: pseudo-response regulator, APRR5
MQQVDEHKEEQRQSIHWERFLPVKTLRVLLVENDDSTRQVVSALLRKCCYEVIPAENGLHAWRYLEDLQNNIDLVLTEVFMTCLSGIGLLSKITSHKICKDIPVIMMSTNDSMSMVFKCLSKGAVDFLVKPLRKNELKNLWQHVWRRCHSSSGSESGIQTQKCAKLNTGDEYENGSDSNHDDEENDDGDDDDFSVGLNARDGSDNGSGTQSSWTKRAVEIDSPQPISPDQLVDPPDSTCAQVIHPRSEICSNKWLPTANKRNVKKQKENKDESMGRYLGIGAPRNSSAEYQSSLNDVSVNPIEKGHENHMSKCKSKKETMAEDDCTNMPSATNAETADLISSIARNTEGQQAVQAVDAPDGPSKMANGNDKNHDSHIEVTPHELGLKRSRTNGATAEIHDERNILKRSDQSAFTRYHTSVASNQGGARYGESSSPQDNSSEAMKTDSTCKMKSNSDAAPIKQGSNGSSNNDVGSSTKNVAARPSGDRERVASPLAIKSTQHASAFHTIQNQTSPANLIGEDKADEGISNAVKMSHPTEVPQGCVQHHHHVHYYLHVMTQKQPSTARGCLNTIKWELEG

SEQ ID NO: 22591 - protein, 498 aa, Zea mays subsp. mays
  peptide (1)..(498): Ceres Seq. ID no. 13623253
  misc_feature (1)..(69): Pfam Name: Pfam Description:  Response regulator receiver domain
  misc_feature (87)..(487): NCBI GI NO: 24796813 NR Description: putative pseudo-response regulator
  misc_feature (1)..(132): NCBI GI NO: 24796813 NR Description: putative pseudo-response regulator
  misc_feature (1)..(475): NCBI GI NO: 34394035 NR Description: putative pseudo-response regulator
  misc_feature (1)..(423): NCBI GI NO: 18414032 NR Description: pseudo-response regulator, APRR7
  misc_feature (1)..(423): NCBI GI NO: 11357905 NR Description: hypothetical protein F9G14
  misc_feature (1)..(240): NCBI GI NO: 18424319 NR Description: pseudo-response regulator, APRR3
  misc_feature (1)..(331): NCBI GI NO: 18407171 NR Description: pseudo-response regulator, APRR9
  misc_feature (1)..(331): NCBI GI NO: 7485762 NR Description: hypothetical protein At2g46790
  misc_feature (1)..(221): NCBI GI NO: 9758535 NR Description: contains similarity to two-component responseregulator protein~gene_id:T31K7
  misc_feature (1)..(221): NCBI GI NO: 18420797 NR Description: pseudo-response regulator, APRR5
MTCLSGIGLLSKITSHKICKDIPVIMMSTNDSMSMVFKCLSKGAVDFLVKPLRKNELKNLWQHVWRRCHSSSGSESGIQTQKCAKLNTGDEYENGSDSNHDDEENDDGDDDDFSVGLNARDGSDNGSGTQSSWTKRAVEIDSPQPISPDQLVDPPDSTCAQVIHPRSEICSNKWLPTANKRNVKKQKENKDESMGRYLGIGAPRNSSAEYQSSLNDVSVNPIEKGHENHMSKCKSKKETMAEDDCTNMPSATNAETADLISSIARNTEGQQAVQAVDAPDGPSKMANGNDKNHDSHIEVTPHELGLKRSRTNGATAEIHDERNILKRSDQSAFTRYHTSVASNQGGARYGESSSPQDNSSEAMKTDSTCKMKSNSDAAPIKQGSNGSSNNDVGSSTKNVAARPSGDRERVASPLAIKSTQHASAFHTIQNQTSPANLIGEDKADEGISNAVKMSHPTEVPQGCVQHHHHVHYYLHVMTQKQPSTARGCLNTIKWELEG

SEQ ID NO: 22592 - DNA, 2288 bp, Zea mays subsp. mays
  misc_feature (1)..(2288): Ceres Seq. ID no. 13623385
ttcacctgaggatacaggtttgagtggcaaacatatatcagggttctatgaggaataccccatccttaaatcagagtatgttcagaatcttgttactgtcactgtgaggagagacattgaagcgcataaaagacttgtggaatttgacactgatattcctggagaagttatcattcattggggagtttgcagagacaatactatgacatgggagatcccaccagaaccacatccaccaaaaacgaaaatattccgacacaaagctcttcaaactttgctgcagcaaaaagctgatggagcaggaaactcaatttcattctcacttgatgcagagtattcttgtctgttttttgtgctcaaacttgacgagtatacttggttgagaaatcttgagaatggatctgatttctatgtgccacttacaagagtggggcagtatggcagcactcaggatcctgacaaggctgaggcacagaaaatagaggataagtcttcacaggctgatggcttaatcagtgatataagaaatctggtggttggcctatcgtctagaagaggtcagaaagctaagaataaagttcttcaagaggacatcctacaagaaatcgaaagacttgcagcagaagcttatagcattttcaggagccccactattgattccgtagatgaatctgtacagctcgatgacacattaagcgcaaagccagcatgttctggcactggatctggttttgagatattgtgccaaggatttaactgggaatctcataaatcagggaaatggtatgttgagcttggcacaaaggccaaggagttgtcgtccttgggtttcaccattgtctggtcaccaccaccaactgattctgtgtcacctgaaggatacatgccaagggatctatataatctaaactcacgatatgggtccatggatgagctgaaggaacttgtgaagattttccatgaagctggtatcaaggttcttggcgacgctgttctaaatcataggtgtgctcagtttcagaacaacaatggtgtctggaatatatttggtggtcgtatgaactgggatgatcgagcagttgttgctgatgatccacatttccagggaagaggaaacaagagcagtggagataatttccatgcagcaccaaacattgatcactcccaagagtttgtgaggaatgatcttaaagaatggctttgctggatgagaaaggaagtcggctacgatggatggagacttgactttgttcgtggtttctggggtggatatgtcaaggactatttggaagcaagtgaaccatactttgcagtaggagagtactgggactccctcagttatacttatggtgaaatggactacaatcaggatgcccacaggcagagaattgttgattggataaatgctacaaatggaactgctggcgcatttgatgttaccactaaaggaatacttcatgcggcgcttgaaagatcagagtattggcgcctgtccgatgaaaaagggaaaccccctggagtattgggttggtggccttcaagagcagtcacatttatagagaatcatgatactggttctactcagggccattggaggttcccctatggtatggaactgcaaggatacgcctacatcctgacacaccctggcactcccgcagtcttctatgaccacatattttcacacttacaaccagagatcgctaaatttatttccattcgacaccgtcaaaagattcattgccgcagcaagatcaagatactaaaggcagagaggagtttatatgcggctgaaattgatgagaaggtaacaatgaaaatcggatcagaacattttgagccaagcggtccccagaactggattgttgctgctgagggtcaagattacaaaatctgggaagcgtcttcatagacttggcgggctgcgagtgccatataactgctcaaagactaaaaagctacaagaaagcataatgctaggagatggcgcctcagaatggtcagctggcgggagctgctgccgctgccgccatggagcagcaaaattcaacaacataagctatggaagcacttgccacggcgataggattatctaataggactactgttgaacattcgatatatccagaaccacccatcatttgcaggcacattggccattaaaatttagcttcgtcctctattttggagctatgtaaaagcatgcacaactctatttatgtgtgaaataaaatttgaatcttcatcaaagaaaaaaaaaaaaaaaaaaactcgagggggggcccggt

SEQ ID NO: 22593 - protein, 636 aa, Zea mays subsp. mays
  peptide (1)..(636): Ceres Seq. ID no. 13623386
  misc_feature (2)..(636): NCBI GI NO: 34910588 NR Description: putative alpha-amylase
  misc_feature (10)..(635): NCBI GI NO: 18409378 NR Description: alpha-amylase
  misc_feature (10)..(635): NCBI GI NO: 25404842 NR Description: probable alpha-amylase T17F3.14
  misc_feature (227)..(633): NCBI GI NO: 1220453 NR Description: alpha-amylase
  misc_feature (243)..(632): NCBI GI NO: 38346145 NR Description: OSJNBb0118P14.5
  misc_feature (243)..(632): NCBI GI NO: 15222959 NR Description: alpha-amylase
  misc_feature (239)..(632): NCBI GI NO: 25289325 NR Description: protein T23E18.6 [imported] - Arabidopsis thaliana
  misc_feature (242)..(632): NCBI GI NO: 7532799 NR Description: alpha-amylase [Malus x domestica]
  misc_feature (242)..(633): NCBI GI NO: 3769330 NR Description: alpha-amylase [Phaseolus vulgaris]
  misc_feature (246)..(633): NCBI GI NO: 228404 NR Description: alpha amylase
SPEDTGLSGKHISGFYEEYPILKSEYVQNLVTVTVRRDIEAHKRLVEFDTDIPGEVIIHWGVCRDNTMTWEIPPEPHPPKTKIFRHKALQTLLQQKADGAGNSISFSLDAEYSCLFFVLKLDEYTWLRNLENGSDFYVPLTRVGQYGSTQDPDKAEAQKIEDKSSQADGLISDIRNLVVGLSSRRGQKAKNKVLQEDILQEIERLAAEAYSIFRSPTIDSVDESVQLDDTLSAKPACSGTGSGFEILCQGFNWESHKSGKWYVELGTKAKELSSLGFTIVWSPPPTDSVSPEGYMPRDLYNLNSRYGSMDELKELVKIFHEAGIKVLGDAVLNHRCAQFQNNNGVWNIFGGRMNWDDRAVVADDPHFQGRGNKSSGDNFHAAPNIDHSQEFVRNDLKEWLCWMRKEVGYDGWRLDFVRGFWGGYVKDYLEASEPYFAVGEYWDSLSYTYGEMDYNQDAHRQRIVDWINATNGTAGAFDVTTKGILHAALERSEYWRLSDEKGKPPGVLGWWPSRAVTFIENHDTGSTQGHWRFPYGMELQGYAYILTHPGTPAVFYDHIFSHLQPEIAKFISIRHRQKIHCRSKIKILKAERSLYAAEIDEKVTMKIGSEHFEPSGPQNWIVAAEGQDYKIWEASS

SEQ ID NO: 22594 - protein, 569 aa, Zea mays subsp. mays
  peptide (1)..(569): Ceres Seq. ID no. 13623387
  misc_feature (1)..(569): NCBI GI NO: 34910588 NR Description: putative alpha-amylase
  misc_feature (1)..(568): NCBI GI NO: 18409378 NR Description: alpha-amylase
  misc_feature (1)..(568): NCBI GI NO: 25404842 NR Description: probable alpha-amylase T17F3.14
  misc_feature (160)..(566): NCBI GI NO: 1220453 NR Description: alpha-amylase
  misc_feature (176)..(565): NCBI GI NO: 38346145 NR Description: OSJNBb0118P14.5
  misc_feature (176)..(565): NCBI GI NO: 15222959 NR Description: alpha-amylase
  misc_feature (172)..(565): NCBI GI NO: 25289325 NR Description: protein T23E18.6 [imported] - Arabidopsis thaliana
  misc_feature (175)..(565): NCBI GI NO: 7532799 NR Description: alpha-amylase [Malus x domestica]
  misc_feature (175)..(566): NCBI GI NO: 3769330 NR Description: alpha-amylase [Phaseolus vulgaris]
  misc_feature (179)..(566): NCBI GI NO: 228404 NR Description: alpha amylase
MTWEIPPEPHPPKTKIFRHKALQTLLQQKADGAGNSISFSLDAEYSCLFFVLKLDEYTWLRNLENGSDFYVPLTRVGQYGSTQDPDKAEAQKIEDKSSQADGLISDIRNLVVGLSSRRGQKAKNKVLQEDILQEIERLAAEAYSIFRSPTIDSVDESVQLDDTLSAKPACSGTGSGFEILCQGFNWESHKSGKWYVELGTKAKELSSLGFTIVWSPPPTDSVSPEGYMPRDLYNLNSRYGSMDELKELVKIFHEAGIKVLGDAVLNHRCAQFQNNNGVWNIFGGRMNWDDRAVVADDPHFQGRGNKSSGDNFHAAPNIDHSQEFVRNDLKEWLCWMRKEVGYDGWRLDFVRGFWGGYVKDYLEASEPYFAVGEYWDSLSYTYGEMDYNQDAHRQRIVDWINATNGTAGAFDVTTKGILHAALERSEYWRLSDEKGKPPGVLGWWPSRAVTFIENHDTGSTQGHWRFPYGMELQGYAYILTHPGTPAVFYDHIFSHLQPEIAKFISIRHRQKIHCRSKIKILKAERSLYAAEIDEKVTMKIGSEHFEPSGPQNWIVAAEGQDYKIWEASS

SEQ ID NO: 22595 - protein, 342 aa, Zea mays subsp. mays
  peptide (1)..(342): Ceres Seq. ID no. 13623388
  misc_feature (1)..(342): NCBI GI NO: 34910588 NR Description: putative alpha-amylase
  misc_feature (1)..(341): NCBI GI NO: 18409378 NR Description: alpha-amylase
  misc_feature (1)..(341): NCBI GI NO: 25404842 NR Description: probable alpha-amylase T17F3.14
  misc_feature (1)..(339): NCBI GI NO: 1220453 NR Description: alpha-amylase
  misc_feature (1)..(338): NCBI GI NO: 38346145 NR Description: OSJNBb0118P14.5
  misc_feature (1)..(338): NCBI GI NO: 15222959 NR Description: alpha-amylase
  misc_feature (1)..(338): NCBI GI NO: 25289325 NR Description: protein T23E18.6 [imported] - Arabidopsis thaliana
  misc_feature (1)..(338): NCBI GI NO: 7532799 NR Description: alpha-amylase [Malus x domestica]
  misc_feature (1)..(339): NCBI GI NO: 3769330 NR Description: alpha-amylase [Phaseolus vulgaris]
  misc_feature (1)..(339): NCBI GI NO: 228404 NR Description: alpha amylase
MPRDLYNLNSRYGSMDELKELVKIFHEAGIKVLGDAVLNHRCAQFQNNNGVWNIFGGRMNWDDRAVVADDPHFQGRGNKSSGDNFHAAPNIDHSQEFVRNDLKEWLCWMRKEVGYDGWRLDFVRGFWGGYVKDYLEASEPYFAVGEYWDSLSYTYGEMDYNQDAHRQRIVDWINATNGTAGAFDVTTKGILHAALERSEYWRLSDEKGKPPGVLGWWPSRAVTFIENHDTGSTQGHWRFPYGMELQGYAYILTHPGTPAVFYDHIFSHLQPEIAKFISIRHRQKIHCRSKIKILKAERSLYAAEIDEKVTMKIGSEHFEPSGPQNWIVAAEGQDYKIWEASS

SEQ ID NO: 22596 - DNA, 1150 bp, Zea mays subsp. mays
  misc_feature (1)..(1150): Ceres Seq. ID no. 13599756
  misc_feature (1143)..(1143): n is a, c, t, g, unknown, or other
aagaccaaggccgccgccgcggattcggccctggtcgttcgcgacgactcctacctagaggcggtcactcagaagaggattcgcttcttcgaggagatccaggcaaggcaagccgtcgagcggctgaatatcggcggcgaagttatcaaggtaactttgcctgatggcgctatcaaggagggtaagaaatggataacaaccccaatggatattgctaaggagatatcaagtggatttgcagctagttgtttgatagctcaagtggacgaaacactctgggacatggggaggccactcgaaggtgattgtaaattgcaaatgttcaagtttgataccaatgaaggtcgtgacaccttctggcactcaagtgctcatattcttggagaatctattgagagagcatatggatgcaagctgtgtattgggccttgcaccacaagaggggagggtttctactatgatgcttactacaatgatcagacattgaatgaggagcactttggtatcattgaaaaccaagctaaaaaggctgttgcggaaaagcaaccgtttgaacgcattgaggtcagcagggcagaagctcttgaaatgtttgctgagaatgaattcaaggttgaaatcattaatgagttgcctgaggacaagaccattactgtatacaggtgtggtcctttagttgacctatgccgtgggccacacatcccaaatacttcctttgtcaaagctttcgcttgtctgaaggcttcatcatcatattggagaggaaaagttgaccgcgaaagcctgcagagagtatatggaatttctttccctgattctcgacgtctcacggaatataaacattttctagaggaagctaagaaacgtgatcataggatattagggaaagcacaggaactcttctttttccatgaacttagccctggaagctgcttcttccttccacatggtgccaggatatataacaaactgatggacttcatgcgacaacagtacagagatagaggataccaagaggtgttgagcccaaatatttacaatatgcaactatgggaaacttctggacacgccgcaaactataaggagaacatgtttgtttttgagatcgagaaacaggaatttggacttaagccaatgaattgnccaggac

SEQ ID NO: 22597 - protein, 383 aa, Zea mays subsp. mays
  peptide (1)..(383): Ceres Seq. ID no. 13599757
  misc_feature (309)..(382): Pfam Name: G, H, P, S and T Pfam Description: tRNA synthetase class II core domain
  misc_feature (2)..(382): NCBI GI NO: 38175524 NR Description: putative threonyl-tRNA synthetase
  misc_feature (14)..(382): NCBI GI NO: 11271129 NR Description: threonine-tRNA ligase (EC 6.1.1.3)
  misc_feature (14)..(382): NCBI GI NO: 30690426 NR Description: threonyl-tRNA synthetase [Arabidopsis thaliana]
  misc_feature (14)..(382): NCBI GI NO: 15081626 NR Description: AT5g26830/F2P16_90 [Arabidopsis thaliana]
  misc_feature (148)..(382): NCBI GI NO: 7437517 NR Description: threonine-tRNA ligase (EC 6
  misc_feature (14)..(129): NCBI GI NO: 7437517 NR Description: threonine-tRNA ligase (EC 6
  misc_feature (158)..(382): NCBI GI NO: 20429011 NR Description: threonyl-tRNA synthetase
  misc_feature (26)..(382): NCBI GI NO: 31237882 NR Description: ENSANGP00000021424 [Anopheles gambiae]
  misc_feature (26)..(382): NCBI GI NO: 31237885 NR Description: ENSANGP00000024346 [Anopheles gambiae]
  misc_feature (21)..(382): NCBI GI NO: 17532457 NR Description: Threonyl tRNA Synthetase TRS-1 (84.4 kD) (trs-1)
  misc_feature (381)..(381): Xaa is any aa, unknown or other
KTKAAAADSALVVRDDSYLEAVTQKRIRFFEEIQARQAVERLNIGGEVIKVTLPDGAIKEGKKWITTPMDIAKEISSGFAASCLIAQVDETLWDMGRPLEGDCKLQMFKFDTNEGRDTFWHSSAHILGESIERAYGCKLCIGPCTTRGEGFYYDAYYNDQTLNEEHFGIIENQAKKAVAEKQPFERIEVSRAEALEMFAENEFKVEIINELPEDKTITVYRCGPLVDLCRGPHIPNTSFVKAFACLKASSSYWRGKVDRESLQRVYGISFPDSRRLTEYKHFLEEAKKRDHRILGKAQELFFFHELSPGSCFFLPHGARIYNKLMDFMRQQYRDRGYQEVLSPNIYNMQLWETSGHAANYKENMFVFEIEKQEFGLKPMNXPG

SEQ ID NO: 22598 - protein, 315 aa, Zea mays subsp. mays
  peptide (1)..(315): Ceres Seq. ID no. 13599758
  misc_feature (241)..(314): Pfam Name: G, H, P, S and T Pfam Description: tRNA synthetase class II core domain
  misc_feature (1)..(314): NCBI GI NO: 38175524 NR Description: putative threonyl-tRNA synthetase
  misc_feature (1)..(314): NCBI GI NO: 11271129 NR Description: threonine-tRNA ligase (EC 6.1.1.3)
  misc_feature (1)..(314): NCBI GI NO: 30690426 NR Description: threonyl-tRNA synthetase [Arabidopsis thaliana]
  misc_feature (1)..(314): NCBI GI NO: 15081626 NR Description: AT5g26830/F2P16_90 [Arabidopsis thaliana]
  misc_feature (80)..(314): NCBI GI NO: 7437517 NR Description: threonine-tRNA ligase (EC 6
  misc_feature (1)..(61): NCBI GI NO: 7437517 NR Description: threonine-tRNA ligase (EC 6
  misc_feature (90)..(314): NCBI GI NO: 20429011 NR Description: threonyl-tRNA synthetase
  misc_feature (1)..(314): NCBI GI NO: 31237882 NR Description: ENSANGP00000021424 [Anopheles gambiae]
  misc_feature (1)..(314): NCBI GI NO: 31237885 NR Description: ENSANGP00000024346 [Anopheles gambiae]
  misc_feature (1)..(314): NCBI GI NO: 17532457 NR Description: Threonyl tRNA Synthetase TRS-1 (84.4 kD) (trs-1)
  misc_feature (313)..(313): Xaa is any aa, unknown or other
MDIAKEISSGFAASCLIAQVDETLWDMGRPLEGDCKLQMFKFDTNEGRDTFWHSSAHILGESIERAYGCKLCIGPCTTRGEGFYYDAYYNDQTLNEEHFGIIENQAKKAVAEKQPFERIEVSRAEALEMFAENEFKVEIINELPEDKTITVYRCGPLVDLCRGPHIPNTSFVKAFACLKASSSYWRGKVDRESLQRVYGISFPDSRRLTEYKHFLEEAKKRDHRILGKAQELFFFHELSPGSCFFLPHGARIYNKLMDFMRQQYRDRGYQEVLSPNIYNMQLWETSGHAANYKENMFVFEIEKQEFGLKPMNXPG

SEQ ID NO: 22599 - protein, 289 aa, Zea mays subsp. mays
  peptide (1)..(289): Ceres Seq. ID no. 13599759
  misc_feature (215)..(288): Pfam Name: G, H, P, S and T Pfam Description: tRNA synthetase class II core domain
  misc_feature (1)..(288): NCBI GI NO: 38175524 NR Description: putative threonyl-tRNA synthetase
  misc_feature (1)..(288): NCBI GI NO: 11271129 NR Description: threonine-tRNA ligase (EC 6.1.1.3)
  misc_feature (1)..(288): NCBI GI NO: 30690426 NR Description: threonyl-tRNA synthetase [Arabidopsis thaliana]
  misc_feature (1)..(288): NCBI GI NO: 15081626 NR Description: AT5g26830/F2P16_90 [Arabidopsis thaliana]
  misc_feature (54)..(288): NCBI GI NO: 7437517 NR Description: threonine-tRNA ligase (EC 6
  misc_feature (1)..(35): NCBI GI NO: 7437517 NR Description: threonine-tRNA ligase (EC 6
  misc_feature (64)..(288): NCBI GI NO: 20429011 NR Description: threonyl-tRNA synthetase
  misc_feature (1)..(288): NCBI GI NO: 31237882 NR Description: ENSANGP00000021424 [Anopheles gambiae]
  misc_feature (1)..(288): NCBI GI NO: 31237885 NR Description: ENSANGP00000024346 [Anopheles gambiae]
  misc_feature (1)..(288): NCBI GI NO: 17532457 NR Description: Threonyl tRNA Synthetase TRS-1 (84.4 kD) (trs-1)
  misc_feature (287)..(287): Xaa is any aa, unknown or other
MGRPLEGDCKLQMFKFDTNEGRDTFWHSSAHILGESIERAYGCKLCIGPCTTRGEGFYYDAYYNDQTLNEEHFGIIENQAKKAVAEKQPFERIEVSRAEALEMFAENEFKVEIINELPEDKTITVYRCGPLVDLCRGPHIPNTSFVKAFACLKASSSYWRGKVDRESLQRVYGISFPDSRRLTEYKHFLEEAKKRDHRILGKAQELFFFHELSPGSCFFLPHGARIYNKLMDFMRQQYRDRGYQEVLSPNIYNMQLWETSGHAANYKENMFVFEIEKQEFGLKPMNXPG

SEQ ID NO: 22600 - DNA, 1226 bp, Zea mays subsp. mays
  misc_feature (1)..(1226): Ceres Seq. ID no. 12590304
ccccccccccccccaatcaaaagcaagatgcaagttgcaagtctggaaagaccgactaccattcaatgttgcaagtgatttctattgttaagaagctatgagcgaaaattttgtgtctcaagatttgaagcatgagaagcgttgcgggggagaagcttcagtgcaacattgttgttctatagggatcaacatcctcaagatcacttggaaaactttcacgaaaaacttgtaatgcaagcatatgttttattggaaaagttttccaagctgaatttctaaaagcctcctcactgctttagttatgctgaattggaatttgcaactaggggtttcttacaagtaaatttcttagctaaaggcatggtgcactgcacattgatctttcttcttctatcgtatgatgtgacttgtgattgctttgccaatgcgacctacatggagctggattgttattacagacaacagaactgtatttatcttgaataatgattgatggttaagtgcatgcgtcactgggttcgagatcgactacagccactgggtggacgagcagaaaaggcacatggcagagctgacgtcgacgctccaggggcagcagacgtcggagctggagctccgcctgctggtggagacgtggctcagcaactacgagcgcctgtttaggatcaaggcgacggcggccaacgcggacgtgttctacgtcatgtcgggcttgtggaagacccccgccaagaggttcttcctctggatcggtgggttccggccgtcggatgtcctcaaggatgtaagcaatctcatgcacctgttgttgctcgcaaggttcatccctcacaagtacaagatcaaagactcgaaagcttaggttgctttgagccgtggtggatctcccggtgtgatgacatggggctgggtctgggagctcttctcaaatctgggggttctcggtctgctcttctcaatttagtgttatctttttcttttagaacaatgccaaagatacatgacagactgctttgcttgtttttgacatgatgcaaaagcaatggagtctttacttttaaacctttgttatttttgttttgattcaattatgatactgctgaaatgtacggatatctattattttgatgcaatagtggtgttttgcgatgtttaaaaaaaaaaaaaaaaaaaaaaaaaaaaaaaaaagaaaaaaaaaaaaaaaaaaaactcgagggggggcccgg

SEQ ID NO: 22601 - protein, 99 aa, Zea mays subsp. mays
  peptide (1)..(99): Ceres Seq. ID no. 12590305
  misc_feature (1)..(75): NCBI GI NO: 39545747 NR Description: OSJNBb0034I13.13
  misc_feature (1)..(73): NCBI GI NO: 13195752 NR Description: mas-binding factor MBF1 [Solanum tuberosum]
  misc_feature (1)..(73): NCBI GI NO: 1076422 NR Description: transcription factor OBF4 - Arabidopsis thaliana
  misc_feature (1)..(73): NCBI GI NO: 15238046 NR Description: bZIP transcription factor, OBF4
  misc_feature (1)..(73): NCBI GI NO: 1076664 NR Description: transcription factor D11 - potato
  misc_feature (1)..(73): NCBI GI NO: 14600166 NR Description: leucine-zipper transcription factor
  misc_feature (1)..(82): NCBI GI NO: 15148922 NR Description: TGA-type basic leucine zipper protein TGA1.1
  misc_feature (1)..(73): NCBI GI NO: 320563 NR Description: transcription factor tga1 - Arabidopsis thaliana
  misc_feature (1)..(73): NCBI GI NO: 15238367 NR Description: bZIP transcription factor, TGA1
  misc_feature (1)..(73): NCBI GI NO: 21592661 NR Description: DNA binding protein TGA1a homolog
MAELTSTLQGQQTSELELRLLVETWLSNYERLFRIKATAANADVFYVMSGLWKTPAKRFFLWIGGFRPSDVLKDVSNLMHLLLLARFIPHKYKIKDSKA

SEQ ID NO: 22602 - protein, 56 aa, Zea mays subsp. mays
  peptide (1)..(56): Ceres Seq. ID no. 12590306
MVKCMRHWVRDRLQPLGGRAEKAHGRADVDAPGAADVGAGAPPAGGDVAQQLRAPV

SEQ ID NO: 22603 - protein, 52 aa, Zea mays subsp. mays
  peptide (1)..(52): Ceres Seq. ID no. 12590307
MRHWVRDRLQPLGGRAEKAHGRADVDAPGAADVGAGAPPAGGDVAQQLRAPV

SEQ ID NO: 22604 - DNA, 2158 bp, Zea mays subsp. mays
  misc_feature (1)..(2158): Ceres Seq. ID no. 13599838
  misc_feature (2132)..(2132): n is a, c, t, g, unknown, or other
  misc_feature (2133)..(2133): n is a, c, t, g, unknown, or other
  misc_feature (2134)..(2134): n is a, c, t, g, unknown, or other
gagcaaagcgtcttccatttctcagaagagtgtgtgacaacagcggcaaccgacagacatgtcttcgccgacatcgccttggtttgcggatctcttcacagatgacagggtgaggaccctatcgcaccaggtctccacacttggggacagggtgtgggaactggagcacaaaattacccagctgatgggcgagaaggccaagctggagaagcaactggaggaggcaaaggcgatctcaagccacaaggaagaggtggggagaagcttgaaggctgaaaatgataagcttcagtcggaggttttggttgcggaggaaaagtgtagcaagtctgcagcggaggttgagaggctgacgaaggaattaggcgcgctggcggaggcaaaggaggcagctgccaaggaattcaacgacgagagagagaaaatcacgctagaatcggaggatctcaagatgaggctggaggaaatgctggccatcaaggatttgacagagagcgagaatgacaagcttcggtccgaggctttgatcgcagctgaaaagcaaaacatgtatgaagcagagattgagaggctcaagaaggaactgagtgggttgttggaggcgaaggaggcggctgccaaggctttcgacgtacaaaaagcagaaatcaccaatgaattagaggaactacagaggaagctgaaggaaatcgaagctaataaggatttagtggagggagaaaacagtaagcttcagtctgagattctcacagcacaggagaaatatagacagtctgaagcagaggttaagtgcattaaacaagtaatgtgttcagtggtggaggcgaaggaggcagctgcaagggcatctgaagctgagaaggcagaaatcatggaggaaatggacaaccttaagaggacaatcgaggagatcaaggccaacagggatttggtagagagtcagaaccaggagcttcggtcaaagatttcgagtgcagagcaagagcgtagcctatttgaaggagagattaagagcgtcaggatggaattgggggcagtagaggaggccaagcagatccttacgagggagttmgatgctgagaagkcagagatcctgaaggaactggatgaccttgagaagaagmtagagkmattgcagaccaacaagggtttgctggaggctgaaaacgacaagcttcagctggaggtttttgaccgcacagcacaaacaaagcatgtccgaagcagaggctgagagccttaagatggaactgggagcattggtggaggcaaaggaggcggctacaaaagcatttggtgccgagaaagcaaagaccacgaaggaactggaggatcttaagaggaaggtggaggaaatccaaaccaagaaggatctggtggagggcgaaaaggataagctccgtttggagattttaatagcggagcagaggcatgccatggctgaattagaggttaagcgcctcaagatggacttggctgcatcggcagaggcgagggagacagttgtgaggtcatgtgacgctgagaaggccaagttcatggcggaaatagagaacctcaggaggaagatagaggaaatccacgccagcaaggaagcggccgagaaagcagcgcgcaacaaagatgcagaggctgacaggctgaaggatgagctggcgaggatccggctctctgtgtcacagctgcaagcgtcctgcgacgaacttgatgccaagcagtcgcgcctgaacgacgagaagaactctgtccagaaagcactagtgtccgagaaggtcgaaggtaacaagctcaagttaaaaatcgaggaactcgagaatcacattgctggcaaggacggtgagaaagggaaactgaaggcggcgttggaggaaaagatgactgagatcaatgctctcagcaaagacaacgcgatgctacatcgcacaattctcgaggcacaagagaagaataaaggtagcattttatcgttcttgtcaccgtgcggctccaagtaacttggttgtaatgtgttgcattactaatgcaatggtgaaggtaccatgcaatgaaatwrtttaaacacaatwwmgagkkwwctkkgwggggggaaaaaaaaaaaaaaaaaaaaaaaaaaaaaaaaaaaaaaaaaaaannntcgagggggggcccggtacccaat

SEQ ID NO: 22605 - protein, 391 aa, Zea mays subsp. mays
  peptide (1)..(391): Ceres Seq. ID no. 15218632
  misc_feature (38)..(390): Pfam Name: Pfam Description:  Myosin tail
  misc_feature (11)..(385): NCBI GI NO: 38346693 NR Description: OSJNBa0080E14.9
  misc_feature (27)..(390): NCBI GI NO: 38345638 NR Description: OSJNBb0028M18.1
  misc_feature (11)..(377): NCBI GI NO: 38345173 NR Description: OSJNBa0089E12.15
  misc_feature (41)..(377): NCBI GI NO: 32487724 NR Description: OSJNBa0022F16.25
  misc_feature (15)..(377): NCBI GI NO: 32487724 NR Description: OSJNBa0022F16.25
  misc_feature (16)..(390): NCBI GI NO: 38346693 NR Description: OSJNBa0080E14.9
  misc_feature (22)..(377): NCBI GI NO: 32487724 NR Description: OSJNBa0022F16.25
  misc_feature (45)..(389): NCBI GI NO: 38346693 NR Description: OSJNBa0080E14.9
  misc_feature (17)..(375): NCBI GI NO: 32487724 NR Description: OSJNBa0022F16.25
  misc_feature (41)..(385): NCBI GI NO: 32487724 NR Description: OSJNBa0022F16.25
  misc_feature (338)..(338): Xaa is any aa, unknown or other
  misc_feature (343)..(343): Xaa is any aa, unknown or other
  misc_feature (356)..(356): Xaa is any aa, unknown or other
  misc_feature (358)..(358): Xaa is any aa, unknown or other
MSSPTSPWFADLFTDDRVRTLSHQVSTLGDRVWELEHKITQLMGEKAKLEKQLEEAKAISSHKEEVGRSLKAENDKLQSEVLVAEEKCSKSAAEVERLTKELGALAEAKEAAAKEFNDEREKITLESEDLKMRLEEMLAIKDLTESENDKLRSEALIAAEKQNMYEAEIERLKKELSGLLEAKEAAAKAFDVQKAEITNELEELQRKLKEIEANKDLVEGENSKLQSEILTAQEKYRQSEAEVKCIKQVMCSVVEAKEAAARASEAEKAEIMEEMDNLKRTIEEIKANRDLVESQNQELRSKISSAEQERSLFEGEIKSVRMELGAVEEAKQILTREXDAEKXEILKELDDLEKKXEXLQTNKGLLEAENDKLQLEVFDRTAQTKHVRSRG

SEQ ID NO: 22606 - protein, 349 aa, Zea mays subsp. mays
  peptide (1)..(349): Ceres Seq. ID no. 15218633
  misc_feature (1)..(348): Pfam Name: Pfam Description:  Myosin tail
  misc_feature (1)..(343): NCBI GI NO: 38346693 NR Description: OSJNBa0080E14.9
  misc_feature (1)..(348): NCBI GI NO: 38345638 NR Description: OSJNBb0028M18.1
  misc_feature (1)..(335): NCBI GI NO: 38345173 NR Description: OSJNBa0089E12.15
  misc_feature (1)..(335): NCBI GI NO: 32487724 NR Description: OSJNBa0022F16.25
  misc_feature (1)..(335): NCBI GI NO: 32487724 NR Description: OSJNBa0022F16.25
  misc_feature (1)..(348): NCBI GI NO: 38346693 NR Description: OSJNBa0080E14.9
  misc_feature (1)..(335): NCBI GI NO: 32487724 NR Description: OSJNBa0022F16.25
  misc_feature (3)..(347): NCBI GI NO: 38346693 NR Description: OSJNBa0080E14.9
  misc_feature (1)..(333): NCBI GI NO: 32487724 NR Description: OSJNBa0022F16.25
  misc_feature (1)..(343): NCBI GI NO: 32487724 NR Description: OSJNBa0022F16.25
  misc_feature (296)..(296): Xaa is any aa, unknown or other
  misc_feature (301)..(301): Xaa is any aa, unknown or other
  misc_feature (314)..(314): Xaa is any aa, unknown or other
  misc_feature (316)..(316): Xaa is any aa, unknown or other
MGEKAKLEKQLEEAKAISSHKEEVGRSLKAENDKLQSEVLVAEEKCSKSAAEVERLTKELGALAEAKEAAAKEFNDEREKITLESEDLKMRLEEMLAIKDLTESENDKLRSEALIAAEKQNMYEAEIERLKKELSGLLEAKEAAAKAFDVQKAEITNELEELQRKLKEIEANKDLVEGENSKLQSEILTAQEKYRQSEAEVKCIKQVMCSVVEAKEAAARASEAEKAEIMEEMDNLKRTIEEIKANRDLVESQNQELRSKISSAEQERSLFEGEIKSVRMELGAVEEAKQILTREXDAEKXEILKELDDLEKKXEXLQTNKGLLEAENDKLQLEVFDRTAQTKHVRSRG

SEQ ID NO: 22607 - protein, 260 aa, Zea mays subsp. mays
  peptide (1)..(260): Ceres Seq. ID no. 15218634
  misc_feature (1)..(259): Pfam Name: Pfam Description:  Myosin tail
  misc_feature (1)..(254): NCBI GI NO: 38346693 NR Description: OSJNBa0080E14.9
  misc_feature (1)..(259): NCBI GI NO: 38345638 NR Description: OSJNBb0028M18.1
  misc_feature (1)..(246): NCBI GI NO: 38345173 NR Description: OSJNBa0089E12.15
  misc_feature (1)..(246): NCBI GI NO: 32487724 NR Description: OSJNBa0022F16.25
  misc_feature (1)..(246): NCBI GI NO: 32487724 NR Description: OSJNBa0022F16.25
  misc_feature (1)..(259): NCBI GI NO: 38346693 NR Description: OSJNBa0080E14.9
  misc_feature (1)..(246): NCBI GI NO: 32487724 NR Description: OSJNBa0022F16.25
  misc_feature (1)..(258): NCBI GI NO: 38346693 NR Description: OSJNBa0080E14.9
  misc_feature (1)..(244): NCBI GI NO: 32487724 NR Description: OSJNBa0022F16.25
  misc_feature (1)..(254): NCBI GI NO: 32487724 NR Description: OSJNBa0022F16.25
  misc_feature (207)..(207): Xaa is any aa, unknown or other
  misc_feature (212)..(212): Xaa is any aa, unknown or other
  misc_feature (225)..(225): Xaa is any aa, unknown or other
  misc_feature (227)..(227): Xaa is any aa, unknown or other
MRLEEMLAIKDLTESENDKLRSEALIAAEKQNMYEAEIERLKKELSGLLEAKEAAAKAFDVQKAEITNELEELQRKLKEIEANKDLVEGENSKLQSEILTAQEKYRQSEAEVKCIKQVMCSVVEAKEAAARASEAEKAEIMEEMDNLKRTIEEIKANRDLVESQNQELRSKISSAEQERSLFEGEIKSVRMELGAVEEAKQILTREXDAEKXEILKELDDLEKKXEXLQTNKGLLEAENDKLQLEVFDRTAQTKHVRSRG

SEQ ID NO: 22608 - DNA, 787 bp, Zea mays subsp. mays
  misc_feature (1)..(787): Ceres Seq. ID no. 13599859
aaatccgatcgatctccgcggcctccagatcccccggcgggcggagacggcgagctccaggcggccaagaagcccccccctcgcagcgctcctctcctctgcctctccgaatcccttaccagggggaaaaaacattgcctgaaagttcttcaggccctggtgtagcagctgaattacccagtttaatggcgaagaacgagctttagatggtctaaagatggagatgagatagaagcaccacaaagtgtacagtggggtagcaaggatatgactgtcatgatgcctcagcgccaccgggctacagccaagaagcccatgtggataatcgtgctcttgtgcatggtttgcatcgtgctgattggggcttacgtcttcccaccgcggcgcttctctaactgctacctctctgcttcaagtgtatgcgcacctttcaaggattggctcccttctatgggccgtcgggagagaactgacgaggagattatttcatctgtagttattagggatatcctttcaatgcccatgcctatgccaaaaaatccaaagattgcccttatgttcttgacaccaggttcattgccctttgagaaattgtgggagaagtttttacagggacatgagggaagatactccatctatgtgcacgcatcacgtgaaaagcctgttcatactagttctttgtttgctggccgggatattcacagtgatgcggtagtatggggattgatttcaatggttgatgctgagaaaagattgttagcgaatgcactggaagatgttgataatc

SEQ ID NO: 22609 - protein, 173 aa, Zea mays subsp. mays
  peptide (1)..(173): Ceres Seq. ID no. 13599860
  misc_feature (8)..(172): NCBI GI NO: 7487281 NR Description: hypothetical protein T20K24
  misc_feature (8)..(172): NCBI GI NO: 30680587 NR Description: expressed protein [Arabidopsis thaliana]
  misc_feature (1)..(172): NCBI GI NO: 38637182 NR Description: unknown protein
  misc_feature (1)..(172): NCBI GI NO: 15235920 NR Description: expressed protein [Arabidopsis thaliana]
  misc_feature (1)..(172): NCBI GI NO: 38346557 NR Description: OSJNBa0035M09.18
  misc_feature (1)..(172): NCBI GI NO: 7486517 NR Description: hypothetical protein F6G3
  misc_feature (1)..(172): NCBI GI NO: 22329024 NR Description: expressed protein [Arabidopsis thaliana]
  misc_feature (4)..(172): NCBI GI NO: 26452247 NR Description: unknown protein [Arabidopsis thaliana]
  misc_feature (8)..(172): NCBI GI NO: 8777360 NR Description: gene_id:MJB24
  misc_feature (8)..(172): NCBI GI NO: 22327910 NR Description: expressed protein [Arabidopsis thaliana]
MTVMMPQRHRATAKKPMWIIVLLCMVCIVLIGAYVFPPRRFSNCYLSASSVCAPFKDWLPSMGRRERTDEEIISSVVIRDILSMPMPMPKNPKIALMFLTPGSLPFEKLWEKFLQGHEGRYSIYVHASREKPVHTSSLFAGRDIHSDAVVWGLISMVDAEKRLLANALEDVDN

SEQ ID NO: 22610 - protein, 170 aa, Zea mays subsp. mays
  peptide (1)..(170): Ceres Seq. ID no. 13599861
  misc_feature (5)..(169): NCBI GI NO: 7487281 NR Description: hypothetical protein T20K24
  misc_feature (5)..(169): NCBI GI NO: 30680587 NR Description: expressed protein [Arabidopsis thaliana]
  misc_feature (1)..(169): NCBI GI NO: 38637182 NR Description: unknown protein
  misc_feature (1)..(169): NCBI GI NO: 15235920 NR Description: expressed protein [Arabidopsis thaliana]
  misc_feature (1)..(169): NCBI GI NO: 38346557 NR Description: OSJNBa0035M09.18
  misc_feature (1)..(169): NCBI GI NO: 7486517 NR Description: hypothetical protein F6G3
  misc_feature (1)..(169): NCBI GI NO: 22329024 NR Description: expressed protein [Arabidopsis thaliana]
  misc_feature (1)..(169): NCBI GI NO: 26452247 NR Description: unknown protein [Arabidopsis thaliana]
  misc_feature (5)..(169): NCBI GI NO: 8777360 NR Description: gene_id:MJB24
  misc_feature (5)..(169): NCBI GI NO: 22327910 NR Description: expressed protein [Arabidopsis thaliana]
MMPQRHRATAKKPMWIIVLLCMVCIVLIGAYVFPPRRFSNCYLSASSVCAPFKDWLPSMGRRERTDEEIISSVVIRDILSMPMPMPKNPKIALMFLTPGSLPFEKLWEKFLQGHEGRYSIYVHASREKPVHTSSLFAGRDIHSDAVVWGLISMVDAEKRLLANALEDVDN

SEQ ID NO: 22611 - protein, 169 aa, Zea mays subsp. mays
  peptide (1)..(169): Ceres Seq. ID no. 13599862
  misc_feature (4)..(168): NCBI GI NO: 7487281 NR Description: hypothetical protein T20K24
  misc_feature (4)..(168): NCBI GI NO: 30680587 NR Description: expressed protein [Arabidopsis thaliana]
  misc_feature (1)..(168): NCBI GI NO: 38637182 NR Description: unknown protein
  misc_feature (1)..(168): NCBI GI NO: 15235920 NR Description: expressed protein [Arabidopsis thaliana]
  misc_feature (1)..(168): NCBI GI NO: 38346557 NR Description: OSJNBa0035M09.18
  misc_feature (1)..(168): NCBI GI NO: 7486517 NR Description: hypothetical protein F6G3
  misc_feature (1)..(168): NCBI GI NO: 22329024 NR Description: expressed protein [Arabidopsis thaliana]
  misc_feature (1)..(168): NCBI GI NO: 26452247 NR Description: unknown protein [Arabidopsis thaliana]
  misc_feature (4)..(168): NCBI GI NO: 8777360 NR Description: gene_id:MJB24
  misc_feature (4)..(168): NCBI GI NO: 22327910 NR Description: expressed protein [Arabidopsis thaliana]
MPQRHRATAKKPMWIIVLLCMVCIVLIGAYVFPPRRFSNCYLSASSVCAPFKDWLPSMGRRERTDEEIISSVVIRDILSMPMPMPKNPKIALMFLTPGSLPFEKLWEKFLQGHEGRYSIYVHASREKPVHTSSLFAGRDIHSDAVVWGLISMVDAEKRLLANALEDVDN

SEQ ID NO: 22612 - DNA, 2061 bp, Zea mays subsp. mays
  misc_feature (1)..(2061): Ceres Seq. ID no. 13623497
tgatagctagggcctcttttcctgcttcggcttctcatgtttcttgccggtcgtagtggaatccctacatgacagttagtaataacaacatatatctgtaaggtactctgtttttttggttgatgaggtaaactcaaccctttgctttgatgataataataagagtcatattttgcaggattttttttatttagggattatctccgattcctctttacaccactttttttcatttcagtgcaatatcaggtagtggaagtgctgggaggagaaaaaatcttgtcttgcatctgattcggtcttgtagagaaacagaaatgaaatttcttgtcagaacactggttcgtaacttgcgtattggggctatgatgaagacgattttacctgcgcttgcacatgctgttgtttttgatagaaactgtgcagcagatcctgcggtgtcattggaaggcataaaatcacaactacagagtctttcaactgaagttgccgaggcatacaatgtcactcctaatctagatttgctcattccttctcttctgagagaaggcactgcattttcagcttcatccttggcaatggtgcctggcacacctattccacctatgcttgcaagaattactaacgggttgactcagtcgttgaaagctttccatggcagatcatttacttgtgagtacaagtatgatggtcagcgtgcccagattcacaaagcacttgatggatccgtgcgaatattttcaaggcaaatgaaagaatcaacttccagatttcctgatcttgtgaatatgattaaggagttgtgcaagcccgaagtgtcaagctttatactggatgccgaggtggtaggaattaacaggaagaaaggaaatgagttgatgtcgttccaagagctatcttcaagagaaagagggaataagcattcctcaatttcaatagagaacataaaggttgacatttgtgtgtttgtttttgacatcatgttccatgatggagagagactactggattgccctcttcggcaaagaagaaagtacattcatgacttgttccatgagaagccaggatattttgagttagctcagcagctaaatatagaagcctgcgaagcttcaccagacaattctagcactttggctaggatggacacgtttttcagaaatgcatgccagtcttcttgtgagggtataatgttaaagactttggatgtcgatgctggatactctgcttccaaacgctgtgattcatggttaaaggtcaagcgtgactatgtgcaaggcttaggtgatagccttgacttggttccgattggtgcatggtatggaaacggacgtaaagctgggtggtacagcccttttctcatggcatgctacaaccctgaaactgaagagttccaaagtgtatgtcgtgttatgtctggtttctcggatgagttctataaagagatgaaggagttctattcgggggaaaggatactgcccaagaagcctgtttactacaaaacagacgagcaaccagagctgtggttcaccgcagaacaaatctgggagatccgaggtgcagacctgacgttgtcccctgtccaccatgcggccattgggcttgtccatccatcgcgcggcatctcggtgaggatgccccggtacatccgttcagttccagaccggagcccagaggactgcggcacggccgccgatattgctagcatgttcaaagcccagacccggaagatggatgtcagcagcgagggccaggagtagtaggcaatgcaaagctcagcccatttcctcgtcctagctttgcttatgttcaccagttctgtatatacacagaacgaaccagggtgaagtgaaccaccctactgatcaaatggtgaaaactgaagcgtaggacaggcagcactgatcccactggctttcaatttttctttgtacagaaactgaatgcagttggaacgcggaaggaagcccacgagttgcacgttcggggggaaaaaaacgatgcataagtacatcaggcaaaaaaaaaaaaaaaaaaaactcgagggggggcccggtaccc

SEQ ID NO: 22613 - protein, 480 aa, Zea mays subsp. mays
  peptide (1)..(480): Ceres Seq. ID no. 13623498
  misc_feature (93)..(315): Pfam Name: Pfam Description:  ATP dependent DNA ligase domain
  misc_feature (1)..(377): NCBI GI NO: 15219728 NR Description: DNA ligase I -related [Arabidopsis thaliana]
  misc_feature (369)..(477): NCBI GI NO: 15219728 NR Description: DNA ligase I -related [Arabidopsis thaliana]
  misc_feature (1)..(176): NCBI GI NO: 34911260 NR Description: putative DNA ligase
  misc_feature (372)..(480): NCBI GI NO: 34911260 NR Description: putative DNA ligase
  misc_feature (173)..(376): NCBI GI NO: 34911260 NR Description: putative DNA ligase
  misc_feature (1)..(468): NCBI GI NO: 19112137 NR Description: dna ligase [Schizosaccharomyces pombe]
  misc_feature (1)..(468): NCBI GI NO: 28830036 NR Description: similar to Xenopus laevis (African clawed frog)
  misc_feature (1)..(469): NCBI GI NO: 30962491 NR Description: DNA ligase I [Coprinopsis cinerea]
  misc_feature (1)..(480): NCBI GI NO: 31239171 NR Description: ENSANGP00000010547 [Anopheles gambiae]
  misc_feature (51)..(468): NCBI GI NO: 23486709 NR Description: DNA ligase 1 [Plasmodium yoelii yoelii]
MKFLVRTLVRNLRIGAMMKTILPALAHAVVFDRNCAADPAVSLEGIKSQLQSLSTEVAEAYNVTPNLDLLIPSLLREGTAFSASSLAMVPGTPIPPMLARITNGLTQSLKAFHGRSFTCEYKYDGQRAQIHKALDGSVRIFSRQMKESTSRFPDLVNMIKELCKPEVSSFILDAEVVGINRKKGNELMSFQELSSRERGNKHSSISIENIKVDICVFVFDIMFHDGERLLDCPLRQRRKYIHDLFHEKPGYFELAQQLNIEACEASPDNSSTLARMDTFFRNACQSSCEGIMLKTLDVDAGYSASKRCDSWLKVKRDYVQGLGDSLDLVPIGAWYGNGRKAGWYSPFLMACYNPETEEFQSVCRVMSGFSDEFYKEMKEFYSGERILPKKPVYYKTDEQPELWFTAEQIWEIRGADLTLSPVHHAAIGLVHPSRGISVRMPRYIRSVPDRSPEDCGTAADIASMFKAQTRKMDVSSEGQE

SEQ ID NO: 22614 - protein, 464 aa, Zea mays subsp. mays
  peptide (1)..(464): Ceres Seq. ID no. 13623499
  misc_feature (77)..(299): Pfam Name: Pfam Description:  ATP dependent DNA ligase domain
  misc_feature (1)..(361): NCBI GI NO: 15219728 NR Description: DNA ligase I -related [Arabidopsis thaliana]
  misc_feature (353)..(461): NCBI GI NO: 15219728 NR Description: DNA ligase I -related [Arabidopsis thaliana]
  misc_feature (1)..(160): NCBI GI NO: 34911260 NR Description: putative DNA ligase
  misc_feature (356)..(464): NCBI GI NO: 34911260 NR Description: putative DNA ligase
  misc_feature (157)..(360): NCBI GI NO: 34911260 NR Description: putative DNA ligase
  misc_feature (1)..(452): NCBI GI NO: 19112137 NR Description: dna ligase [Schizosaccharomyces pombe]
  misc_feature (1)..(452): NCBI GI NO: 28830036 NR Description: similar to Xenopus laevis (African clawed frog)
  misc_feature (1)..(453): NCBI GI NO: 30962491 NR Description: DNA ligase I [Coprinopsis cinerea]
  misc_feature (1)..(464): NCBI GI NO: 31239171 NR Description: ENSANGP00000010547 [Anopheles gambiae]
  misc_feature (35)..(452): NCBI GI NO: 23486709 NR Description: DNA ligase 1 [Plasmodium yoelii yoelii]
MMKTILPALAHAVVFDRNCAADPAVSLEGIKSQLQSLSTEVAEAYNVTPNLDLLIPSLLREGTAFSASSLAMVPGTPIPPMLARITNGLTQSLKAFHGRSFTCEYKYDGQRAQIHKALDGSVRIFSRQMKESTSRFPDLVNMIKELCKPEVSSFILDAEVVGINRKKGNELMSFQELSSRERGNKHSSISIENIKVDICVFVFDIMFHDGERLLDCPLRQRRKYIHDLFHEKPGYFELAQQLNIEACEASPDNSSTLARMDTFFRNACQSSCEGIMLKTLDVDAGYSASKRCDSWLKVKRDYVQGLGDSLDLVPIGAWYGNGRKAGWYSPFLMACYNPETEEFQSVCRVMSGFSDEFYKEMKEFYSGERILPKKPVYYKTDEQPELWFTAEQIWEIRGADLTLSPVHHAAIGLVHPSRGISVRMPRYIRSVPDRSPEDCGTAADIASMFKAQTRKMDVSSEGQE

SEQ ID NO: 22615 - protein, 463 aa, Zea mays subsp. mays
  peptide (1)..(463): Ceres Seq. ID no. 13623500
  misc_feature (76)..(298): Pfam Name: Pfam Description:  ATP dependent DNA ligase domain
  misc_feature (1)..(360): NCBI GI NO: 15219728 NR Description: DNA ligase I -related [Arabidopsis thaliana]
  misc_feature (352)..(460): NCBI GI NO: 15219728 NR Description: DNA ligase I -related [Arabidopsis thaliana]
  misc_feature (1)..(159): NCBI GI NO: 34911260 NR Description: putative DNA ligase
  misc_feature (355)..(463): NCBI GI NO: 34911260 NR Description: putative DNA ligase
  misc_feature (156)..(359): NCBI GI NO: 34911260 NR Description: putative DNA ligase
  misc_feature (1)..(451): NCBI GI NO: 19112137 NR Description: dna ligase [Schizosaccharomyces pombe]
  misc_feature (1)..(451): NCBI GI NO: 28830036 NR Description: similar to Xenopus laevis (African clawed frog)
  misc_feature (1)..(452): NCBI GI NO: 30962491 NR Description: DNA ligase I [Coprinopsis cinerea]
  misc_feature (1)..(463): NCBI GI NO: 31239171 NR Description: ENSANGP00000010547 [Anopheles gambiae]
  misc_feature (34)..(451): NCBI GI NO: 23486709 NR Description: DNA ligase 1 [Plasmodium yoelii yoelii]
MKTILPALAHAVVFDRNCAADPAVSLEGIKSQLQSLSTEVAEAYNVTPNLDLLIPSLLREGTAFSASSLAMVPGTPIPPMLARITNGLTQSLKAFHGRSFTCEYKYDGQRAQIHKALDGSVRIFSRQMKESTSRFPDLVNMIKELCKPEVSSFILDAEVVGINRKKGNELMSFQELSSRERGNKHSSISIENIKVDICVFVFDIMFHDGERLLDCPLRQRRKYIHDLFHEKPGYFELAQQLNIEACEASPDNSSTLARMDTFFRNACQSSCEGIMLKTLDVDAGYSASKRCDSWLKVKRDYVQGLGDSLDLVPIGAWYGNGRKAGWYSPFLMACYNPETEEFQSVCRVMSGFSDEFYKEMKEFYSGERILPKKPVYYKTDEQPELWFTAEQIWEIRGADLTLSPVHHAAIGLVHPSRGISVRMPRYIRSVPDRSPEDCGTAADIASMFKAQTRKMDVSSEGQE

SEQ ID NO: 22616 - DNA, 1936 bp, Zea mays subsp. mays
  misc_feature (1)..(1936): Ceres Seq. ID no. 13574398
ggatcggcggagaatgaagatgaaggcgctggcgtgctgccggcggcggccccaggacttgagcatcgacatggaccaagagcccgacagggtgatgacatataatggcctggagacctgcattatcaactgttccgcctatgacgatgatagtggcatcagtgcaacaacatgcggagatggctgtgtcaccgctgattcccttgatgatgaagtctctagctgctttagtaaagatgcttctggttcttccttctcttcacactgccttagcaagcaggaggagcattcgctagatgagttgggtacacccatcgcaattcatctactccctttcaaagcgaagaaaccaatcacatataccttgagtgcttcagatattgaaaacatgaagaaaaaatttgcgaagcttttgctcggttatgatacttcaggaggcgctaggggcgtttgtgcggctctggccttgtctaatggcataatcaatctctctgctactgtttttggagaactctggaagctggaaccattgtgcgaagataaaaagatcaggtggagaaaagaaatggactggttgatgtctcctacaacttatatagtggagctggttccaaggaaacaaagcggagcagatggatgcacatttgagattatgactccaaaggcccgctcagatgttcatgtgaaccttcctgcccttcagaagcttgatacgatgctcattgaagtaatggactctatgatagatacagagttctggtatgaggagagtggtagcagagctgatggtccggtgaaaattaccggcccaaggaagagtaaaaagtggtggctcccatctcctcgtgtccctgagcaagggctatctcgatttcagcggaaaaggcttgtttttcaggctaagcttgttcaccagatcctcaaagccgcaaaatccatcaacgaacaagtcctgttccacatgcctattccggcagctgttatggatgcccttccaaagtctgggagagctagcttgggtgaagatttgtaccaggctataacgaccgagtatattcccatagaggaaatatttgtttccctcagtttgaaaactgagcatagtgtgctcgagactatgaaccagttggagggggcaatgtttgcatggaaccaaagaatcttagaggagcgaagcaagaggtcaccgggacgtcattcctggagcttcatgaaggacagctcgtcagaactcgacaagatgtctgcatgcatcgaaagggtcgacacccttgtgcagcttctgaaagccagatatccgaacctgcctccaacttttatagatgttctaaaggtccagtacaatgtggatgtggggaatgcaatcgtggaggcatactctagggttcttgtcggggtagcattcagcatactgtcgcgcgtggcggagatactgctggaggatgacctggtcaagaggcccaacacccccatggcctcactgaagttcgacctctcctccgacgtgtacttggccggcataacagagacgccgccgggacacgtccggaggtcccttatggatcagatcagcatggtcgacgggcgcttcaacgctgctgtgaagaagaaaggagcgaagcagctgaggtggtgaggacagtcggctgttgtgtgaaatcttttggccatgtacagggtgggtgatgcagagcccagtgtccgctccacaaggacacaaggcaaggttaccatagcaatagcgccagtgtaatgtatttggcaacgagtttatagcttactgtaagagcaagcattaggcgaatcctgcctgtcgaagtctccggatgttgctgttccgtctgaacatctgatgctcttggtcagcctctgctgcatttcttgctggcaacaaagaaaacctaaaaaaaaaatgagaaaacttctacaaagctct

SEQ ID NO: 22617 - protein, 544 aa, Zea mays subsp. mays
  peptide (1)..(544): Ceres Seq. ID no. 13574399
  misc_feature (31)..(489): Pfam Name: DUF315 Pfam Description: Domain of unknown function
  misc_feature (8)..(528): NCBI GI NO: 30692580 NR Description: expressed protein [Arabidopsis thaliana]
  misc_feature (8)..(528): NCBI GI NO: 26452131 NR Description: unknown protein [Arabidopsis thaliana]
  misc_feature (31)..(528): NCBI GI NO: 12597851 NR Description: hypothetical protein [Arabidopsis thaliana]
  misc_feature (48)..(494): NCBI GI NO: 15233845 NR Description: expressed protein [Arabidopsis thaliana]
  misc_feature (48)..(494): NCBI GI NO: 15810309 NR Description: unknown protein [Arabidopsis thaliana]
  misc_feature (74)..(483): NCBI GI NO: 34908302 NR Description: P0005H10.23
  misc_feature (73)..(485): NCBI GI NO: 15241663 NR Description: hypothetical protein [Arabidopsis thaliana]
  misc_feature (125)..(491): NCBI GI NO: 15220004 NR Description: hypothetical protein [Arabidopsis thaliana]
  misc_feature (125)..(483): NCBI GI NO: 15230137 NR Description: hypothetical protein [Arabidopsis thaliana]
  misc_feature (126)..(486): NCBI GI NO: 15239292 NR Description: hypothetical protein [Arabidopsis thaliana]
DRRRMKMKALACCRRRPQDLSIDMDQEPDRVMTYNGLETCIINCSAYDDDSGISATTCGDGCVTADSLDDEVSSCFSKDASGSSFSSHCLSKQEEHSLDELGTPIAIHLLPFKAKKPITYTLSASDIENMKKKFAKLLLGYDTSGGARGVCAALALSNGIINLSATVFGELWKLEPLCEDKKIRWRKEMDWLMSPTTYIVELVPRKQSGADGCTFEIMTPKARSDVHVNLPALQKLDTMLIEVMDSMIDTEFWYEESGSRADGPVKITGPRKSKKWWLPSPRVPEQGLSRFQRKRLVFQAKLVHQILKAAKSINEQVLFHMPIPAAVMDALPKSGRASLGEDLYQAITTEYIPIEEIFVSLSLKTEHSVLETMNQLEGAMFAWNQRILEERSKRSPGRHSWSFMKDSSSELDKMSACIERVDTLVQLLKARYPNLPPTFIDVLKVQYNVDVGNAIVEAYSRVLVGVAFSILSRVAEILLEDDLVKRPNTPMASLKFDLSSDVYLAGITETPPGHVRRSLMDQISMVDGRFNAAVKKKGAKQLRW

SEQ ID NO: 22618 - protein, 540 aa, Zea mays subsp. mays
  peptide (1)..(540): Ceres Seq. ID no. 13574400
  misc_feature (27)..(485): Pfam Name: DUF315 Pfam Description: Domain of unknown function
  misc_feature (4)..(524): NCBI GI NO: 30692580 NR Description: expressed protein [Arabidopsis thaliana]
  misc_feature (4)..(524): NCBI GI NO: 26452131 NR Description: unknown protein [Arabidopsis thaliana]
  misc_feature (27)..(524): NCBI GI NO: 12597851 NR Description: hypothetical protein [Arabidopsis thaliana]
  misc_feature (44)..(490): NCBI GI NO: 15233845 NR Description: expressed protein [Arabidopsis thaliana]
  misc_feature (44)..(490): NCBI GI NO: 15810309 NR Description: unknown protein [Arabidopsis thaliana]
  misc_feature (70)..(479): NCBI GI NO: 34908302 NR Description: P0005H10.23
  misc_feature (69)..(481): NCBI GI NO: 15241663 NR Description: hypothetical protein [Arabidopsis thaliana]
  misc_feature (121)..(487): NCBI GI NO: 15220004 NR Description: hypothetical protein [Arabidopsis thaliana]
  misc_feature (121)..(479): NCBI GI NO: 15230137 NR Description: hypothetical protein [Arabidopsis thaliana]
  misc_feature (122)..(482): NCBI GI NO: 15239292 NR Description: hypothetical protein [Arabidopsis thaliana]
MKMKALACCRRRPQDLSIDMDQEPDRVMTYNGLETCIINCSAYDDDSGISATTCGDGCVTADSLDDEVSSCFSKDASGSSFSSHCLSKQEEHSLDELGTPIAIHLLPFKAKKPITYTLSASDIENMKKKFAKLLLGYDTSGGARGVCAALALSNGIINLSATVFGELWKLEPLCEDKKIRWRKEMDWLMSPTTYIVELVPRKQSGADGCTFEIMTPKARSDVHVNLPALQKLDTMLIEVMDSMIDTEFWYEESGSRADGPVKITGPRKSKKWWLPSPRVPEQGLSRFQRKRLVFQAKLVHQILKAAKSINEQVLFHMPIPAAVMDALPKSGRASLGEDLYQAITTEYIPIEEIFVSLSLKTEHSVLETMNQLEGAMFAWNQRILEERSKRSPGRHSWSFMKDSSSELDKMSACIERVDTLVQLLKARYPNLPPTFIDVLKVQYNVDVGNAIVEAYSRVLVGVAFSILSRVAEILLEDDLVKRPNTPMASLKFDLSSDVYLAGITETPPGHVRRSLMDQISMVDGRFNAAVKKKGAKQLRW

SEQ ID NO: 22619 - protein, 538 aa, Zea mays subsp. mays
  peptide (1)..(538): Ceres Seq. ID no. 13574401
  misc_feature (25)..(483): Pfam Name: DUF315 Pfam Description: Domain of unknown function
  misc_feature (2)..(522): NCBI GI NO: 30692580 NR Description: expressed protein [Arabidopsis thaliana]
  misc_feature (2)..(522): NCBI GI NO: 26452131 NR Description: unknown protein [Arabidopsis thaliana]
  misc_feature (25)..(522): NCBI GI NO: 12597851 NR Description: hypothetical protein [Arabidopsis thaliana]
  misc_feature (42)..(488): NCBI GI NO: 15233845 NR Description: expressed protein [Arabidopsis thaliana]
  misc_feature (42)..(488): NCBI GI NO: 15810309 NR Description: unknown protein [Arabidopsis thaliana]
  misc_feature (68)..(477): NCBI GI NO: 34908302 NR Description: P0005H10.23
  misc_feature (67)..(479): NCBI GI NO: 15241663 NR Description: hypothetical protein [Arabidopsis thaliana]
  misc_feature (119)..(485): NCBI GI NO: 15220004 NR Description: hypothetical protein [Arabidopsis thaliana]
  misc_feature (119)..(477): NCBI GI NO: 15230137 NR Description: hypothetical protein [Arabidopsis thaliana]
  misc_feature (120)..(480): NCBI GI NO: 15239292 NR Description: hypothetical protein [Arabidopsis thaliana]
MKALACCRRRPQDLSIDMDQEPDRVMTYNGLETCIINCSAYDDDSGISATTCGDGCVTADSLDDEVSSCFSKDASGSSFSSHCLSKQEEHSLDELGTPIAIHLLPFKAKKPITYTLSASDIENMKKKFAKLLLGYDTSGGARGVCAALALSNGIINLSATVFGELWKLEPLCEDKKIRWRKEMDWLMSPTTYIVELVPRKQSGADGCTFEIMTPKARSDVHVNLPALQKLDTMLIEVMDSMIDTEFWYEESGSRADGPVKITGPRKSKKWWLPSPRVPEQGLSRFQRKRLVFQAKLVHQILKAAKSINEQVLFHMPIPAAVMDALPKSGRASLGEDLYQAITTEYIPIEEIFVSLSLKTEHSVLETMNQLEGAMFAWNQRILEERSKRSPGRHSWSFMKDSSSELDKMSACIERVDTLVQLLKARYPNLPPTFIDVLKVQYNVDVGNAIVEAYSRVLVGVAFSILSRVAEILLEDDLVKRPNTPMASLKFDLSSDVYLAGITETPPGHVRRSLMDQISMVDGRFNAAVKKKGAKQLRW

SEQ ID NO: 22620 - DNA, 2272 bp, Zea mays subsp. mays
  misc_feature (1)..(2272): Ceres Seq. ID no. 13600163
  misc_feature (2086)..(2086): n is a, c, t, g, unknown, or other
gagctcactagtcccccccccccctaaatggcttacgcccgaggggcttattcttccttatcatggtatgatataattatcatacaaaaatgttacactgcttttacagggtgtacctcatctatttgcttgtacaattcatcttactactgctttgacaaacattggtctgcactgctttggtctgtgctttaggattctgtttcattgggagaaacaaatgcccttgcttacttttatttatgcttttctgaataattaagaagactagcctcatgttggaatcttcagcgttatatataatacaaaaaaagaggtttgcaatgaaaagttaaaaaggggacttttctccaatacaaggaatcatcttgacagaatataaaacttttcttctaaacatagcatacaatggttttagctgattattgtgtatttcagaagatggtgaattgtgtgaatacttccctagccctttttgctacatcgaggtcttcaggaggaaccttgcttttgacaccaggaatgttgtaagcattacagtatgcaattagttccttctttattaccatatatatgaacttaggtgttcctctactgaccaggcttcagaccaatctggagaagtgtcaggtcatacccatccagttatccatggtcaaacttgcctttgtacaggagattttcagctgtcagattgctcctttcccctgccactacttaggtgttcctctctcaatctacaagcctaaacacagtaaggattaaggagcagccgttgtatacttgtatataattgtggatagaattcccacttggatgggcaacatgctaaatttagctgggcgagctaccttggtgaaggtcacacactctgcaattccgatattcatctccattgacacctgtttgtcggtatgggccattgaacagattgatctgtcaccctactgagcttggtagggtatgccctcatattaaggtgggaatggcttcacataactgacccatatcgtacttggattgatcttctgagtctggcttgatggttcctcaattaagcatgtggctgatctgtgcaactgtgggtagataaattcattggatttttttttgctgaggttgctttttttgcatccgtgtctatgtcgacatagaggcatcattatggtgcatgataataaaaactatttgtaaacctttgttgtacatgcccagattggggaagactttacagtcgataactttactatatacccttctttgtcaaggctttgatgataagccaatggttaaaagggttgtcattgtaacccccacaagcttagttagcaactgggaatctgagataattaagtggttgaaaggcagagtgcaggtgctggccatctgtgaaagcacacgtgctgatgttctttccggaattgaaagtttcttaaaacccttgagccgtctccatgttttcttttgcttactaattatttgttaatatacactatactaaatgaaaatgtagctgcaagttaatgacaatttctgtggtgcatgaataatcttcaggtacttatcatatcttatgagactttccgcatgcattcttcatgcgcgcaccaagtgcgcgcagtgccataccgtggagcgaggtggcgcgcacaggcaggggcccaacctgcacggcctcttcggtcgtcagtcaggcaccaccctcggctaagcctactccacgaccaacaagaacatggtcatcgtctgggaggagggcaccctgtacgactacctcttcaaccccaagaagtacattctaggcacaaagatggtcttcccggggctcaagaagcccaaggagcgaaccgatctcatcgcctacttgacctatcgacgcaacaggggatactcacactgtcatccttagctctgtggcaataagtcgttcgtctgcaacacagccgacagaaaactgagcatgtgcttcagagaccaggcattattgaactttgctgccactaatttacattagatgaactgagttacagcagaatgaatttcctggatcctaaatgcagagaataaataaataaaaatatataanaggaaaaaaaaaaaaaaaaaaaaaaaaaaaaaaaaaaaaaaaaaaaaaaaaaaaaaaaaaaaaaaaaaaaaaaaaaaaaaaaaaaaaaaaaaaaaaaaaaaaaaaaaaaaaaaaaaacccccccggggggggccccgaaccccaatccccccaaaagggggcgaaaaaaaaacccccggcccccct

SEQ ID NO: 22621 - protein, 126 aa, Zea mays subsp. mays
  peptide (1)..(126): Ceres Seq. ID no. 13600164
  misc_feature (4)..(19): NCBI GI NO: 22331177 NR Description: DNA repair protein RAD54, putative
  misc_feature (4)..(19): NCBI GI NO: 9294624 NR Description: DNA repair protein RAD54-like
MNNLQVLIISYETFRMHSSCAHQVRAVPYRGARWRAQAGAQPARPLRSSVRHHPRLSLLHDQQEHGHRLGGGHPVRLPLQPQEVHSRHKDGLPGAQEAQGANRSHRLLDLSTQQGILTLSSLALWQ

SEQ ID NO: 22622 - protein, 111 aa, Zea mays subsp. mays
  peptide (1)..(111): Ceres Seq. ID no. 13600165
MHSSCAHQVRAVPYRGARWRAQAGAQPARPLRSSVRHHPRLSLLHDQQEHGHRLGGGHPVRLPLQPQEVHSRHKDGLPGAQEAQGANRSHRLLDLSTQQGILTLSSLALWQ

SEQ ID NO: 22623 - protein, 104 aa, Zea mays subsp. mays; identical to SEQ ID NO: 22571
  peptide (1)..(104): Ceres Seq. ID no. 13600166
  misc_feature (16)..(96): Pfam Name: Pfam Description:  SNF2 family N-terminal domain
  misc_feature (16)..(96): NCBI GI NO: 22331177 NR Description: DNA repair protein RAD54, putative
  misc_feature (16)..(96): NCBI GI NO: 9294624 NR Description: DNA repair protein RAD54-like
  misc_feature (16)..(94): NCBI GI NO: 3329473 NR Description: RAD54 DNA repair protein [Drosophila melanogaster]
  misc_feature (16)..(94): NCBI GI NO: 1765914 NR Description: RAD54 [Drosophila melanogaster]
  misc_feature (16)..(94): NCBI GI NO: 27819922 NR Description: LD35220p [Drosophila melanogaster]
  misc_feature (16)..(87): NCBI GI NO: 23482686 NR Description: DNA repair protein RAD54-like-related
  misc_feature (16)..(87): NCBI GI NO: 23612971 NR Description: DNA repair protein rad54, putative
  misc_feature (16)..(88): NCBI GI NO: 28277973 NR Description: Similar to RAD54-like (S. cerevisiae)
  misc_feature (16)..(88): NCBI GI NO: 26353994 NR Description: unnamed protein product [Mus musculus]
  misc_feature (16)..(88): NCBI GI NO: 26326753 NR Description: unnamed protein product [Mus musculus]

SEQ ID NO: 22624 - DNA, 1985 bp, Zea mays subsp. mays
  misc_feature (1)..(1985): Ceres Seq. ID no. 15224673
ctagtccccccccccccccattaaaccctaaccctaaaataacggtttgttttgctctctcggtttccatgggtgtggctgagaccaagtctctcagtggccgaaaccctagatttagtgttagttaaaccctaacccgagagatctaaaattcttaaatctggtttgtttatttttctgcatctgaaccactgcagggagttcaggagttttgtgtctagattcttaaatctgaataaacaagttgaatatattaactgcaatgaaaacatatagatgtcatctgccacctatctccacgcacagtctggctcgacatcacctgcccttctcgtgatatctgattactgttttgctagtgctagctatcgatgctgttcggggattagtagtgttctatttcatcctcttaatgtgttcgcatcagatagatatatgttcatatgatttaaggatatcctgtcagcagcttacacatttgtctatctccatgcttcctttctttagttggagactggattattttttgttgggataaacttagtacattatcagagcatcttaactctggatatgggtgcctttaagggatatccaataaacaaaatttgaacacatttggtttgtcgtataggtacaaagccagcacatgcttgggcaggtttgatcagtttcactaggaactgttcactaattgactgtctcagtaatacaattgaatagcctgcaactcagttagccatgactttcttcgtcatagtttctttagctgaattattttgcacatattacatggatgtgcactacccatgttgttcaatatcccacatcaatatcgaattgagtatgatgactgatgacaactaccagttattgtttcttgaattggcaacaacttggtctgtgagtcattcccactttgcccctacccttgctgagtagtgtcattcttttaggcataccttatagatgaatgattttttacattactgccttccccagtccccatcccaccccatttttttgtatcttagaaaatgtgacttggacaataagatgttgcttgagttacttacatttcttaaaagtattgattagtcttgcatctggatgcaggagctctgcagtaaaggaagtgtgtagtcaccatggtccatttcaagaataggtacatggtggtggagatctttatagatgcaggtagaggtgaacaggaccctgtaatcctcacccaatttaatataacaaaagttataaaagacagcattcagctcaactttggagagtgtggcctagctggatctcttggatcattgcaagttaagtatgttaatcctgtaacgaagctctgcatcgtccgcttgtctcgcgaagaccaccaaaaagtttgggctgctatgacgatggtgcggtgcattgggaagatccccgtttcgttcaacttgctcgacatgagtggaagcatcagggcttgcaagaaagctgcactggagtgcgatgaagcgaaatttgagcaatacaagctggctgcaggtgattgtatcacggcagagatcatccagtctgtagagaagtgctttgagaagatcagaggactagagagctaagcagaagaattgacatcacgtccacccaccctcggatcctaaaacctgctgaccctgcaccgcatccgtgatcacgtcacaccacaagctgtgtgtcctggctccagcgcccaccacggcaacggcctctcgccacttgctgccagcagcctccgtgcctccatcagctctcctttccaaggaaaagtctgaagtctgcaaccaaacaagtgttctgcagctgctctttgccgttggttgaagtctgcaaccaaacaaatgttatgcagctgctctttgccgttggttggagttctcggctccacactttcagaaagaattcatgtatacataaaatttattatatagagagtttgcttcgtatattagtaatttttt

SEQ ID NO: 22625 - protein, 152 aa, Zea mays subsp. mays; identical to SEQ ID NO: 22566
  peptide (1)..(152): Ceres Seq. ID no. 15224674
  misc_feature (7)..(94): Pfam Name: Pfam Description:  Rpp14 family
  misc_feature (1)..(152): NCBI GI NO: 38343977 NR Description: OSJNBa0041M21.1
  misc_feature (6)..(152): NCBI GI NO: 38568007 NR Description: OSJNBb0068N06.26
  misc_feature (1)..(152): NCBI GI NO: 22329330 NR Description: Probable lipoate-protein ligase B -related
  misc_feature (1)..(94): NCBI GI NO: 3122357 NR Description: Probable lipoate-protein ligase
  misc_feature (1)..(126): NCBI GI NO: 19075979 NR Description: putative pre-tRNA/pre-rRNA processing protein
  misc_feature (1)..(115): NCBI GI NO: 20270249 NR Description: RNase MRP/RNase P protein-like isoform a

SEQ ID NO: 22626 - protein, 144 aa, Zea mays subsp. mays; identical to SEQ ID NO: 22567
  peptide (1)..(144): Ceres Seq. ID no. 15224675
  misc_feature (1)..(86): Pfam Name: Pfam Description:  Rpp14 family
  misc_feature (1)..(144): NCBI GI NO: 38343977 NR Description: OSJNBa0041M21.1
  misc_feature (1)..(144): NCBI GI NO: 38568007 NR Description: OSJNBb0068N06.26
  misc_feature (1)..(144): NCBI GI NO: 22329330 NR Description: Probable lipoate-protein ligase B -related
  misc_feature (1)..(86): NCBI GI NO: 3122357 NR Description: Probable lipoate-protein ligase
  misc_feature (1)..(118): NCBI GI NO: 19075979 NR Description: putative pre-tRNA/pre-rRNA processing protein
  misc_feature (1)..(107): NCBI GI NO: 20270249 NR Description: RNase MRP/RNase P protein-like isoform a

SEQ ID NO: 22627 - DNA, 616 bp, Zea mays subsp. mays
  misc_feature (1)..(616): Ceres Seq. ID no. 14302176
actgagaagaaggagagctcagaaaccaaagaagctcggaagagcacgcagagtccagaaggcggcggcaaaggcgacgagggtccagacagcaaggcggagggcgagaaggaagcggccgttgttgaccttaggccactgacgatggaagacctgaggcaggcaaagaaccaggttgcagcgagcttcgccgccgagggtgccgtgatgaacgagctcaggcagtggaacgacctgtacggcgaaggggggtccaggaagaaacagcagctgacctacttcttgtagaggtgaagcatttggcaggtggtggagaggaacagagctgggcagacggtggacccatacttgatgaaccgagcatggtttcttcaagacgtgacgtgggcatgacgcatagtactagtctttgaggttccaggatccatgagatgagatgaggtcgatggtcaatttgtaggatcatgaactattattcttttacatgcatttgtacatgagcgctagactggttatgtatatctggattgattgaacagctcttgtgtttgagggtcattttagcttctcgtagactgctgtaattatatcatatatagtgagtatatatattcac

SEQ ID NO: 22628 - protein, 95 aa, Zea mays subsp. mays
  peptide (1)..(95): Ceres Seq. ID no. 14302177
  misc_feature (3)..(95): NCBI GI NO: 15234347 NR Description: hypothetical protein [Arabidopsis thaliana]
  misc_feature (1)..(95): NCBI GI NO: 34904204 NR Description: P0492F05.26
  misc_feature (5)..(95): NCBI GI NO: 34912822 NR Description: P0501G01.20
  misc_feature (5)..(95): NCBI GI NO: 18407974 NR Description: expressed protein [Arabidopsis thaliana]
  misc_feature (5)..(95): NCBI GI NO: 30696968 NR Description: expressed protein [Arabidopsis thaliana]
  misc_feature (13)..(95): NCBI GI NO: 25404926 NR Description: protein F22C12.12
  misc_feature (43)..(95): NCBI GI NO: 7487016 NR Description: hypothetical protein T14P8
  misc_feature (43)..(95): NCBI GI NO: 25518408 NR Description: hypothetical protein F22D16
  misc_feature (43)..(95): NCBI GI NO: 30678418 NR Description: expressed protein [Arabidopsis thaliana]
  misc_feature (43)..(95): NCBI GI NO: 20259341 NR Description: unknown protein [Arabidopsis thaliana]
TEKKESSETKEARKSTQSPEGGGKGDEGPDSKAEGEKEAAVVDLRPLTMEDLRQAKNQVAASFAAEGAVMNELRQWNDLYGEGGSRKKQQLTYFL

SEQ ID NO: 22629 - protein, 47 aa, Zea mays subsp. mays
  peptide (1)..(47): Ceres Seq. ID no. 14302178
  misc_feature (1)..(47): NCBI GI NO: 15234347 NR Description: hypothetical protein [Arabidopsis thaliana]
  misc_feature (1)..(47): NCBI GI NO: 34904204 NR Description: P0492F05.26
  misc_feature (1)..(47): NCBI GI NO: 34912822 NR Description: P0501G01.20
  misc_feature (1)..(47): NCBI GI NO: 18407974 NR Description: expressed protein [Arabidopsis thaliana]
  misc_feature (1)..(47): NCBI GI NO: 30696968 NR Description: expressed protein [Arabidopsis thaliana]
  misc_feature (1)..(47): NCBI GI NO: 25404926 NR Description: protein F22C12.12
  misc_feature (1)..(47): NCBI GI NO: 7487016 NR Description: hypothetical protein T14P8
  misc_feature (1)..(47): NCBI GI NO: 25518408 NR Description: hypothetical protein F22D16
  misc_feature (1)..(47): NCBI GI NO: 30678418 NR Description: expressed protein [Arabidopsis thaliana]
  misc_feature (1)..(47): NCBI GI NO: 20259341 NR Description: unknown protein [Arabidopsis thaliana]
MEDLRQAKNQVAASFAAEGAVMNELRQWNDLYGEGGSRKKQQLTYFL

SEQ ID NO: 22630 - DNA, 627 bp, Zea mays subsp. mays
  misc_feature (1)..(627): Ceres Seq. ID no. 13599941
  misc_feature (571)..(571): n is a, c, t, g, unknown, or other
  misc_feature (570)..(570): n is a, c, t, g, unknown, or other
  misc_feature (572)..(572): n is a, c, t, g, unknown, or other
  misc_feature (573)..(573): n is a, c, t, g, unknown, or other
tctatagagcccatcctctgcttcgcataacctagcggcaccagcagctaaccgtccagagaacagaacagagatgaccaccagcgtccccgtccctctggcctcacagtcgcaggcgccgcagcgcaagccacggacctacaccccgagcccatggggtgacttcttcctccaccacaccccatgcactccgtcacagctcttgtcgatgaaggagagggcaaaggtcaaggagcaacaggtgaggcagatcatacaggaaacaatggcctcctccaacctgcttcgcaagttggagcttgtggacacgctgcagcgtctcggggtggactaccgctacaacgaggagatcgaccagttgcttcgctctgtatacgacgacgacgacagggacggaggcggctccgacgatctctacctcacctcgctgcggttgtacttgctcaggaagcatgggtatacaacctcttcagatgtgttcgagaaattcagggacgagcgcgggagcgtctcgagcgacgatgccggctgcttgctcatgctgtatgacgctgctcatacgagaactcnnnnggaggagattcttgacgacatcatcgcttgggagcagagccgcctgcaatccct

SEQ ID NO: 22631 - protein, 184 aa, Zea mays subsp. mays
  peptide (1)..(184): Ceres Seq. ID no. 13599942
  misc_feature (28)..(183): Pfam Name: Pfam Description:  Terpene synthase, N-terminal domain
  misc_feature (19)..(183): NCBI GI NO: 38636781 NR Description: putative sesquiterpene cyclase 1
  misc_feature (1)..(183): NCBI GI NO: 34894946 NR Description: putative sesquiterpene cyclase 1
  misc_feature (1)..(182): NCBI GI NO: 8389329 NR Description: (+)-delta-cadinene synthase [Gossypium hirsutum]
  misc_feature (8)..(182): NCBI GI NO: 3287826 NR Description:
  misc_feature (8)..(182): NCBI GI NO: 30519654 NR Description: (+)-delta-cadinene synthase [Gossypium arboreum]
  misc_feature (8)..(182): NCBI GI NO: 5802576 NR Description: (+)-delta-cadinene sythase [Gossypium arboreum]
  misc_feature (1)..(182): NCBI GI NO: 3287832 NR Description: (+)-delta-cadinene synthase (D-cadinene synthase)
  misc_feature (1)..(182): NCBI GI NO: 3287824 NR Description:
  misc_feature (1)..(182): NCBI GI NO: 3287834 NR Description:
  misc_feature (1)..(183): NCBI GI NO: 9864189 NR Description: terpene synthase [Citrus junos]
  misc_feature (166)..(166): Xaa is any aa, unknown or other
  misc_feature (167)..(167): Xaa is any aa, unknown or other
MTTSVPVPLASQSQAPQRKPRTYTPSPWGDFFLHHTPCTPSQLLSMKERAKVKEQQVRQIIQETMASSNLLRKLELVDTLQRLGVDYRYNEEIDQLLRSVYDDDDRDGGGSDDLYLTSLRLYLLRKHGYTTSSDVFEKFRDERGSVSSDDAGCLLMLYDAAHTRTXXEEILDDIIAWEQSRLQS

SEQ ID NO: 22632 - protein, 139 aa, Zea mays subsp. mays
  peptide (1)..(139): Ceres Seq. ID no. 13599943
  misc_feature (1)..(138): Pfam Name: Pfam Description:  Terpene synthase, N-terminal domain
  misc_feature (1)..(138): NCBI GI NO: 38636781 NR Description: putative sesquiterpene cyclase 1
  misc_feature (1)..(138): NCBI GI NO: 34894946 NR Description: putative sesquiterpene cyclase 1
  misc_feature (1)..(137): NCBI GI NO: 8389329 NR Description: (+)-delta-cadinene synthase [Gossypium hirsutum]
  misc_feature (1)..(137): NCBI GI NO: 3287826 NR Description:
  misc_feature (1)..(137): NCBI GI NO: 30519654 NR Description: (+)-delta-cadinene synthase [Gossypium arboreum]
  misc_feature (1)..(137): NCBI GI NO: 5802576 NR Description: (+)-delta-cadinene sythase [Gossypium arboreum]
  misc_feature (1)..(137): NCBI GI NO: 3287832 NR Description: (+)-delta-cadinene synthase (D-cadinene synthase)
  misc_feature (1)..(137): NCBI GI NO: 3287824 NR Description:
  misc_feature (1)..(137): NCBI GI NO: 3287834 NR Description:
  misc_feature (1)..(138): NCBI GI NO: 9864189 NR Description: terpene synthase [Citrus junos]
  misc_feature (121)..(121): Xaa is any aa, unknown or other
  misc_feature (122)..(122): Xaa is any aa, unknown or other
MKERAKVKEQQVRQIIQETMASSNLLRKLELVDTLQRLGVDYRYNEEIDQLLRSVYDDDDRDGGGSDDLYLTSLRLYLLRKHGYTTSSDVFEKFRDERGSVSSDDAGCLLMLYDAAHTRTXXEEILDDIIAWEQSRLQS

SEQ ID NO: 22633 - protein, 121 aa, Zea mays subsp. mays
  peptide (1)..(121): Ceres Seq. ID no. 13599944
MHSVTALVDEGEGKGQGATGEADHTGNNGLLQPASQVGACGHAAASRGGLPLQRGDRPVASLCIRRRRQGRRRLRRSLPHLAAVVLAQEAWVYNLFRCVREIQGRARERLERRCRLLAHAV

SEQ ID NO: 22634 - DNA, 2219 bp, Zea mays subsp. mays
  misc_feature (1)..(2219): Ceres Seq. ID no. 13600220
gcaagactcaatacacaagcagagctcaaacaattcttgcttcccgctagctagctcgcaagaaataatggctccacttcttcttgcttctcgcacagcctgtcatcctggccttacaagcagccgccatgataatggccggcacggcctttcttcttcaccgggaagtagtagtaagcgaagccgtagccttagcttcataccacgagctgaaaagacgacgacaggcggtgagggtcatgttgtgagcgaaaagctgagcccctggcaaatccccaggagggagtggttcccccctagctttatctttggtgccgccacttcagcataccaaattgaaggcgcttggaacgaaggtggcaaggggccaagcacttgggacgatttctgccacaaatatccggagtggatagcggacgggagcagtggggatgttggagcgaactcctactacctgtatagagaggatgtcagattgctgaaggagatgggtatggacgcctacaggttctctatcgcttggtccagaatactgccaaaggggacgctcgagggaggcattaaccataaaggcatcgagtactacaaaaggctcatcaacttgttgaaagagaacggcatagaaccatatgtaacacttttccactgggacacacctcaagcgctggtggacagctacggtggcttcttagatgacaggattgtaaaagattacacggactttgccaaggtgtgctttgtgcacttcggcgacgtcgtgaagaactggttcaccttcaacgagccacagacgttctcctctttttcctacggaaccgggatctttgccccggggcggtgctccccaggacaaaaatgcgctaacccaaccgggaactcgctaaccgagccttacattgttgcccacaaccttctccgagctcatgctgagactgtccatgagtacaacaagcattacagaggtaacaaggacgcacagatagggattgcgttcgatgtgatgggccgtgtgccatatgacaatatgtttctggacgaccaggcccaagaaaggtccatcgattataacctaggatggttcatggagccggtagttcgcggcgactaccctttctccatgagatcattgatcaaggatcggctaccctacttcaccgacgacgagaaagagaagttagtgggttcgtatgacataatggggataaactactacacctcaaggttttccaagcacatcgacatctcgccaaagtactcgccagtgctcaacaccgacgatgcctatgccgcccaagagacgaaaggacctgacgggaatactattggtccatctatggggaatccgtggatttacatgtaccctaacggcctaaaggatatccttatgttcatgaagaacaaatacggaaacccaccggtctacatcactgagaatggaatcggggatgttgacaccaaagataaacctctacccataaaagacgcgttgaatgaccacgtgaggctagattacctccagcgccacatttcagttctcaaagacgcaatagacctgggggcggacgtgcgtggccacttcacctggtctctgctggacaacttcgagtggtcggccggttacacggagcggtacggcatcgtctacgtggaccgtggcaacggctgcaagcgccgcatgaagcgctcagccaaatggttgaagaaattcaaccgagccgcgcatacgaagaagaaagatatgacgggcattattccgccgtcagcttattagaacagtgcagctagctagctgccatatgcatatgttttaagatacagatatggtgtgtgtgtggtaagtatggtgcatgtatgttgtttgtaaaataaattaacccacatgatgttgtggaaagtaaaattaaaatactcaatggatcggagacatatagccaaaaaaaaaaaaaaaaaaaaaaaaaaaaaaaaaaaaaaaaaaaaaaaaaaaaaaaaaaaaaaaaaaaaaaaaaaaaaaaaaaaagaaaaaaaaaaaaaaaaaaattctgggggggggcccgggacccatttccccctaatggggggccatttaaaattcccgggcccgccttttaaaaccgcgggaaggggaaaaccctggggttacccaatttaatccccttggaaaaaatccccctttccccagttggggaaaaaagaaaaaggcccccccccattccccttcc

SEQ ID NO: 22635 - protein, 589 aa, Zea mays subsp. mays
  peptide (1)..(589): Ceres Seq. ID no. 15218920
  misc_feature (23)..(581): NCBI GI NO: 7489718 NR Description: beta-D-glucosidase (EC 3
  misc_feature (26)..(589): NCBI GI NO: 7435456 NR Description: probable beta-glucosidase (EC 3.2.1.-) - sorghum
  misc_feature (23)..(581): NCBI GI NO: 626042 NR Description: beta-glucosidase, root meristem (EC 3
  misc_feature (23)..(581): NCBI GI NO: 1352081 NR Description: BETA-GLUCOSIDASE, CHLOROPLAST PRECURSOR
  misc_feature (84)..(581): NCBI GI NO: 13399866 NR Description: Chain A, Crystal Structure Of A Monocot
  misc_feature (84)..(581): NCBI GI NO: 28373358 NR Description: Chain A, Crystal Structure Of The Maize Zm-P60
  misc_feature (84)..(581): NCBI GI NO: 12084533 NR Description: Chain A
  misc_feature (84)..(581): NCBI GI NO: 29726257 NR Description: Chain A
  misc_feature (23)..(573): NCBI GI NO: 13924741 NR Description: cyanogenic beta-glucosidase dhurrinase-2
  misc_feature (23)..(582): NCBI GI NO: 4106413 NR Description: beta-D-glucosidase beta subunit precursor
QDSIHKQSSNNSCFPLASSQEIMAPLLLASRTACHPGLTSSRHDNGRHGLSSSPGSSSKRSRSLSFIPRAEKTTTGGEGHVVSEKLSPWQIPRREWFPPSFIFGAATSAYQIEGAWNEGGKGPSTWDDFCHKYPEWIADGSSGDVGANSYYLYREDVRLLKEMGMDAYRFSIAWSRILPKGTLEGGINHKGIEYYKRLINLLKENGIEPYVTLFHWDTPQALVDSYGGFLDDRIVKDYTDFAKVCFVHFGDVVKNWFTFNEPQTFSSFSYGTGIFAPGRCSPGQKCANPTGNSLTEPYIVAHNLLRAHAETVHEYNKHYRGNKDAQIGIAFDVMGRVPYDNMFLDDQAQERSIDYNLGWFMEPVVRGDYPFSMRSLIKDRLPYFTDDEKEKLVGSYDIMGINYYTSRFSKHIDISPKYSPVLNTDDAYAAQETKGPDGNTIGPSMGNPWIYMYPNGLKDILMFMKNKYGNPPVYITENGIGDVDTKDKPLPIKDALNDHVRLDYLQRHISVLKDAIDLGADVRGHFTWSLLDNFEWSAGYTERYGIVYVDRGNGCKRRMKRSAKWLKKFNRAAHTKKKDMTGIIPPSAY

SEQ ID NO: 22636 - protein, 567 aa, Zea mays subsp. mays
  peptide (1)..(567): Ceres Seq. ID no. 15218921
  misc_feature (1)..(559): NCBI GI NO: 7489718 NR Description: beta-D-glucosidase (EC 3
  misc_feature (4)..(567): NCBI GI NO: 7435456 NR Description: probable beta-glucosidase (EC 3.2.1.-) - sorghum
  misc_feature (1)..(559): NCBI GI NO: 626042 NR Description: beta-glucosidase, root meristem (EC 3
  misc_feature (1)..(559): NCBI GI NO: 1352081 NR Description: BETA-GLUCOSIDASE, CHLOROPLAST PRECURSOR
  misc_feature (62)..(559): NCBI GI NO: 13399866 NR Description: Chain A, Crystal Structure Of A Monocot
  misc_feature (62)..(559): NCBI GI NO: 28373358 NR Description: Chain A, Crystal Structure Of The Maize Zm-P60
  misc_feature (62)..(559): NCBI GI NO: 12084533 NR Description: Chain A
  misc_feature (62)..(559): NCBI GI NO: 29726257 NR Description: Chain A
  misc_feature (1)..(551): NCBI GI NO: 13924741 NR Description: cyanogenic beta-glucosidase dhurrinase-2
  misc_feature (1)..(560): NCBI GI NO: 4106413 NR Description: beta-D-glucosidase beta subunit precursor
MAPLLLASRTACHPGLTSSRHDNGRHGLSSSPGSSSKRSRSLSFIPRAEKTTTGGEGHVVSEKLSPWQIPRREWFPPSFIFGAATSAYQIEGAWNEGGKGPSTWDDFCHKYPEWIADGSSGDVGANSYYLYREDVRLLKEMGMDAYRFSIAWSRILPKGTLEGGINHKGIEYYKRLINLLKENGIEPYVTLFHWDTPQALVDSYGGFLDDRIVKDYTDFAKVCFVHFGDVVKNWFTFNEPQTFSSFSYGTGIFAPGRCSPGQKCANPTGNSLTEPYIVAHNLLRAHAETVHEYNKHYRGNKDAQIGIAFDVMGRVPYDNMFLDDQAQERSIDYNLGWFMEPVVRGDYPFSMRSLIKDRLPYFTDDEKEKLVGSYDIMGINYYTSRFSKHIDISPKYSPVLNTDDAYAAQETKGPDGNTIGPSMGNPWIYMYPNGLKDILMFMKNKYGNPPVYITENGIGDVDTKDKPLPIKDALNDHVRLDYLQRHISVLKDAIDLGADVRGHFTWSLLDNFEWSAGYTERYGIVYVDRGNGCKRRMKRSAKWLKKFNRAAHTKKKDMTGIIPPSAY

SEQ ID NO: 22637 - protein, 427 aa, Zea mays subsp. mays
  peptide (1)..(427): Ceres Seq. ID no. 15218922
  misc_feature (1)..(419): NCBI GI NO: 7489718 NR Description: beta-D-glucosidase (EC 3
  misc_feature (1)..(427): NCBI GI NO: 7435456 NR Description: probable beta-glucosidase (EC 3.2.1.-) - sorghum
  misc_feature (1)..(419): NCBI GI NO: 626042 NR Description: beta-glucosidase, root meristem (EC 3
  misc_feature (1)..(419): NCBI GI NO: 1352081 NR Description: BETA-GLUCOSIDASE, CHLOROPLAST PRECURSOR
  misc_feature (1)..(419): NCBI GI NO: 13399866 NR Description: Chain A, Crystal Structure Of A Monocot
  misc_feature (1)..(419): NCBI GI NO: 28373358 NR Description: Chain A, Crystal Structure Of The Maize Zm-P60
  misc_feature (1)..(419): NCBI GI NO: 12084533 NR Description: Chain A
  misc_feature (1)..(419): NCBI GI NO: 29726257 NR Description: Chain A
  misc_feature (1)..(411): NCBI GI NO: 13924741 NR Description: cyanogenic beta-glucosidase dhurrinase-2
  misc_feature (1)..(420): NCBI GI NO: 4106413 NR Description: beta-D-glucosidase beta subunit precursor
MGMDAYRFSIAWSRILPKGTLEGGINHKGIEYYKRLINLLKENGIEPYVTLFHWDTPQALVDSYGGFLDDRIVKDYTDFAKVCFVHFGDVVKNWFTFNEPQTFSSFSYGTGIFAPGRCSPGQKCANPTGNSLTEPYIVAHNLLRAHAETVHEYNKHYRGNKDAQIGIAFDVMGRVPYDNMFLDDQAQERSIDYNLGWFMEPVVRGDYPFSMRSLIKDRLPYFTDDEKEKLVGSYDIMGINYYTSRFSKHIDISPKYSPVLNTDDAYAAQETKGPDGNTIGPSMGNPWIYMYPNGLKDILMFMKNKYGNPPVYITENGIGDVDTKDKPLPIKDALNDHVRLDYLQRHISVLKDAIDLGADVRGHFTWSLLDNFEWSAGYTERYGIVYVDRGNGCKRRMKRSAKWLKKFNRAAHTKKKDMTGIIPPSAY

SEQ ID NO: 22638 - DNA, 1995 bp, Zea mays subsp. mays
  misc_feature (1)..(1995): Ceres Seq. ID no. 13599965
tattggggccaaagtcgctgccctgccgagtctcgactctccacctcagccctcagggccgccggctccttcctcccctctcctccgcctcgacaagcgtcggcgagatggtgaagaggagcaagaagagcaagagcaagcgagtcacgctgcggcagaagcacaaggtgcagcgcaaggtgaaggagcaccaccgcaagaagcgcaaggaagccaagaaggccggcaaggccggccagcggaggaaggtcgagaaggaccccgggatccccaacgagtggcccttcaaggagcaggagctcaaggcgctcgaggcccgacgcgcgcaggcgctccaggagctcgagctcaagaagcaggcgcgcaaggagagggctcagaagaggaaggcaggattgcttgaggacgaggacattgctagtttggcatctgcagcttccgcacagggcagtgagtttgcagcaaaggagaatgctcctttattagtggcaaagatcaacgatcattcagagaggtctttctacaaggagcttgttaaagtaattgaagcttccgatgtgattatggaggttcttgatgcaagggatccgctgggcacccgttgcattgacatggaaaagatggttaggaaggctgatccaagtaaacggattgtactacttctcaacaagatagatcttgttcccaaggaggcggtagagaaatggcttacatatctaagagaagaattgccaacagttgcttttaagtgcaatacccaggagcagaggaccaagctgggatggaaatcttcaaaattagataaaacaagcaacatcccacaaagcagtgattgtcttggtgccgagaatctaatcaaattgcttaagaattattccagaagccatgagctcaaactggcaattacggtgggtattgttggacttcctaatgttggcaagagcagtctgatcaacagcctgaagaggtcccgagtggtcaatgtcggttctactccagggattactagatcaatgcaagaagttcaattagacaagaaggtaaagttgttggattgtcctggtgttgttatgctcaaatcttccaacagtggtgtgtctgtagcccttcgaaactgcaaaagggttgagaaaatagaagatccagtcgctcctgttaaggagatcctaagtatttgcccacatgagaagttgctgtctctgtacaaggttccaaactttggttcagttgatgattttcttcagaaagtagcaactgtacgtgggaaattgaaaaagggtggtgtagtggatgttgaagctgcagcgagaattgtgcttcatgactggaatgaaggtaaaataccatattttacactgccgcctaaaagagatgctggggaagactcagatgcagtgattatatccgaggatgggaaagaatttaatatcgatgagatttacaaagctgaatcttcatatattggtggtttgaagtccattgaggagttccatcatattgagattcctcctaatgctccactggcgatcgatgaagagatgctagaggatggtggcaagaaaccaagcgaagccatccaggaaagccgggacagggaggagcaaatgcccgacgtgaaggactcaggaggaagcaaggcagccagcgccagcacgcagaacgacaagttgtacaccgccgacgccatactcgaccctcacaagaggaaagcagagaagaaacggcgcaaggcgagcaggcccagcgcgctgaacgacatggacgcggactacgatttcaaggtggattatcggatggaggacggtgggagcgagggtgcacatgcggatgatgaagatggcggagatggatccgaggataatgaaccaatgaccggtgtcgatgatgcgtgaattgtcatgtcgagtgccactttgccagaaatgatttgtcccaatgggggttgggaaattaacccacgacagtttggtaattagtttgtttctgtttaaacac

SEQ ID NO: 22639 - protein, 629 aa, Zea mays subsp. mays
  peptide (1)..(629): Ceres Seq. ID no. 13599966
  misc_feature (36)..(629): NCBI GI NO: 34914820 NR Description: putative GTPase
  misc_feature (36)..(609): NCBI GI NO: 15231373 NR Description: GTPase -related [Arabidopsis thaliana]
  misc_feature (76)..(574): NCBI GI NO: 15451214 NR Description: putative GTPase [Arabidopsis thaliana]
  misc_feature (36)..(585): NCBI GI NO: 39587211 NR Description: Hypothetical protein CBG00673
  misc_feature (36)..(585): NCBI GI NO: 17534827 NR Description: GTPase of MMR1/HSR1 type (62.3 kD)
  misc_feature (37)..(599): NCBI GI NO: 21428328 NR Description: AT23067p [Drosophila melanogaster]
  misc_feature (37)..(599): NCBI GI NO: 24647590 NR Description: CG3983-PB [Drosophila melanogaster]
  misc_feature (65)..(481): NCBI GI NO: 33468623 NR Description: SI:zK13A21
  misc_feature (30)..(488): NCBI GI NO: 31209693 NR Description: ENSANGP00000012225 [Anopheles gambiae]
  misc_feature (50)..(526): NCBI GI NO: 9506611 NR Description: hypothetical protein FLJ10613 [Homo sapiens]
LGPKSLPCRVSTLHLSPQGRRLLPPLSSASTSVGEMVKRSKKSKSKRVTLRQKHKVQRKVKEHHRKKRKEAKKAGKAGQRRKVEKDPGIPNEWPFKEQELKALEARRAQALQELELKKQARKERAQKRKAGLLEDEDIASLASAASAQGSEFAAKENAPLLVAKINDHSERSFYKELVKVIEASDVIMEVLDARDPLGTRCIDMEKMVRKADPSKRIVLLLNKIDLVPKEAVEKWLTYLREELPTVAFKCNTQEQRTKLGWKSSKLDKTSNIPQSSDCLGAENLIKLLKNYSRSHELKLAITVGIVGLPNVGKSSLINSLKRSRVVNVGSTPGITRSMQEVQLDKKVKLLDCPGVVMLKSSNSGVSVALRNCKRVEKIEDPVAPVKEILSICPHEKLLSLYKVPNFGSVDDFLQKVATVRGKLKKGGVVDVEAAARIVLHDWNEGKIPYFTLPPKRDAGEDSDAVIISEDGKEFNIDEIYKAESSYIGGLKSIEEFHHIEIPPNAPLAIDEEMLEDGGKKPSEAIQESRDREEQMPDVKDSGGSKAASASTQNDKLYTADAILDPHKRKAEKKRRKASRPSALNDMDADYDFKVDYRMEDGGSEGAHADDEDGGDGSEDNEPMTGVDDA

SEQ ID NO: 22640 - protein, 594 aa, Zea mays subsp. mays
  peptide (1)..(594): Ceres Seq. ID no. 13599967
  misc_feature (1)..(594): NCBI GI NO: 34914820 NR Description: putative GTPase
  misc_feature (1)..(574): NCBI GI NO: 15231373 NR Description: GTPase -related [Arabidopsis thaliana]
  misc_feature (41)..(539): NCBI GI NO: 15451214 NR Description: putative GTPase [Arabidopsis thaliana]
  misc_feature (1)..(550): NCBI GI NO: 39587211 NR Description: Hypothetical protein CBG00673
  misc_feature (1)..(550): NCBI GI NO: 17534827 NR Description: GTPase of MMR1/HSR1 type (62.3 kD)
  misc_feature (2)..(564): NCBI GI NO: 21428328 NR Description: AT23067p [Drosophila melanogaster]
  misc_feature (2)..(564): NCBI GI NO: 24647590 NR Description: CG3983-PB [Drosophila melanogaster]
  misc_feature (30)..(446): NCBI GI NO: 33468623 NR Description: SI:zK13A21
  misc_feature (1)..(453): NCBI GI NO: 31209693 NR Description: ENSANGP00000012225 [Anopheles gambiae]
  misc_feature (15)..(491): NCBI GI NO: 9506611 NR Description: hypothetical protein FLJ10613 [Homo sapiens]
MVKRSKKSKSKRVTLRQKHKVQRKVKEHHRKKRKEAKKAGKAGQRRKVEKDPGIPNEWPFKEQELKALEARRAQALQELELKKQARKERAQKRKAGLLEDEDIASLASAASAQGSEFAAKENAPLLVAKINDHSERSFYKELVKVIEASDVIMEVLDARDPLGTRCIDMEKMVRKADPSKRIVLLLNKIDLVPKEAVEKWLTYLREELPTVAFKCNTQEQRTKLGWKSSKLDKTSNIPQSSDCLGAENLIKLLKNYSRSHELKLAITVGIVGLPNVGKSSLINSLKRSRVVNVGSTPGITRSMQEVQLDKKVKLLDCPGVVMLKSSNSGVSVALRNCKRVEKIEDPVAPVKEILSICPHEKLLSLYKVPNFGSVDDFLQKVATVRGKLKKGGVVDVEAAARIVLHDWNEGKIPYFTLPPKRDAGEDSDAVIISEDGKEFNIDEIYKAESSYIGGLKSIEEFHHIEIPPNAPLAIDEEMLEDGGKKPSEAIQESRDREEQMPDVKDSGGSKAASASTQNDKLYTADAILDPHKRKAEKKRRKASRPSALNDMDADYDFKVDYRMEDGGSEGAHADDEDGGDGSEDNEPMTGVDDA

SEQ ID NO: 22641 - protein, 442 aa, Zea mays subsp. mays
  peptide (1)..(442): Ceres Seq. ID no. 13599968
  misc_feature (1)..(442): NCBI GI NO: 34914820 NR Description: putative GTPase
  misc_feature (1)..(422): NCBI GI NO: 15231373 NR Description: GTPase -related [Arabidopsis thaliana]
  misc_feature (1)..(387): NCBI GI NO: 15451214 NR Description: putative GTPase [Arabidopsis thaliana]
  misc_feature (1)..(398): NCBI GI NO: 39587211 NR Description: Hypothetical protein CBG00673
  misc_feature (1)..(398): NCBI GI NO: 17534827 NR Description: GTPase of MMR1/HSR1 type (62.3 kD)
  misc_feature (1)..(412): NCBI GI NO: 21428328 NR Description: AT23067p [Drosophila melanogaster]
  misc_feature (1)..(412): NCBI GI NO: 24647590 NR Description: CG3983-PB [Drosophila melanogaster]
  misc_feature (1)..(294): NCBI GI NO: 33468623 NR Description: SI:zK13A21
  misc_feature (1)..(301): NCBI GI NO: 31209693 NR Description: ENSANGP00000012225 [Anopheles gambiae]
  misc_feature (1)..(339): NCBI GI NO: 9506611 NR Description: hypothetical protein FLJ10613 [Homo sapiens]
MEVLDARDPLGTRCIDMEKMVRKADPSKRIVLLLNKIDLVPKEAVEKWLTYLREELPTVAFKCNTQEQRTKLGWKSSKLDKTSNIPQSSDCLGAENLIKLLKNYSRSHELKLAITVGIVGLPNVGKSSLINSLKRSRVVNVGSTPGITRSMQEVQLDKKVKLLDCPGVVMLKSSNSGVSVALRNCKRVEKIEDPVAPVKEILSICPHEKLLSLYKVPNFGSVDDFLQKVATVRGKLKKGGVVDVEAAARIVLHDWNEGKIPYFTLPPKRDAGEDSDAVIISEDGKEFNIDEIYKAESSYIGGLKSIEEFHHIEIPPNAPLAIDEEMLEDGGKKPSEAIQESRDREEQMPDVKDSGGSKAASASTQNDKLYTADAILDPHKRKAEKKRRKASRPSALNDMDADYDFKVDYRMEDGGSEGAHADDEDGGDGSEDNEPMTGVDDA

SEQ ID NO: 22642 - DNA, 2342 bp, Zea mays subsp. mays
  misc_feature (1)..(2342): Ceres Seq. ID no. 15225015
gaaaaaacatgacctagaatccggtccggtacgtcctctgcgccgcgcctcctcggctcctcccatccgtcgccagcgcccagcgccgcccgactccgccccacgtcgcgcgtagctcaagaccaagcacgtcttgcaccgcctagctcacctctacggccgccgaacctgcctccgccgttgccgactccaagctccactcgcctgaggtcccctcgtccgaggtgctcgactggacttcctccccccgaggtcccctcctatccattgccgctcctccccgacatgtccaagaaggtcggtaagctaccgccgccggcggcggcgcatgaggaggcgagagaggagctgtttgcttcatgctctttcgccgacctcggcctccactctaccctctgcgcccaccttcaagataagatgagtttccaagcacccactcgaattcaagctcaggcaattccagttgccatttctggacagcacatgctagtgaaggctgctactggcactgggaagactcttgcgtaccttgctccgattgttcacgttctccagatgagggagcctcgtgtggatagaactcatggaacttttgcgttggtacttgtgccaacgcgagagctatgcttacaggtttacgggattgcacaacagctggttcatcgttttcactggattgtccctgggtatgtcatgggtggggagaacagagcaaaagagaaagcaagactgcggaaaggaatatcaattctcattgctactcctgggcgccttcttgaccatttacagcgtactgcttcatttagctattccaatctgcagtggatcgtttttgatgaggctgacagcattctcgaacttggttttggaaaagcagttgaggatattctagagcacttgggttcaaggaatggcgctactggtcaaattaaaaacaaaggtgggcatatcagaagacaaaaccttcttttatctgccactcttaatgagaaggtgaatcgtttggcaaaaattagtttgaaaaacccagtgatgatcggccttgatgatcaaagcaagccatcaggaaaatccaacaatgtagggaacaatcatacttctctattatctgatgaggatgatgaaatactgaaaaagcagaatgatttagtggagcatgcagttgatgatttcaagcttcctactcaattggttcaaagatatgttaaagtttcatgtggttcgaggcttgcagttcttcttatgattctgaaatctctatttgaaagacaagtctctcagaaggtcgttgttttcttttcaacctgcgactctgtagattttcaccacacagtactcagccagcttgagtggagctctggcccacagcgtgatatggataagaagcaaaaatttcttagctgtaaagtgttccgtttgcatggtaacatggagcaggatgatcgcaagaagtcatttttgggttttggttctgagaaatcagcaattcttgtatctaccgatatcgctgctaggggtttggactttccaaaagtcaagtacatcatacaatatgattctccaggagaagcttctgaatacgttcacagggttggaagaactgcaagaattggtgagaagggggaggctctcctctttctgcaacctattgaactcgactacttgaaagatctggagttacacggtgtatcactgacagaatatcccttgcaaagggttttggatagttttcctgtaaatggacagaaacctcacaaaaggaagcaaatatccttagacatgcatccctgcataatgtctccgcagaggtcacttgagggtttcgttgcagctgaggacgcaacgaagaagcttgccagggatgccttctgttcctgggttcgtgcctacactgcccaccgaggtgaactgaagaaaattttcatggtgaagaagctccacctgggccatgtagcgaggagcttcgggctaaaggagcagccgtcgctggttggaaggtcacatcaggtgtctcttaagaagcggaagaaagagcagaagcgcgagcggcctgccaaaaggaggaagcttccctccaagaagtgaatttgcacacccggaatgctgctgcatcgcttgacttcggatcatgacgcacgccatttttgggaccgacaaccgtggtagcctatgcctcggtctgtagactcttgacatgagctatttttgttcgcgatattacatgtagaaatgtaggaactatagcaacaaatgcacaatcacattgttcgctgcagcagctgtttgttgatgtgagatcatctgttactattattattttagtatccgcttgggtttgtctt

SEQ ID NO: 22643 - protein, 599 aa, Zea mays subsp. mays
  peptide (1)..(599): Ceres Seq. ID no. 15225016
  misc_feature (45)..(290): Pfam Name: Pfam Description:  DEAD/DEAH box helicase
  misc_feature (1)..(599): NCBI GI NO: 14719335 NR Description: putative ATP-dependent RNA helicase [Oryza sativa]
  misc_feature (17)..(595): NCBI GI NO: 15226735 NR Description: DEAD/DEAH box helicase, putative
  misc_feature (223)..(598): NCBI GI NO: 10440004 NR Description: unnamed protein product [Homo sapiens]
  misc_feature (16)..(263): NCBI GI NO: 10440004 NR Description: unnamed protein product [Homo sapiens]
  misc_feature (223)..(598): NCBI GI NO: 39645219 NR Description: DDX31 protein [Homo sapiens]
  misc_feature (16)..(263): NCBI GI NO: 39645219 NR Description: DDX31 protein [Homo sapiens]
  misc_feature (223)..(598): NCBI GI NO: 17505907 NR Description: DEAD
  misc_feature (16)..(263): NCBI GI NO: 17505907 NR Description: DEAD
  misc_feature (293)..(599): NCBI GI NO: 38074599 NR Description: similar to DEAD
  misc_feature (16)..(262): NCBI GI NO: 38074599 NR Description: similar to DEAD
MSKKVGKLPPPAAAHEEAREELFASCSFADLGLHSTLCAHLQDKMSFQAPTRIQAQAIPVAISGQHMLVKAATGTGKTLAYLAPIVHVLQMREPRVDRTHGTFALVLVPTRELCLQVYGIAQQLVHRFHWIVPGYVMGGENRAKEKARLRKGISILIATPGRLLDHLQRTASFSYSNLQWIVFDEADSILELGFGKAVEDILEHLGSRNGATGQIKNKGGHIRRQNLLLSATLNEKVNRLAKISLKNPVMIGLDDQSKPSGKSNNVGNNHTSLLSDEDDEILKKQNDLVEHAVDDFKLPTQLVQRYVKVSCGSRLAVLLMILKSLFERQVSQKVVVFFSTCDSVDFHHTVLSQLEWSSGPQRDMDKKQKFLSCKVFRLHGNMEQDDRKKSFLGFGSEKSAILVSTDIAARGLDFPKVKYIIQYDSPGEASEYVHRVGRTARIGEKGEALLFLQPIELDYLKDLELHGVSLTEYPLQRVLDSFPVNGQKPHKRKQISLDMHPCIMSPQRSLEGFVAAEDATKKLARDAFCSWVRAYTAHRGELKKIFMVKKLHLGHVARSFGLKEQPSLVGRSHQVSLKKRKKEQKRERPAKRRKLPSKK

SEQ ID NO: 22644 - protein, 555 aa, Zea mays subsp. mays
  peptide (1)..(555): Ceres Seq. ID no. 15225017
  misc_feature (1)..(246): Pfam Name: Pfam Description:  DEAD/DEAH box helicase
  misc_feature (1)..(555): NCBI GI NO: 14719335 NR Description: putative ATP-dependent RNA helicase [Oryza sativa]
  misc_feature (1)..(551): NCBI GI NO: 15226735 NR Description: DEAD/DEAH box helicase, putative
  misc_feature (179)..(554): NCBI GI NO: 10440004 NR Description: unnamed protein product [Homo sapiens]
  misc_feature (1)..(219): NCBI GI NO: 10440004 NR Description: unnamed protein product [Homo sapiens]
  misc_feature (179)..(554): NCBI GI NO: 39645219 NR Description: DDX31 protein [Homo sapiens]
  misc_feature (1)..(219): NCBI GI NO: 39645219 NR Description: DDX31 protein [Homo sapiens]
  misc_feature (179)..(554): NCBI GI NO: 17505907 NR Description: DEAD
  misc_feature (1)..(219): NCBI GI NO: 17505907 NR Description: DEAD
  misc_feature (249)..(555): NCBI GI NO: 38074599 NR Description: similar to DEAD
  misc_feature (1)..(218): NCBI GI NO: 38074599 NR Description: similar to DEAD
MSFQAPTRIQAQAIPVAISGQHMLVKAATGTGKTLAYLAPIVHVLQMREPRVDRTHGTFALVLVPTRELCLQVYGIAQQLVHRFHWIVPGYVMGGENRAKEKARLRKGISILIATPGRLLDHLQRTASFSYSNLQWIVFDEADSILELGFGKAVEDILEHLGSRNGATGQIKNKGGHIRRQNLLLSATLNEKVNRLAKISLKNPVMIGLDDQSKPSGKSNNVGNNHTSLLSDEDDEILKKQNDLVEHAVDDFKLPTQLVQRYVKVSCGSRLAVLLMILKSLFERQVSQKVVVFFSTCDSVDFHHTVLSQLEWSSGPQRDMDKKQKFLSCKVFRLHGNMEQDDRKKSFLGFGSEKSAILVSTDIAARGLDFPKVKYIIQYDSPGEASEYVHRVGRTARIGEKGEALLFLQPIELDYLKDLELHGVSLTEYPLQRVLDSFPVNGQKPHKRKQISLDMHPCIMSPQRSLEGFVAAEDATKKLARDAFCSWVRAYTAHRGELKKIFMVKKLHLGHVARSFGLKEQPSLVGRSHQVSLKKRKKEQKRERPAKRRKLPSKK

SEQ ID NO: 22645 - protein, 533 aa, Zea mays subsp. mays
  peptide (1)..(533): Ceres Seq. ID no. 15225018
  misc_feature (1)..(224): Pfam Name: Pfam Description:  DEAD/DEAH box helicase
  misc_feature (1)..(533): NCBI GI NO: 14719335 NR Description: putative ATP-dependent RNA helicase [Oryza sativa]
  misc_feature (1)..(529): NCBI GI NO: 15226735 NR Description: DEAD/DEAH box helicase, putative
  misc_feature (157)..(532): NCBI GI NO: 10440004 NR Description: unnamed protein product [Homo sapiens]
  misc_feature (1)..(197): NCBI GI NO: 10440004 NR Description: unnamed protein product [Homo sapiens]
  misc_feature (157)..(532): NCBI GI NO: 39645219 NR Description: DDX31 protein [Homo sapiens]
  misc_feature (1)..(197): NCBI GI NO: 39645219 NR Description: DDX31 protein [Homo sapiens]
  misc_feature (157)..(532): NCBI GI NO: 17505907 NR Description: DEAD
  misc_feature (1)..(197): NCBI GI NO: 17505907 NR Description: DEAD
  misc_feature (227)..(533): NCBI GI NO: 38074599 NR Description: similar to DEAD
  misc_feature (1)..(196): NCBI GI NO: 38074599 NR Description: similar to DEAD
MLVKAATGTGKTLAYLAPIVHVLQMREPRVDRTHGTFALVLVPTRELCLQVYGIAQQLVHRFHWIVPGYVMGGENRAKEKARLRKGISILIATPGRLLDHLQRTASFSYSNLQWIVFDEADSILELGFGKAVEDILEHLGSRNGATGQIKNKGGHIRRQNLLLSATLNEKVNRLAKISLKNPVMIGLDDQSKPSGKSNNVGNNHTSLLSDEDDEILKKQNDLVEHAVDDFKLPTQLVQRYVKVSCGSRLAVLLMILKSLFERQVSQKVVVFFSTCDSVDFHHTVLSQLEWSSGPQRDMDKKQKFLSCKVFRLHGNMEQDDRKKSFLGFGSEKSAILVSTDIAARGLDFPKVKYIIQYDSPGEASEYVHRVGRTARIGEKGEALLFLQPIELDYLKDLELHGVSLTEYPLQRVLDSFPVNGQKPHKRKQISLDMHPCIMSPQRSLEGFVAAEDATKKLARDAFCSWVRAYTAHRGELKKIFMVKKLHLGHVARSFGLKEQPSLVGRSHQVSLKKRKKEQKRERPAKRRKLPSKK

SEQ ID NO: 22646 - DNA, 2255 bp, Zea mays subsp. mays
  misc_feature (1)..(2255): Ceres Seq. ID no. 15226801
gacatgcagttgtagcttggctcgaggcgggcatcagcgacgacaaacatcctgctcaatttgttgtatgataaatactgcgaaacaatgctggtgtttcataagatgaccgtgcagctcatgaaaatccagagggtggagtcgagcgagacgacgtggccggcgcggcgccaggtcgtggcgtgcgccgctgtttgctggtcgtggcgtgaggtcaccaaggaggtggtgaagacgctcaaggagtgcggcaggatcaccttccccatgtcccttaagcaggttggcactctctgccttttctctactttgatgatcaatcacatgtcttcacctttgcagaggcttatgattttgaagatctagaatctatggttgaagaaatagccaaagcattcaagacaaagataatgtttatatatgttgacactgctgaagaaaaccttgcaaaaaccattcctcactctttatggcattgaatcagaaaaggcctactggtccagttcttgaaagggtgggaatgtgtccaagaagacaaaggcatcgacccgccaattcttcgctacaaattaaaacagcactagggtgagatcagtgggcttgagagtagcatcatccttcaaacatgatgatgggtttctagctgatggtgtctctatagctcactggtatccttcaaaaagaaagtatggtgttgttttataagctctcatgtttatgactaaggttgagatttgtgaagattcagaaataattagctacatgcccttgcgtagcttacaatgcacaattagctagcttcattgttttaacttctctgcaatatgaacatgcaaattttaaccacctcatttgtttttaataagctgaaacaaattgttggttattattcccccttgtttggtcgccctcatttaagttgtggcttagatattcctactcagagagttggtacatgttttttatgcttatctttttcatttatcaaccatatgtgtgtttgatgttttttctatgcttagacctaaacaaaacattcttggtagccacatctaaaacattcatttcaagttctacattaattcatttatattccatcaacttttaaaatacaacacttagtttgtttgaaaagaaatagtttttgtgaaatcttcaaacaaggcttgacaatgatttattcatcgacaatgcatctgagccctctttgcattgtaagctcctacaatgaagttatacaaaagtcttatctattcattttggtttaagctggttgagcactttttacaatatctggtcaacacatctaggatgactcttcacatctgtcaattcaaattctcttcaaaacagctaatattgctccatattgtcttttgaagcttcctggaaaaaatgtcttttgaagctaatcttgctccatacagctaatcttcacatctttcaaagcatttgctagggcccttcggtgagcaatagaatacgacttgcgctaccaaagcgtccatagctgaatgcaaaccattgagatggtccaggttgaggacctccatgacacctatgttggtgtgggttgtgccgccccatcgtgaccgtcatcgattgggcctccgagtccaggagaagacctccgatgaagaaagagacatgctgcacatgcacgagggtacttgcagatagatgtcggctctatggacgaacactcgaccaagtcagatgaggagtatgagggcctagccatgcgagacatgatggctaccggtccaacaatgagcagcaagctgtgagttaaagatgaactcacctgtcctggagagcaacatccataggagtgaggcaaaatggcgggtaccaccacaacatggacccgttcctgaagatgtccaaggaggtggtagccgacaccataatgtcttgcgcgtcattgtgtcaccggccggcaacacgctgcgctggtaccggcgggtgttatgtttcttaggcgtatgtttctgtgctttgagctgtgctatagactggttgtgccaactactgattttaaaagaaaaaggtgagctgaaaatcattgttgaaaacaaacatgtaacggttcgttctcatcagttgtgccaactaccaatcatttcattgatcagaatctgtcgttgctcatgagaaccaaaagtaagacacttcttaataaaaaaaaaaaaaaaaaaaaaaaaaaaaaaaaaaaaaaaaaaaaaaaaaaaaaaaaaaaaaaaaaaaaaaaaagg

SEQ ID NO: 22647 - protein, 119 aa, Zea mays subsp. mays
  peptide (1)..(119): Ceres Seq. ID no. 15226802
MNSPVLESNIHRSEAKWRVPPQHGPVPEDVQGGGSRHHNVLRVIVSPAGNTLRWYRRVLCFLGVCFCALSCAIDWLCQLLILKEKGELKIIVENKHVTVRSHQLCQLPIISLIRICRCS

SEQ ID NO: 22648 - protein, 92 aa, Zea mays subsp. mays
  peptide (1)..(92): Ceres Seq. ID no. 15226803
  misc_feature (14)..(55): Pfam Name: Pfam Description:  F-box domain
  misc_feature (14)..(67): NCBI GI NO: 7635492 NR Description: tubby-like protein [Cicer arietinum]
  misc_feature (14)..(67): NCBI GI NO: 5689214 NR Description: tubby-like protein [Lemna paucicostata]
  misc_feature (14)..(67): NCBI GI NO: 25411852 NR Description: probable Tub family protein
  misc_feature (14)..(67): NCBI GI NO: 25405194 NR Description: unknown protein, 3155-1759
  misc_feature (14)..(67): NCBI GI NO: 30680328 NR Description: F-box containing tubby family protein
  misc_feature (14)..(67): NCBI GI NO: 30793997 NR Description: putative F-box containing tubby family protein
  misc_feature (14)..(67): NCBI GI NO: 30694036 NR Description: F-box containing tubby family protein
  misc_feature (14)..(67): NCBI GI NO: 15223772 NR Description: F-box containing tubby family protein
  misc_feature (14)..(67): NCBI GI NO: 38637048 NR Description: putative chain A
  misc_feature (14)..(67): NCBI GI NO: 28188613 NR Description: unknown protein [Arabidopsis thaliana]
MLVFHKMTVQLMKIQRVESSETTWPARRQVVACAAVCWSWREVTKEVVKTLKECGRITFPMSLKQVGTLCLFSTLMINHMSSPLQRLMILKI

SEQ ID NO: 22649 - protein, 86 aa, Zea mays subsp. mays
  peptide (1)..(86): Ceres Seq. ID no. 15226804
  misc_feature (8)..(49): Pfam Name: Pfam Description:  F-box domain
  misc_feature (8)..(61): NCBI GI NO: 7635492 NR Description: tubby-like protein [Cicer arietinum]
  misc_feature (8)..(61): NCBI GI NO: 5689214 NR Description: tubby-like protein [Lemna paucicostata]
  misc_feature (8)..(61): NCBI GI NO: 25411852 NR Description: probable Tub family protein
  misc_feature (8)..(61): NCBI GI NO: 25405194 NR Description: unknown protein, 3155-1759
  misc_feature (8)..(61): NCBI GI NO: 30680328 NR Description: F-box containing tubby family protein
  misc_feature (8)..(61): NCBI GI NO: 30793997 NR Description: putative F-box containing tubby family protein
  misc_feature (8)..(61): NCBI GI NO: 30694036 NR Description: F-box containing tubby family protein
  misc_feature (8)..(61): NCBI GI NO: 15223772 NR Description: F-box containing tubby family protein
  misc_feature (8)..(61): NCBI GI NO: 38637048 NR Description: putative chain A
  misc_feature (8)..(61): NCBI GI NO: 28188613 NR Description: unknown protein [Arabidopsis thaliana]
MTVQLMKIQRVESSETTWPARRQVVACAAVCWSWREVTKEVVKTLKECGRITFPMSLKQVGTLCLFSTLMINHMSSPLQRLMILKI

SEQ ID NO: 22650 - DNA, 626 bp, Zea mays subsp. mays
  misc_feature (1)..(626): Ceres Seq. ID no. 13635567
agtcccccccccactgagaagaaggagagctcagaaaccaaagaagctcggaagagcacgcagagtccagaaggcggcggcaaaggcgacgagggtccagacagcaaggcggagggcgagaaggaagcggccgttgttgaccttaggccactgacgatggaagacctgaggcaggcaaagaaccaggttgcagcgagcttcgccgccgagggtgccgtgatgaacgagctcaggcagtggaacgacctgtacggcgaaggggggtccaggaagaaacagcagctgacctacttcttgtagaggtgaagcatttggcaggtggtggagaggaacagagctgggcagacggtggacccatacttgatgaaccgagcatggtttcttcaagacgtgacgtgggcatgacgcatagtactagtctttgaggttccaggatccatgagatgagatgaggtcgatggtcaatttgtaggatcatgaactattattcttttacatgcatttgtacatgagcgctagactggttatgtatatctggattgattgaacagctcttgtgtttgagggtcattttagcttctcgtagactgctgtaattatatcatatatagtgagtatatatattc

SEQ ID NO: 22651 - protein, 99 aa, Zea mays subsp. mays
  peptide (1)..(99): Ceres Seq. ID no. 13635568
  misc_feature (7)..(99): NCBI GI NO: 15234347 NR Description: hypothetical protein [Arabidopsis thaliana]
  misc_feature (5)..(99): NCBI GI NO: 34904204 NR Description: P0492F05.26
  misc_feature (9)..(99): NCBI GI NO: 34912822 NR Description: P0501G01.20
  misc_feature (3)..(99): NCBI GI NO: 18407974 NR Description: expressed protein [Arabidopsis thaliana]
  misc_feature (3)..(99): NCBI GI NO: 30696968 NR Description: expressed protein [Arabidopsis thaliana]
  misc_feature (17)..(99): NCBI GI NO: 25404926 NR Description: protein F22C12.12
  misc_feature (47)..(99): NCBI GI NO: 7487016 NR Description: hypothetical protein T14P8
  misc_feature (47)..(99): NCBI GI NO: 25518408 NR Description: hypothetical protein F22D16
  misc_feature (47)..(99): NCBI GI NO: 30678418 NR Description: expressed protein [Arabidopsis thaliana]
  misc_feature (47)..(99): NCBI GI NO: 20259341 NR Description: unknown protein [Arabidopsis thaliana]
SPPPTEKKESSETKEARKSTQSPEGGGKGDEGPDSKAEGEKEAAVVDLRPLTMEDLRQAKNQVAASFAAEGAVMNELRQWNDLYGEGGSRKKQQLTYFL

SEQ ID NO: 22652 - protein, 50 aa, Zea mays subsp. mays
  peptide (1)..(50): Ceres Seq. ID no. 13635569
VPPPLRRRRAQKPKKLGRARRVQKAAAKATRVQTARRRARRKRPLLTLGH

SEQ ID NO: 22653 - protein, 47 aa, Zea mays subsp. mays; identical to SEQ ID NO: 22629
  peptide (1)..(47): Ceres Seq. ID no. 13635570
  misc_feature (1)..(47): NCBI GI NO: 15234347 NR Description: hypothetical protein [Arabidopsis thaliana]
  misc_feature (1)..(47): NCBI GI NO: 34904204 NR Description: P0492F05.26
  misc_feature (1)..(47): NCBI GI NO: 34912822 NR Description: P0501G01.20
  misc_feature (1)..(47): NCBI GI NO: 18407974 NR Description: expressed protein [Arabidopsis thaliana]
  misc_feature (1)..(47): NCBI GI NO: 30696968 NR Description: expressed protein [Arabidopsis thaliana]
  misc_feature (1)..(47): NCBI GI NO: 25404926 NR Description: protein F22C12.12
  misc_feature (1)..(47): NCBI GI NO: 7487016 NR Description: hypothetical protein T14P8
  misc_feature (1)..(47): NCBI GI NO: 25518408 NR Description: hypothetical protein F22D16
  misc_feature (1)..(47): NCBI GI NO: 30678418 NR Description: expressed protein [Arabidopsis thaliana]
  misc_feature (1)..(47): NCBI GI NO: 20259341 NR Description: unknown protein [Arabidopsis thaliana]

SEQ ID NO: 22654 - DNA, 2228 bp, Zea mays subsp. mays
  misc_feature (1)..(2228): Ceres Seq. ID no. 14308560
atcacagtgcgggcggcgggcgccactctcacacctaccaggaaaccaatcaaaacttaaaaccaatcgaaattagaccggcgacgaggattagcgctcgccggcgatggattctgactacggcgtgcctcgcgagctctcggaggtgcagaagaagcgcacgctctaccagcccgagctgcccccctgcctccagggcaccactgtcagggtggagtatggtgatgctgcaattgcagctgacccggcaggtgctcatgtgatcagccatgcattccctcatacctatgcgcagcctattgctcattttctcaggaagacagctgttgtccctgatgctaaggtcatatctgaacaccaggcggtcagggttggcattgtcttctgtggcagacaatccccaggaggccacaatgttgtttgggggctctatgaggctatcaaggcccacaaccaaaacagcaaactcattggtttccttggtggatcagatggtctgctagcacagagaaccttggagatcactgataaagttattgcttcatataaaaatcaaggtggatatgacatgcttggtcgaacaaaggatcagattaggacgacagagcaggtcaatggtgctatggctagttgccaagctttgaagttggatgctctggttatcattggaggtgtcacttccaacactgatgctgctcaacttgccgagacatttgctgaggcaaagtgtgcaacaaaggttgtaggtgttcctgtaactttaaatggggaccttaagaaccagtttgttgagacaaccgttggctttgacaccatatgcaaggtgaacgcacaacttatcagcaatgtatgcactgatgctctatctgctgagaagtattactactttattcgcctgatgggacgcaaggcttctcatgtggcattggaatgtgctcttcaatcacatccaaacatggttatcctaggagaggaggtggctgcttccaaacttacaatttttgatattacgaagcagatttgtgatgcagttcaggcaagggctgaaaaagacaagaaccatggggttattcttattcctgagggccttgtggagagtattcctgaactatatgctctgcttcaggaaatccatggcctccatggcaaaggtgtttctgttgagaatatctcttctcagctttcaccttgggcatctgcactctttgagtttttgccccctttaatcaggaagcagctactactacatcctgaatctgatgattcagctcaactttcccagattgagactgaaaagctgctagcccagttagttgagactgagatgaacagacgtttgaaggagggcacttacaaaggaaagaagtttaatgcaatctgtcacttctttggctaccaagctaggggagcactgccttcaaagtttgattgcgattatgcctacgttttggggcatgtgtgctaccacatcatagctgccggattgaacagttacatggctacggtgacaaatcttaagaatccagtgaacaagtggcgatgcggcgcgactcctatttcgtctatgatgactgtgaagcgatggtcgcgtggcccttcagccacccaaattggaaagcccgctgttcacatggctagcgttgacttgaaaggaaaagcatacgatgtgttgagacagaattcttccagctttttgttggaagatgtctacagaaacccaggcccgctccagtttgaaggaccaggtgccgattcaaagcctatttcattgtgcgttgaggatcaagactatatgggcagaataaaaaagttgcaggaatacttggagaaggtgaagaggattgtgaagcctgggtgctcgcaggatgttcttaaagcggcgctgagtgccatgtcttctgtgacggaaacactgaacatcatgacttcatcttctaccggccagactccactgagtcattaggtaccatttcatggtatggatcataatccccacttttttcagtggtggcgattaacgagtttaggaacagcaaccctggtatcatacgggttattcttttgtagccttttggagagttctatcggttttggattcggtagtttatgaaggcttgttgatgagtttgagctcgaatagcttttgaaacagccggatgatgccatctttaataaaccaaattctgtgactgcattcacatttctgtcagtcacctgagtgagaaaag

SEQ ID NO: 22655 - protein, 618 aa, Zea mays subsp. mays
  peptide (1)..(618): Ceres Seq. ID no. 14308561
  misc_feature (88)..(368): Pfam Name: Pfam Description:  Phosphofructokinase
  misc_feature (1)..(616): NCBI GI NO: 2499488 NR Description: Pyrophosphate --fructose 6-phosphate 1-phosphotransferase alpha subunit
  misc_feature (1)..(616): NCBI GI NO: 3790102 NR Description: pyrophosphate-dependent phosphofructokinase alpha subunit
  misc_feature (1)..(615): NCBI GI NO: 129881 NR Description: Pyrophosphate --fructose 6-phosphate 1-phosphotransferase alpha subunit
  misc_feature (1)..(613): NCBI GI NO: 15223082 NR Description: pyrophosphate-dependent phosphofructokinase alpha subunit -related
  misc_feature (1)..(613): NCBI GI NO: 15218074 NR Description: pyrophosphate-dependent phosphofructokinase alpha subunit -related
  misc_feature (1)..(618): NCBI GI NO: 29647436 NR Description: putative pyrophosphate--fructose 6-phosphate 1-phosphotransferase alpha subunit
  misc_feature (88)..(485): NCBI GI NO: 29367525 NR Description: fructose-6-phosphate 1-phosphotransferase
  misc_feature (11)..(546): NCBI GI NO: 11528427 NR Description: pyrophosphate-dependent phosphofructokinase
  misc_feature (12)..(558): NCBI GI NO: 15221156 NR Description: pyrophosphate -fructose-6-phosphate 1-phosphotransferase -related
  misc_feature (12)..(558): NCBI GI NO: 2507174 NR Description: PYROPHOSPHATE --FRUCTOSE 6-PHOSPHATE 1-PHOSPHOTRANSFERASE BETA SUBUNIT
MDSDYGVPRELSEVQKKRTLYQPELPPCLQGTTVRVEYGDAAIAADPAGAHVISHAFPHTYAQPIAHFLRKTAVVPDAKVISEHQAVRVGIVFCGRQSPGGHNVVWGLYEAIKAHNQNSKLIGFLGGSDGLLAQRTLEITDKVIASYKNQGGYDMLGRTKDQIRTTEQVNGAMASCQALKLDALVIIGGVTSNTDAAQLAETFAEAKCATKVVGVPVTLNGDLKNQFVETTVGFDTICKVNAQLISNVCTDALSAEKYYYFIRLMGRKASHVALECALQSHPNMVILGEEVAASKLTIFDITKQICDAVQARAEKDKNHGVILIPEGLVESIPELYALLQEIHGLHGKGVSVENISSQLSPWASALFEFLPPLIRKQLLLHPESDDSAQLSQIETEKLLAQLVETEMNRRLKEGTYKGKKFNAICHFFGYQARGALPSKFDCDYAYVLGHVCYHIIAAGLNSYMATVTNLKNPVNKWRCGATPISSMMTVKRWSRGPSATQIGKPAVHMASVDLKGKAYDVLRQNSSSFLLEDVYRNPGPLQFEGPGADSKPISLCVEDQDYMGRIKKLQEYLEKVKRIVKPGCSQDVLKAALSAMSSVTETLNIMTSSSTGQTPLSH

SEQ ID NO: 22656 - protein, 464 aa, Zea mays subsp. mays
  peptide (1)..(464): Ceres Seq. ID no. 14308562
  misc_feature (1)..(214): Pfam Name: Pfam Description:  Phosphofructokinase
  misc_feature (1)..(462): NCBI GI NO: 2499488 NR Description: Pyrophosphate --fructose 6-phosphate 1-phosphotransferase alpha subunit
  misc_feature (1)..(462): NCBI GI NO: 3790102 NR Description: pyrophosphate-dependent phosphofructokinase alpha subunit
  misc_feature (1)..(461): NCBI GI NO: 129881 NR Description: Pyrophosphate --fructose 6-phosphate 1-phosphotransferase alpha subunit
  misc_feature (1)..(459): NCBI GI NO: 15223082 NR Description: pyrophosphate-dependent phosphofructokinase alpha subunit -related
  misc_feature (1)..(459): NCBI GI NO: 15218074 NR Description: pyrophosphate-dependent phosphofructokinase alpha subunit -related
  misc_feature (1)..(464): NCBI GI NO: 29647436 NR Description: putative pyrophosphate--fructose 6-phosphate 1-phosphotransferase alpha subunit
  misc_feature (1)..(331): NCBI GI NO: 29367525 NR Description: fructose-6-phosphate 1-phosphotransferase
  misc_feature (1)..(392): NCBI GI NO: 11528427 NR Description: pyrophosphate-dependent phosphofructokinase
  misc_feature (1)..(404): NCBI GI NO: 15221156 NR Description: pyrophosphate -fructose-6-phosphate 1-phosphotransferase -related
  misc_feature (1)..(404): NCBI GI NO: 2507174 NR Description: PYROPHOSPHATE --FRUCTOSE 6-PHOSPHATE 1-PHOSPHOTRANSFERASE BETA SUBUNIT
MLGRTKDQIRTTEQVNGAMASCQALKLDALVIIGGVTSNTDAAQLAETFAEAKCATKVVGVPVTLNGDLKNQFVETTVGFDTICKVNAQLISNVCTDALSAEKYYYFIRLMGRKASHVALECALQSHPNMVILGEEVAASKLTIFDITKQICDAVQARAEKDKNHGVILIPEGLVESIPELYALLQEIHGLHGKGVSVENISSQLSPWASALFEFLPPLIRKQLLLHPESDDSAQLSQIETEKLLAQLVETEMNRRLKEGTYKGKKFNAICHFFGYQARGALPSKFDCDYAYVLGHVCYHIIAAGLNSYMATVTNLKNPVNKWRCGATPISSMMTVKRWSRGPSATQIGKPAVHMASVDLKGKAYDVLRQNSSSFLLEDVYRNPGPLQFEGPGADSKPISLCVEDQDYMGRIKKLQEYLEKVKRIVKPGCSQDVLKAALSAMSSVTETLNIMTSSSTGQTPLSH

SEQ ID NO: 22657 - protein, 446 aa, Zea mays subsp. mays
  peptide (1)..(446): Ceres Seq. ID no. 14308563
  misc_feature (1)..(196): Pfam Name: Pfam Description:  Phosphofructokinase
  misc_feature (1)..(444): NCBI GI NO: 2499488 NR Description: Pyrophosphate --fructose 6-phosphate 1-phosphotransferase alpha subunit
  misc_feature (1)..(444): NCBI GI NO: 3790102 NR Description: pyrophosphate-dependent phosphofructokinase alpha subunit
  misc_feature (1)..(443): NCBI GI NO: 129881 NR Description: Pyrophosphate --fructose 6-phosphate 1-phosphotransferase alpha subunit
  misc_feature (1)..(441): NCBI GI NO: 15223082 NR Description: pyrophosphate-dependent phosphofructokinase alpha subunit -related
  misc_feature (1)..(441): NCBI GI NO: 15218074 NR Description: pyrophosphate-dependent phosphofructokinase alpha subunit -related
  misc_feature (1)..(446): NCBI GI NO: 29647436 NR Description: putative pyrophosphate--fructose 6-phosphate 1-phosphotransferase alpha subunit
  misc_feature (1)..(313): NCBI GI NO: 29367525 NR Description: fructose-6-phosphate 1-phosphotransferase
  misc_feature (1)..(374): NCBI GI NO: 11528427 NR Description: pyrophosphate-dependent phosphofructokinase
  misc_feature (1)..(386): NCBI GI NO: 15221156 NR Description: pyrophosphate -fructose-6-phosphate 1-phosphotransferase -related
  misc_feature (1)..(386): NCBI GI NO: 2507174 NR Description: PYROPHOSPHATE --FRUCTOSE 6-PHOSPHATE 1-PHOSPHOTRANSFERASE BETA SUBUNIT
MASCQALKLDALVIIGGVTSNTDAAQLAETFAEAKCATKVVGVPVTLNGDLKNQFVETTVGFDTICKVNAQLISNVCTDALSAEKYYYFIRLMGRKASHVALECALQSHPNMVILGEEVAASKLTIFDITKQICDAVQARAEKDKNHGVILIPEGLVESIPELYALLQEIHGLHGKGVSVENISSQLSPWASALFEFLPPLIRKQLLLHPESDDSAQLSQIETEKLLAQLVETEMNRRLKEGTYKGKKFNAICHFFGYQARGALPSKFDCDYAYVLGHVCYHIIAAGLNSYMATVTNLKNPVNKWRCGATPISSMMTVKRWSRGPSATQIGKPAVHMASVDLKGKAYDVLRQNSSSFLLEDVYRNPGPLQFEGPGADSKPISLCVEDQDYMGRIKKLQEYLEKVKRIVKPGCSQDVLKAALSAMSSVTETLNIMTSSSTGQTPLSH

SEQ ID NO: 22658 - DNA, 672 bp, Zea mays subsp. mays
  misc_feature (1)..(672): Ceres Seq. ID no. 13623924
ccccccccccccccggtatgatctctagtggaaaagtattatcctgcagatttctcaaatcaagaaagaatgcaattagagtgccaattgccacattttcaacttgatgtttgcaaccatccagaactaaagggtttatcatctttggctgatttaacaagtggattagttaaattggataaagattcttcttatccgatggtagataaattattgagattactcttgactctccctgtgtcaactgcgaccacagagtgagccttttcagctatgaaatttgtgaagacacgtcttcgaagcaaaatgggagatgcctatttacgggattatctggtcgtttatattgaaagggaattagcggcaatgattagttctgatgatattatcaaggcctatgatctagctaatacacgtagagctaaattcaaaataactgagatgtaattttaatttgtttgacaaaatagatgctcttttattatattgttttgtaatgaagattatatatcaatatatgcattgtggttggttcccttgccatttttatattgtgtcattgctggtttggtcgcttggaggctaagcctgccccctctgtcttcggatcctggcttcgccccctggccaccaccagtgctgctgcttcccctatggcatgcccaaggtatg

SEQ ID NO: 22659 - protein, 63 aa, Zea mays subsp. mays
  peptide (1)..(63): Ceres Seq. ID no. 13623925
  misc_feature (2)..(63): Pfam Name: Pfam Description:  hAT family dimerisation domain
  misc_feature (1)..(63): NCBI GI NO: 4063770 NR Description: transposase [Ipomoea purpurea]
  misc_feature (1)..(63): NCBI GI NO: 37534546 NR Description: putative transposase
  misc_feature (1)..(63): NCBI GI NO: 37537014 NR Description: putative transposase
  misc_feature (1)..(63): NCBI GI NO: 15230070 NR Description: transposase -related [Arabidopsis thaliana]
  misc_feature (1)..(63): NCBI GI NO: 15221982 NR Description: transposase -related [Arabidopsis thaliana]
  misc_feature (1)..(63): NCBI GI NO: 25518425 NR Description: hypothetical protein T29M8.13
  misc_feature (1)..(63): NCBI GI NO: 32489464 NR Description: OSJNBa0028M15.10
  misc_feature (1)..(63): NCBI GI NO: 38344561 NR Description: OSJNBa0065B15.7
  misc_feature (1)..(63): NCBI GI NO: 34913676 NR Description: putative transposase
  misc_feature (1)..(63): NCBI GI NO: 32488762 NR Description: OSJNBb0016D16.6
MQLECQLPHFQLDVCNHPELKGLSSLADLTSGLVKLDKDSSYPMVDKLLRLLLTLPVSTATTE

SEQ ID NO: 22660 - protein, 57 aa, Zea mays subsp. mays
  peptide (1)..(57): Ceres Seq. ID no. 13623926
  misc_feature (1)..(52): NCBI GI NO: 4063770 NR Description: transposase [Ipomoea purpurea]
  misc_feature (1)..(49): NCBI GI NO: 37534546 NR Description: putative transposase
  misc_feature (1)..(53): NCBI GI NO: 37537014 NR Description: putative transposase
  misc_feature (1)..(49): NCBI GI NO: 15230070 NR Description: transposase -related [Arabidopsis thaliana]
  misc_feature (1)..(49): NCBI GI NO: 15221982 NR Description: transposase -related [Arabidopsis thaliana]
  misc_feature (1)..(49): NCBI GI NO: 25518425 NR Description: hypothetical protein T29M8.13
  misc_feature (1)..(49): NCBI GI NO: 32489464 NR Description: OSJNBa0028M15.10
  misc_feature (1)..(42): NCBI GI NO: 38344561 NR Description: OSJNBa0065B15.7
  misc_feature (1)..(51): NCBI GI NO: 34913676 NR Description: putative transposase
  misc_feature (1)..(51): NCBI GI NO: 32488762 NR Description: OSJNBb0016D16.6
MKFVKTRLRSKMGDAYLRDYLVVYIERELAAMISSDDIIKAYDLANTRRAKFKITEM

SEQ ID NO: 22661 - protein, 46 aa, Zea mays subsp. mays
  peptide (1)..(46): Ceres Seq. ID no. 13623927
  misc_feature (1)..(41): NCBI GI NO: 4063770 NR Description: transposase [Ipomoea purpurea]
  misc_feature (1)..(38): NCBI GI NO: 37534546 NR Description: putative transposase
  misc_feature (1)..(42): NCBI GI NO: 37537014 NR Description: putative transposase
  misc_feature (1)..(38): NCBI GI NO: 15230070 NR Description: transposase -related [Arabidopsis thaliana]
  misc_feature (1)..(38): NCBI GI NO: 15221982 NR Description: transposase -related [Arabidopsis thaliana]
  misc_feature (1)..(38): NCBI GI NO: 25518425 NR Description: hypothetical protein T29M8.13
  misc_feature (1)..(38): NCBI GI NO: 32489464 NR Description: OSJNBa0028M15.10
  misc_feature (1)..(31): NCBI GI NO: 38344561 NR Description: OSJNBa0065B15.7
  misc_feature (1)..(40): NCBI GI NO: 34913676 NR Description: putative transposase
  misc_feature (1)..(40): NCBI GI NO: 32488762 NR Description: OSJNBb0016D16.6
MGDAYLRDYLVVYIERELAAMISSDDIIKAYDLANTRRAKFKITEM

SEQ ID NO: 22662 - DNA, 2227 bp, Zea mays subsp. mays
  misc_feature (1)..(2227): Ceres Seq. ID no. 15224676
tttgggcagggaagtggaccttttcagccggcaacaatgcttgggggtaattgccagcagattgctccaaattttggaggttcgttttttgggcaagggaatttggtgtttggtcagcgcttgcaaggttcgcagttagggttcaatcaaggatttggtggcagcactggaggcaatagggatttgtcttggacacatgggcgagatcatcgtgctcggtctgcgcatgcaccccgtgctgggaagttcagtgccaacaaacatgttgtagagggtgggaaattggagaattctctgcaacaccaggggcagcgcaccaataaaatgatgcagaacaatgctgaacctgaacctatgaagctgaatgcaaaacggataatggaagaaatggttgacaataggcatgacaaaaaaggatggagaagcaagatgagaatgtaatagttcaggatgctataaagatcactccagggattgaggcaccaaaaggtaaaccaaaatggtgtttccggtgtagaactaaggggcatgctacaacagaatgtaccgcgatccttttctgcaatatatgtgagggaggtgatcatgtagcagccacttgcccaatcaagaaaaaacctcgaccggtggctctctcagtcggttatgctgtggatggtttaggtttctttcatattccacatgggccgatttctactaccaaaaatgaaaagaatatggcactaatcaaagttataggaggtgcacttcaacaagcagatttggttgcccacttacagcggctggtgcctggaaagtttgaatgggatgcacaactgcatgcaccaaataaatgggtaacatcctttccttcaaaagtagaattaaagcgaacagtgaattttggttctgctgatctaaagaatggcttagtgttaaaatttgaagaatttgaggaggaatactttggagtggaactgcctcgtgtgtggatgcgggtactgaatttacctaacgtacttcgaacatatgaggtgttgtgggctattggaacgatgattggagctactacaaaggtggatatgatcactactcgaaagagtaattttggtcgatttgaggtggctgttctaaacacatcaatagtgcctacacagatagatgttgtcattggcacaagatggtttgaattacaacttcaaattgagagcacaagttcttcttcagggacaagaacgactgaggataatggtaacgctaatggcgacaatcaggaaaaaggcaatgactcagaaatgaaggatgaagaagctggtgctaaggatcataagtcctctcattcaaatgtttctttttcagttaaaggagcagggacctctaaaggacagcaggttgatgatggttccattgaggatttagaggaagatggtttattggatgttggttgggaggtggcagatggtcctactactgatttaccctctgaattgtatctagataattatgtagtccaaaaagacaacaacaatattcaaattcagaaaaatatgggcaatgatgttgagcagatgcaaccccatgtacaggctaatttaaggaaaaatcgcttgttcacaatcagtgaaacacatgctgaatcacaacctacagcaatacaaacaaagcaaaaccagaaagaagatgatcgcggcatcgaagctactgcatcagatgccctaggtcctttgctagatagggccttgacagagcttaaagaaaggcagtttccacataatggcagcacagaggatggtcaagttctaactgacaaccagctacacactccaccataccaggtgaaaaaagctataatgctaggacaccgaagaggaggagtaaaaggagggaggactctgtcaacgaagattccatcgaacgtgctgaaaggttggtggcaaaaaggaatttggagaattctaaaggtagtgttcagaggaacccactggataagacaatggtccgtgttgcaaaaagaggaaaacatgacacaaatcaagtggggatgtcgtgcgcttgagactacaatgatgcaaattttctcatacaacggatggagttttagtaatcgaattggtttttagtagatttcgaaatatggttgttcttgagatattaaacatcatgtgttttggtttgagatgtaataattgaacagccacatgcatctattggtgcagaagctggaatatttcaatatattccccattct

SEQ ID NO: 22663 - protein, 560 aa, Zea mays subsp. mays
  peptide (1)..(560): Ceres Seq. ID no. 15224677
  misc_feature (148)..(480): NCBI GI NO: 37534700 NR Description: putative non-LTR retroelement reverse transcriptase
  misc_feature (42)..(114): NCBI GI NO: 37534700 NR Description: putative non-LTR retroelement reverse transcriptase
  misc_feature (146)..(443): NCBI GI NO: 34896522 NR Description: putative reverse transcriptase
  misc_feature (19)..(88): NCBI GI NO: 34896522 NR Description: putative reverse transcriptase
  misc_feature (503)..(559): NCBI GI NO: 34896522 NR Description: putative reverse transcriptase
  misc_feature (76)..(332): NCBI GI NO: 31126775 NR Description: hypothetical protein
  misc_feature (54)..(334): NCBI GI NO: 37718853 NR Description: hypothetical protein
  misc_feature (28)..(184): NCBI GI NO: 38345598 NR Description: OSJNBb0012E24.16
  misc_feature (11)..(294): NCBI GI NO: 37700336 NR Description: putative endonuclease/exonuclease/phosphatasefamily protein
  misc_feature (18)..(285): NCBI GI NO: 38346464 NR Description: OSJNBa0019G23.12
MEKQDENVIVQDAIKITPGIEAPKGKPKWCFRCRTKGHATTECTAILFCNICEGGDHVAATCPIKKKPRPVALSVGYAVDGLGFFHIPHGPISTTKNEKNMALIKVIGGALQQADLVAHLQRLVPGKFEWDAQLHAPNKWVTSFPSKVELKRTVNFGSADLKNGLVLKFEEFEEEYFGVELPRVWMRVLNLPNVLRTYEVLWAIGTMIGATTKVDMITTRKSNFGRFEVAVLNTSIVPTQIDVVIGTRWFELQLQIESTSSSSGTRTTEDNGNANGDNQEKGNDSEMKDEEAGAKDHKSSHSNVSFSVKGAGTSKGQQVDDGSIEDLEEDGLLDVGWEVADGPTTDLPSELYLDNYVVQKDNNNIQIQKNMGNDVEQMQPHVQANLRKNRLFTISETHAESQPTAIQTKQNQKEDDRGIEATASDALGPLLDRALTELKERQFPHNGSTEDGQVLTDNQLHTPPYQVKKAIMLGHRRGGVKGGRTLSTKIPSNVLKGWWQKGIWRILKVVFRGTHWIRQWSVLQKEENMTQIKWGCRALETTMMQIFSYNGWSFSNRIGF

SEQ ID NO: 22664 - protein, 460 aa, Zea mays subsp. mays
  peptide (1)..(460): Ceres Seq. ID no. 15224678
  misc_feature (48)..(380): NCBI GI NO: 37534700 NR Description: putative non-LTR retroelement reverse transcriptase
  misc_feature (1)..(14): NCBI GI NO: 37534700 NR Description: putative non-LTR retroelement reverse transcriptase
  misc_feature (46)..(343): NCBI GI NO: 34896522 NR Description: putative reverse transcriptase
  misc_feature (403)..(459): NCBI GI NO: 34896522 NR Description: putative reverse transcriptase
  misc_feature (1)..(232): NCBI GI NO: 31126775 NR Description: hypothetical protein
  misc_feature (1)..(234): NCBI GI NO: 37718853 NR Description: hypothetical protein
  misc_feature (1)..(84): NCBI GI NO: 38345598 NR Description: OSJNBb0012E24.16
  misc_feature (1)..(194): NCBI GI NO: 37700336 NR Description: putative endonuclease/exonuclease/phosphatasefamily protein
  misc_feature (1)..(185): NCBI GI NO: 38346464 NR Description: OSJNBa0019G23.12
  misc_feature (1)..(205): NCBI GI NO: 32489466 NR Description: OSJNBa0028M15.12
MALIKVIGGALQQADLVAHLQRLVPGKFEWDAQLHAPNKWVTSFPSKVELKRTVNFGSADLKNGLVLKFEEFEEEYFGVELPRVWMRVLNLPNVLRTYEVLWAIGTMIGATTKVDMITTRKSNFGRFEVAVLNTSIVPTQIDVVIGTRWFELQLQIESTSSSSGTRTTEDNGNANGDNQEKGNDSEMKDEEAGAKDHKSSHSNVSFSVKGAGTSKGQQVDDGSIEDLEEDGLLDVGWEVADGPTTDLPSELYLDNYVVQKDNNNIQIQKNMGNDVEQMQPHVQANLRKNRLFTISETHAESQPTAIQTKQNQKEDDRGIEATASDALGPLLDRALTELKERQFPHNGSTEDGQVLTDNQLHTPPYQVKKAIMLGHRRGGVKGGRTLSTKIPSNVLKGWWQKGIWRILKVVFRGTHWIRQWSVLQKEENMTQIKWGCRALETTMMQIFSYNGWSFSNRIGF

SEQ ID NO: 22665 - protein, 375 aa, Zea mays subsp. mays
  peptide (1)..(375): Ceres Seq. ID no. 15224679
  misc_feature (1)..(295): NCBI GI NO: 37534700 NR Description: putative non-LTR retroelement reverse transcriptase
  misc_feature (1)..(258): NCBI GI NO: 34896522 NR Description: putative reverse transcriptase
  misc_feature (318)..(374): NCBI GI NO: 34896522 NR Description: putative reverse transcriptase
  misc_feature (1)..(147): NCBI GI NO: 31126775 NR Description: hypothetical protein
  misc_feature (1)..(149): NCBI GI NO: 37718853 NR Description: hypothetical protein
  misc_feature (1)..(109): NCBI GI NO: 37700336 NR Description: putative endonuclease/exonuclease/phosphatasefamily protein
  misc_feature (1)..(100): NCBI GI NO: 38346464 NR Description: OSJNBa0019G23.12
  misc_feature (1)..(120): NCBI GI NO: 32489466 NR Description: OSJNBa0028M15.12
  misc_feature (19)..(141): NCBI GI NO: 37806138 NR Description: hypothetical protein
  misc_feature (1)..(150): NCBI GI NO: 38345001 NR Description: OSJNBa0052O21.4
MRVLNLPNVLRTYEVLWAIGTMIGATTKVDMITTRKSNFGRFEVAVLNTSIVPTQIDVVIGTRWFELQLQIESTSSSSGTRTTEDNGNANGDNQEKGNDSEMKDEEAGAKDHKSSHSNVSFSVKGAGTSKGQQVDDGSIEDLEEDGLLDVGWEVADGPTTDLPSELYLDNYVVQKDNNNIQIQKNMGNDVEQMQPHVQANLRKNRLFTISETHAESQPTAIQTKQNQKEDDRGIEATASDALGPLLDRALTELKERQFPHNGSTEDGQVLTDNQLHTPPYQVKKAIMLGHRRGGVKGGRTLSTKIPSNVLKGWWQKGIWRILKVVFRGTHWIRQWSVLQKEENMTQIKWGCRALETTMMQIFSYNGWSFSNRIGF

SEQ ID NO: 22666 - DNA, 1253 bp, Zea mays subsp. mays
  misc_feature (1)..(1253): Ceres Seq. ID no. 12637240
ggcggcactggtgcgtcgcgtggcaggcctcgagggaggcccaggaaagcagatgcctgcatggacgaagatgagattcaagacaaactggagtatccgtcggctgctgagatgttgctgcagcttctgtccatcgccacggatcctgtaaatggcaattatgactctgctcctgtgattgttagcttcttctcaaagcacaaggactccgatgtgcctagtttatatgaagacaaagaactgattgagaattttggtggcaagaagggtaagaaaaagtccatcggaagcttgggcccagctacaaagccagaagccagcgatgatactgtggatggtcagaggggccgtaggaagtctgctgggagcttgtactcagctagaaaggccgaagattcatattggtgtgatattatcatcagcgatttcgatgacggagacagtgactatgacagtcacaagaggaagcggccctgtaacaggagcaccaataagaagatgaagcaggaggagccacctcaaggagccccatcatcgaatgcaaaacctgcagatggtccagccgcccttattctacatttcagcagtccagaagctattccttctgttgatgacatcaatagcatattccgtattcatggacctattgtggagcgtgagactgtgatcactaagaagtcaaagattgcaaaagtagttttctctaagagtgttgatgcagagcaggcacatcacagttccggaaagcgtaatgcatttggtccatcgcttctcacatctgaaattaagtacttgccatcggcacctcaggtttcttaaatgccgcagtctggactggtggatacgccgtggaaatgcgccatgaagcttggagcaacggagcataagttggtgtcactgactttactgaccaggtcacagtagtcactgagttgagtgagcaaattttaggctttctgtggttacatgcatccatttgactgattgtcgacccggagtttgttgtttatgttgatagtagattagattatgtagcatgatgtgcttcctcttatgctagcaacttttttttggtattgcctagtaattgcacagctgtggatctctctattatgtttttttatttgattgtcacgaggctagtgaagccgctttagtgcaaaaaaaaaaaaaaaaaaaaaaaaaaaaaaaaaaaaaaaaaaaaaaaaaaaaaaagaaaaaaaaaaaaaaaaaaactcgagggggggcccggt

SEQ ID NO: 22667 - protein, 272 aa, Zea mays subsp. mays
  peptide (1)..(272): Ceres Seq. ID no. 12637241
  misc_feature (2)..(271): NCBI GI NO: 34394029 NR Description: PWWP domain protein-like
  misc_feature (2)..(148): NCBI GI NO: 34394030 NR Description: unknown protein
  misc_feature (158)..(265): NCBI GI NO: 15242573 NR Description: PWWP domain protein; protein id: At5g02950.1
  misc_feature (113)..(262): NCBI GI NO: 15232577 NR Description: Putative protein; protein id: At3g54760.1
GGTGASRGRPRGRPRKADACMDEDEIQDKLEYPSAAEMLLQLLSIATDPVNGNYDSAPVIVSFFSKHKDSDVPSLYEDKELIENFGGKKGKKKSIGSLGPATKPEASDDTVDGQRGRRKSAGSLYSARKAEDSYWCDIIISDFDDGDSDYDSHKRKRPCNRSTNKKMKQEEPPQGAPSSNAKPADGPAALILHFSSPEAIPSVDDINSIFRIHGPIVERETVITKKSKIAKVVFSKSVDAEQAHHSSGKRNAFGPSLLTSEIKYLPSAPQVS

SEQ ID NO: 22668 - protein, 252 aa, Zea mays subsp. mays
  peptide (1)..(252): Ceres Seq. ID no. 12637242
  misc_feature (1)..(251): NCBI GI NO: 34394029 NR Description: PWWP domain protein-like
  misc_feature (1)..(128): NCBI GI NO: 34394030 NR Description: unknown protein
  misc_feature (138)..(245): NCBI GI NO: 15242573 NR Description: PWWP domain protein; protein id: At5g02950.1
  misc_feature (93)..(242): NCBI GI NO: 15232577 NR Description: Putative protein; protein id: At3g54760.1
MDEDEIQDKLEYPSAAEMLLQLLSIATDPVNGNYDSAPVIVSFFSKHKDSDVPSLYEDKELIENFGGKKGKKKSIGSLGPATKPEASDDTVDGQRGRRKSAGSLYSARKAEDSYWCDIIISDFDDGDSDYDSHKRKRPCNRSTNKKMKQEEPPQGAPSSNAKPADGPAALILHFSSPEAIPSVDDINSIFRIHGPIVERETVITKKSKIAKVVFSKSVDAEQAHHSSGKRNAFGPSLLTSEIKYLPSAPQVS

SEQ ID NO: 22669 - protein, 235 aa, Zea mays subsp. mays
  peptide (1)..(235): Ceres Seq. ID no. 12637243
  misc_feature (1)..(234): NCBI GI NO: 34394029 NR Description: PWWP domain protein-like
  misc_feature (1)..(111): NCBI GI NO: 34394030 NR Description: unknown protein
  misc_feature (121)..(228): NCBI GI NO: 15242573 NR Description: PWWP domain protein; protein id: At5g02950.1
  misc_feature (76)..(225): NCBI GI NO: 15232577 NR Description: Putative protein; protein id: At3g54760.1
MLLQLLSIATDPVNGNYDSAPVIVSFFSKHKDSDVPSLYEDKELIENFGGKKGKKKSIGSLGPATKPEASDDTVDGQRGRRKSAGSLYSARKAEDSYWCDIIISDFDDGDSDYDSHKRKRPCNRSTNKKMKQEEPPQGAPSSNAKPADGPAALILHFSSPEAIPSVDDINSIFRIHGPIVERETVITKKSKIAKVVFSKSVDAEQAHHSSGKRNAFGPSLLTSEIKYLPSAPQVS

SEQ ID NO: 22670 - DNA, 1715 bp, Zea mays subsp. mays
  misc_feature (1)..(1715): Ceres Seq. ID no. 13600272
atatagtttattttatctttgatgagaaagctcttctaattaattcaagactgccttgattttcccagttattactcgagcgcgctgaggcaactctgaactaagctggtagtaggtatgcttccctccagcaccttgaagatcgaggtttttctttttgaaaagcggatttatccatcgtctttgtttgttaaagtaaagtaaagtatggaattctcaccaagagctgcggaacttacgactctattagaaagtagaatgatcaacttttacacgaatttgaaagtggatgagatcggtcgagtggtctcagttggagatggagagcccgcgcagccccgaggcggagatcggccaccgggtggaggacctctgggaggtggcggagccgcagctctcgccgtcggagaagctcaactcctgcttcgaggacatccccgtcgcgtccttcccgcgcacgcacccgtcccaagtcattgagattccttcagatgcaagtcttgctgaaactgtagaaatattatccaaaaacaaaatcttgagtgcacccataagaaatgttgaggctccagaagatgctagttggatggacaaatacatcggcattgtggaatttgctggtattgccatgtggttgctcagtcagtctgatgctgcagttaatgggacggttggttcgggaccaggatcgcctgtctccagtctagtttcgaggttgggttctttcacattcagaaggacatcatctggaagattagaaactgctactgattctgaatcagacgaagcagcatcggttggtgggagcttttttgaaaccctgacttcctctgaattctacaagaatacaaaggttggcgatatctcagggagcttccgctgggcaccatttcttgcactgcagacatctgacacattccttaccatgttgctgcttctatccaagtacagaatgaagagccttccagttgtagaagtgggaggagataagattgagaacattatcacacaatcctctgtcgtacacatgcttgcagagtgtgttgggctctcctggtttgagaactggggaaagggagttggtggcttgccagtcatggacacaagtggagcaaatgccattggtaatattagcatcagagatgtccagtatcttttaactgctcccaagatatacaaagagcacaggtcaatcacgacaaaggatttccttagtgctgttcgacaccacctccaggagcagcgtgaggcctcaccgttgctgcatgatgtcatcacttgcaaaaaggatgatacaatcaaggacatcatactgaagctggactctgagaagatccacaggatctacgttgtggatgacaaagggaacaccgagggagtcatcaccttgagggacataatctccaagctggtgcatgagccacgccattactttggggatttctttgatggtgttgttcccctgcctgcaaacagcaccgtatgacacatcttcgcggtccaatcacactgatgtatctgtgcaaatgtacattttgagctattctcttctgaagttgcttctagtgtattccttttctcagccttctcggttctcaggtaaacagaccattgcctacatggagaaaaggactaatgctctaatggatggatggcaatgttgtacattgaataatcaaaaaaaaaaaaaaaaaaaactcgagggggggcccggt

SEQ ID NO: 22671 - protein, 398 aa, Zea mays subsp. mays
  peptide (1)..(398): Ceres Seq. ID no. 13600273
  misc_feature (60)..(117): Pfam Name: Pfam Description:  CBS domain
  misc_feature (9)..(270): NCBI GI NO: 38346640 NR Description: OSJNBa0072D21.10
  misc_feature (262)..(398): NCBI GI NO: 38346640 NR Description: OSJNBa0072D21.10
  misc_feature (12)..(270): NCBI GI NO: 32364482 NR Description: AKIN gamma [Medicago truncatula]
  misc_feature (238)..(398): NCBI GI NO: 32364482 NR Description: AKIN gamma [Medicago truncatula]
  misc_feature (16)..(273): NCBI GI NO: 19386799 NR Description: OJ1485_B09.7
  misc_feature (262)..(398): NCBI GI NO: 19386799 NR Description: OJ1485_B09.7
  misc_feature (262)..(398): NCBI GI NO: 15228397 NR Description: CBS domain containing protein
  misc_feature (163)..(270): NCBI GI NO: 15228397 NR Description: CBS domain containing protein
  misc_feature (262)..(398): NCBI GI NO: 21592917 NR Description: unknown [Arabidopsis thaliana]
  misc_feature (163)..(270): NCBI GI NO: 21592917 NR Description: unknown [Arabidopsis thaliana]
MRSVEWSQLEMESPRSPEAEIGHRVEDLWEVAEPQLSPSEKLNSCFEDIPVASFPRTHPSQVIEIPSDASLAETVEILSKNKILSAPIRNVEAPEDASWMDKYIGIVEFAGIAMWLLSQSDAAVNGTVGSGPGSPVSSLVSRLGSFTFRRTSSGRLETATDSESDEAASVGGSFFETLTSSEFYKNTKVGDISGSFRWAPFLALQTSDTFLTMLLLLSKYRMKSLPVVEVGGDKIENIITQSSVVHMLAECVGLSWFENWGKGVGGLPVMDTSGANAIGNISIRDVQYLLTAPKIYKEHRSITTKDFLSAVRHHLQEQREASPLLHDVITCKKDDTIKDIILKLDSEKIHRIYVVDDKGNTEGVITLRDIISKLVHEPRHYFGDFFDGVVPLPANSTV

SEQ ID NO: 22672 - protein, 388 aa, Zea mays subsp. mays
  peptide (1)..(388): Ceres Seq. ID no. 13600274
  misc_feature (50)..(107): Pfam Name: Pfam Description:  CBS domain
  misc_feature (1)..(260): NCBI GI NO: 38346640 NR Description: OSJNBa0072D21.10
  misc_feature (252)..(388): NCBI GI NO: 38346640 NR Description: OSJNBa0072D21.10
  misc_feature (2)..(260): NCBI GI NO: 32364482 NR Description: AKIN gamma [Medicago truncatula]
  misc_feature (228)..(388): NCBI GI NO: 32364482 NR Description: AKIN gamma [Medicago truncatula]
  misc_feature (6)..(263): NCBI GI NO: 19386799 NR Description: OJ1485_B09.7
  misc_feature (252)..(388): NCBI GI NO: 19386799 NR Description: OJ1485_B09.7
  misc_feature (252)..(388): NCBI GI NO: 15228397 NR Description: CBS domain containing protein
  misc_feature (153)..(260): NCBI GI NO: 15228397 NR Description: CBS domain containing protein
  misc_feature (252)..(388): NCBI GI NO: 21592917 NR Description: unknown [Arabidopsis thaliana]
  misc_feature (153)..(260): NCBI GI NO: 21592917 NR Description: unknown [Arabidopsis thaliana]
MESPRSPEAEIGHRVEDLWEVAEPQLSPSEKLNSCFEDIPVASFPRTHPSQVIEIPSDASLAETVEILSKNKILSAPIRNVEAPEDASWMDKYIGIVEFAGIAMWLLSQSDAAVNGTVGSGPGSPVSSLVSRLGSFTFRRTSSGRLETATDSESDEAASVGGSFFETLTSSEFYKNTKVGDISGSFRWAPFLALQTSDTFLTMLLLLSKYRMKSLPVVEVGGDKIENIITQSSVVHMLAECVGLSWFENWGKGVGGLPVMDTSGANAIGNISIRDVQYLLTAPKIYKEHRSITTKDFLSAVRHHLQEQREASPLLHDVITCKKDDTIKDIILKLDSEKIHRIYVVDDKGNTEGVITLRDIISKLVHEPRHYFGDFFDGVVPLPANSTV

SEQ ID NO: 22673 - protein, 299 aa, Zea mays subsp. mays
  peptide (1)..(299): Ceres Seq. ID no. 13600275
  misc_feature (1)..(171): NCBI GI NO: 38346640 NR Description: OSJNBa0072D21.10
  misc_feature (163)..(299): NCBI GI NO: 38346640 NR Description: OSJNBa0072D21.10
  misc_feature (1)..(171): NCBI GI NO: 32364482 NR Description: AKIN gamma [Medicago truncatula]
  misc_feature (139)..(299): NCBI GI NO: 32364482 NR Description: AKIN gamma [Medicago truncatula]
  misc_feature (1)..(174): NCBI GI NO: 19386799 NR Description: OJ1485_B09.7
  misc_feature (163)..(299): NCBI GI NO: 19386799 NR Description: OJ1485_B09.7
  misc_feature (163)..(299): NCBI GI NO: 15228397 NR Description: CBS domain containing protein
  misc_feature (64)..(171): NCBI GI NO: 15228397 NR Description: CBS domain containing protein
  misc_feature (163)..(299): NCBI GI NO: 21592917 NR Description: unknown [Arabidopsis thaliana]
  misc_feature (64)..(171): NCBI GI NO: 21592917 NR Description: unknown [Arabidopsis thaliana]
MDKYIGIVEFAGIAMWLLSQSDAAVNGTVGSGPGSPVSSLVSRLGSFTFRRTSSGRLETATDSESDEAASVGGSFFETLTSSEFYKNTKVGDISGSFRWAPFLALQTSDTFLTMLLLLSKYRMKSLPVVEVGGDKIENIITQSSVVHMLAECVGLSWFENWGKGVGGLPVMDTSGANAIGNISIRDVQYLLTAPKIYKEHRSITTKDFLSAVRHHLQEQREASPLLHDVITCKKDDTIKDIILKLDSEKIHRIYVVDDKGNTEGVITLRDIISKLVHEPRHYFGDFFDGVVPLPANSTV

SEQ ID NO: 22674 - DNA, 613 bp, Zea mays subsp. mays
  misc_feature (1)..(613): Ceres Seq. ID no. 12594347
tatatttggttatttctccaccgtcagagatgcggcctagtaacctgtgtgccagatgcattttcatgaaatggcaaagtgccattgccaccctcaatatgtatatctgtgtgcaactctctgcgtgcatgattcttcacttagaggggaaaaataatcttatatcctttcgtgccataagattttcagaatccgattatcctctacgacagcacaaggtgtgacaaaccgcactgccatgcaatgcagattcagggaatctttcaacatatattcctctctccaggctttcattataaatagaggccaactgggttttgcacttcatacaaccccagaccttcagagcttacaaggagtagcagagctcagaagagcattcgtattcagcacatagtgcgccttcttgaaagaactgtacaggagatcacacaatgagctattacggcagcagctcttctggtggacgaagcagtaggagagtcgactatgggaggacatatgtggtgaggccaaagggaaggcacctagccaccattgtgtggctccatggcataggtgacaatggtgctagctggtcccagctcctggattctcttcctctacaaatatc

SEQ ID NO: 22675 - protein, 73 aa, Zea mays subsp. mays
  peptide (1)..(73): Ceres Seq. ID no. 12594348
YLVISPPSEMRPSNLCARCIFMKWQSAIATLNMYICVQLSACMILHLEGKNNLISFRAIRFSESDYPLRQHKV

SEQ ID NO: 22676 - protein, 64 aa, Zea mays subsp. mays
  peptide (1)..(64): Ceres Seq. ID no. 12594349
MRPSNLCARCIFMKWQSAIATLNMYICVQLSACMILHLEGKNNLISFRAIRFSESDYPLRQHKV

SEQ ID NO: 22677 - protein, 59 aa, Zea mays subsp. mays
  peptide (1)..(59): Ceres Seq. ID no. 12594350
  misc_feature (2)..(57): NCBI GI NO: 34910274 NR Description: OSJNBa0089K24.24
  misc_feature (1)..(57): NCBI GI NO: 29409364 NR Description: biostress-resistance-related protein
  misc_feature (1)..(57): NCBI GI NO: 15241251 NR Description: putative protein; protein id: At5g20060
  misc_feature (1)..(57): NCBI GI NO: 15232645 NR Description: putative lysophospholipase; protein id: At3g15650
  misc_feature (1)..(57): NCBI GI NO: 5903036 NR Description: F6D8.5 [Arabidopsis thaliana]
  misc_feature (1)..(57): NCBI GI NO: 15219072 NR Description: unknown protein; protein id: At1g52700.1
MSYYGSSSSGGRSSRRVDYGRTYVVRPKGRHLATIVWLHGIGDNGASWSQLLDSLPLQI

SEQ ID NO: 22678 - DNA, 1524 bp, Zea mays subsp. mays
  misc_feature (1)..(1524): Ceres Seq. ID no. 15226179
ttcgttgattatatttttaggtgggtgcgttggcaaaagatgtttgcaagcgatgagttggggtgagccatgggtttgaccccattatcagggctatgtagcacagaagatagtgctgctagaaaatcttgttggcaatccctgcaaagttgagtggccacacattctttgatggtatccatgggtttaccaaccagaaatttaccaatggtatatgcatcttttactgaaatggtttgttaacatacagcaattcgataaggttcttgagccatgtcttttgcctgagctgtatctgaaaagaaaagacttgccactagaaaaatgtctattgttttaatacaaaatcttatatagtgaccaaagtggtgtctaactgtgaagacatgtatgatctgttgattatcaatatttgtttggtattttctactcaaaaaaagctgttcaggatgttcctttaacatttaatgtgatattaatagctgtgtccgcttccgctattacatatatttgtatttctatcctttaattgcttagccccctcttaacttcgtttcatgatccaccattgtttgttaggctgatgacgaggacaaacgatgcaagtggtggtgggaagcttccccggaagcgcttctatcgcgccagggcacacagcaacccgctcagcgactcgcacttcccagtcccaatatcgcctgaagaggtcgatctctcacagcactacccgcggtacttccctgctgacaagggcagcgacggtgaggaggctgcagcgccacaacagatccgcttcgccgatgtggggtgcggatttggcgggttgcttgtagggctctcgcctctcttcccagatacgctcatgattggcatggagctcagggacaaggtaacggagtatgtgaaggagaggattttagctctaagaggggcaaacccaggacagtatgataacatatccgttgtccgcacgaactcgatgaaatacattccaaattacttcagaaaggctcagctcaccaagatgttcttcctgttccccgatccccacttcaaggagaagaaccacaggaggagggttatcagcatgcagctgttagacgagtatgcttacgtgatggaagtgggaggaatcatatataccatcactgatgtcgaggagctcggagagtggatgcggtcgtgtctagagaagcacccgttattcgaaaccgttcctgaggaagagattaaggctgaccctgttttcaaactactgtctactgccactgaagaaagccagaaggtggcaagaaatggaggacagactttctatgccatcttcaggcggatctccttacaagaagaataagtcgcttaagagattattagctagatcgtgttacgtgtgtttgtcagttttatacattttttaaaaaaaatttagcagtaggtgtacttggtactaaatattgcaatgttgctttgcaaggttctgcagacccaaaaaaaaaaacaaaaaaaactcgagggggggcccggtcc

SEQ ID NO: 22679 - protein, 255 aa, Zea mays subsp. mays
  peptide (1)..(255): Ceres Seq. ID no. 15226180
  misc_feature (35)..(250): Pfam Name: Pfam Description:  Putative methyltransferase
  misc_feature (2)..(251): NCBI GI NO: 15238631 NR Description: methyltransferase-related protein
  misc_feature (2)..(250): NCBI GI NO: 1418767 NR Description: D1075-like [Homo sapiens]
  misc_feature (2)..(250): NCBI GI NO: 10880981 NR Description: methyltransferase-like protein 1 isoform a
  misc_feature (14)..(250): NCBI GI NO: 4160294 NR Description: methyltransferase-like protein 1 [Mus musculus]
  misc_feature (14)..(250): NCBI GI NO: 15215058 NR Description: methyltransferase-like 1 [Mus musculus]
  misc_feature (14)..(250): NCBI GI NO: 6754682 NR Description: methyltransferase-like 1; methyltransferase-like 1
  misc_feature (13)..(250): NCBI GI NO: 39597269 NR Description: Hypothetical protein CBG02883
  misc_feature (13)..(250): NCBI GI NO: 17536689 NR Description: methyltransferase-like 1 (2L762)
  misc_feature (13)..(250): NCBI GI NO: 6320000 NR Description: Transfer RNA methyltransferase; Trm8p
  misc_feature (58)..(250): NCBI GI NO: 32405284 NR Description: probable methyltransferase related protein
MTRTNDASGGGKLPRKRFYRARAHSNPLSDSHFPVPISPEEVDLSQHYPRYFPADKGSDGEEAAAPQQIRFADVGCGFGGLLVGLSPLFPDTLMIGMELRDKVTEYVKERILALRGANPGQYDNISVVRTNSMKYIPNYFRKAQLTKMFFLFPDPHFKEKNHRRRVISMQLLDEYAYVMEVGGIIYTITDVEELGEWMRSCLEKHPLFETVPEEEIKADPVFKLLSTATEESQKVARNGGQTFYAIFRRISLQEE

SEQ ID NO: 22680 - protein, 162 aa, Zea mays subsp. mays
  peptide (1)..(162): Ceres Seq. ID no. 15226181
  misc_feature (1)..(157): Pfam Name: Pfam Description:  Putative methyltransferase
  misc_feature (1)..(158): NCBI GI NO: 15238631 NR Description: methyltransferase-related protein
  misc_feature (1)..(157): NCBI GI NO: 1418767 NR Description: D1075-like [Homo sapiens]
  misc_feature (1)..(157): NCBI GI NO: 10880981 NR Description: methyltransferase-like protein 1 isoform a
  misc_feature (1)..(157): NCBI GI NO: 4160294 NR Description: methyltransferase-like protein 1 [Mus musculus]
  misc_feature (1)..(157): NCBI GI NO: 6754682 NR Description: methyltransferase-like 1; methyltransferase-like 1
  misc_feature (1)..(157): NCBI GI NO: 15215058 NR Description: methyltransferase-like 1 [Mus musculus]
  misc_feature (1)..(157): NCBI GI NO: 39597269 NR Description: Hypothetical protein CBG02883
  misc_feature (1)..(157): NCBI GI NO: 17536689 NR Description: methyltransferase-like 1 (2L762)
  misc_feature (1)..(157): NCBI GI NO: 6320000 NR Description: Transfer RNA methyltransferase; Trm8p
  misc_feature (1)..(157): NCBI GI NO: 32405284 NR Description: probable methyltransferase related protein
MIGMELRDKVTEYVKERILALRGANPGQYDNISVVRTNSMKYIPNYFRKAQLTKMFFLFPDPHFKEKNHRRRVISMQLLDEYAYVMEVGGIIYTITDVEELGEWMRSCLEKHPLFETVPEEEIKADPVFKLLSTATEESQKVARNGGQTFYAIFRRISLQEE

SEQ ID NO: 22681 - protein, 159 aa, Zea mays subsp. mays
  peptide (1)..(159): Ceres Seq. ID no. 15226182
  misc_feature (1)..(154): Pfam Name: Pfam Description:  Putative methyltransferase
  misc_feature (1)..(155): NCBI GI NO: 15238631 NR Description: methyltransferase-related protein
  misc_feature (1)..(154): NCBI GI NO: 1418767 NR Description: D1075-like [Homo sapiens]
  misc_feature (1)..(154): NCBI GI NO: 10880981 NR Description: methyltransferase-like protein 1 isoform a
  misc_feature (1)..(154): NCBI GI NO: 4160294 NR Description: methyltransferase-like protein 1 [Mus musculus]
  misc_feature (1)..(154): NCBI GI NO: 6754682 NR Description: methyltransferase-like 1; methyltransferase-like 1
  misc_feature (1)..(154): NCBI GI NO: 15215058 NR Description: methyltransferase-like 1 [Mus musculus]
  misc_feature (1)..(154): NCBI GI NO: 39597269 NR Description: Hypothetical protein CBG02883
  misc_feature (1)..(154): NCBI GI NO: 17536689 NR Description: methyltransferase-like 1 (2L762)
  misc_feature (1)..(154): NCBI GI NO: 6320000 NR Description: Transfer RNA methyltransferase; Trm8p
  misc_feature (1)..(154): NCBI GI NO: 32405284 NR Description: probable methyltransferase related protein
MELRDKVTEYVKERILALRGANPGQYDNISVVRTNSMKYIPNYFRKAQLTKMFFLFPDPHFKEKNHRRRVISMQLLDEYAYVMEVGGIIYTITDVEELGEWMRSCLEKHPLFETVPEEEIKADPVFKLLSTATEESQKVARNGGQTFYAIFRRISLQEE

SEQ ID NO: 22682 - DNA, 1844 bp, Zea mays subsp. mays
  misc_feature (1)..(1844): Ceres Seq. ID no. 12637271
gtggctagcggtgtggctccgtcagctgctccaggagctccatagttcgctgacatggagcacgctgggctactgtgatgtcagcgtcgtatatctctccatcaacctcgtctaacaccagcgcacgaagcatgtcgagctcgatctccacttcatgcgtgagcgtgtcgccattggagatgtgcgagttcatgtaccaaccacctctcagttcgccgacgtcttcaccaagggccatcccacgccggtgtttgaggagtttcggtccagtctcaacatctatcatggctagagttttgactgcggggggtgttagatgtatttgtgtgtggctgtcattgtattgggccaaggcccacctactctattattaatacatcacccaaccttattgagagagttagggtttcagtcttttccagaatgcaatattatctaagacacatatggatttgcttctctcctcaagttgatagacacatgttttttagaatgctaccttttttaatgaaaagtaggaagtattcctctgatcctataaccctatatattaatatacatgcatataaaagagtgattgtcacagtaagctacatttacattaaaatttgaatctttgtaaggtctactgttggcattggatgtcaagtagtatgatgaaagtttattttgttattatatctaagattgtgcttaaaactggtaggggcatttcacttctaggaaaagaaaaaaaaatcctactttgacctcttttttttatatcctggctggtttaggttatctgagatactgagaccagctagctatcagttagttatacttatgcacattctttgctccataagtattctttatcttcctatgttggcattttcaatttgagttgttgtcacctgaatttcaatacttcatattctataaataccccccccccccccctcaaactaacatatttcaagtatgtttgaacaatgaacagttggtagttctctaaaaaagtttaaggatcttgcaggtttcctgcttctgacaaggcctccaagatgaggaatcttgatgcctcgttgcttccgcaaaccaacaagaatgttcagcagcaaagtgaagtcgatgtgaagcttgcatcaatgctctatgaagctttacttagccttagagaacagataatggaggagtgtaacgaaggattcaatgcgtatcacatattcaaaacagacacgttgaaggaaatgagtatccgagtaccgagaacaaaagaagagcttttggatataaacggcctcggcaagacaaaggtcaagaagtacggggaccgcttgcttgcaaccatcgaggacttcctcagcaaacacccaaatccaaggagaaacagcggcggaggtggcggcggcaacgagcactccgatgcggcaaagaagcgaaggggctccaccgccatctctgcagcgagttacggcgactatgacttcgacgaacgcacgggccagcagtccaagaagcgcgcggccaagacgcgaactgtctctgcccacggcccccgctgcacggacgccgatctcgatgggcctgaggtggtggaggtggacggcgagctgcgcagcgtccggaagcccgtggcgtatggcaatggcagggttcttcccaagtgggcacccctctaacttattccaggaatttgggtacgtcaagtagagtagagtaccgctagggaataggaatgtaggcttgcacatatgtaatctcccaggttggctcgtgcacatgcagcgatgcagtgatgtcaagggttttctgtaaaaaagaaaaaaaaaaaaaaaaaaactcgagggggggcccggtac

SEQ ID NO: 22683 - protein, 205 aa, Zea mays subsp. mays
  peptide (1)..(205): Ceres Seq. ID no. 12637272
  misc_feature (1)..(202): NCBI GI NO: 38345369 NR Description: OSJNBa0088K19.8
  misc_feature (7)..(202): NCBI GI NO: 11121449 NR Description: DNA Helicase [Arabidopsis thaliana]
  misc_feature (7)..(202): NCBI GI NO: 30681987 NR Description: DNA helicase (recQl4A) [Arabidopsis thaliana]
  misc_feature (1)..(111): NCBI GI NO: 11121451 NR Description: DNA Helicase [Arabidopsis thaliana]
  misc_feature (26)..(111): NCBI GI NO: 25404300 NR Description: probable DNA helicase T7P1.7
  misc_feature (1)..(82): NCBI GI NO: 30696491 NR Description: DNA helicase, putative [Arabidopsis thaliana]
  misc_feature (1)..(173): NCBI GI NO: 28211708 NR Description: ATP-dependent DNA helicase recQ
  misc_feature (14)..(177): NCBI GI NO: 30020934 NR Description: ATP-dependent DNA helicase recQ
MRNLDASLLPQTNKNVQQQSEVDVKLASMLYEALLSLREQIMEECNEGFNAYHIFKTDTLKEMSIRVPRTKEELLDINGLGKTKVKKYGDRLLATIEDFLSKHPNPRRNSGGGGGGNEHSDAAKKRRGSTAISAASYGDYDFDERTGQQSKKRAAKTRTVSAHGPRCTDADLDGPEVVEVDGELRSVRKPVAYGNGRVLPKWAPL

SEQ ID NO: 22684 - protein, 177 aa, Zea mays subsp. mays
  peptide (1)..(177): Ceres Seq. ID no. 12637273
  misc_feature (1)..(174): NCBI GI NO: 38345369 NR Description: OSJNBa0088K19.8
  misc_feature (1)..(174): NCBI GI NO: 11121449 NR Description: DNA Helicase [Arabidopsis thaliana]
  misc_feature (1)..(174): NCBI GI NO: 30681987 NR Description: DNA helicase (recQl4A) [Arabidopsis thaliana]
  misc_feature (1)..(83): NCBI GI NO: 11121451 NR Description: DNA Helicase [Arabidopsis thaliana]
  misc_feature (1)..(83): NCBI GI NO: 25404300 NR Description: probable DNA helicase T7P1.7
  misc_feature (1)..(54): NCBI GI NO: 30696491 NR Description: DNA helicase, putative [Arabidopsis thaliana]
  misc_feature (1)..(145): NCBI GI NO: 28211708 NR Description: ATP-dependent DNA helicase recQ
  misc_feature (1)..(149): NCBI GI NO: 30020934 NR Description: ATP-dependent DNA helicase recQ
MLYEALLSLREQIMEECNEGFNAYHIFKTDTLKEMSIRVPRTKEELLDINGLGKTKVKKYGDRLLATIEDFLSKHPNPRRNSGGGGGGNEHSDAAKKRRGSTAISAASYGDYDFDERTGQQSKKRAAKTRTVSAHGPRCTDADLDGPEVVEVDGELRSVRKPVAYGNGRVLPKWAPL

SEQ ID NO: 22685 - protein, 164 aa, Zea mays subsp. mays
  peptide (1)..(164): Ceres Seq. ID no. 12637274
  misc_feature (1)..(161): NCBI GI NO: 38345369 NR Description: OSJNBa0088K19.8
  misc_feature (1)..(161): NCBI GI NO: 11121449 NR Description: DNA Helicase [Arabidopsis thaliana]
  misc_feature (1)..(161): NCBI GI NO: 30681987 NR Description: DNA helicase (recQl4A) [Arabidopsis thaliana]
  misc_feature (1)..(70): NCBI GI NO: 11121451 NR Description: DNA Helicase [Arabidopsis thaliana]
  misc_feature (1)..(70): NCBI GI NO: 25404300 NR Description: probable DNA helicase T7P1.7
  misc_feature (1)..(41): NCBI GI NO: 30696491 NR Description: DNA helicase, putative [Arabidopsis thaliana]
  misc_feature (1)..(132): NCBI GI NO: 28211708 NR Description: ATP-dependent DNA helicase recQ
  misc_feature (1)..(136): NCBI GI NO: 30020934 NR Description: ATP-dependent DNA helicase recQ
MEECNEGFNAYHIFKTDTLKEMSIRVPRTKEELLDINGLGKTKVKKYGDRLLATIEDFLSKHPNPRRNSGGGGGGNEHSDAAKKRRGSTAISAASYGDYDFDERTGQQSKKRAAKTRTVSAHGPRCTDADLDGPEVVEVDGELRSVRKPVAYGNGRVLPKWAPL

SEQ ID NO: 22686 - DNA, 2224 bp, Zea mays subsp. mays
  misc_feature (1)..(2224): Ceres Seq. ID no. 15179672
tcagtctctcagtgctgatacttctctccactctcctctttctttccctgtcccgacagagttcgaggaagctggggtgggcctgatgcttctccttctcttgcagtctagcgtccattccacttcgcaagggcttttctttctgttttaagtaaaacggatccagcaacgcaccagttcctgaaacagaaacgtgatgatggattcagtaagcatgaagctgttagcttttgtgttccttctgttgcgatgccagcgggcatcgcttgctcttgctgtcgacttccaagtcgaagcattggttgaaatgaggacgcaacttggtgacaaacgtggtgtccttagtgattggaaggataatcaaatgagcccctgctactgggccaatgttaattgccaagataacaaagtcacaacaataattttgagctcgtcagggttaacaggatccttatcacccagcattgcaaagctaacaactttacagcagctgatactggataacaacaacattactggagggattcctccggagtttggaaacctatcaggtttgacaattctaaaccttggaagaaataatttaaatgggtcaataccggactcccttggacaactttctaaactccaaaatctggatctaagccataattatttgaccggaaatatcccaagctctttctcaaatcttctgtcattgagtgatattaatctggcatataataatataagaggtgcaatcccacaacatctacttcaggtggcccaatacaactatgcaggcaaccacttgaattgtggccaaaatttatctgcatgtgaacgaggcagcacattgacaggtggatccaaaaatttcaagctaaacgtggttattggaagcattgctggagcagtcacattttctgtaactgtagttctagttttgctatggtggcaaagaatgcgttaccggcctgaaatcttcattgacgtgtcaggtcagaatgatcatatgcttgagtttgggcaaataaagcggttctcatggcgggagcttcagattgcaaccagcaatttcagtgaacagaatgttcttggcaagggtggttttggtaaggtgtataaaggagttcttccaggtccaaacagtataaagattgcagtgaaacgactactgaacgtggacagtcgtgatggggaaatggctttcctcagagaagttgaattgataagcattgctgtacacaagaacatattaaggttgataggattctgtacaacaccaacagagaggcttttggtctaccctttcatggagaatcttagtgttgcttcccgtttaagagatataaaactaaacgaaccagcattagattggtctacaagaatgcgaattgctcttggcgctgcctgtggtttggagtaccttcatgagcactgcaatcccaagatcatccaccgtgatgtcaaggctgcaaatgtcctgcttgatgggaactttgaagcagtggtaggagattttgggctggcgaagatggtagacatagggaggaatacagtaacaacaggggttcgtggaactatgggccacgtagctcctgagtacataaagacaggaaggccatcagtgaagacagatatctttggttatggtgtcatgctgttagagattgtgacaggagagcgtgcaattgcattccatcctgaccgtatagaagaagcaggcgagatcctgctcactgatcaggtcaagctatggatggaagaagggcgactactcgacctagtggatcgcaatctaggtggcgtctacaaccttgaagagctggagaaggttacccagatagcacttctctgcactcacatggatcctgaacaacgccctacaatgtctgaggtggtgcagatgctggaaggagagattgtcccagcagagcggtgggaggagtggcagctggctgagctccaacgacgacaacagcatgagatgaggcaacagggcaaactattcaacttcagtgaagagtctcaaaacatccaggaagccattgagttgtcagctggcagatgagctgtcataagaaagtgacatgattttcacttgttccttaaatagaaaggctataagagaaatattgactattaggaatagtctataaggtcctggactcctggtgtaatatcttgcacaagtaactccgtccatatgctgttaatacaacgataggaccacacctagctc

SEQ ID NO: 22687 - protein, 618 aa, Zea mays subsp. mays
  peptide (1)..(618): Ceres Seq. ID no. 15179673
  misc_feature (1)..(618): NCBI GI NO: 5596996 NR Description: putative protein serine /threonine kinase
  misc_feature (2)..(618): NCBI GI NO: 22326703 NR Description: protein serine/threonine kinase-related protein
  misc_feature (10)..(618): NCBI GI NO: 11358729 NR Description: protein serine/threonine kinase-like protein -Arabidopsis thaliana
  misc_feature (2)..(618): NCBI GI NO: 20260260 NR Description: protein serine/threonine kinase-like protein
  misc_feature (25)..(618): NCBI GI NO: 15238386 NR Description: receptor-related protein kinase
  misc_feature (33)..(618): NCBI GI NO: 13897308 NR Description: SERK1 protein [Zea mays]
  misc_feature (15)..(618): NCBI GI NO: 38679443 NR Description: benzothiadiazole-induced somatic embryogenesisreceptor kinase 1
  misc_feature (33)..(618): NCBI GI NO: 21740899 NR Description: OSJNBa0036B21.13
  misc_feature (15)..(618): NCBI GI NO: 40253600 NR Description: putative somatic embryogenesis receptor kinase 1
  misc_feature (12)..(618): NCBI GI NO: 22331326 NR Description: somatic embryogenesis receptor-related kinase
MMDSVSMKLLAFVFLLLRCQRASLALAVDFQVEALVEMRTQLGDKRGVLSDWKDNQMSPCYWANVNCQDNKVTTIILSSSGLTGSLSPSIAKLTTLQQLILDNNNITGGIPPEFGNLSGLTILNLGRNNLNGSIPDSLGQLSKLQNLDLSHNYLTGNIPSSFSNLLSLSDINLAYNNIRGAIPQHLLQVAQYNYAGNHLNCGQNLSACERGSTLTGGSKNFKLNVVIGSIAGAVTFSVTVVLVLLWWQRMRYRPEIFIDVSGQNDHMLEFGQIKRFSWRELQIATSNFSEQNVLGKGGFGKVYKGVLPGPNSIKIAVKRLLNVDSRDGEMAFLREVELISIAVHKNILRLIGFCTTPTERLLVYPFMENLSVASRLRDIKLNEPALDWSTRMRIALGAACGLEYLHEHCNPKIIHRDVKAANVLLDGNFEAVVGDFGLAKMVDIGRNTVTTGVRGTMGHVAPEYIKTGRPSVKTDIFGYGVMLLEIVTGERAIAFHPDRIEEAGEILLTDQVKLWMEEGRLLDLVDRNLGGVYNLEELEKVTQIALLCTHMDPEQRPTMSEVVQMLEGEIVPAERWEEWQLAELQRRQQHEMRQQGKLFNFSEESQNIQEAIELSAGR

SEQ ID NO: 22688 - protein, 617 aa, Zea mays subsp. mays
  peptide (1)..(617): Ceres Seq. ID no. 15179674
  misc_feature (1)..(617): NCBI GI NO: 5596996 NR Description: putative protein serine /threonine kinase
  misc_feature (1)..(617): NCBI GI NO: 22326703 NR Description: protein serine/threonine kinase-related protein
  misc_feature (9)..(617): NCBI GI NO: 11358729 NR Description: protein serine/threonine kinase-like protein -Arabidopsis thaliana
  misc_feature (1)..(617): NCBI GI NO: 20260260 NR Description: protein serine/threonine kinase-like protein
  misc_feature (24)..(617): NCBI GI NO: 15238386 NR Description: receptor-related protein kinase
  misc_feature (32)..(617): NCBI GI NO: 13897308 NR Description: SERK1 protein [Zea mays]
  misc_feature (14)..(617): NCBI GI NO: 38679443 NR Description: benzothiadiazole-induced somatic embryogenesisreceptor kinase 1
  misc_feature (32)..(617): NCBI GI NO: 21740899 NR Description: OSJNBa0036B21.13
  misc_feature (14)..(617): NCBI GI NO: 40253600 NR Description: putative somatic embryogenesis receptor kinase 1
  misc_feature (11)..(617): NCBI GI NO: 22331326 NR Description: somatic embryogenesis receptor-related kinase
MDSVSMKLLAFVFLLLRCQRASLALAVDFQVEALVEMRTQLGDKRGVLSDWKDNQMSPCYWANVNCQDNKVTTIILSSSGLTGSLSPSIAKLTTLQQLILDNNNITGGIPPEFGNLSGLTILNLGRNNLNGSIPDSLGQLSKLQNLDLSHNYLTGNIPSSFSNLLSLSDINLAYNNIRGAIPQHLLQVAQYNYAGNHLNCGQNLSACERGSTLTGGSKNFKLNVVIGSIAGAVTFSVTVVLVLLWWQRMRYRPEIFIDVSGQNDHMLEFGQIKRFSWRELQIATSNFSEQNVLGKGGFGKVYKGVLPGPNSIKIAVKRLLNVDSRDGEMAFLREVELISIAVHKNILRLIGFCTTPTERLLVYPFMENLSVASRLRDIKLNEPALDWSTRMRIALGAACGLEYLHEHCNPKIIHRDVKAANVLLDGNFEAVVGDFGLAKMVDIGRNTVTTGVRGTMGHVAPEYIKTGRPSVKTDIFGYGVMLLEIVTGERAIAFHPDRIEEAGEILLTDQVKLWMEEGRLLDLVDRNLGGVYNLEELEKVTQIALLCTHMDPEQRPTMSEVVQMLEGEIVPAERWEEWQLAELQRRQQHEMRQQGKLFNFSEESQNIQEAIELSAGR

SEQ ID NO: 22689 - protein, 612 aa, Zea mays subsp. mays
  peptide (1)..(612): Ceres Seq. ID no. 15179675
  misc_feature (1)..(612): NCBI GI NO: 5596996 NR Description: putative protein serine /threonine kinase
  misc_feature (1)..(612): NCBI GI NO: 22326703 NR Description: protein serine/threonine kinase-related protein
  misc_feature (4)..(612): NCBI GI NO: 11358729 NR Description: protein serine/threonine kinase-like protein -Arabidopsis thaliana
  misc_feature (1)..(612): NCBI GI NO: 20260260 NR Description: protein serine/threonine kinase-like protein
  misc_feature (19)..(612): NCBI GI NO: 15238386 NR Description: receptor-related protein kinase
  misc_feature (27)..(612): NCBI GI NO: 13897308 NR Description: SERK1 protein [Zea mays]
  misc_feature (9)..(612): NCBI GI NO: 38679443 NR Description: benzothiadiazole-induced somatic embryogenesisreceptor kinase 1
  misc_feature (27)..(612): NCBI GI NO: 21740899 NR Description: OSJNBa0036B21.13
  misc_feature (9)..(612): NCBI GI NO: 40253600 NR Description: putative somatic embryogenesis receptor kinase 1
  misc_feature (6)..(612): NCBI GI NO: 22331326 NR Description: somatic embryogenesis receptor-related kinase
MKLLAFVFLLLRCQRASLALAVDFQVEALVEMRTQLGDKRGVLSDWKDNQMSPCYWANVNCQDNKVTTIILSSSGLTGSLSPSIAKLTTLQQLILDNNNITGGIPPEFGNLSGLTILNLGRNNLNGSIPDSLGQLSKLQNLDLSHNYLTGNIPSSFSNLLSLSDINLAYNNIRGAIPQHLLQVAQYNYAGNHLNCGQNLSACERGSTLTGGSKNFKLNVVIGSIAGAVTFSVTVVLVLLWWQRMRYRPEIFIDVSGQNDHMLEFGQIKRFSWRELQIATSNFSEQNVLGKGGFGKVYKGVLPGPNSIKIAVKRLLNVDSRDGEMAFLREVELISIAVHKNILRLIGFCTTPTERLLVYPFMENLSVASRLRDIKLNEPALDWSTRMRIALGAACGLEYLHEHCNPKIIHRDVKAANVLLDGNFEAVVGDFGLAKMVDIGRNTVTTGVRGTMGHVAPEYIKTGRPSVKTDIFGYGVMLLEIVTGERAIAFHPDRIEEAGEILLTDQVKLWMEEGRLLDLVDRNLGGVYNLEELEKVTQIALLCTHMDPEQRPTMSEVVQMLEGEIVPAERWEEWQLAELQRRQQHEMRQQGKLFNFSEESQNIQEAIELSAGR

SEQ ID NO: 22690 - DNA, 1900 bp, Zea mays subsp. mays
  misc_feature (1)..(1900): Ceres Seq. ID no. 13599990
  misc_feature (1860)..(1860): n is a, c, t, g, unknown, or other
  misc_feature (1859)..(1859): n is a, c, t, g, unknown, or other
  misc_feature (1858)..(1858): n is a, c, t, g, unknown, or other
cccccccccgggttgttgcactgtagtactggagtggaggtccggtcccacgtttgggggtggactcgacaaacgccaaaccgagcaccccccaaagcctgattctgctcaacactgcgcctgaacaattttctctggtggggctgcaaagacaaattaggagtgcttccaagttccaatccctgtttgcttgtacagggtataattaaagaggcaacggagtcatgacccttttgagggagtatcagtaactgcatgatcttttcgagggaggcacgatggaaggaaataacctaccctctggaagcttgatgcaaggaacaccttacagtaatgtggacttgcagcatcataaacatatgcaaatgcctgcaccaagctctggaaaccaggctttcaaccactctcagatgcctggcaatttccccatttgtctgaaccaggttacagattccgaccagctacctgaattccaatttggagagcacggcaaggtcagtcaccaccatcatcctcaccatcacaagcagcatgcaacgaatagcatgagcgatgatgaggagcatggtgtgcatgaggatgccactgatagccagatcggcaagggaaagaagggttccgcatggcatcggatgaagtggactgattcgatggttaggcttttgattactgcagcatcctacaccggggaagacccaggagctgatttaggaggtggtaggagaagctgtgcaatgatgcagaagaaaggcaagtggaaggccatatcaaaagtcatgggcgagcgaggctgcctcgtgtcgccgcagcagtgtgaggataagttcaatgacctaaataagaggtataaaaggcttacagatatccttggtcggggtactacttgcagagttgtggcaaacccagaacttctagatggcatggctaatctctcagataagatgaaagatgacgcgaggaagatattgagctctaagcacttgttctatgaagagatgtgctcctatcacaacaataatcggttcagtttacctgaagatcctgcacttcagcgatcgttgcagcttgctcttaagtgtaaggatgagcatgatgcaaggaagcgagcaagtggagatgctgatgaagatgatcaaagtgcagacactgataatgaagaagagaatgatgatgagcatcccatcacgcatgccaataaggggaccctactcacgcgtaaaagattgcggtacatgccggcggatatggaggatgtaggtttcggcaactcttccagctcacatgactgtagctggagatctgatccccatagcattgcagtggacatcaacaaagcttctccagatggaactaacttggcttcggttcaaaaagacttggctacacagtctgcggagattgagaaacagcgcatggaaattgaagttcaggcattggagcttgcaaaacaacgtctcaagtgggaggcatttagtaagaagaaggacagagagctagagaagatgaggttggaaaatgaacaaatgaagattgagaataaacgtttggagctagaggtaagatacaaggagttggagcttgaacacaaaccacaaggccatggcagtcatgcaacatgataatatctttaaaatcacgaagactgaaacgcaagatagtaagctttgtctcctgttatcactacccagagaaataattatgagtaactcatttctaattctgtcaccaaatccttgatattcatgggttgctagagtaggtgctatttggtaccagacagttcagtcatgtttatatttattttgttctctgtagatgtttcagagaaacgagaacttgaaattccaacgcatgcttnnnggaaaaaaaaaaaaaaaaaaaactcgagggggggcccggt

SEQ ID NO: 22691 - protein, 446 aa, Zea mays subsp. mays
  peptide (1)..(446): Ceres Seq. ID no. 15218635
  misc_feature (1)..(435): NCBI GI NO: 18394964 NR Description: expressed protein [Arabidopsis thaliana]
  misc_feature (80)..(432): NCBI GI NO: 15223769 NR Description: hypothetical protein [Arabidopsis thaliana]
  misc_feature (73)..(439): NCBI GI NO: 14579399 NR Description: unknown [Glycine max]
  misc_feature (92)..(434): NCBI GI NO: 6143872 NR Description: unknown protein [Arabidopsis thaliana]
  misc_feature (92)..(434): NCBI GI NO: 30681119 NR Description: expressed protein [Arabidopsis thaliana]
  misc_feature (132)..(246): NCBI GI NO: 34894646 NR Description: P0028G04.23
  misc_feature (327)..(435): NCBI GI NO: 34894646 NR Description: P0028G04.23
  misc_feature (110)..(188): NCBI GI NO: 34894646 NR Description: P0028G04.23
  misc_feature (327)..(435): NCBI GI NO: 32352186 NR Description: hypothetical protein
MEGNNLPSGSLMQGTPYSNVDLQHHKHMQMPAPSSGNQAFNHSQMPGNFPICLNQVTDSDQLPEFQFGEHGKVSHHHHPHHHKQHATNSMSDDEEHGVHEDATDSQIGKGKKGSAWHRMKWTDSMVRLLITAASYTGEDPGADLGGGRRSCAMMQKKGKWKAISKVMGERGCLVSPQQCEDKFNDLNKRYKRLTDILGRGTTCRVVANPELLDGMANLSDKMKDDARKILSSKHLFYEEMCSYHNNNRFSLPEDPALQRSLQLALKCKDEHDARKRASGDADEDDQSADTDNEEENDDEHPITHANKGTLLTRKRLRYMPADMEDVGFGNSSSSHDCSWRSDPHSIAVDINKASPDGTNLASVQKDLATQSAEIEKQRMEIEVQALELAKQRLKWEAFSKKKDRELEKMRLENEQMKIENKRLELEVRYKELELEHKPQGHGSHAT

SEQ ID NO: 22692 - protein, 435 aa, Zea mays subsp. mays
  peptide (1)..(435): Ceres Seq. ID no. 15218636
  misc_feature (1)..(424): NCBI GI NO: 18394964 NR Description: expressed protein [Arabidopsis thaliana]
  misc_feature (69)..(421): NCBI GI NO: 15223769 NR Description: hypothetical protein [Arabidopsis thaliana]
  misc_feature (62)..(428): NCBI GI NO: 14579399 NR Description: unknown [Glycine max]
  misc_feature (81)..(423): NCBI GI NO: 6143872 NR Description: unknown protein [Arabidopsis thaliana]
  misc_feature (81)..(423): NCBI GI NO: 30681119 NR Description: expressed protein [Arabidopsis thaliana]
  misc_feature (121)..(235): NCBI GI NO: 34894646 NR Description: P0028G04.23
  misc_feature (316)..(424): NCBI GI NO: 34894646 NR Description: P0028G04.23
  misc_feature (99)..(177): NCBI GI NO: 34894646 NR Description: P0028G04.23
  misc_feature (316)..(424): NCBI GI NO: 32352186 NR Description: hypothetical protein
MQGTPYSNVDLQHHKHMQMPAPSSGNQAFNHSQMPGNFPICLNQVTDSDQLPEFQFGEHGKVSHHHHPHHHKQHATNSMSDDEEHGVHEDATDSQIGKGKKGSAWHRMKWTDSMVRLLITAASYTGEDPGADLGGGRRSCAMMQKKGKWKAISKVMGERGCLVSPQQCEDKFNDLNKRYKRLTDILGRGTTCRVVANPELLDGMANLSDKMKDDARKILSSKHLFYEEMCSYHNNNRFSLPEDPALQRSLQLALKCKDEHDARKRASGDADEDDQSADTDNEEENDDEHPITHANKGTLLTRKRLRYMPADMEDVGFGNSSSSHDCSWRSDPHSIAVDINKASPDGTNLASVQKDLATQSAEIEKQRMEIEVQALELAKQRLKWEAFSKKKDRELEKMRLENEQMKIENKRLELEVRYKELELEHKPQGHGSHAT

SEQ ID NO: 22693 - protein, 419 aa, Zea mays subsp. mays
  peptide (1)..(419): Ceres Seq. ID no. 15218637
  misc_feature (1)..(408): NCBI GI NO: 18394964 NR Description: expressed protein [Arabidopsis thaliana]
  misc_feature (53)..(405): NCBI GI NO: 15223769 NR Description: hypothetical protein [Arabidopsis thaliana]
  misc_feature (46)..(412): NCBI GI NO: 14579399 NR Description: unknown [Glycine max]
  misc_feature (65)..(407): NCBI GI NO: 6143872 NR Description: unknown protein [Arabidopsis thaliana]
  misc_feature (65)..(407): NCBI GI NO: 30681119 NR Description: expressed protein [Arabidopsis thaliana]
  misc_feature (105)..(219): NCBI GI NO: 34894646 NR Description: P0028G04.23
  misc_feature (300)..(408): NCBI GI NO: 34894646 NR Description: P0028G04.23
  misc_feature (83)..(161): NCBI GI NO: 34894646 NR Description: P0028G04.23
  misc_feature (300)..(408): NCBI GI NO: 32352186 NR Description: hypothetical protein
MQMPAPSSGNQAFNHSQMPGNFPICLNQVTDSDQLPEFQFGEHGKVSHHHHPHHHKQHATNSMSDDEEHGVHEDATDSQIGKGKKGSAWHRMKWTDSMVRLLITAASYTGEDPGADLGGGRRSCAMMQKKGKWKAISKVMGERGCLVSPQQCEDKFNDLNKRYKRLTDILGRGTTCRVVANPELLDGMANLSDKMKDDARKILSSKHLFYEEMCSYHNNNRFSLPEDPALQRSLQLALKCKDEHDARKRASGDADEDDQSADTDNEEENDDEHPITHANKGTLLTRKRLRYMPADMEDVGFGNSSSSHDCSWRSDPHSIAVDINKASPDGTNLASVQKDLATQSAEIEKQRMEIEVQALELAKQRLKWEAFSKKKDRELEKMRLENEQMKIENKRLELEVRYKELELEHKPQGHGSHAT

SEQ ID NO: 22694 - DNA, 2163 bp, Zea mays subsp. mays
  misc_feature (1)..(2163): Ceres Seq. ID no. 15226186
cccccccccccccccccccaaacattccagggagcatgctgatcaagaacttgaagtagagagaactgcacaggctgggttggaacaagagtgtgactctgtgccaatggattctgaggaacacggttgcctgacttcatatgctcatactgatgatgagcaagatgaggtgaagcagaaagttacttctggaacagcagatgttatgcattatgcagcagacacttttaatgttaacacaaattcatggaaagaagatattgaagaggatccaactgaagctgctctaacagccatacatcaaatttgttacgaacctttgacgagcatagtcaagttctctctagatcatagtgtctccgaagaagacagagagcctgatacgccgactcatattgaaggtatatgtgattcacaggaactgctggattctaaaacagttgtttctgatgctaaatctgtagattcaagtgttgctactttgtctactgatctggaaagcactgaattggtgagtgtcgatcaactaaaatctgctttggcttccacacgcaaatcattgaacaccctatattctgaacttgaaaatgagaggaacgctgctgctatagctgccgatgaaaccatggcaatgataaaccgcttgcaagaacagaaagctgcaatgcagatggaggcgattcaataccagcggcttatggaggaacagtcagagtatgaccaagaagcactgcagaggttgaatgaactagttgttaagagagagaaggagaagcaagatctggagagagaactcgagctgtatcgccacaaggttcatctctatgaggtaaaggtgaggaaaatgtccaggcacaaggctgatgaccagaatggatcatcgtcaacttcatcgagtgctgaggatagtgatgacctttcacaaagtttctatgaaggtgatgaatcttcccatggtattaatggaagtaatgggagtattcctactgatgtggtgctacaagaaactgccaggcatcttgttacccttgatggctcactagctgattttgaggaagagagactatccatactggaacagcttaaagtgctagaagataaactttttgatcttgaggatgaagagtccgatgacatgaagcatttctcagaagaaaaccatttaagtggtgcctcgaatggtttctctgatgatgatagctgctttaagcttcatgacaagagaaagaatgtaacctatagaggaaagaaactccttccattgttcgacgatgctaccgtggaagctggaaacgtcccccaaggtaatgatgcacagcattcaacagaggtcacactggaccttgctagagagcaacataagcttgcaattgccaatgaaatcgatcaggtacacgagaggctgcatgctcttgaggcagatagggaatacataaaacagtgcgtgaggactttgaagaagggagggaaagggtttgatcttcttcaggagatattacagcatcttcgggacctaagaaggattgagcaacgtgcaagtgcaaggaactctggggagctttcgcctcattacctacatcatcacacggattgaagattccagatcagctgcctatgtccagcgaatattgcttgaagatggaaatcatacaacaatgataagggaaaaaaaagattgccgactaagtagtattgtcattggagaagttttgttggttcccggagaggaaggagctcctcctggaacacccgtcacagtcggttcgaagataccattgggaaggcagatcacggagcaattctgccttccaaggtccaggattttttttgtggaccacatcccacgttctctttttgtgttggtttagttttcccggtgggttccaaacttttgcccaagggcaagagggtggttggtgagccgcccgggcccctgtggggctgtgtgtttgttgtgggggtgtggcggcaatcatggccttgtgcagaagctttagaattcattaacctgaaaacatgccgatgccagctttgctgccagatatgttgggcttcactagtttttgttttcttctttttttctaaatcctttccctgtaaatcttctagctgtatgtaatgtgctttcggcctttggaatgatgaggtgttgggtgtgtgcat

SEQ ID NO: 22695 - protein, 530 aa, Zea mays subsp. mays
  peptide (1)..(530): Ceres Seq. ID no. 15226187
  misc_feature (173)..(266): Pfam Name: Pfam Description:  Protein of unknown function, DUF593
  misc_feature (6)..(530): NCBI GI NO: 13702818 NR Description: unknown protein [Oryza sativa]
  misc_feature (73)..(521): NCBI GI NO: 25406071 NR Description: unknown protein F5A18.7
  misc_feature (161)..(521): NCBI GI NO: 18409667 NR Description: IFA-binding protein [Arabidopsis thaliana]
  misc_feature (38)..(424): NCBI GI NO: 11357812 NR Description: hypothetical protein F5E19_60 - Arabidopsisthaliana
  misc_feature (38)..(424): NCBI GI NO: 30685989 NR Description: expressed protein [Arabidopsis thaliana]
  misc_feature (161)..(307): NCBI GI NO: 4101564 NR Description: IFA-binding protein [Arabidopsis thaliana]
  misc_feature (115)..(384): NCBI GI NO: 25406384 NR Description: hypothetical protein F9E10.32
  misc_feature (115)..(384): NCBI GI NO: 30699047 NR Description: expressed protein [Arabidopsis thaliana]
  misc_feature (115)..(384): NCBI GI NO: 26451391 NR Description: unknown protein [Arabidopsis thaliana]
  misc_feature (152)..(516): NCBI GI NO: 11357812 NR Description: hypothetical protein F5E19_60 - Arabidopsisthaliana
PPPPPPKHSREHADQELEVERTAQAGLEQECDSVPMDSEEHGCLTSYAHTDDEQDEVKQKVTSGTADVMHYAADTFNVNTNSWKEDIEEDPTEAALTAIHQICYEPLTSIVKFSLDHSVSEEDREPDTPTHIEGICDSQELLDSKTVVSDAKSVDSSVATLSTDLESTELVSVDQLKSALASTRKSLNTLYSELENERNAAAIAADETMAMINRLQEQKAAMQMEAIQYQRLMEEQSEYDQEALQRLNELVVKREKEKQDLERELELYRHKVHLYEVKVRKMSRHKADDQNGSSSTSSSAEDSDDLSQSFYEGDESSHGINGSNGSIPTDVVLQETARHLVTLDGSLADFEEERLSILEQLKVLEDKLFDLEDEESDDMKHFSEENHLSGASNGFSDDDSCFKLHDKRKNVTYRGKKLLPLFDDATVEAGNVPQGNDAQHSTEVTLDLAREQHKLAIANEIDQVHERLHALEADREYIKQCVRTLKKGGKGFDLLQEILQHLRDLRRIEQRASARNSGELSPHYLHHHTD

SEQ ID NO: 22696 - protein, 495 aa, Zea mays subsp. mays
  peptide (1)..(495): Ceres Seq. ID no. 15226188
  misc_feature (138)..(231): Pfam Name: Pfam Description:  Protein of unknown function, DUF593
  misc_feature (1)..(495): NCBI GI NO: 13702818 NR Description: unknown protein [Oryza sativa]
  misc_feature (38)..(486): NCBI GI NO: 25406071 NR Description: unknown protein F5A18.7
  misc_feature (126)..(486): NCBI GI NO: 18409667 NR Description: IFA-binding protein [Arabidopsis thaliana]
  misc_feature (3)..(389): NCBI GI NO: 11357812 NR Description: hypothetical protein F5E19_60 - Arabidopsisthaliana
  misc_feature (3)..(389): NCBI GI NO: 30685989 NR Description: expressed protein [Arabidopsis thaliana]
  misc_feature (126)..(272): NCBI GI NO: 4101564 NR Description: IFA-binding protein [Arabidopsis thaliana]
  misc_feature (80)..(349): NCBI GI NO: 25406384 NR Description: hypothetical protein F9E10.32
  misc_feature (80)..(349): NCBI GI NO: 30699047 NR Description: expressed protein [Arabidopsis thaliana]
  misc_feature (80)..(349): NCBI GI NO: 26451391 NR Description: unknown protein [Arabidopsis thaliana]
  misc_feature (117)..(481): NCBI GI NO: 11357812 NR Description: hypothetical protein F5E19_60 - Arabidopsisthaliana
MDSEEHGCLTSYAHTDDEQDEVKQKVTSGTADVMHYAADTFNVNTNSWKEDIEEDPTEAALTAIHQICYEPLTSIVKFSLDHSVSEEDREPDTPTHIEGICDSQELLDSKTVVSDAKSVDSSVATLSTDLESTELVSVDQLKSALASTRKSLNTLYSELENERNAAAIAADETMAMINRLQEQKAAMQMEAIQYQRLMEEQSEYDQEALQRLNELVVKREKEKQDLERELELYRHKVHLYEVKVRKMSRHKADDQNGSSSTSSSAEDSDDLSQSFYEGDESSHGINGSNGSIPTDVVLQETARHLVTLDGSLADFEEERLSILEQLKVLEDKLFDLEDEESDDMKHFSEENHLSGASNGFSDDDSCFKLHDKRKNVTYRGKKLLPLFDDATVEAGNVPQGNDAQHSTEVTLDLAREQHKLAIANEIDQVHERLHALEADREYIKQCVRTLKKGGKGFDLLQEILQHLRDLRRIEQRASARNSGELSPHYLHHHTD

SEQ ID NO: 22697 - protein, 462 aa, Zea mays subsp. mays
  peptide (1)..(462): Ceres Seq. ID no. 15226189
  misc_feature (105)..(198): Pfam Name: Pfam Description:  Protein of unknown function, DUF593
  misc_feature (1)..(462): NCBI GI NO: 13702818 NR Description: unknown protein [Oryza sativa]
  misc_feature (5)..(453): NCBI GI NO: 25406071 NR Description: unknown protein F5A18.7
  misc_feature (93)..(453): NCBI GI NO: 18409667 NR Description: IFA-binding protein [Arabidopsis thaliana]
  misc_feature (1)..(356): NCBI GI NO: 11357812 NR Description: hypothetical protein F5E19_60 - Arabidopsisthaliana
  misc_feature (1)..(356): NCBI GI NO: 30685989 NR Description: expressed protein [Arabidopsis thaliana]
  misc_feature (93)..(239): NCBI GI NO: 4101564 NR Description: IFA-binding protein [Arabidopsis thaliana]
  misc_feature (47)..(316): NCBI GI NO: 25406384 NR Description: hypothetical protein F9E10.32
  misc_feature (47)..(316): NCBI GI NO: 30699047 NR Description: expressed protein [Arabidopsis thaliana]
  misc_feature (47)..(316): NCBI GI NO: 26451391 NR Description: unknown protein [Arabidopsis thaliana]
  misc_feature (84)..(448): NCBI GI NO: 11357812 NR Description: hypothetical protein F5E19_60 - Arabidopsisthaliana
MHYAADTFNVNTNSWKEDIEEDPTEAALTAIHQICYEPLTSIVKFSLDHSVSEEDREPDTPTHIEGICDSQELLDSKTVVSDAKSVDSSVATLSTDLESTELVSVDQLKSALASTRKSLNTLYSELENERNAAAIAADETMAMINRLQEQKAAMQMEAIQYQRLMEEQSEYDQEALQRLNELVVKREKEKQDLERELELYRHKVHLYEVKVRKMSRHKADDQNGSSSTSSSAEDSDDLSQSFYEGDESSHGINGSNGSIPTDVVLQETARHLVTLDGSLADFEEERLSILEQLKVLEDKLFDLEDEESDDMKHFSEENHLSGASNGFSDDDSCFKLHDKRKNVTYRGKKLLPLFDDATVEAGNVPQGNDAQHSTEVTLDLAREQHKLAIANEIDQVHERLHALEADREYIKQCVRTLKKGGKGFDLLQEILQHLRDLRRIEQRASARNSGELSPHYLHHHTD

SEQ ID NO: 22698 - DNA, 2055 bp, Zea mays subsp. mays
  misc_feature (1)..(2055): Ceres Seq. ID no. 13666169
taatcgcattttctcaaattcgtctgcccctaatagggattcttacaacagtatgggctcagtcaatgaggtctctgctcagccgatttatattgattctttccccaagctaagtgcttggtatttccagaatcaagcttgcatcgcctctacactttctggtctttgcaacaaaaaccctgtccatcaagttgcgaacaaaattttgaatatgatttgccgaaaaatgaataaaggtggagtatcatctagtaatctttcatctacttctagtagtagcgttagtggttcttctgtaagtgcatcggatgattcttaccaaaggcctgctgttcctgcttgggaatttttagaagctgttccttttgtacttgaagctgttctgacagcatgtgctcatgggcggctttccagccgagacttgactacaagcttaagggatcttgtggactttttgcctgcttctcttgctgcaattgtaagctacttctcagcagaaattacacggggaatctggaaacctgttccaatgaatggaactgaatggcccagtcctggtgcttctcttcattccattgaagctgaagtaaaggaaattcttgcatctgctggtgttcagattaacagctgctatccacgtggtgtgccgccaatgcttcctttgcctatggctgcacttgtcagcttgacaattacatttaagctagataggagtttggagtacattcaaggggtcattggacatgcactagagaactgcgcagggggaagttcctggccaagcatgcccattatcggggcattgtggacacagaaagtgcgaagatggcatgacttcattgtcctctcttgtatgcgttctccatttggcagagacaaagatgcagttgcgcagctcatccgaagctgcttttcgtcctttctgcagtcatcatccagtggttctgacataatcgcaaaccgtggagttggggctttattaggggactcaatcacggatcaaggtcttaggctcccaatggcacctggtttcgtctacctgagaacatgtcgaactttccatgacacatacttcgttagtgaagtgatcctcaagcaagtgattgaatgggctcacaaacttgcaaatggatggtctttcaatgggcctccgcagttgaaatcaggccggacaccactatcttgtgcagcatctatggcgcatcaggtcgcgatgcttggtggtggtctcctatgcatagcaggtggaccacttgtggtccaggtgttgtatgaagacacactaccgaccactgctgctgtcagccagagaacagagtttgaaagaccctgggccagtttctagcacactacaaggttacgccatggccaacatgctcttttactgtggtagcctactttggggagcggacaggagttctcctgtcatgaaattgtctttcctctcgaggcggccacgggtggtgagaaaccacatggatttcatagctggtgtactggacggacacattcttctgggctgtgacccgggtacctggaaagcgtatgtttctcagtttatgttcctggtggtgaagtttgttccatcatggttgccggacataaagctggacacgctaaagaagatagcagctggacttcggagttggcatgaacatgaccttgctctatcccttcttgagcgaggaggaccacaagcaatctctgttgtagtcgagacctttctgtgatcctgccatttggacattttgccccccacctgacatcgcagccgctgttagggtttgaagtcggtggtctgaggtctagctgaagtaatcaggatgacccttccagaattccacttgagcaaccaggataactgatgtttttctcatgtatggcgaacccattttgtttttgtgaattcaatacggaagaacattcaacctactagagtctagagtgtattgacatcagccctaacatgtaacctrtgttaaacacaataaagtgggaaaaaaaaaaaaaaaaaaatgtttaaacacaataaagttggaactggaggggggaaag

SEQ ID NO: 22699 - protein, 447 aa, Zea mays subsp. mays
  peptide (1)..(447): Ceres Seq. ID no. 15220510
  misc_feature (1)..(439): NCBI GI NO: 33146668 NR Description: unknown protein
  misc_feature (1)..(439): NCBI GI NO: 33146669 NR Description: unknown protein
  misc_feature (25)..(442): NCBI GI NO: 15229478 NR Description: expressed protein [Arabidopsis thaliana]
  misc_feature (25)..(442): NCBI GI NO: 26449340 NR Description: unknown protein [Arabidopsis thaliana]
  misc_feature (8)..(430): NCBI GI NO: 25370851 NR Description: hypothetical protein At2g48110
  misc_feature (8)..(430): NCBI GI NO: 18407529 NR Description: hypothetical protein [Arabidopsis thaliana]
  misc_feature (8)..(235): NCBI GI NO: 20197556 NR Description: unknown protein [Arabidopsis thaliana]
  misc_feature (245)..(430): NCBI GI NO: 1223579 NR Description: cDNA101 [Arabidopsis thaliana]
  misc_feature (262)..(430): NCBI GI NO: 34394478 NR Description: unknown protein
NRIFSNSSAPNRDSYNSMGSVNEVSAQPIYIDSFPKLSAWYFQNQACIASTLSGLCNKNPVHQVANKILNMICRKMNKGGVSSSNLSSTSSSSVSGSSVSASDDSYQRPAVPAWEFLEAVPFVLEAVLTACAHGRLSSRDLTTSLRDLVDFLPASLAAIVSYFSAEITRGIWKPVPMNGTEWPSPGASLHSIEAEVKEILASAGVQINSCYPRGVPPMLPLPMAALVSLTITFKLDRSLEYIQGVIGHALENCAGGSSWPSMPIIGALWTQKVRRWHDFIVLSCMRSPFGRDKDAVAQLIRSCFSSFLQSSSSGSDIIANRGVGALLGDSITDQGLRLPMAPGFVYLRTCRTFHDTYFVSEVILKQVIEWAHKLANGWSFNGPPQLKSGRTPLSCAASMAHQVAMLGGGLLCIAGGPLVVQVLYEDTLPTTAAVSQRTEFERPWASF

SEQ ID NO: 22700 - protein, 430 aa, Zea mays subsp. mays
  peptide (1)..(430): Ceres Seq. ID no. 15220511
  misc_feature (1)..(422): NCBI GI NO: 33146668 NR Description: unknown protein
  misc_feature (1)..(422): NCBI GI NO: 33146669 NR Description: unknown protein
  misc_feature (8)..(425): NCBI GI NO: 15229478 NR Description: expressed protein [Arabidopsis thaliana]
  misc_feature (8)..(425): NCBI GI NO: 26449340 NR Description: unknown protein [Arabidopsis thaliana]
  misc_feature (1)..(413): NCBI GI NO: 25370851 NR Description: hypothetical protein At2g48110
  misc_feature (1)..(413): NCBI GI NO: 18407529 NR Description: hypothetical protein [Arabidopsis thaliana]
  misc_feature (1)..(218): NCBI GI NO: 20197556 NR Description: unknown protein [Arabidopsis thaliana]
  misc_feature (228)..(413): NCBI GI NO: 1223579 NR Description: cDNA101 [Arabidopsis thaliana]
  misc_feature (245)..(413): NCBI GI NO: 34394478 NR Description: unknown protein
MGSVNEVSAQPIYIDSFPKLSAWYFQNQACIASTLSGLCNKNPVHQVANKILNMICRKMNKGGVSSSNLSSTSSSSVSGSSVSASDDSYQRPAVPAWEFLEAVPFVLEAVLTACAHGRLSSRDLTTSLRDLVDFLPASLAAIVSYFSAEITRGIWKPVPMNGTEWPSPGASLHSIEAEVKEILASAGVQINSCYPRGVPPMLPLPMAALVSLTITFKLDRSLEYIQGVIGHALENCAGGSSWPSMPIIGALWTQKVRRWHDFIVLSCMRSPFGRDKDAVAQLIRSCFSSFLQSSSSGSDIIANRGVGALLGDSITDQGLRLPMAPGFVYLRTCRTFHDTYFVSEVILKQVIEWAHKLANGWSFNGPPQLKSGRTPLSCAASMAHQVAMLGGGLLCIAGGPLVVQVLYEDTLPTTAAVSQRTEFERPWASF

SEQ ID NO: 22701 - protein, 377 aa, Zea mays subsp. mays
  peptide (1)..(377): Ceres Seq. ID no. 15220512
  misc_feature (1)..(369): NCBI GI NO: 33146668 NR Description: unknown protein
  misc_feature (1)..(369): NCBI GI NO: 33146669 NR Description: unknown protein
  misc_feature (1)..(372): NCBI GI NO: 15229478 NR Description: expressed protein [Arabidopsis thaliana]
  misc_feature (1)..(372): NCBI GI NO: 26449340 NR Description: unknown protein [Arabidopsis thaliana]
  misc_feature (1)..(360): NCBI GI NO: 25370851 NR Description: hypothetical protein At2g48110
  misc_feature (1)..(360): NCBI GI NO: 18407529 NR Description: hypothetical protein [Arabidopsis thaliana]
  misc_feature (1)..(165): NCBI GI NO: 20197556 NR Description: unknown protein [Arabidopsis thaliana]
  misc_feature (175)..(360): NCBI GI NO: 1223579 NR Description: cDNA101 [Arabidopsis thaliana]
  misc_feature (192)..(360): NCBI GI NO: 34394478 NR Description: unknown protein
MICRKMNKGGVSSSNLSSTSSSSVSGSSVSASDDSYQRPAVPAWEFLEAVPFVLEAVLTACAHGRLSSRDLTTSLRDLVDFLPASLAAIVSYFSAEITRGIWKPVPMNGTEWPSPGASLHSIEAEVKEILASAGVQINSCYPRGVPPMLPLPMAALVSLTITFKLDRSLEYIQGVIGHALENCAGGSSWPSMPIIGALWTQKVRRWHDFIVLSCMRSPFGRDKDAVAQLIRSCFSSFLQSSSSGSDIIANRGVGALLGDSITDQGLRLPMAPGFVYLRTCRTFHDTYFVSEVILKQVIEWAHKLANGWSFNGPPQLKSGRTPLSCAASMAHQVAMLGGGLLCIAGGPLVVQVLYEDTLPTTAAVSQRTEFERPWASF

SEQ ID NO: 22702 - DNA, 417 bp, Zea mays subsp. mays
  misc_feature (1)..(417): Ceres Seq. ID no. 14306114
atgctgtcgttccggcgccaggtgaccaaggacaacaacttgtcagtgaaatcggggtcacgcaaatctggccctgatgaccaccattggagctccccagccaaactgccacataaggacgttgacaagatttccagagaaaagaagcagccgtggatgccgttcatctgctgccactccgtgcgctgataatatattttgcatcagttgacaactctacatacatgtgctgctgtaactaatgctatccgtctttgtgtagatagtctgcaatctagtatctgatattttgaatcagtgcaattttgatgtatccgctacctgacttgttagacatttgcgcgtgaatctgtcctgatgttcagattcagctagtgtttctgtggactgaacaggcctggaatcttgtaccggatt

SEQ ID NO: 22703 - protein, 62 aa, Zea mays subsp. mays
  peptide (1)..(62): Ceres Seq. ID no. 14306115
  misc_feature (1)..(61): NCBI GI NO: 29647493 NR Description: OJ1191_A10.17
MLSFRRQVTKDNNLSVKSGSRKSGPDDHHWSSPAKLPHKDVDKISREKKQPWMPFICCHSVR

SEQ ID NO: 22704 - protein, 44 aa, Zea mays subsp. mays
  peptide (1)..(44): Ceres Seq. ID no. 14306116
MTTIGAPQPNCHIRTLTRFPEKRSSRGCRSSAATPCADNIFCIS

SEQ ID NO: 22705 - DNA, 739 bp, Zea mays subsp. mays
  misc_feature (1)..(739): Ceres Seq. ID no. 12566963
  misc_feature (697)..(697): n is a, c, t, g, unknown, or other
  misc_feature (598)..(598): n is a, c, t, g, unknown, or other
  misc_feature (667)..(667): n is a, c, t, g, unknown, or other
  misc_feature (705)..(705): n is a, c, t, g, unknown, or other
gaaatgttttgcggtttcacaaggcagaagcgacgtgggagcacaagcgccaagtagtccaacagcactggcggacggacctcaagcaattcgcttccatgtgttctctctctgtcccctcggtctcagtagtgtcgaaggaaaacacacacaggcatgaggcatccctgtgagtttgttggtcttgaactcttgatgctgaaaatggagattaaagagcattattttgaggtctgtgacattatagatgacttgtccgtatcaatattaaaccacttgactgaaaactgcaagaaagaactcgagacaataaacgggcagtatccattttgaacctctgaagtatctagacaaaaccttgaagatcacttacgacgaatgagttcaaatgttaaaggtacaaacttacagctgtctcttgctactgtaacggagtccttctgttagatattacgatcctaacgccttccttttcattttcccatgctttgctatatttgagtccggtagacaaatgcttgttctgctgccctaggcccctagcagcttagtgcaaggagcagttcagcttgattgatatgacgttatttgcattgtntaagcttggtttagttgtgctgtggtgagcttagggagatgcaatccgaccattcacttgcaattgctntcaaagcttcaatttggggtgtatcacacncaaattanagagttaggaagttttagtgatccttttagcttt

SEQ ID NO: 22706 - protein, 58 aa, Zea mays subsp. mays
  peptide (1)..(58): Ceres Seq. ID no. 12566964
  misc_feature (2)..(58): Pfam Name: D, K and N Pfam Description: tRNA synthetases class II
  misc_feature (2)..(58): NCBI GI NO: 18252211 NR Description: aspartate--tRNA ligase - like protein
  misc_feature (2)..(58): NCBI GI NO: 30688944 NR Description: aspartyl-tRNA synthetase
MRHPCEFVGLELLMLKMEIKEHYFEVCDIIDDLSVSILNHLTENCKKELETINGQYPF

SEQ ID NO: 22707 - protein, 56 aa, Zea mays subsp. mays
  peptide (1)..(56): Ceres Seq. ID no. 12566965
NVLRFHKAEATWEHKRQVVQQHWRTDLKQFASMCSLSVPSVSVVSKENTHRHEASL

SEQ ID NO: 22708 - protein, 52 aa, Zea mays subsp. mays
  peptide (1)..(52): Ceres Seq. ID no. 12566966
KCFAVSQGRSDVGAQAPSSPTALADGPQAIRFHVFSLCPLGLSSVEGKHTQA

SEQ ID NO: 22709 - DNA, 1022 bp, Zea mays subsp. mays
  misc_feature (1)..(1022): Ceres Seq. ID no. 15224539
ccccctcgagtcagctacgtaggccccccccccggagctccagtagggcaaccatctccttctgcaggagacacctctggtcaaccagagtgcaagggtgagaagcttgacaagctaataaggattggcctgttgcaactcattagtagtgtggagggcttgcaattgcagtcaactcctgaaagttttcagattaatctgctgaggctgagggccgtgcagagccaattccaacaggtgatcgtgatcgccacaagcatgctcgtcctgcgccaagttctgatgagcgagaactcgagggccactcctctggaactggaaaatgccatctcagaactcgtcaaggctctcgcggacatactggacagctcacccgattccggcacggaagagattgtgcaggcgatggtcaatgcatcagcctcagttggctcaccatcagaggagaaggttcaggccaggatgcagatgatcacccgggtgttcctcaagagcctccagcccggtgacgtggtcttcaagaaggtatcccgtgcggtctactgcgccttccgtggcatcatcttaggtggcagtggtcccaagggccagaagctggcggacgcggcattgcgccgcatcggcgccaccaaggttgtcgacagggtgttgaaggctgctgaggtgctgatcaaggtggcaacggtatcagagaaggtccacggtccctggtacaaagctctgatagtctgatgtgagcgtgaatgtgaatggtttggcttttgtgaatacagacagtgaaagtgtaaattccttgttccactgggtgggatgggagatatggtgttgtacagcaatttatagttgttggtcagtaggcagttcaggatgtgaagaattctggtgagctgggcgaatatggatgctctttcaccaggatttagtcaggctcgatggatggatgctaaaacgcgtctggaaatgtaaattgtggcaccttgtttgattttcgaactgaaataatgtaaataattgattgcgtt

SEQ ID NO: 22710 - protein, 243 aa, Zea mays subsp. mays
  peptide (1)..(243): Ceres Seq. ID no. 15224540
  misc_feature (30)..(242): Pfam Name: Pfam Description:  T-complex protein 11
  misc_feature (12)..(241): NCBI GI NO: 39545653 NR Description: OJ000114_01.8
  misc_feature (12)..(241): NCBI GI NO: 39545651 NR Description: OJ000114_01.6
  misc_feature (30)..(242): NCBI GI NO: 15233756 NR Description: expressed protein [Arabidopsis thaliana]
  misc_feature (13)..(138): NCBI GI NO: 15219971 NR Description: expressed protein [Arabidopsis thaliana]
  misc_feature (107)..(242): NCBI GI NO: 15219971 NR Description: expressed protein [Arabidopsis thaliana]
PPRVSYVGPPPGAPVGQPSPSAGDTSGQPECKGEKLDKLIRIGLLQLISSVEGLQLQSTPESFQINLLRLRAVQSQFQQVIVIATSMLVLRQVLMSENSRATPLELENAISELVKALADILDSSPDSGTEEIVQAMVNASASVGSPSEEKVQARMQMITRVFLKSLQPGDVVFKKVSRAVYCAFRGIILGGSGPKGQKLADAALRRIGATKVVDRVLKAAEVLIKVATVSEKVHGPWYKALIV

SEQ ID NO: 22711 - protein, 157 aa, Zea mays subsp. mays
  peptide (1)..(157): Ceres Seq. ID no. 15224541
  misc_feature (1)..(156): Pfam Name: Pfam Description:  T-complex protein 11
  misc_feature (1)..(155): NCBI GI NO: 39545653 NR Description: OJ000114_01.8
  misc_feature (1)..(155): NCBI GI NO: 39545651 NR Description: OJ000114_01.6
  misc_feature (1)..(156): NCBI GI NO: 15233756 NR Description: expressed protein [Arabidopsis thaliana]
  misc_feature (1)..(52): NCBI GI NO: 15219971 NR Description: expressed protein [Arabidopsis thaliana]
  misc_feature (21)..(156): NCBI GI NO: 15219971 NR Description: expressed protein [Arabidopsis thaliana]
MLVLRQVLMSENSRATPLELENAISELVKALADILDSSPDSGTEEIVQAMVNASASVGSPSEEKVQARMQMITRVFLKSLQPGDVVFKKVSRAVYCAFRGIILGGSGPKGQKLADAALRRIGATKVVDRVLKAAEVLIKVATVSEKVHGPWYKALIV

SEQ ID NO: 22712 - protein, 149 aa, Zea mays subsp. mays
  peptide (1)..(149): Ceres Seq. ID no. 15224542
  misc_feature (1)..(148): Pfam Name: Pfam Description:  T-complex protein 11
  misc_feature (1)..(147): NCBI GI NO: 39545653 NR Description: OJ000114_01.8
  misc_feature (1)..(147): NCBI GI NO: 39545651 NR Description: OJ000114_01.6
  misc_feature (1)..(148): NCBI GI NO: 15233756 NR Description: expressed protein [Arabidopsis thaliana]
  misc_feature (1)..(44): NCBI GI NO: 15219971 NR Description: expressed protein [Arabidopsis thaliana]
  misc_feature (13)..(148): NCBI GI NO: 15219971 NR Description: expressed protein [Arabidopsis thaliana]
MSENSRATPLELENAISELVKALADILDSSPDSGTEEIVQAMVNASASVGSPSEEKVQARMQMITRVFLKSLQPGDVVFKKVSRAVYCAFRGIILGGSGPKGQKLADAALRRIGATKVVDRVLKAAEVLIKVATVSEKVHGPWYKALIV

SEQ ID NO: 22713 - DNA, 838 bp, Zea mays subsp. mays
  misc_feature (1)..(838): Ceres Seq. ID no. 14305784
aaaagagagtactccgttcatgaaatagaggagatgcttgattataagaagatggccgagagggagcacaggcagacggatgagatcaagaacatggaaacattcctcactgcactcagctgcaccaagacgctccagttgcacttatcgactgaatactccgaggttttggacatggtcaaggcttcaacgttgacgagtttgcccaagaaaaagtacctgcatggcttgaaatcactcagccttactctggaccacaaccatgcagttcttgctactctagtctcatgcttgctgaacagctctcccaacctcaaggatctcagaatcattgagctccggcacccggggagcccggtgcccttggctgcggagttctgggagaagaagataaccgcggacgggtttctgtaccacctggcgagcgtcaccttctacaccgactcgctcctggaaggccacccttgcgagggcatctgcaagttcctggtgatgaacgcgagggtcctcaagaggatgagcatcgtgtaccaccactcgcaggtcaggccggagcatgcagccaagctcgaggcggcccggagggagctccgtgtctggccgagggcttccgcggacgtgctgctggagttgactcctgtccatcggttcccatggttctgaggggcgaggtcgctgatccattgctcacatgcagatcctgcactgcagcttttgttctactcctgttctatctatgcctctcattgactctggcttgctctaagatgtagacaccagatgctaggcaccgtttaaggggatgtttgtttctagtgactaatgtttagtccctaag

SEQ ID NO: 22714 - protein, 220 aa, Zea mays subsp. mays
  peptide (1)..(220): Ceres Seq. ID no. 14305785
  misc_feature (139)..(220): NCBI GI NO: 34910586 NR Description: B1131B07.21
  misc_feature (80)..(110): NCBI GI NO: 34910586 NR Description: B1131B07.21
  misc_feature (68)..(206): NCBI GI NO: 34910584 NR Description: B1131B07.20
KREYSVHEIEEMLDYKKMAEREHRQTDEIKNMETFLTALSCTKTLQLHLSTEYSEVLDMVKASTLTSLPKKKYLHGLKSLSLTLDHNHAVLATLVSCLLNSSPNLKDLRIIELRHPGSPVPLAAEFWEKKITADGFLYHLASVTFYTDSLLEGHPCEGICKFLVMNARVLKRMSIVYHHSQVRPEHAAKLEAARRELRVWPRASADVLLELTPVHRFPWF

SEQ ID NO: 22715 - protein, 209 aa, Zea mays subsp. mays
  peptide (1)..(209): Ceres Seq. ID no. 14305786
  misc_feature (128)..(209): NCBI GI NO: 34910586 NR Description: B1131B07.21
  misc_feature (69)..(99): NCBI GI NO: 34910586 NR Description: B1131B07.21
  misc_feature (57)..(195): NCBI GI NO: 34910584 NR Description: B1131B07.20
MLDYKKMAEREHRQTDEIKNMETFLTALSCTKTLQLHLSTEYSEVLDMVKASTLTSLPKKKYLHGLKSLSLTLDHNHAVLATLVSCLLNSSPNLKDLRIIELRHPGSPVPLAAEFWEKKITADGFLYHLASVTFYTDSLLEGHPCEGICKFLVMNARVLKRMSIVYHHSQVRPEHAAKLEAARRELRVWPRASADVLLELTPVHRFPWF

SEQ ID NO: 22716 - protein, 203 aa, Zea mays subsp. mays
  peptide (1)..(203): Ceres Seq. ID no. 14305787
  misc_feature (122)..(203): NCBI GI NO: 34910586 NR Description: B1131B07.21
  misc_feature (63)..(93): NCBI GI NO: 34910586 NR Description: B1131B07.21
  misc_feature (51)..(189): NCBI GI NO: 34910584 NR Description: B1131B07.20
MAEREHRQTDEIKNMETFLTALSCTKTLQLHLSTEYSEVLDMVKASTLTSLPKKKYLHGLKSLSLTLDHNHAVLATLVSCLLNSSPNLKDLRIIELRHPGSPVPLAAEFWEKKITADGFLYHLASVTFYTDSLLEGHPCEGICKFLVMNARVLKRMSIVYHHSQVRPEHAAKLEAARRELRVWPRASADVLLELTPVHRFPWF

SEQ ID NO: 22717 - DNA, 781 bp, Zea mays subsp. mays
  misc_feature (1)..(781): Ceres Seq. ID no. 14305790
gaatatatccatcctaacatccacccacccacacaccagacacacataccttattctccgccgtttcttggcctccggaaatctcctcccccaagttgcaagcatgggcgggttcagcctcagcggcgctacaggtctcgcggcgtaccgcgaggaagacgacgaggagctgttcgagacgtcgtcttcgatctccggcgactccgacgatgagggccaccagctctccgatggagaggggggcgcctatgatttgtcatctgtgatggcacagctccctgtcaagaaagggctatccagatactacgacggcaagtcccagtccttcgcgtgcatgtctgaagtgcgatgcctggaagatctgcgcaagaaagagacgccctacaagaagatcaagacatcaaggagtagcgtcgcgttagacgaagagcaggactgtcatacgccgggtcgtacgaacagcagcagagcgcccggaagttgttgcgcaaacctggtggctcggaacaacggcaaaaacatgctgtacagacctcccccagtccctgtaaacaaaagtggataccgtcagtaggctctaggacattactggatgatatctatccagggtttcacctcttgttttttttccatttttgagggattttgttgacaggcgtattggcctgtctcagatgtaatgtaagagggtttccttctctgctcttagcagagttatctcctatgatcttgtccatgagacattggttcgtgtaaataatagtgatgttgtaaccacttt

SEQ ID NO: 22718 - protein, 190 aa, Zea mays subsp. mays
  peptide (1)..(190): Ceres Seq. ID no. 14305791
  misc_feature (51)..(190): NCBI GI NO: 34909358 NR Description: P0638D12.11
  misc_feature (83)..(190): NCBI GI NO: 20159729 NR Description: unknown cold induced protein
  misc_feature (51)..(170): NCBI GI NO: 15241248 NR Description: expressed protein [Arabidopsis thaliana]
  misc_feature (51)..(136): NCBI GI NO: 38346806 NR Description: OSJNBa0088A01.13
  misc_feature (35)..(96): NCBI GI NO: 34909358 NR Description: P0638D12.11
NISILTSTHPHTRHTYLILRRFLASGNLLPQVASMGGFSLSGATGLAAYREEDDEELFETSSSISGDSDDEGHQLSDGEGGAYDLSSVMAQLPVKKGLSRYYDGKSQSFACMSEVRCLEDLRKKETPYKKIKTSRSSVALDEEQDCHTPGRTNSSRAPGSCCANLVARNNGKNMLYRPPPVPVNKSGYRQ

SEQ ID NO: 22719 - protein, 156 aa, Zea mays subsp. mays
  peptide (1)..(156): Ceres Seq. ID no. 14305792
  misc_feature (17)..(156): NCBI GI NO: 34909358 NR Description: P0638D12.11
  misc_feature (49)..(156): NCBI GI NO: 20159729 NR Description: unknown cold induced protein
  misc_feature (17)..(136): NCBI GI NO: 15241248 NR Description: expressed protein [Arabidopsis thaliana]
  misc_feature (17)..(102): NCBI GI NO: 38346806 NR Description: OSJNBa0088A01.13
  misc_feature (1)..(62): NCBI GI NO: 34909358 NR Description: P0638D12.11
MGGFSLSGATGLAAYREEDDEELFETSSSISGDSDDEGHQLSDGEGGAYDLSSVMAQLPVKKGLSRYYDGKSQSFACMSEVRCLEDLRKKETPYKKIKTSRSSVALDEEQDCHTPGRTNSSRAPGSCCANLVARNNGKNMLYRPPPVPVNKSGYRQ

SEQ ID NO: 22720 - protein, 102 aa, Zea mays subsp. mays
  peptide (1)..(102): Ceres Seq. ID no. 14305793
  misc_feature (1)..(102): NCBI GI NO: 34909358 NR Description: P0638D12.11
  misc_feature (1)..(102): NCBI GI NO: 20159729 NR Description: unknown cold induced protein
  misc_feature (1)..(82): NCBI GI NO: 15241248 NR Description: expressed protein [Arabidopsis thaliana]
  misc_feature (1)..(48): NCBI GI NO: 38346806 NR Description: OSJNBa0088A01.13
MAQLPVKKGLSRYYDGKSQSFACMSEVRCLEDLRKKETPYKKIKTSRSSVALDEEQDCHTPGRTNSSRAPGSCCANLVARNNGKNMLYRPPPVPVNKSGYRQ

SEQ ID NO: 22721 - DNA, 768 bp, Zea mays subsp. mays
  misc_feature (1)..(768): Ceres Seq. ID no. 12589383
  misc_feature (710)..(710): n is a, c, t, g, unknown, or other
agaaagcttcgaacatattcaaacgtattgatctgataaatttctctgcatgccaatttgctaacccagctttgcaaagacactatgggatcttggaggccttagctttaggcgaagatgagatgcctgatataaaggatgagaccctgcctgacgaagaaggcttgtctaagccaggggtagccaatgctattgaggaattcaagacttcagtctatggtgaaaattatgaccaagaggaggcagaagcggcagcagggaaagcttcccgtggtaatgcttcaaaaaagcggaaggaggtcactgatgcagctgcgcagataagtgctgcttatgattgggcagaacttgcagacaatggaaaactgaaggaaatgaccacggtggaattgagatcctacctgaccgcgcatgatctcccggtttctggtaagaaagatgtacttatcagcaggatcttgactcacctgggtaagtgaagccgggtatccgaactgttagtttcctgagacccgactgacatctgtagtgctgtctcgcggatccttgtggaccgtaatcctcccccgtgcaggctacgtgccgattttttgtatagcgacaggacagcaccagttgccaatgtaacctgtgttaagtttcgtcttgtggtatcatctgcttgtcattgtcaacatgaaacataatgtaattctggatacttagacccncaatatggagcataactgcataaggtatgttaaagcataggccctctttagcatggcc

SEQ ID NO: 22722 - protein, 158 aa, Zea mays subsp. mays
  peptide (1)..(158): Ceres Seq. ID no. 12589384
  misc_feature (1)..(158): NCBI GI NO: 34393279 NR Description: putative ATP-dependent DNA helicase II 70 kDa subunit
  misc_feature (1)..(158): NCBI GI NO: 18394425 NR Description: expressed protein; protein id: At1g16970
  misc_feature (57)..(158): NCBI GI NO: 25518483 NR Description: hypothetical protein F6I1.2 - Arabidopsis thaliana
  misc_feature (1)..(158): NCBI GI NO: 25518483 NR Description: hypothetical protein F6I1.2 - Arabidopsis thaliana
  misc_feature (19)..(158): NCBI GI NO: 110652 NR Description: Lupus autoantigen p70 - mouse (fragment)
  misc_feature (19)..(158): NCBI GI NO: 3241858 NR Description: Ku70 [Mus musculus]
  misc_feature (19)..(158): NCBI GI NO: 6753928 NR Description: thyroid autoantigen
  misc_feature (19)..(158): NCBI GI NO: 19548754 NR Description: Ku70 [Mus musculus]
  misc_feature (19)..(158): NCBI GI NO: 21717799 NR Description: thyroid autoantigen
  misc_feature (13)..(158): NCBI GI NO: 4630797 NR Description: human Ku70 autoantigen homologue [Xenopus laevis]
KASNIFKRIDLINFSACQFANPALQRHYGILEALALGEDEMPDIKDETLPDEEGLSKPGVANAIEEFKTSVYGENYDQEEAEAAAGKASRGNASKKRKEVTDAAAQISAAYDWAELADNGKLKEMTTVELRSYLTAHDLPVSGKKDVLISRILTHLGK

SEQ ID NO: 22723 - protein, 118 aa, Zea mays subsp. mays
  peptide (1)..(118): Ceres Seq. ID no. 12589385
  misc_feature (1)..(118): NCBI GI NO: 34393279 NR Description: putative ATP-dependent DNA helicase II 70 kDa subunit
  misc_feature (1)..(118): NCBI GI NO: 18394425 NR Description: expressed protein; protein id: At1g16970
  misc_feature (17)..(118): NCBI GI NO: 25518483 NR Description: hypothetical protein F6I1.2 - Arabidopsis thaliana
  misc_feature (1)..(118): NCBI GI NO: 25518483 NR Description: hypothetical protein F6I1.2 - Arabidopsis thaliana
  misc_feature (1)..(118): NCBI GI NO: 110652 NR Description: Lupus autoantigen p70 - mouse (fragment)
  misc_feature (1)..(118): NCBI GI NO: 3241858 NR Description: Ku70 [Mus musculus]
  misc_feature (1)..(118): NCBI GI NO: 19548754 NR Description: Ku70 [Mus musculus]
  misc_feature (1)..(118): NCBI GI NO: 6753928 NR Description: thyroid autoantigen
  misc_feature (1)..(118): NCBI GI NO: 21717799 NR Description: thyroid autoantigen
  misc_feature (1)..(118): NCBI GI NO: 4630797 NR Description: human Ku70 autoantigen homologue [Xenopus laevis]
MPDIKDETLPDEEGLSKPGVANAIEEFKTSVYGENYDQEEAEAAAGKASRGNASKKRKEVTDAAAQISAAYDWAELADNGKLKEMTTVELRSYLTAHDLPVSGKKDVLISRILTHLGK

SEQ ID NO: 22724 - DNA, 575 bp, Zea mays subsp. mays
  misc_feature (1)..(575): Ceres Seq. ID no. 13577582
gccaatcaagaaacgagagagcatagatcatatcagaacgaagaacaaaaaccaacaagtcaatatggccgacggctctgctttgtgcattattatcattactttattcataccacctctcggcgtcttcctgatctcaggctgtagcgttgacttgctaatcaacatccttctcaccattctcggatacttcccaggccacatacatgcctattacctagaatatgtgtattaccatcgtcgcggtcttgctgctggcggaacgacgtttgcgaagcccgctacgggagtttattccgagcggattcagtcgggaggtcatcatcagcagacgcaatatgggactatacggacttgatcgagcgtggcttattggaaagtggctagtcattagagatttgcagcttgagtctttgcatgtctagttaggggtgggagtttgggtaggttggcagtggtggatgatacctatttgttatggcgtcggtttgggaggttttgtcgaaagctagttactgggttacttgatattggtgcccattaagtatagctttaataccatggttttacgattt

SEQ ID NO: 22725 - protein, 118 aa, Zea mays subsp. mays
  peptide (1)..(118): Ceres Seq. ID no. 13577583
  misc_feature (31)..(73): Pfam Name: Pfam Description:  Uncharacterized protein family UPF0057
  misc_feature (22)..(116): NCBI GI NO: 28949921 NR Description: conserved hypothetical protein [Neurospora crassa]
  misc_feature (26)..(82): NCBI GI NO: 6320080 NR Description: Homology to PMP3/SNA1 (Sensitivity to Na+); Sna4p
  misc_feature (31)..(77): NCBI GI NO: 19112142 NR Description: UPF0057 family protein
  misc_feature (28)..(73): NCBI GI NO: 482177 NR Description: hypothetical protein ZK632
  misc_feature (28)..(73): NCBI GI NO: 17556987 NR Description: Putative membrane protein
  misc_feature (31)..(73): NCBI GI NO: 15214248 NR Description: Protein Ric1
  misc_feature (28)..(80): NCBI GI NO: 15234810 NR Description: stress responsive protein homolog
  misc_feature (30)..(73): NCBI GI NO: 39590745 NR Description: Hypothetical protein CBG09982
  misc_feature (22)..(73): NCBI GI NO: 34896280 NR Description: putative low temperature and salt responsiveprotein
  misc_feature (32)..(77): NCBI GI NO: 39598070 NR Description: Hypothetical protein CBG14697
PIKKRESIDHIRTKNKNQQVNMADGSALCIIIITLFIPPLGVFLISGCSVDLLINILLTILGYFPGHIHAYYLEYVYYHRRGLAAGGTTFAKPATGVYSERIQSGGHHQQTQYGTIRT

SEQ ID NO: 22726 - protein, 97 aa, Zea mays subsp. mays
  peptide (1)..(97): Ceres Seq. ID no. 13577584
  misc_feature (10)..(52): Pfam Name: Pfam Description:  Uncharacterized protein family UPF0057
  misc_feature (1)..(95): NCBI GI NO: 28949921 NR Description: conserved hypothetical protein [Neurospora crassa]
  misc_feature (5)..(61): NCBI GI NO: 6320080 NR Description: Homology to PMP3/SNA1 (Sensitivity to Na+); Sna4p
  misc_feature (10)..(56): NCBI GI NO: 19112142 NR Description: UPF0057 family protein
  misc_feature (7)..(52): NCBI GI NO: 482177 NR Description: hypothetical protein ZK632
  misc_feature (7)..(52): NCBI GI NO: 17556987 NR Description: Putative membrane protein
  misc_feature (10)..(52): NCBI GI NO: 15214248 NR Description: Protein Ric1
  misc_feature (7)..(59): NCBI GI NO: 15234810 NR Description: stress responsive protein homolog
  misc_feature (9)..(52): NCBI GI NO: 39590745 NR Description: Hypothetical protein CBG09982
  misc_feature (1)..(52): NCBI GI NO: 34896280 NR Description: putative low temperature and salt responsiveprotein
  misc_feature (11)..(56): NCBI GI NO: 39598070 NR Description: Hypothetical protein CBG14697
MADGSALCIIIITLFIPPLGVFLISGCSVDLLINILLTILGYFPGHIHAYYLEYVYYHRRGLAAGGTTFAKPATGVYSERIQSGGHHQQTQYGTIRT

SEQ ID NO: 22727 - protein, 66 aa, Zea mays subsp. mays
  peptide (1)..(66): Ceres Seq. ID no. 13577585
MCITIVAVLLLAERRLRSPLREFIPSGFSREVIISRRNMGLYGLDRAWLIGKWLVIRDLQLESLHV

SEQ ID NO: 22728 - DNA, 1000 bp, Zea mays subsp. mays
  misc_feature (1)..(1000): Ceres Seq. ID no. 15225689
aaggggattaatgttgggtattgccggggtttttccatgcaggacttgttaaaaggcgggccaggaaattttatttggcccccttttggggggaattgggttcgggggcccccctcgrgttmagctwygtwggggcccccccccccccccctccctgcgacgtcmrgaactgaaggaagtcatagcaaagcaacaagagctgggttttgacccacctgagctaccgcctggctatctatcagaaattggggatcaatgcattgaaaataaaaataataggaaaactcaattcagggattctcattttggaaatcgtttcaataataacaaaagatcaaggtatgagcgtggaggttttcagtctaaaagatctaaggtatggaaccgtactcctcacgctgatcacgggatggtcaagagcagagaaccaaccctcctgcagaagcttcttagctctgatatcaagagggataaacgtagacttattcacgtgttcagattcatgaccttgaacaatttctttaaggactggcctgacaggcctttacagtttcctagtgttaagatgaatcagattgaaataggaagcaatattagcacagatgatttggagaatgctgggatgtccaaagacagcatccttggtgtaaacgaaaatggtgattggaaagagttgagctcgattgatgaagaggataccgatagcgccaaccacaatgatgaagacgtcgatgatgacagtgttgacagcagcattgaggatggggccgaggaggacgggtacgaagagcagtttaatgagcctgaagatgatacggcagtctgaaaatttgactgagccgggtatccacatcaaaaagacaaagcgcttctccttgagtagagtttttgcacaacacattctgtagctcttcgcatattccagttataggagagggtctggtgtttaaagaaactttgtactttgttgtagttgaattgttatgttatcgccgggaat

SEQ ID NO: 22729 - protein, 138 aa, Zea mays subsp. mays
  peptide (1)..(138): Ceres Seq. ID no. 15225690
  misc_feature (1)..(110): NCBI GI NO: 34909224 NR Description: P0432B10.22
  misc_feature (1)..(95): NCBI GI NO: 15238815 NR Description: hypothetical protein [Arabidopsis thaliana]
MVKSREPTLLQKLLSSDIKRDKRRLIHVFRFMTLNNFFKDWPDRPLQFPSVKMNQIEIGSNISTDDLENAGMSKDSILGVNENGDWKELSSIDEEDTDSANHNDEDVDDDSVDSSIEDGAEEDGYEEQFNEPEDDTAV

SEQ ID NO: 22730 - protein, 107 aa, Zea mays subsp. mays
  peptide (1)..(107): Ceres Seq. ID no. 15225691
  misc_feature (1)..(79): NCBI GI NO: 34909224 NR Description: P0432B10.22
  misc_feature (1)..(64): NCBI GI NO: 15238815 NR Description: hypothetical protein [Arabidopsis thaliana]
MTLNNFFKDWPDRPLQFPSVKMNQIEIGSNISTDDLENAGMSKDSILGVNENGDWKELSSIDEEDTDSANHNDEDVDDDSVDSSIEDGAEEDGYEEQFNEPEDDTAV

SEQ ID NO: 22731 - protein, 86 aa, Zea mays subsp. mays
  peptide (1)..(86): Ceres Seq. ID no. 15225692
  misc_feature (1)..(58): NCBI GI NO: 34909224 NR Description: P0432B10.22
  misc_feature (1)..(43): NCBI GI NO: 15238815 NR Description: hypothetical protein [Arabidopsis thaliana]
MNQIEIGSNISTDDLENAGMSKDSILGVNENGDWKELSSIDEEDTDSANHNDEDVDDDSVDSSIEDGAEEDGYEEQFNEPEDDTAV

SEQ ID NO: 22732 - DNA, 822 bp, Zea mays subsp. mays
  misc_feature (1)..(822): Ceres Seq. ID no. 14303237
gcgtgatctctctcccttcctcccttccggcgacgcctgggccaccgccgcggccgccctacgccaggtgcccaggtcctcgtccggcccttcgccggcgatgagcacccaccaggccaatacgctgcggttgtacctcacctgcatccggaacactctggaggcggcgatgtgcctccagaatttcccttgccaagaagtcgagaggcacaacaaaccggaggtggagctcaagacaagccctgaacttctgctgaatccggtattgatatgccgcaacgaagcagaaaaatgcttgatagagacttcaatcaactccatacgtataagcatgaaggttaagcaggcagatgaattggagaacattcttgccaagaagttccttaggtttttgtcaatgagggcagaggcattccaagtgttgaggagaaaaccggttcagggctatgatatcagtttcctgataacaaactaccattgtgaggacatgcataagcacaagctcatagatttcatcgtgcaatttatggaggatattgacaaggagatcagtgagctgaagctgtcagtaaacactcgtggccggctagtggccactgaattcttgaagcagttcttatgactcggccatggccgtagtcagtgttgattatcatggcctgcaactaagctgccgttctgcaacagctttaagatttttttacacgacagctcttgtaaatgccttgccaaagatgcattcgtggccctgggccacctgattaacagctgacaattacagtatcaggacgcacatagcgctctgagattgttcatgtgatc

SEQ ID NO: 22733 - protein, 206 aa, Zea mays subsp. mays
  peptide (1)..(206): Ceres Seq. ID no. 14303238
  misc_feature (45)..(205): Pfam Name: ARPC4 Pfam Description: ARP2/3 complex 20 kDa subunit
  misc_feature (39)..(206): NCBI GI NO: 34897476 NR Description: putative actin-related complex protein
  misc_feature (39)..(201): NCBI GI NO: 29244680 NR Description: putative ARP2/3 complex 20 kDa subunit, 3'-partial
  misc_feature (45)..(205): NCBI GI NO: 4093169 NR Description: p20-Arc [Dictyostelium discoideum]
  misc_feature (41)..(205): NCBI GI NO: 5031595 NR Description: actin related protein 2/3 complex subunit 4
  misc_feature (41)..(205): NCBI GI NO: 12857620 NR Description: unnamed protein product [Mus musculus]
  misc_feature (41)..(205): NCBI GI NO: 34783179 NR Description: ARPC4 protein [Homo sapiens]
  misc_feature (39)..(205): NCBI GI NO: 27525268 NR Description: putative ARP2/3 complex 20KD subunit (P20-ARC)
  misc_feature (39)..(205): NCBI GI NO: 31242821 NR Description: ENSANGP00000020957 [Anopheles gambiae]
  misc_feature (41)..(205): NCBI GI NO: 26345244 NR Description: unnamed protein product [Mus musculus]
  misc_feature (41)..(203): NCBI GI NO: 33244031 NR Description: Actin related protein 2/3 complex, subunit 4
RDLSPFLPSGDAWATAAAALRQVPRSSSGPSPAMSTHQANTLRLYLTCIRNTLEAAMCLQNFPCQEVERHNKPEVELKTSPELLLNPVLICRNEAEKCLIETSINSIRISMKVKQADELENILAKKFLRFLSMRAEAFQVLRRKPVQGYDISFLITNYHCEDMHKHKLIDFIVQFMEDIDKEISELKLSVNTRGRLVATEFLKQFL

SEQ ID NO: 22734 - protein, 173 aa, Zea mays subsp. mays
  peptide (1)..(173): Ceres Seq. ID no. 14303239
  misc_feature (12)..(172): Pfam Name: ARPC4 Pfam Description: ARP2/3 complex 20 kDa subunit
  misc_feature (6)..(173): NCBI GI NO: 34897476 NR Description: putative actin-related complex protein
  misc_feature (6)..(168): NCBI GI NO: 29244680 NR Description: putative ARP2/3 complex 20 kDa subunit, 3'-partial
  misc_feature (12)..(172): NCBI GI NO: 4093169 NR Description: p20-Arc [Dictyostelium discoideum]
  misc_feature (8)..(172): NCBI GI NO: 5031595 NR Description: actin related protein 2/3 complex subunit 4
  misc_feature (8)..(172): NCBI GI NO: 12857620 NR Description: unnamed protein product [Mus musculus]
  misc_feature (8)..(172): NCBI GI NO: 34783179 NR Description: ARPC4 protein [Homo sapiens]
  misc_feature (6)..(172): NCBI GI NO: 27525268 NR Description: putative ARP2/3 complex 20KD subunit (P20-ARC)
  misc_feature (6)..(172): NCBI GI NO: 31242821 NR Description: ENSANGP00000020957 [Anopheles gambiae]
  misc_feature (8)..(172): NCBI GI NO: 26345244 NR Description: unnamed protein product [Mus musculus]
  misc_feature (8)..(170): NCBI GI NO: 33244031 NR Description: Actin related protein 2/3 complex, subunit 4
MSTHQANTLRLYLTCIRNTLEAAMCLQNFPCQEVERHNKPEVELKTSPELLLNPVLICRNEAEKCLIETSINSIRISMKVKQADELENILAKKFLRFLSMRAEAFQVLRRKPVQGYDISFLITNYHCEDMHKHKLIDFIVQFMEDIDKEISELKLSVNTRGRLVATEFLKQFL

SEQ ID NO: 22735 - protein, 150 aa, Zea mays subsp. mays
  peptide (1)..(150): Ceres Seq. ID no. 14303240
  misc_feature (1)..(149): Pfam Name: ARPC4 Pfam Description: ARP2/3 complex 20 kDa subunit
  misc_feature (1)..(150): NCBI GI NO: 34897476 NR Description: putative actin-related complex protein
  misc_feature (1)..(145): NCBI GI NO: 29244680 NR Description: putative ARP2/3 complex 20 kDa subunit, 3'-partial
  misc_feature (1)..(149): NCBI GI NO: 4093169 NR Description: p20-Arc [Dictyostelium discoideum]
  misc_feature (1)..(149): NCBI GI NO: 5031595 NR Description: actin related protein 2/3 complex subunit 4
  misc_feature (1)..(149): NCBI GI NO: 12857620 NR Description: unnamed protein product [Mus musculus]
  misc_feature (1)..(149): NCBI GI NO: 34783179 NR Description: ARPC4 protein [Homo sapiens]
  misc_feature (1)..(149): NCBI GI NO: 27525268 NR Description: putative ARP2/3 complex 20KD subunit (P20-ARC)
  misc_feature (1)..(149): NCBI GI NO: 31242821 NR Description: ENSANGP00000020957 [Anopheles gambiae]
  misc_feature (1)..(149): NCBI GI NO: 26345244 NR Description: unnamed protein product [Mus musculus]
  misc_feature (1)..(147): NCBI GI NO: 33244031 NR Description: Actin related protein 2/3 complex, subunit 4
MCLQNFPCQEVERHNKPEVELKTSPELLLNPVLICRNEAEKCLIETSINSIRISMKVKQADELENILAKKFLRFLSMRAEAFQVLRRKPVQGYDISFLITNYHCEDMHKHKLIDFIVQFMEDIDKEISELKLSVNTRGRLVATEFLKQFL

SEQ ID NO: 22736 - DNA, 934 bp, Zea mays subsp. mays
  misc_feature (1)..(934): Ceres Seq. ID no. 13586712
agtccatgacaaggggctcggttagtccacagccctagaggctgcagctgcacacttctcttctctgttttcgccggttaaactttccccacttgttgctggccttcgaatctgtggtttgtttgagcttagcagggaagcgaagaacagggaagcaaggacatggatgctttcagtgcagtgatggacaaggtaaagagccacccagaaatgatggagaaggtcagtgcagtgatggacaaggtgaagaagagccacccagaagcggtggaaaaggtcaaggacgaggtgatgagccttgctgatgctctccatctgcgtagacatggatccaaagataaagaacctgagtctgaagagaaggccgaagaaggcgaggcagcgcagagcgtcgaagaggaggagggtacctctgctgacaagactgcagaacctaatgtgttggagcaggccgtacaggagattcaggctgtcgccgcagctttgcagcagacagcacctgaaactgaaactgaaattccagttgagactgctgctgctgctcctgaaacttcggctgaaggagacaagcctgaagacacaatcagggaggtggagaaagatgacccaaagaagcggctcgatttcgccgggttcttcgccatgctgtttgagaggttctgctccccggccaacaagaagaaagactgagtgattgcaggtcagctgtggatttctcgttttgtgatcttggacgtggaaattacattttacttgatgtatttattgtgggtggtgtacagtctgcacttgtgttctattaagataaatctgctcttgctttttttactttcttttgtgatgacagggcaatgattacattttacttgatgtatttattgtcgcccttgtggaattgatttaatttatgtgaacgattgatttatttagggtt

SEQ ID NO: 22737 - protein, 175 aa, Zea mays subsp. mays
  peptide (1)..(175): Ceres Seq. ID no. 13586713
  misc_feature (1)..(175): NCBI GI NO: 4240037 NR Description: ZmGR2a [Zea mays]
  misc_feature (1)..(175): NCBI GI NO: 4240039 NR Description: ZmGR2b [Zea mays]
  misc_feature (1)..(175): NCBI GI NO: 4240041 NR Description: ZmGR2c [Zea mays]
  misc_feature (1)..(175): NCBI GI NO: 20521262 NR Description: putative ZmGR2c
  misc_feature (1)..(133): NCBI GI NO: 20521262 NR Description: putative ZmGR2c
MDAFSAVMDKVKSHPEMMEKVSAVMDKVKKSHPEAVEKVKDEVMSLADALHLRRHGSKDKEPESEEKAEEGEAAQSVEEEEGTSADKTAEPNVLEQAVQEIQAVAAALQQTAPETETEIPVETAAAAPETSAEGDKPEDTIREVEKDDPKKRLDFAGFFAMLFERFCSPANKKKD

SEQ ID NO: 22738 - protein, 168 aa, Zea mays subsp. mays
  peptide (1)..(168): Ceres Seq. ID no. 13586714
  misc_feature (1)..(168): NCBI GI NO: 4240037 NR Description: ZmGR2a [Zea mays]
  misc_feature (1)..(168): NCBI GI NO: 4240039 NR Description: ZmGR2b [Zea mays]
  misc_feature (1)..(168): NCBI GI NO: 4240041 NR Description: ZmGR2c [Zea mays]
  misc_feature (1)..(168): NCBI GI NO: 20521262 NR Description: putative ZmGR2c
  misc_feature (1)..(126): NCBI GI NO: 20521262 NR Description: putative ZmGR2c
MDKVKSHPEMMEKVSAVMDKVKKSHPEAVEKVKDEVMSLADALHLRRHGSKDKEPESEEKAEEGEAAQSVEEEEGTSADKTAEPNVLEQAVQEIQAVAAALQQTAPETETEIPVETAAAAPETSAEGDKPEDTIREVEKDDPKKRLDFAGFFAMLFERFCSPANKKKD

SEQ ID NO: 22739 - protein, 159 aa, Zea mays subsp. mays
  peptide (1)..(159): Ceres Seq. ID no. 13586715
  misc_feature (1)..(159): NCBI GI NO: 4240037 NR Description: ZmGR2a [Zea mays]
  misc_feature (1)..(159): NCBI GI NO: 4240039 NR Description: ZmGR2b [Zea mays]
  misc_feature (1)..(159): NCBI GI NO: 4240041 NR Description: ZmGR2c [Zea mays]
  misc_feature (1)..(159): NCBI GI NO: 20521262 NR Description: putative ZmGR2c
  misc_feature (1)..(117): NCBI GI NO: 20521262 NR Description: putative ZmGR2c
MMEKVSAVMDKVKKSHPEAVEKVKDEVMSLADALHLRRHGSKDKEPESEEKAEEGEAAQSVEEEEGTSADKTAEPNVLEQAVQEIQAVAAALQQTAPETETEIPVETAAAAPETSAEGDKPEDTIREVEKDDPKKRLDFAGFFAMLFERFCSPANKKKD

SEQ ID NO: 22740 - DNA, 936 bp, Zea mays subsp. mays
  misc_feature (1)..(936): Ceres Seq. ID no. 13599030
gatggtggtagcgatcaaaaacttatctggttttgttgaggctgacaaggatggaaattggtcttgtcccactgacaagaagcataagcatgagatatttccaaacccggtattagaagtcaacagactagctgctaatcttcaatcatacttggagcaaaggggagcaaaactgcctgatgggcatatcatcgggagagttgttctgccaaatcccaactgcaggccttcctatactataagcacccaaccagaggtcatgctgtatgatcaatggaaggatctcaagacagactcaaagactggactctcagcatggattaaaggtgcatttactggaagcagaagtgacatgcaagattctgtactccagaatctacattttattctcagctcatcgcctatgtgggacaggttggaactcaaaggagacaaaaatgttcttggtgaattcattgaattcaaaggcaggcatgaggacgttcaacttctcaaaattctcaaggggtcaaaagtcagtcgcttcatcatccagaagtcaactctttttggtggttttggtaggtcacgagttcaaatattgtattctcctcgtgactatcgagctgaggggacttcatcttcagagttgaaagagatttctgtgaagcaatacacggagatcgttttccaaccactgcgttccaaaaaggctcggaagttcaagctgtccaatgttgtttctgtcacactgagtgcctagcaagcagaagcttgcctttcaaatttaggctagccaagtagccatatctcttgtattttatatttctcgtccgtgtgtgtaactcatcagttgtgtgcttctctgtttgcacttgtaattatgtgtctgttcttgatgatgagggaagtaacttacaacgacggctaactgaatatgcttcgtactgttgcttg

SEQ ID NO: 22741 - protein, 246 aa, Zea mays subsp. mays
  peptide (1)..(246): Ceres Seq. ID no. 13599031
  misc_feature (1)..(246): NCBI GI NO: 37537134 NR Description: unknown protein
  misc_feature (1)..(246): NCBI GI NO: 15220924 NR Description: hypothetical protein [Arabidopsis thaliana]
  misc_feature (1)..(184): NCBI GI NO: 25373168 NR Description: hypothetical protein F16G16.1
MVVAIKNLSGFVEADKDGNWSCPTDKKHKHEIFPNPVLEVNRLAANLQSYLEQRGAKLPDGHIIGRVVLPNPNCRPSYTISTQPEVMLYDQWKDLKTDSKTGLSAWIKGAFTGSRSDMQDSVLQNLHFILSSSPMWDRLELKGDKNVLGEFIEFKGRHEDVQLLKILKGSKVSRFIIQKSTLFGGFGRSRVQILYSPRDYRAEGTSSSELKEISVKQYTEIVFQPLRSKKARKFKLSNVVSVTLSA

SEQ ID NO: 22742 - protein, 160 aa, Zea mays subsp. mays
  peptide (1)..(160): Ceres Seq. ID no. 13599032
  misc_feature (1)..(160): NCBI GI NO: 37537134 NR Description: unknown protein
  misc_feature (1)..(160): NCBI GI NO: 15220924 NR Description: hypothetical protein [Arabidopsis thaliana]
  misc_feature (1)..(98): NCBI GI NO: 25373168 NR Description: hypothetical protein F16G16.1
MLYDQWKDLKTDSKTGLSAWIKGAFTGSRSDMQDSVLQNLHFILSSSPMWDRLELKGDKNVLGEFIEFKGRHEDVQLLKILKGSKVSRFIIQKSTLFGGFGRSRVQILYSPRDYRAEGTSSSELKEISVKQYTEIVFQPLRSKKARKFKLSNVVSVTLSA

SEQ ID NO: 22743 - protein, 129 aa, Zea mays subsp. mays
  peptide (1)..(129): Ceres Seq. ID no. 13599033
  misc_feature (1)..(129): NCBI GI NO: 37537134 NR Description: unknown protein
  misc_feature (1)..(129): NCBI GI NO: 15220924 NR Description: hypothetical protein [Arabidopsis thaliana]
  misc_feature (1)..(67): NCBI GI NO: 25373168 NR Description: hypothetical protein F16G16.1
MQDSVLQNLHFILSSSPMWDRLELKGDKNVLGEFIEFKGRHEDVQLLKILKGSKVSRFIIQKSTLFGGFGRSRVQILYSPRDYRAEGTSSSELKEISVKQYTEIVFQPLRSKKARKFKLSNVVSVTLSA

SEQ ID NO: 22744 - DNA, 1507 bp, Zea mays subsp. mays
  misc_feature (1)..(1507): Ceres Seq. ID no. 13586716
tcagctacgtaggccccccccccacctgctctgctcctcagccccagcccaggccttcgctctcgctgccctgagccctccgcgttccccgcccgccacgcgatgccggcgtgggccgaagcggcgctcgtgctcgcctcaccatcccccgccaccgcctcctcgaccacgtcatcatgtggcgccaggccgcgcgccgccgtggggtccgtcaggctcttctgcaagggattcccttgtagcattcgttccaaagctggattccagattcataattaccgtacaaggatgtttaagattaaagcaaaagcagaatctggtgatggctacacacggcttgctccacttagatttgaatctccaagtggccagcttctgattcaaatactacaatcacaccctcatcttatccctgcaacagttgatcagcaacttggaaatcttcaatcagagaaatctgcccaaagtgaagaagcctcaaaagttccccaggacctcctctacaagagaattgcagaagtcaaagagaaggaaaggcaaaatgccttagaagagattatctactgttgggttacatataggttcatggaaaatgacatatatatgacacctgcattatcaccagggggtggccctgtacgtgacatatccgcattgcctaatcaagaagacaaattgcgaaacatacactccgcagacgcctttgagatgatacaaaaccatctcaatcttatcatgggagaaaagatagcatcaccgcccgatactgttgttgagatcagcaacttgaatcttggaaagctgtatgcagcatccatcatgtatggttactttctgaagagagtggatgagcgattccaacttgagaaaactatgaagactctcccaccaaagcccaaccagcagatagtatttgaaaacctacagcctaatccattctgggatatggagtccttagtacagattacacctgatggggaggagataagtttggacgatgaaaaatcaaatccaaacaagttgaggtcttatgtctcacaactggatgctgacacattgcaaagatatgctactatcagatcgaaggaagccgtctcactgatcgagaagcaaactcaggcgttgtttggacggccagacatcaaagtattggacgatggttcggtcaatgcaaaggatggcagaatgataacaatcacatttacagagctcaatcatctggtcttggaggcagttgctttcggttccttcctttgggaagctgagagttacgtagaatcaaaataccattttgtcaacagttgaatgtgccttttcttatttgaattttggaaatggtttgtgtacatgtgatagggtaggatccatatctgatctattttttcagtgtattcatggttcttgctcgctatcagtaacagccaaagcatcaccacccatgaaccatgcctgtaacaggtttgagatttttcatcaaaggaagcgggcctgatccatagtgtaatct

SEQ ID NO: 22745 - protein, 400 aa, Zea mays subsp. mays
  peptide (1)..(400): Ceres Seq. ID no. 13586717
  misc_feature (41)..(400): Pfam Name: DUF760 Pfam Description: Protein of unknown function
  misc_feature (1)..(400): NCBI GI NO: 32489097 NR Description: OSJNBa0093F12.3
  misc_feature (41)..(400): NCBI GI NO: 18398302 NR Description: expressed protein [Arabidopsis thaliana]
  misc_feature (70)..(398): NCBI GI NO: 17064820 NR Description: Unknown protein [Arabidopsis thaliana]
  misc_feature (70)..(398): NCBI GI NO: 18401645 NR Description: expressed protein [Arabidopsis thaliana]
  misc_feature (79)..(398): NCBI GI NO: 28301943 NR Description: unknown protein
  misc_feature (90)..(398): NCBI GI NO: 15221185 NR Description: expressed protein [Arabidopsis thaliana]
  misc_feature (149)..(398): NCBI GI NO: 13561930 NR Description: unknown [Brassica napus]
  misc_feature (62)..(262): NCBI GI NO: 15221185 NR Description: expressed protein [Arabidopsis thaliana]
  misc_feature (281)..(392): NCBI GI NO: 32470642 NR Description: hypothetical protein [Solanum bulbocastanum]
  misc_feature (67)..(261): NCBI GI NO: 18397912 NR Description: expressed protein [Arabidopsis thaliana]
MPAWAEAALVLASPSPATASSTTSSCGARPRAAVGSVRLFCKGFPCSIRSKAGFQIHNYRTRMFKIKAKAESGDGYTRLAPLRFESPSGQLLIQILQSHPHLIPATVDQQLGNLQSEKSAQSEEASKVPQDLLYKRIAEVKEKERQNALEEIIYCWVTYRFMENDIYMTPALSPGGGPVRDISALPNQEDKLRNIHSADAFEMIQNHLNLIMGEKIASPPDTVVEISNLNLGKLYAASIMYGYFLKRVDERFQLEKTMKTLPPKPNQQIVFENLQPNPFWDMESLVQITPDGEEISLDDEKSNPNKLRSYVSQLDADTLQRYATIRSKEAVSLIEKQTQALFGRPDIKVLDDGSVNAKDGRMITITFTELNHLVLEAVAFGSFLWEAESYVESKYHFVNS

SEQ ID NO: 22746 - protein, 338 aa, Zea mays subsp. mays
  peptide (1)..(338): Ceres Seq. ID no. 13586718
  misc_feature (1)..(338): Pfam Name: DUF760 Pfam Description: Protein of unknown function
  misc_feature (1)..(338): NCBI GI NO: 32489097 NR Description: OSJNBa0093F12.3
  misc_feature (1)..(338): NCBI GI NO: 18398302 NR Description: expressed protein [Arabidopsis thaliana]
  misc_feature (8)..(336): NCBI GI NO: 17064820 NR Description: Unknown protein [Arabidopsis thaliana]
  misc_feature (8)..(336): NCBI GI NO: 18401645 NR Description: expressed protein [Arabidopsis thaliana]
  misc_feature (17)..(336): NCBI GI NO: 28301943 NR Description: unknown protein
  misc_feature (28)..(336): NCBI GI NO: 15221185 NR Description: expressed protein [Arabidopsis thaliana]
  misc_feature (87)..(336): NCBI GI NO: 13561930 NR Description: unknown [Brassica napus]
  misc_feature (1)..(200): NCBI GI NO: 15221185 NR Description: expressed protein [Arabidopsis thaliana]
  misc_feature (219)..(330): NCBI GI NO: 32470642 NR Description: hypothetical protein [Solanum bulbocastanum]
  misc_feature (5)..(199): NCBI GI NO: 18397912 NR Description: expressed protein [Arabidopsis thaliana]
MFKIKAKAESGDGYTRLAPLRFESPSGQLLIQILQSHPHLIPATVDQQLGNLQSEKSAQSEEASKVPQDLLYKRIAEVKEKERQNALEEIIYCWVTYRFMENDIYMTPALSPGGGPVRDISALPNQEDKLRNIHSADAFEMIQNHLNLIMGEKIASPPDTVVEISNLNLGKLYAASIMYGYFLKRVDERFQLEKTMKTLPPKPNQQIVFENLQPNPFWDMESLVQITPDGEEISLDDEKSNPNKLRSYVSQLDADTLQRYATIRSKEAVSLIEKQTQALFGRPDIKVLDDGSVNAKDGRMITITFTELNHLVLEAVAFGSFLWEAESYVESKYHFVNS

SEQ ID NO: 22747 - protein, 239 aa, Zea mays subsp. mays
  peptide (1)..(239): Ceres Seq. ID no. 13586719
  misc_feature (1)..(239): Pfam Name: DUF760 Pfam Description: Protein of unknown function
  misc_feature (1)..(239): NCBI GI NO: 32489097 NR Description: OSJNBa0093F12.3
  misc_feature (1)..(239): NCBI GI NO: 18398302 NR Description: expressed protein [Arabidopsis thaliana]
  misc_feature (1)..(237): NCBI GI NO: 17064820 NR Description: Unknown protein [Arabidopsis thaliana]
  misc_feature (1)..(237): NCBI GI NO: 18401645 NR Description: expressed protein [Arabidopsis thaliana]
  misc_feature (1)..(237): NCBI GI NO: 28301943 NR Description: unknown protein
  misc_feature (1)..(237): NCBI GI NO: 15221185 NR Description: expressed protein [Arabidopsis thaliana]
  misc_feature (1)..(237): NCBI GI NO: 13561930 NR Description: unknown [Brassica napus]
  misc_feature (1)..(101): NCBI GI NO: 15221185 NR Description: expressed protein [Arabidopsis thaliana]
  misc_feature (120)..(231): NCBI GI NO: 32470642 NR Description: hypothetical protein [Solanum bulbocastanum]
  misc_feature (1)..(100): NCBI GI NO: 18397912 NR Description: expressed protein [Arabidopsis thaliana]
MENDIYMTPALSPGGGPVRDISALPNQEDKLRNIHSADAFEMIQNHLNLIMGEKIASPPDTVVEISNLNLGKLYAASIMYGYFLKRVDERFQLEKTMKTLPPKPNQQIVFENLQPNPFWDMESLVQITPDGEEISLDDEKSNPNKLRSYVSQLDADTLQRYATIRSKEAVSLIEKQTQALFGRPDIKVLDDGSVNAKDGRMITITFTELNHLVLEAVAFGSFLWEAESYVESKYHFVNS

SEQ ID NO: 22748 - DNA, 832 bp, Zea mays subsp. mays
  misc_feature (1)..(832): Ceres Seq. ID no. 15177512
atcgaacagtggtattttttatttcttctaatgaaaatggttaccatttcagtcccttttatttcttttctactagaaatatttttcttgtaaggacctttaattgtataagtttttgttcacagtggattgcagatatctgaagccctcaaactgcagatggaggtccaaaagcggctgcacgaacagttagaagtacaaaggcagctgcagttacgaattgaggctcagggaaagtacctccagaagatcatcgaagagcagcagcgcttaacaggtgtgaaatctgaaactcctgctggaggtgcttctgtcactgtatcaagtgatcaattcccagactcggagcggactgagccctccacacctgcaccagcatccgagtctccaactcaagttggtgcttccaatagggacactggagaccgaactgaagcaaccaagagcacctgtcatggtgattctctttcccgcaacgagccactaacccctgattccaactgccagaacggttctcctgtcgctagtccaaaccatgaaagggcagccaagaggcagcgaggcagtggtactgaattcttagattctgaggctgagttttcccttccgcgccacatcttcgagtcgagttcaggctcagagttccaacaatactcaatgtcctactcaggacagtagcttctgatgttcacatcatctctgcaccgttgctagcttgttcagcacgatgcgcatggtccgtaggtctgggtaggttgatgtctcaaggagcgtgttgttggtaaacaaagctgtaggtgttcagtgattgtctacatggtaaaaataaaag

SEQ ID NO: 22749 - protein, 172 aa, Zea mays subsp. mays
  peptide (1)..(172): Ceres Seq. ID no. 15177513
  misc_feature (1)..(171): NCBI GI NO: 29647445 NR Description: putative transfactor
  misc_feature (1)..(134): NCBI GI NO: 15226170 NR Description: transfactor-related protein [Arabidopsis thaliana]
  misc_feature (1)..(107): NCBI GI NO: 18399836 NR Description: expressed protein [Arabidopsis thaliana]
  misc_feature (1)..(107): NCBI GI NO: 15795136 NR Description: transfactor-like protein [Arabidopsis thaliana]
  misc_feature (1)..(97): NCBI GI NO: 26452281 NR Description: putative transfactor [Arabidopsis thaliana]
  misc_feature (1)..(97): NCBI GI NO: 15229298 NR Description: transfactor -related [Arabidopsis thaliana]
  misc_feature (1)..(107): NCBI GI NO: 21536970 NR Description: transfactor-like protein [Arabidopsis thaliana]
  misc_feature (1)..(131): NCBI GI NO: 34394528 NR Description: transfactor-like protein
  misc_feature (1)..(81): NCBI GI NO: 4519671 NR Description: transfactor [Nicotiana tabacum]
  misc_feature (1)..(67): NCBI GI NO: 14596181 NR Description: transfactor-like protein [Arabidopsis thaliana]
MEVQKRLHEQLEVQRQLQLRIEAQGKYLQKIIEEQQRLTGVKSETPAGGASVTVSSDQFPDSERTEPSTPAPASESPTQVGASNRDTGDRTEATKSTCHGDSLSRNEPLTPDSNCQNGSPVASPNHERAAKRQRGSGTEFLDSEAEFSLPRHIFESSSGSEFQQYSMSYSGQ

SEQ ID NO: 22750 - DNA, 693 bp, Zea mays subsp. mays
  misc_feature (1)..(693): Ceres Seq. ID no. 13622871
gtctgtctccactctacagttgtgccgcctcgtctctctcctttcygctgcgcccccctatcgtgcgtgattctatccaggattctagggttcgttcgcctcgtctcgcgatggacaagggcagcgtcgtcgtgcccccggcccctgccgccgccgccgcgaagaaggccaagcgcttcgagatcaagaagtggaacgccgtctctctctgggcctgggacatcgtggtggacaactgcgccatctgccgcaaccacatcatggacctttgcatcgagtgccaggcgaaccaggcgagcgccaccagcgaggagtgcaccgtcgcttggggaatttgcaaccatgcattccacttccactgtatcagccgttggctaaagacccgtcaagtgtgccctcttgacaacagtgagtgggagttccagaagtatggtcactagagagaatggcttcggcgtggaattgcttcatgtttctcgtcgtttagcagtagtggttactgaatagattctggtgaacatgctatggatctgtaacgtttctgaagttctgccttacttgaagctgtaggcgaatactctggttatgccatattcgtccttcggggcgctgttgaacagctcttcctcacatgaaggtgtagacgaattactcagtttgcagaaattaattggtaattgtgggctataggct

SEQ ID NO: 22751 - protein, 145 aa, Zea mays subsp. mays
  peptide (1)..(145): Ceres Seq. ID no. 15219336
  misc_feature (112)..(133): Pfam Name: RING finger Pfam Description: Zinc finger, C3HC4 type
  misc_feature (37)..(145): NCBI GI NO: 19387246 NR Description: putative ring box-1 protein
  misc_feature (37)..(145): NCBI GI NO: 31747517 NR Description: ring box protein [Populus tomentosa]
  misc_feature (49)..(145): NCBI GI NO: 18420256 NR Description: ring-box protein - like [Arabidopsis thaliana]
  misc_feature (36)..(145): NCBI GI NO: 19067884 NR Description: hyperosmotic protein 21 [Salmo salar]
  misc_feature (36)..(145): NCBI GI NO: 37537963 NR Description: RING-box protein 1
  misc_feature (47)..(145): NCBI GI NO: 31210271 NR Description: ENSANGP00000010437 [Anopheles gambiae]
  misc_feature (36)..(145): NCBI GI NO: 7657508 NR Description: ring-box 1
  misc_feature (36)..(145): NCBI GI NO: 32425477 NR Description: RBX1 protein [Homo sapiens]
  misc_feature (48)..(145): NCBI GI NO: 18543187 NR Description: CG16982-PA [Drosophila melanogaster]
  misc_feature (51)..(145): NCBI GI NO: 20502055 NR Description: ZYP protein [Homo sapiens]
  misc_feature (15)..(15): Xaa is any aa, unknown or other
LSPLYSCAASSLSFXLRPPIVRDSIQDSRVRSPRLAMDKGSVVVPPAPAAAAAKKAKRFEIKKWNAVSLWAWDIVVDNCAICRNHIMDLCIECQANQASATSEECTVAWGICNHAFHFHCISRWLKTRQVCPLDNSEWEFQKYGH

SEQ ID NO: 22752 - protein, 125 aa, Zea mays subsp. mays
  peptide (1)..(125): Ceres Seq. ID no. 15219337
  misc_feature (41)..(125): NCBI GI NO: 12835172 NR Description: unnamed protein product [Mus musculus]
  misc_feature (16)..(16): Xaa is any aa, unknown or other
VCLHSTVVPPRLSPFXCAPLSCVILSRILGFVRLVSRWTRAASSCPRPLPPPPRRRPSASRSRSGTPSLSGPGTSWWTTAPSAATTSWTFASSARRTRRAPPARSAPSLGEFATMHSTSTVSAVG

SEQ ID NO: 22753 - protein, 109 aa, Zea mays subsp. mays
  peptide (1)..(109): Ceres Seq. ID no. 15219338
  misc_feature (76)..(97): Pfam Name: RING finger Pfam Description: Zinc finger, C3HC4 type
  misc_feature (1)..(109): NCBI GI NO: 19387246 NR Description: putative ring box-1 protein
  misc_feature (1)..(109): NCBI GI NO: 31747517 NR Description: ring box protein [Populus tomentosa]
  misc_feature (13)..(109): NCBI GI NO: 18420256 NR Description: ring-box protein - like [Arabidopsis thaliana]
  misc_feature (1)..(109): NCBI GI NO: 19067884 NR Description: hyperosmotic protein 21 [Salmo salar]
  misc_feature (1)..(109): NCBI GI NO: 37537963 NR Description: RING-box protein 1
  misc_feature (11)..(109): NCBI GI NO: 31210271 NR Description: ENSANGP00000010437 [Anopheles gambiae]
  misc_feature (1)..(109): NCBI GI NO: 7657508 NR Description: ring-box 1
  misc_feature (1)..(109): NCBI GI NO: 32425477 NR Description: RBX1 protein [Homo sapiens]
  misc_feature (12)..(109): NCBI GI NO: 18543187 NR Description: CG16982-PA [Drosophila melanogaster]
  misc_feature (15)..(109): NCBI GI NO: 20502055 NR Description: ZYP protein [Homo sapiens]
MDKGSVVVPPAPAAAAAKKAKRFEIKKWNAVSLWAWDIVVDNCAICRNHIMDLCIECQANQASATSEECTVAWGICNHAFHFHCISRWLKTRQVCPLDNSEWEFQKYGH

SEQ ID NO: 22754 - DNA, 790 bp, Zea mays subsp. mays
  misc_feature (1)..(790): Ceres Seq. ID no. 14305455
atttattctgcatttggctcctctgcgccatactcggcgtttcctgattcgcagcccttcctaaggtgggcacgcgaaaagggactcactgttggcatcgtcagcaatgcagaataccgctacaaagatgtaatcctgccagctttaggattgaatcagagctccgaatgggactttggggtgttctcaggtgtcgttggcgttgagaagccagacccaagaatttacaagatagcgctggagatggcaggaaacgtcgctccggaagaagcgctccacataggtgacagcatgcggaaggactacaccccagctaggagcatcgggatgcatgcgctgctcctggaccggttcaagactgccgacgctgagagctggaggcagtcaggcgccacggtgctcccggaccttgtcgccactcaagagtggctcaccaaggatcagaatgacgaacaggaggaaacagtggcagcacgagtgctgaagagaatgtccgaaaagctatagatgggggctttaaccatgcattaattctacgagtgttcctttatattatctagctatggactgaaggtccaaaagcaacttatgctgatgagaggttggtgacgattcttggctactggctactgtaattagcttgagctactattctggttgcagcatctgtggctgaacacgagtaccatatctgagtgtcataagtcatgttgcgaagaacatgagtagcatatttcaggtgccgtttggttcatatatttgtaatgtaatgggtaacggataacgttag

SEQ ID NO: 22755 - protein, 168 aa, Zea mays subsp. mays
  peptide (1)..(168): Ceres Seq. ID no. 14305456
  misc_feature (1)..(118): Pfam Name: Pfam Description:  haloacid dehalogenase-like hydrolase
  misc_feature (1)..(148): NCBI GI NO: 15241564 NR Description: haloacid dehalogenase-like hydrolase family
  misc_feature (81)..(168): NCBI GI NO: 1362147 NR Description: hypothetical protein
  misc_feature (1)..(115): NCBI GI NO: 27714603 NR Description: similar to RIKEN cDNA 2810435D12
  misc_feature (1)..(115): NCBI GI NO: 21312204 NR Description: RIKEN cDNA 2810435D12 [Mus musculus]
  misc_feature (1)..(119): NCBI GI NO: 17231587 NR Description: hypothetical protein [Nostoc sp. PCC 7120]
  misc_feature (11)..(125): NCBI GI NO: 11559439 NR Description: hypothetical protein [Thermus thermophilus]
  misc_feature (1)..(117): NCBI GI NO: 23130292 NR Description: hypothetical protein [Nostoc punctiforme]
  misc_feature (1)..(117): NCBI GI NO: 23041810 NR Description: hypothetical protein
  misc_feature (1)..(124): NCBI GI NO: 17553988 NR Description: predicted CDS
  misc_feature (1)..(159): NCBI GI NO: 7505080 NR Description: hypothetical protein K01G5
IYSAFGSSAPYSAFPDSQPFLRWAREKGLTVGIVSNAEYRYKDVILPALGLNQSSEWDFGVFSGVVGVEKPDPRIYKIALEMAGNVAPEEALHIGDSMRKDYTPARSIGMHALLLDRFKTADAESWRQSGATVLPDLVATQEWLTKDQNDEQEETVAARVLKRMSEKL

SEQ ID NO: 22756 - protein, 87 aa, Zea mays subsp. mays
  peptide (1)..(87): Ceres Seq. ID no. 14305457
  misc_feature (1)..(67): NCBI GI NO: 15241564 NR Description: haloacid dehalogenase-like hydrolase family
  misc_feature (1)..(87): NCBI GI NO: 1362147 NR Description: hypothetical protein
  misc_feature (1)..(34): NCBI GI NO: 27714603 NR Description: similar to RIKEN cDNA 2810435D12
  misc_feature (1)..(34): NCBI GI NO: 21312204 NR Description: RIKEN cDNA 2810435D12 [Mus musculus]
  misc_feature (1)..(38): NCBI GI NO: 17231587 NR Description: hypothetical protein [Nostoc sp. PCC 7120]
  misc_feature (1)..(44): NCBI GI NO: 11559439 NR Description: hypothetical protein [Thermus thermophilus]
  misc_feature (1)..(36): NCBI GI NO: 23130292 NR Description: hypothetical protein [Nostoc punctiforme]
  misc_feature (1)..(36): NCBI GI NO: 23041810 NR Description: hypothetical protein
  misc_feature (1)..(43): NCBI GI NO: 17553988 NR Description: predicted CDS
  misc_feature (1)..(78): NCBI GI NO: 7505080 NR Description: hypothetical protein K01G5
MAGNVAPEEALHIGDSMRKDYTPARSIGMHALLLDRFKTADAESWRQSGATVLPDLVATQEWLTKDQNDEQEETVAARVLKRMSEKL

SEQ ID NO: 22757 - DNA, 1414 bp, Zea mays subsp. mays
  misc_feature (1)..(1414): Ceres Seq. ID no. 15224940
aattgggttccgggccccccctcgagtcagctacgtaggccccccccccccccaaaccttgtaaaagcattaacaaacttatggaatactctggatactcatatggaagagcgtcaaccttatgggcaaattaaggtactcgcaatgacttcagtaaacggtatgctaggtcctggaagcctcacacttgagacaattcaacaggtaaaagaccagagattaaacttcaaagcagaatgaattatgtcagacaagtaactgtcttgaagctgataggttattagtttcaccatgttgaataaaataggttgaaactgaagttcagcggctgaatcagttgaaggcaagcaaaatggaagagctattcgtaaagaagagagcagaagtcgacgaaatttgcaagaaatcacacatgggcatgccttatcaaacagaaatggacaagataatgaatctgataatgtcaggagatgtggtccatgatgatttattaaagacaatggatgaatatatatacagagcaaaagaggaggccacaagccggaaagacataatggataaggttgacaaatggatggcttcatgggatgaagaacgatggctagaagaatacagcagggtgcactagctgcctgatgaccatagccatggacattgccttctctagaactttaatttttactatgttgattataattttccacaggatgaccgaaggtactcagtaagcagaggagcgcacaagcacttgaaaagggcagagcgtgctcgaattatagttaacaaaattccaggcttggtagaacagttaatggtcaagacacaattctgggaacaggagagaaacaagatcttctactatgatgagctcccgcttctggcaatgctgaaagactacatgttcacgctcaaagaaaaagaagaagagaaatacaggcaacgggagaataaaaagatacagactctacttgtaaagaggcatgagaattcaataatgttaaggcccaacacaagcttcagccgtccatcaagcagaggcttcaatacgagtcctggctccacatccatctggagcagccaagtttctgcaaaagttcagctgcctgactcagagaactccccagctgaaaaagatatgcgtgcaaaaataattaggaacagaggtatgcagggcattttgggaaataacagaagctgttcaatctctcatgaagataaagcagaagtctccacagtgaagcaagacatttcaccaatttaattttttctcactttaaatttctacagaaatttgtctgcctgacgtgaagttgcaacagcccccttaatctattagataagtgaagaaaaatatgtttgtatgcagcttacaccatattcatatatttatttatgtatgattcattaaaatgtc

SEQ ID NO: 22758 - protein, 149 aa, Zea mays subsp. mays
  peptide (1)..(149): Ceres Seq. ID no. 15224941
  misc_feature (1)..(85): Pfam Name: MAP65/ASE1 family Pfam Description: Microtubule associated protein
  misc_feature (1)..(85): NCBI GI NO: 15217774 NR Description: microtubule associated protein (MAP65/ASE1) family
  misc_feature (1)..(102): NCBI GI NO: 11558252 NR Description: microtubule-associated protein MAP65-1a
  misc_feature (1)..(73): NCBI GI NO: 28200790 NR Description: 65kD microtubule associated protein
  misc_feature (1)..(86): NCBI GI NO: 30677965 NR Description: microtubule associated protein (MAP65/ASE1) family
  misc_feature (1)..(86): NCBI GI NO: 25410943 NR Description: hypothetical protein At2g01910
  misc_feature (1)..(81): NCBI GI NO: 15240485 NR Description: microtubule associated protein (MAP65/ASE1) family
  misc_feature (1)..(137): NCBI GI NO: 11558256 NR Description: microtubule-associated protein MAP65-1c
  misc_feature (1)..(137): NCBI GI NO: 11558254 NR Description: microtubule-associated protein MAP65-1b
  misc_feature (1)..(86): NCBI GI NO: 21539547 NR Description: unknown protein [Arabidopsis thaliana]
  misc_feature (1)..(86): NCBI GI NO: 8778239 NR Description: F10B6.9 [Arabidopsis thaliana]
MVKTQFWEQERNKIFYYDELPLLAMLKDYMFTLKEKEEEKYRQRENKKIQTLLVKRHENSIMLRPNTSFSRPSSRGFNTSPGSTSIWSSQVSAKVQLPDSENSPAEKDMRAKIIRNRGMQGILGNNRSCSISHEDKAEVSTVKQDISPI

SEQ ID NO: 22759 - protein, 125 aa, Zea mays subsp. mays
  peptide (1)..(125): Ceres Seq. ID no. 15224942
  misc_feature (1)..(61): Pfam Name: MAP65/ASE1 family Pfam Description: Microtubule associated protein
  misc_feature (1)..(61): NCBI GI NO: 15217774 NR Description: microtubule associated protein (MAP65/ASE1) family
  misc_feature (1)..(78): NCBI GI NO: 11558252 NR Description: microtubule-associated protein MAP65-1a
  misc_feature (1)..(49): NCBI GI NO: 28200790 NR Description: 65kD microtubule associated protein
  misc_feature (1)..(62): NCBI GI NO: 30677965 NR Description: microtubule associated protein (MAP65/ASE1) family
  misc_feature (1)..(62): NCBI GI NO: 25410943 NR Description: hypothetical protein At2g01910
  misc_feature (1)..(57): NCBI GI NO: 15240485 NR Description: microtubule associated protein (MAP65/ASE1) family
  misc_feature (1)..(113): NCBI GI NO: 11558256 NR Description: microtubule-associated protein MAP65-1c
  misc_feature (1)..(113): NCBI GI NO: 11558254 NR Description: microtubule-associated protein MAP65-1b
  misc_feature (1)..(62): NCBI GI NO: 21539547 NR Description: unknown protein [Arabidopsis thaliana]
  misc_feature (1)..(62): NCBI GI NO: 8778239 NR Description: F10B6.9 [Arabidopsis thaliana]
MLKDYMFTLKEKEEEKYRQRENKKIQTLLVKRHENSIMLRPNTSFSRPSSRGFNTSPGSTSIWSSQVSAKVQLPDSENSPAEKDMRAKIIRNRGMQGILGNNRSCSISHEDKAEVSTVKQDISPI

SEQ ID NO: 22760 - protein, 120 aa, Zea mays subsp. mays
  peptide (1)..(120): Ceres Seq. ID no. 15224943
  misc_feature (1)..(56): Pfam Name: MAP65/ASE1 family Pfam Description: Microtubule associated protein
  misc_feature (1)..(56): NCBI GI NO: 15217774 NR Description: microtubule associated protein (MAP65/ASE1) family
  misc_feature (1)..(73): NCBI GI NO: 11558252 NR Description: microtubule-associated protein MAP65-1a
  misc_feature (1)..(44): NCBI GI NO: 28200790 NR Description: 65kD microtubule associated protein
  misc_feature (1)..(57): NCBI GI NO: 30677965 NR Description: microtubule associated protein (MAP65/ASE1) family
  misc_feature (1)..(57): NCBI GI NO: 25410943 NR Description: hypothetical protein At2g01910
  misc_feature (1)..(52): NCBI GI NO: 15240485 NR Description: microtubule associated protein (MAP65/ASE1) family
  misc_feature (1)..(108): NCBI GI NO: 11558256 NR Description: microtubule-associated protein MAP65-1c
  misc_feature (1)..(108): NCBI GI NO: 11558254 NR Description: microtubule-associated protein MAP65-1b
  misc_feature (1)..(57): NCBI GI NO: 21539547 NR Description: unknown protein [Arabidopsis thaliana]
  misc_feature (1)..(57): NCBI GI NO: 8778239 NR Description: F10B6.9 [Arabidopsis thaliana]
MFTLKEKEEEKYRQRENKKIQTLLVKRHENSIMLRPNTSFSRPSSRGFNTSPGSTSIWSSQVSAKVQLPDSENSPAEKDMRAKIIRNRGMQGILGNNRSCSISHEDKAEVSTVKQDISPI

SEQ ID NO: 22761 - DNA, 963 bp, Zea mays subsp. mays
  misc_feature (1)..(963): Ceres Seq. ID no. 15178498
gtgtccatttcaactctgctccatccatatcccattcccatcacgattcacgaacccaccaaaacatcctctccgtccccggtacatgcacagaaccagagtctgcaagagaagaaggccaatgggttcgtgcgtctcccgctccggcgcgatgtcgacggcggcggagtccgtgcacgcgctcacggccaaggtcgtggacctcgacggctccgtggcgcagttcgcgccgcccgtcacggcgcaagaggccctggcggccaccgccagcggagcgcagccctcgtcgtcgtcgcgcttcctctgctgctccgacgcgctggacttcgacgcgcccatcagcgcgctggccgcgcacgacgcgctgcacccggggcagctctacttcgccctgccagcgtccatgctcggccggccgctgtccgcccagggcatggccgcgctcgccgtcaaggcctgcgcggctctggggacagcgccggtcggcagcgtcccgtcgtcgtcgctggacagaagcgaggcccgtgcggccagcagctggccgcagcggtggcagtccacgggacgagtcgcgccgctcgtcgtcgtgcacgctgacgcgcacggggagtggaagagttacccggtgcacggcgggtacaaggcggcgcgtgttggcggcggcggcggcggcggcgaccatacggtggggaagacgagaaacggagtcggttacaagggtatcgcccgtgaccttgcacccattcagaggctaagcgtgatcgtggaaggagcagagctagtgagtgatccattcattgatcagtattcagtagtactagtaaactagtacggagtagtttgatcaagccggcaatttagtttacctgctcccctgttccgtttgagaggagatcggtgtactgtacgtgtacaatatgttttcaataaacttttgattctttggaaaaaaaaaaaaaaaaa

SEQ ID NO: 22762 - protein, 275 aa, Zea mays subsp. mays
  peptide (1)..(275): Ceres Seq. ID no. 15178499
  misc_feature (54)..(167): NCBI GI NO: 34904464 NR Description: OSJNBa0086P08.11
  misc_feature (41)..(256): NCBI GI NO: 34394505 NR Description: hypothetical protein
  misc_feature (41)..(183): NCBI GI NO: 31126784 NR Description: hypothetical protein
  misc_feature (41)..(156): NCBI GI NO: 21592697 NR Description: unknown [Arabidopsis thaliana]
  misc_feature (41)..(156): NCBI GI NO: 15240014 NR Description: expressed protein [Arabidopsis thaliana]
  misc_feature (63)..(193): NCBI GI NO: 5441883 NR Description: Similar to Arabidopsis thaliana BAC genomicsequence
  misc_feature (41)..(261): NCBI GI NO: 13699079 NR Description: TMV response-related gene product
  misc_feature (41)..(159): NCBI GI NO: 18411155 NR Description: expressed protein [Arabidopsis thaliana]
  misc_feature (41)..(159): NCBI GI NO: 14596201 NR Description: Unknown protein [Arabidopsis thaliana]
  misc_feature (41)..(160): NCBI GI NO: 5441882 NR Description: Similar to Arabidopsis thaliana DNA contigfragment
CPFQLCSIHIPFPSRFTNPPKHPLRPRYMHRTRVCKRRRPMGSCVSRSGAMSTAAESVHALTAKVVDLDGSVAQFAPPVTAQEALAATASGAQPSSSSRFLCCSDALDFDAPISALAAHDALHPGQLYFALPASMLGRPLSAQGMAALAVKACAALGTAPVGSVPSSSLDRSEARAASSWPQRWQSTGRVAPLVVVHADAHGEWKSYPVHGGYKAARVGGGGGGGDHTVGKTRNGVGYKGIARDLAPIQRLSVIVEGAELVSDPFIDQYSVVLVN

SEQ ID NO: 22763 - protein, 250 aa, Zea mays subsp. mays
  peptide (1)..(250): Ceres Seq. ID no. 15178500
  misc_feature (12)..(239): NCBI GI NO: 5821151 NR Description: RNA binding protein [Homo sapiens]
  misc_feature (35)..(239): NCBI GI NO: 5821151 NR Description: RNA binding protein [Homo sapiens]
  misc_feature (6)..(245): NCBI GI NO: 25143299 NR Description: pre-mRNA splicing SR protein related (68
  misc_feature (12)..(239): NCBI GI NO: 6634015 NR Description: KIAA0324 protein [Homo sapiens]
  misc_feature (12)..(239): NCBI GI NO: 7512967 NR Description: hypothetical protein KIAA0324 - human (fragment)
  misc_feature (35)..(239): NCBI GI NO: 6634015 NR Description: KIAA0324 protein [Homo sapiens]
  misc_feature (35)..(239): NCBI GI NO: 7512967 NR Description: hypothetical protein KIAA0324 - human (fragment)
  misc_feature (5)..(244): NCBI GI NO: 28972153 NR Description: mKIAA0324 protein [Mus musculus]
  misc_feature (12)..(239): NCBI GI NO: 19923466 NR Description: splicing coactivator subunit SRm300
  misc_feature (35)..(239): NCBI GI NO: 19923466 NR Description: splicing coactivator subunit SRm300
VHFNSAPSISHSHHDSRTHQNILSVPGTCTEPESAREEGQWVRASPAPARCRRRRSPCTRSRPRSWTSTAPWRSSRRPSRRKRPWRPPPAERSPRRRRASSAAPTRWTSTRPSARWPRTTRCTRGSSTSPCQRPCSAGRCPPRAWPRSPSRPARLWGQRRSAASRRRRWTEARPVRPAAGRSGGSPRDESRRSSSCTLTRTGSGRVTRCTAGTRRRVLAAAAAAATIRWGRRETESVTRVSPVTLHPFRG

SEQ ID NO: 22764 - protein, 247 aa, Zea mays subsp. mays
  peptide (1)..(247): Ceres Seq. ID no. 15178501
  misc_feature (26)..(139): NCBI GI NO: 34904464 NR Description: OSJNBa0086P08.11
  misc_feature (13)..(228): NCBI GI NO: 34394505 NR Description: hypothetical protein
  misc_feature (13)..(155): NCBI GI NO: 31126784 NR Description: hypothetical protein
  misc_feature (13)..(128): NCBI GI NO: 21592697 NR Description: unknown [Arabidopsis thaliana]
  misc_feature (13)..(128): NCBI GI NO: 15240014 NR Description: expressed protein [Arabidopsis thaliana]
  misc_feature (35)..(165): NCBI GI NO: 5441883 NR Description: Similar to Arabidopsis thaliana BAC genomicsequence
  misc_feature (13)..(233): NCBI GI NO: 13699079 NR Description: TMV response-related gene product
  misc_feature (13)..(131): NCBI GI NO: 18411155 NR Description: expressed protein [Arabidopsis thaliana]
  misc_feature (13)..(131): NCBI GI NO: 14596201 NR Description: Unknown protein [Arabidopsis thaliana]
  misc_feature (13)..(132): NCBI GI NO: 5441882 NR Description: Similar to Arabidopsis thaliana DNA contigfragment
MHRTRVCKRRRPMGSCVSRSGAMSTAAESVHALTAKVVDLDGSVAQFAPPVTAQEALAATASGAQPSSSSRFLCCSDALDFDAPISALAAHDALHPGQLYFALPASMLGRPLSAQGMAALAVKACAALGTAPVGSVPSSSLDRSEARAASSWPQRWQSTGRVAPLVVVHADAHGEWKSYPVHGGYKAARVGGGGGGGDHTVGKTRNGVGYKGIARDLAPIQRLSVIVEGAELVSDPFIDQYSVVLVN

SEQ ID NO: 22765 - DNA, 1202 bp, Zea mays subsp. mays
  misc_feature (1)..(1202): Ceres Seq. ID no. 12388689
actgctcagcagtcagtcagcactcgccacccacacgcctccgctccgcccacgggtccactccaactctccgatctccaggaatccgcggctgaggcgccggcgatggcggctcccatggtcgacgccgaatacctgcgccaggtcgacagggcgcgccgccacctccgcgccctcatctccaacaagggatgcgccccgatcatgctccgcctcgcatggcatgatgctggaacttatgacctgaagacaaaaactggtggtgcaaatggttcgattagatatgaagaagagtacactcatggttcaaatgctggtttaaagattgctatcgatctccttgagcctatcaaagcaaagaatccaaagataacatatgcagacctgtatcagcttgctggagtggttgcagtcgaagtgactggggggccaactgttgaatttattcctggcagacgtgattcgtcggtgtgcccccgtgaagggcgtctgccagatgctaagaaaggtgcaccacatctgagggacatcttttatcggatgggcttatcggacaaagatattgtagctctatcagggggacatactctgggaagggctcaccctgagaggtctggattcgatggtgcctggacaaaggagcctcttaagtttgataactcatactttcttgagctgttgaatgaggaatctgagggacttttaaagctcccaactgacaaggcactgttatcagatcctgaatttaggcgctatgtggagctctatgcaaaggatgaagatgcgttcttcaaagattatgctgaatcacacaagaaactctctgagcttggcttcacgcctcgcagcacagcaccatccaaatcagatcttccaaccgccgccgtgcttgcacagagtgcctttggggtagcagttgctgcagccgtagttatcgctggctacttgtacgaggcttccaagaaggccaagtagagggcgaagttcttctccacatggctttgctttagtaagtctgaagatcgaataacaggaccatatctgaagatcgaataacggatcatataaatgagttactcggaaaatgttctgaaatccttacgaacagaacgttgccttcatgtttacactgtactcatgagtcacagtgatatggagatggcatagcctactattggaagtatatgcattctgtgtaatcc

SEQ ID NO: 22766 - protein, 324 aa, Zea mays subsp. mays
  peptide (1)..(324): Ceres Seq. ID no. 12388690
  misc_feature (52)..(259): Pfam Name: Pfam Description:  Peroxidase
  misc_feature (36)..(324): NCBI GI NO: 15080682 NR Description: peroxisome type ascorbate peroxidase
  misc_feature (36)..(324): NCBI GI NO: 7484726 NR Description: L-ascorbate peroxidase (EC 1
  misc_feature (36)..(324): NCBI GI NO: 5442410 NR Description: ascorbate peroxidase [Zantedeschia aethiopica]
  misc_feature (36)..(324): NCBI GI NO: 15236239 NR Description: ascorbate peroxidase, putative
  misc_feature (36)..(324): NCBI GI NO: 15430584 NR Description: peroxisomal ascorbate peroxidase
  misc_feature (36)..(324): NCBI GI NO: 17066705 NR Description: ascorbate peroxidase [Capsicum annuum]
  misc_feature (36)..(324): NCBI GI NO: 3288066 NR Description: ascorbate peroxidase [Arabidopsis thaliana]
  misc_feature (37)..(322): NCBI GI NO: 38344123 NR Description: OSJNBb0072N21.2
  misc_feature (37)..(322): NCBI GI NO: 37030052 NR Description: putative peroxisome-bound ascorbate peroxidase
  misc_feature (39)..(324): NCBI GI NO: 4835909 NR Description: cytosolic ascorbate peroxidase
TAQQSVSTRHPHASAPPTGPLQLSDLQESAAEAPAMAAPMVDAEYLRQVDRARRHLRALISNKGCAPIMLRLAWHDAGTYDLKTKTGGANGSIRYEEEYTHGSNAGLKIAIDLLEPIKAKNPKITYADLYQLAGVVAVEVTGGPTVEFIPGRRDSSVCPREGRLPDAKKGAPHLRDIFYRMGLSDKDIVALSGGHTLGRAHPERSGFDGAWTKEPLKFDNSYFLELLNEESEGLLKLPTDKALLSDPEFRRYVELYAKDEDAFFKDYAESHKKLSELGFTPRSTAPSKSDLPTAAVLAQSAFGVAVAAAVVIAGYLYEASKKAK

SEQ ID NO: 22767 - protein, 289 aa, Zea mays subsp. mays
  peptide (1)..(289): Ceres Seq. ID no. 12388691
  misc_feature (17)..(224): Pfam Name: Pfam Description:  Peroxidase
  misc_feature (1)..(289): NCBI GI NO: 15080682 NR Description: peroxisome type ascorbate peroxidase
  misc_feature (1)..(289): NCBI GI NO: 7484726 NR Description: L-ascorbate peroxidase (EC 1
  misc_feature (1)..(289): NCBI GI NO: 5442410 NR Description: ascorbate peroxidase [Zantedeschia aethiopica]
  misc_feature (1)..(289): NCBI GI NO: 15236239 NR Description: ascorbate peroxidase, putative
  misc_feature (1)..(289): NCBI GI NO: 15430584 NR Description: peroxisomal ascorbate peroxidase
  misc_feature (1)..(289): NCBI GI NO: 17066705 NR Description: ascorbate peroxidase [Capsicum annuum]
  misc_feature (1)..(289): NCBI GI NO: 3288066 NR Description: ascorbate peroxidase [Arabidopsis thaliana]
  misc_feature (2)..(287): NCBI GI NO: 38344123 NR Description: OSJNBb0072N21.2
  misc_feature (2)..(287): NCBI GI NO: 37030052 NR Description: putative peroxisome-bound ascorbate peroxidase
  misc_feature (4)..(289): NCBI GI NO: 4835909 NR Description: cytosolic ascorbate peroxidase
MAAPMVDAEYLRQVDRARRHLRALISNKGCAPIMLRLAWHDAGTYDLKTKTGGANGSIRYEEEYTHGSNAGLKIAIDLLEPIKAKNPKITYADLYQLAGVVAVEVTGGPTVEFIPGRRDSSVCPREGRLPDAKKGAPHLRDIFYRMGLSDKDIVALSGGHTLGRAHPERSGFDGAWTKEPLKFDNSYFLELLNEESEGLLKLPTDKALLSDPEFRRYVELYAKDEDAFFKDYAESHKKLSELGFTPRSTAPSKSDLPTAAVLAQSAFGVAVAAAVVIAGYLYEASKKAK

SEQ ID NO: 22768 - protein, 285 aa, Zea mays subsp. mays
  peptide (1)..(285): Ceres Seq. ID no. 12388692
  misc_feature (13)..(220): Pfam Name: Pfam Description:  Peroxidase
  misc_feature (1)..(285): NCBI GI NO: 15080682 NR Description: peroxisome type ascorbate peroxidase
  misc_feature (1)..(285): NCBI GI NO: 7484726 NR Description: L-ascorbate peroxidase (EC 1
  misc_feature (1)..(285): NCBI GI NO: 5442410 NR Description: ascorbate peroxidase [Zantedeschia aethiopica]
  misc_feature (1)..(285): NCBI GI NO: 15236239 NR Description: ascorbate peroxidase, putative
  misc_feature (1)..(285): NCBI GI NO: 15430584 NR Description: peroxisomal ascorbate peroxidase
  misc_feature (1)..(285): NCBI GI NO: 17066705 NR Description: ascorbate peroxidase [Capsicum annuum]
  misc_feature (1)..(285): NCBI GI NO: 3288066 NR Description: ascorbate peroxidase [Arabidopsis thaliana]
  misc_feature (1)..(283): NCBI GI NO: 38344123 NR Description: OSJNBb0072N21.2
  misc_feature (1)..(283): NCBI GI NO: 37030052 NR Description: putative peroxisome-bound ascorbate peroxidase
  misc_feature (1)..(285): NCBI GI NO: 4835909 NR Description: cytosolic ascorbate peroxidase
MVDAEYLRQVDRARRHLRALISNKGCAPIMLRLAWHDAGTYDLKTKTGGANGSIRYEEEYTHGSNAGLKIAIDLLEPIKAKNPKITYADLYQLAGVVAVEVTGGPTVEFIPGRRDSSVCPREGRLPDAKKGAPHLRDIFYRMGLSDKDIVALSGGHTLGRAHPERSGFDGAWTKEPLKFDNSYFLELLNEESEGLLKLPTDKALLSDPEFRRYVELYAKDEDAFFKDYAESHKKLSELGFTPRSTAPSKSDLPTAAVLAQSAFGVAVAAAVVIAGYLYEASKKAK

SEQ ID NO: 22769 - DNA, 751 bp, Zea mays subsp. mays
  misc_feature (1)..(751): Ceres Seq. ID no. 12634627
ggtgggttgtggcctcctatccttgcacgcacacgcaaacgcatcccatcctgtcctcgcgttactactagttagttagagagacagagaggatcgatctgctggcggcgtctaagctggagaaaggcggcgccaccgccgagggcgacgagataggcatcgacccagcggcggagactccggagcagcgcaacaagttcctggtcctccgcctgtacgaggcgctcaacgcccgggaccacgccgccgtgcagtcgctgctggcgcccgacctggagtggtggttccatggcccgcccaagcaccagcagcacatgatgcgcctcctgacaaccaccaccaccaccaccaccggcagcttccgcttcgtgccccgctccgtggacgccctcgccgcctcgtccggcaccgtgatcgccgagggccacgagaggggttgctactgggtgcacgcctggaccgtgggacccgatggggtgatcacccagctccgtgagtacttcaacaccgacctcaccgtcacccgcctcgccgccgccgtcgccgccaagtgcgtctggcagagccgccgccccgacagcgccaccaactccctgccgggactcctgctcgccctctgatcactctgagggataaattaaataccatctctatctatatactacgtatcatccttgtcgtcgtcagtcagtcagtgcaaccgtgtgcatgtatctatctatgtatctacgtattgtatttgtatcccatc

SEQ ID NO: 22770 - protein, 101 aa, Zea mays subsp. mays
  peptide (1)..(101): Ceres Seq. ID no. 12634628
  misc_feature (1)..(101): NCBI GI NO: 34898184 NR Description: P0034A04.2
  misc_feature (1)..(101): NCBI GI NO: 15228414 NR Description: unknown protein; protein id: At3g10980.1
  misc_feature (1)..(101): NCBI GI NO: 15241041 NR Description: putative protein; protein id: At5g01740
  misc_feature (1)..(101): NCBI GI NO: 33146884 NR Description: unknown protein
  misc_feature (2)..(101): NCBI GI NO: 139780 NR Description: WOUND-INDUCED PROTEIN 1
  misc_feature (2)..(101): NCBI GI NO: 15028339 NR Description: unknown protein [Arabidopsis thaliana]
  misc_feature (5)..(101): NCBI GI NO: 10241935 NR Description: elicitor inducible protein [Nicotiana tabacum]
  misc_feature (4)..(74): NCBI GI NO: 4574320 NR Description: wound-induced protein WI12
MMRLLTTTTTTTTGSFRFVPRSVDALAASSGTVIAEGHERGCYWVHAWTVGPDGVITQLREYFNTDLTVTRLAAAVAAKCVWQSRRPDSATNSLPGLLLAL

SEQ ID NO: 22771 - protein, 100 aa, Zea mays subsp. mays
  peptide (1)..(100): Ceres Seq. ID no. 12634629
  misc_feature (1)..(100): NCBI GI NO: 34898184 NR Description: P0034A04.2
  misc_feature (1)..(100): NCBI GI NO: 15228414 NR Description: unknown protein; protein id: At3g10980.1
  misc_feature (1)..(100): NCBI GI NO: 15241041 NR Description: putative protein; protein id: At5g01740
  misc_feature (1)..(100): NCBI GI NO: 33146884 NR Description: unknown protein
  misc_feature (1)..(100): NCBI GI NO: 139780 NR Description: WOUND-INDUCED PROTEIN 1
  misc_feature (1)..(100): NCBI GI NO: 15028339 NR Description: unknown protein [Arabidopsis thaliana]
  misc_feature (4)..(100): NCBI GI NO: 10241935 NR Description: elicitor inducible protein [Nicotiana tabacum]
  misc_feature (3)..(73): NCBI GI NO: 4574320 NR Description: wound-induced protein WI12
MRLLTTTTTTTTGSFRFVPRSVDALAASSGTVIAEGHERGCYWVHAWTVGPDGVITQLREYFNTDLTVTRLAAAVAAKCVWQSRRPDSATNSLPGLLLAL

SEQ ID NO: 22772 - DNA, 1150 bp, Zea mays subsp. mays
  misc_feature (1)..(1150): Ceres Seq. ID no. 14302154
ggctagtggataagctaagctctccctctcgctgagctggctgttgctcttccccaaccccgcgcgcgggggagcgataaaccctagtcttcgccgtcgtcgcaggaggacccgcgatgtcgcacttcgggaggtcaggcccgccggacatccgcgacaccttctcgctcctcgtcctcaacatcagcttccgcaccacggccgacgacctcttcccgctcttcgagcgctacggcaaggtcgtcgacgtcttcatcccgagggacaggaggaccggggactcgaggggtttcgcgttcgtgcggtacaagtacgccgacgaggcgcagaaggctatagatcggctcgatggccgtgatgtggatgggagaaacatcatggtgcagtttgcaaagtacggccccaatgctgagccaatccgcaaaggaagggttaaagagggggttgagaaatcacaagacagatcaagaagccgcagtccaaggccaaggcacagagatagagatcatagaagccaaagtcgcagcaggagcagagaaaggcatgtccgtgatagagacaggggctatcgtcgtcggagcagaagtagaagccaaagtcttagttcaagccctgacaacagaagtcatcatagagcaagagatgatgataggcgcaagagcatgagtaagagcaggagcaggagcacaagtagaagccgctcatactatagtgcttcacctgcccggcacagtgctagccctcgcaagagcccaccgccacagaggagccccactcctgcaaagcatgccaatggaaaagattcacctctgtcacgctgtgtttctccattaccgaagcgtgcaacctcccgcagcccaggcagtgatggcaaggagtaaagcttgctgatttggtgatgcctagaaaacagccttctcacggagtcacgggattgcagaaccttgagaaggttgattgagcacaatggaagtagcagtctgcaatcaaccgcgatccaaggttgctagttcttttaatggcttatagaattgtgttttccagttgtcaaaaatatgcgctggtttgtatttttggcatatactgtgtttttatacccttgcactgcatcatcatctactttatatatgcatcagtttctcgaaaccat

SEQ ID NO: 22773 - protein, 254 aa, Zea mays subsp. mays
  peptide (1)..(254): Ceres Seq. ID no. 14302155
  misc_feature (18)..(89): Pfam Name: a.k.a. RRM, RBD, or RNP domain Pfam Description: RNA recognition motif.
  misc_feature (1)..(248): NCBI GI NO: 7446336 NR Description: probable arginine/serine-rich splicing factor -alfalfa
  misc_feature (1)..(253): NCBI GI NO: 33146621 NR Description: putative splicing factor, arginine/serine-rich 2
  misc_feature (1)..(251): NCBI GI NO: 9843653 NR Description: splicing factor SC35 [Arabidopsis thaliana]
  misc_feature (1)..(251): NCBI GI NO: 15237641 NR Description: arginine/serine-rich splicing factor SC35
  misc_feature (4)..(219): NCBI GI NO: 266991 NR Description: Splicing factor, arginine/serine-rich 2
  misc_feature (4)..(219): NCBI GI NO: 6755478 NR Description: splicing factor, arginine/serine-rich 2
  misc_feature (4)..(213): NCBI GI NO: 28279759 NR Description: Similar to splicing factor, arginine/serine-rich 2
  misc_feature (4)..(219): NCBI GI NO: 4506899 NR Description: splicing factor, arginine/serine-rich 2
  misc_feature (4)..(219): NCBI GI NO: 28175397 NR Description: Unknown (protein for MGC:53177) [Xenopus laevis]
  misc_feature (4)..(219): NCBI GI NO: 39794351 NR Description: Unknown (protein for MGC:75633)
MSHFGRSGPPDIRDTFSLLVLNISFRTTADDLFPLFERYGKVVDVFIPRDRRTGDSRGFAFVRYKYADEAQKAIDRLDGRDVDGRNIMVQFAKYGPNAEPIRKGRVKEGVEKSQDRSRSRSPRPRHRDRDHRSQSRSRSRERHVRDRDRGYRRRSRSRSQSLSSSPDNRSHHRARDDDRRKSMSKSRSRSTSRSRSYYSASPARHSASPRKSPPPQRSPTPAKHANGKDSPLSRCVSPLPKRATSRSPGSDGKE

SEQ ID NO: 22774 - protein, 167 aa, Zea mays subsp. mays
  peptide (1)..(167): Ceres Seq. ID no. 14302156
  misc_feature (1)..(161): NCBI GI NO: 7446336 NR Description: probable arginine/serine-rich splicing factor -alfalfa
  misc_feature (1)..(166): NCBI GI NO: 33146621 NR Description: putative splicing factor, arginine/serine-rich 2
  misc_feature (1)..(164): NCBI GI NO: 9843653 NR Description: splicing factor SC35 [Arabidopsis thaliana]
  misc_feature (1)..(164): NCBI GI NO: 15237641 NR Description: arginine/serine-rich splicing factor SC35
  misc_feature (1)..(132): NCBI GI NO: 266991 NR Description: Splicing factor, arginine/serine-rich 2
  misc_feature (1)..(132): NCBI GI NO: 6755478 NR Description: splicing factor, arginine/serine-rich 2
  misc_feature (1)..(126): NCBI GI NO: 28279759 NR Description: Similar to splicing factor, arginine/serine-rich 2
  misc_feature (1)..(132): NCBI GI NO: 4506899 NR Description: splicing factor, arginine/serine-rich 2
  misc_feature (1)..(132): NCBI GI NO: 28175397 NR Description: Unknown (protein for MGC:53177) [Xenopus laevis]
  misc_feature (1)..(132): NCBI GI NO: 39794351 NR Description: Unknown (protein for MGC:75633)
MVQFAKYGPNAEPIRKGRVKEGVEKSQDRSRSRSPRPRHRDRDHRSQSRSRSRERHVRDRDRGYRRRSRSRSQSLSSSPDNRSHHRARDDDRRKSMSKSRSRSTSRSRSYYSASPARHSASPRKSPPPQRSPTPAKHANGKDSPLSRCVSPLPKRATSRSPGSDGKE

SEQ ID NO: 22775 - DNA, 1145 bp, Zea mays subsp. mays
  misc_feature (1)..(1145): Ceres Seq. ID no. 14305417
gccgatctaacgggaacgcgtctcacagcttccacgcgactgcaccgtggcacccgaggctcgcccccgctgagccagcggagcgaatctccatggcctccacatcctcctccaggtacgcgaaacatcgtcggatcggagaggacgatgagtcggaggaggttgaggaggaggccgaagaggagcttgagcggttcgatgatttcaccattgcttcgtcatgggaaaagtttatatctgagatagaggctatttgccgtcaatggcttgcagatggcgcaaagatcttaatgcaaaaaggtgcagagggtgttcctccttttgaaaacttatatatgatcaagcgtgaattgaagcatgggaaaagagtctattctatggagtaccatttcatgaaatctgtaaaaggtcaaaactcatattgggacgatgatacacatagcatgcagctctcatttggagttgatgagtttttgataattgctccgctgagtgccagtggtgtgatcctcgatgatccagaatcaactaagcttttgagttctgtagcaattgctctttctaattgtggcagcaattggccagcgtttgtaccagttcacgacccttcacggaaagcctatatagggattcaaaatttgggaactgtatttactcgaagatttgaagctgaccgaattggtagtcaagtgccaataagactcatgcatctggaggggttacatgagctatttctatcaaaatttgtcctatcctcgtcagattttccagctagggtaaaggttcacttctcaatgaagcttagctacaagaccccagaatatgatcatgataatgaaactttagattctgaagctactgagccattgactgaaaatgaagttgcgaaacaccctagaaaactatgggacgatgattgcccttgggcagagtggtactctgctgaggatcctgttaaaggttttgagttgactgccatctggggagagaggacatttgaagagacccttgagatggctgaagtggaaaatgcctcgtcctttgatgctgatagctggttccttcacccagttgtatctcaatacatgtaaccttttttatttgtaaatcccttgttaaccttctgcaagtaatttctatttcat

SEQ ID NO: 22776 - protein, 362 aa, Zea mays subsp. mays
  peptide (1)..(362): Ceres Seq. ID no. 14305418
  misc_feature (45)..(362): NCBI GI NO: 22327950 NR Description: expressed protein [Arabidopsis thaliana]
  misc_feature (57)..(362): NCBI GI NO: 10177029 NR Description: gene_id:MQJ2.13~unknown protein
  misc_feature (131)..(331): NCBI GI NO: 505100 NR Description: KIAA0066 [Homo sapiens]
  misc_feature (55)..(155): NCBI GI NO: 505100 NR Description: KIAA0066 [Homo sapiens]
  misc_feature (131)..(331): NCBI GI NO: 26345344 NR Description: unnamed protein product [Mus musculus]
  misc_feature (131)..(331): NCBI GI NO: 28374414 NR Description: RAB3 GTPase-activating protein [Mus musculus]
  misc_feature (131)..(331): NCBI GI NO: 30520087 NR Description: RAB3 GTPase-activating protein [Mus musculus]
  misc_feature (55)..(100): NCBI GI NO: 26345344 NR Description: unnamed protein product [Mus musculus]
  misc_feature (55)..(100): NCBI GI NO: 30520087 NR Description: RAB3 GTPase-activating protein [Mus musculus]
  misc_feature (55)..(100): NCBI GI NO: 28374414 NR Description: RAB3 GTPase-activating protein [Mus musculus]
RSNGNASHSFHATAPWHPRLAPAEPAERISMASTSSSRYAKHRRIGEDDESEEVEEEAEEELERFDDFTIASSWEKFISEIEAICRQWLADGAKILMQKGAEGVPPFENLYMIKRELKHGKRVYSMEYHFMKSVKGQNSYWDDDTHSMQLSFGVDEFLIIAPLSASGVILDDPESTKLLSSVAIALSNCGSNWPAFVPVHDPSRKAYIGIQNLGTVFTRRFEADRIGSQVPIRLMHLEGLHELFLSKFVLSSSDFPARVKVHFSMKLSYKTPEYDHDNETLDSEATEPLTENEVAKHPRKLWDDDCPWAEWYSAEDPVKGFELTAIWGERTFEETLEMAEVENASSFDADSWFLHPVVSQYM

SEQ ID NO: 22777 - protein, 332 aa, Zea mays subsp. mays
  peptide (1)..(332): Ceres Seq. ID no. 14305419
  misc_feature (15)..(332): NCBI GI NO: 22327950 NR Description: expressed protein [Arabidopsis thaliana]
  misc_feature (27)..(332): NCBI GI NO: 10177029 NR Description: gene_id:MQJ2.13~unknown protein
  misc_feature (101)..(301): NCBI GI NO: 505100 NR Description: KIAA0066 [Homo sapiens]
  misc_feature (25)..(125): NCBI GI NO: 505100 NR Description: KIAA0066 [Homo sapiens]
  misc_feature (101)..(301): NCBI GI NO: 26345344 NR Description: unnamed protein product [Mus musculus]
  misc_feature (101)..(301): NCBI GI NO: 30520087 NR Description: RAB3 GTPase-activating protein [Mus musculus]
  misc_feature (101)..(301): NCBI GI NO: 28374414 NR Description: RAB3 GTPase-activating protein [Mus musculus]
  misc_feature (25)..(70): NCBI GI NO: 26345344 NR Description: unnamed protein product [Mus musculus]
  misc_feature (25)..(70): NCBI GI NO: 30520087 NR Description: RAB3 GTPase-activating protein [Mus musculus]
  misc_feature (25)..(70): NCBI GI NO: 28374414 NR Description: RAB3 GTPase-activating protein [Mus musculus]
MASTSSSRYAKHRRIGEDDESEEVEEEAEEELERFDDFTIASSWEKFISEIEAICRQWLADGAKILMQKGAEGVPPFENLYMIKRELKHGKRVYSMEYHFMKSVKGQNSYWDDDTHSMQLSFGVDEFLIIAPLSASGVILDDPESTKLLSSVAIALSNCGSNWPAFVPVHDPSRKAYIGIQNLGTVFTRRFEADRIGSQVPIRLMHLEGLHELFLSKFVLSSSDFPARVKVHFSMKLSYKTPEYDHDNETLDSEATEPLTENEVAKHPRKLWDDDCPWAEWYSAEDPVKGFELTAIWGERTFEETLEMAEVENASSFDADSWFLHPVVSQYM

SEQ ID NO: 22778 - protein, 266 aa, Zea mays subsp. mays
  peptide (1)..(266): Ceres Seq. ID no. 14305420
  misc_feature (1)..(266): NCBI GI NO: 22327950 NR Description: expressed protein [Arabidopsis thaliana]
  misc_feature (1)..(266): NCBI GI NO: 10177029 NR Description: gene_id:MQJ2.13~unknown protein
  misc_feature (35)..(235): NCBI GI NO: 505100 NR Description: KIAA0066 [Homo sapiens]
  misc_feature (1)..(59): NCBI GI NO: 505100 NR Description: KIAA0066 [Homo sapiens]
  misc_feature (35)..(235): NCBI GI NO: 26345344 NR Description: unnamed protein product [Mus musculus]
  misc_feature (35)..(235): NCBI GI NO: 30520087 NR Description: RAB3 GTPase-activating protein [Mus musculus]
  misc_feature (35)..(235): NCBI GI NO: 28374414 NR Description: RAB3 GTPase-activating protein [Mus musculus]
  misc_feature (35)..(235): NCBI GI NO: 26345242 NR Description: unnamed protein product [Mus musculus]
MQKGAEGVPPFENLYMIKRELKHGKRVYSMEYHFMKSVKGQNSYWDDDTHSMQLSFGVDEFLIIAPLSASGVILDDPESTKLLSSVAIALSNCGSNWPAFVPVHDPSRKAYIGIQNLGTVFTRRFEADRIGSQVPIRLMHLEGLHELFLSKFVLSSSDFPARVKVHFSMKLSYKTPEYDHDNETLDSEATEPLTENEVAKHPRKLWDDDCPWAEWYSAEDPVKGFELTAIWGERTFEETLEMAEVENASSFDADSWFLHPVVSQYM

SEQ ID NO: 22779 - DNA, 631 bp, Zea mays subsp. mays
  misc_feature (1)..(631): Ceres Seq. ID no. 12589546
cagctacgtaggccccccccccttcactcgagcgccgcttcctctccccttccatcgagcacagcgccgccgccaccactccgcaccgccgccagttccccacttcctccccacccccgaatcggattgaagccagaaggcaaggtgaagagtgggcttgggtgacggttacaaagagatatccccaacagttgcagtcactcgcatccagtcggctcagctatggaggaggactcatcagcgatggagcggaataggctgcgcgaggccgaggcggccgctggggagctgaagaggctgcgcgaggccgggcagtctcagtacatgtacctgtctgtcgccgacgccagggttgtcggcggccgggtctgcctcttcgccgtcgtctccgagatcggcgctaccgtccacagccgtggcacggatttcactgttacgttgagagtaatagatgaatcatacaagtctggaatatctgtaactttttttgctgacagcactgcactattgccttgtgtgaagtcgtgtggagatgtgatcagtctccataacgtcgtggtatagcataaaactctatttaatatgcaattcgcccttgattattcctcgaagttataaaaatgtctttttc

SEQ ID NO: 22780 - protein, 113 aa, Zea mays subsp. mays
  peptide (1)..(113): Ceres Seq. ID no. 12589547
  misc_feature (1)..(113): NCBI GI NO: 38606523 NR Description: OSJNBa0016O02.10
MEEDSSAMERNRLREAEAAAGELKRLREAGQSQYMYLSVADARVVGGRVCLFAVVSEIGATVHSRGTDFTVTLRVIDESYKSGISVTFFADSTALLPCVKSCGDVISLHNVVV

SEQ ID NO: 22781 - protein, 106 aa, Zea mays subsp. mays
  peptide (1)..(106): Ceres Seq. ID no. 12589548
  misc_feature (1)..(106): NCBI GI NO: 38606523 NR Description: OSJNBa0016O02.10
MERNRLREAEAAAGELKRLREAGQSQYMYLSVADARVVGGRVCLFAVVSEIGATVHSRGTDFTVTLRVIDESYKSGISVTFFADSTALLPCVKSCGDVISLHNVVV

SEQ ID NO: 22782 - protein, 79 aa, Zea mays subsp. mays
  peptide (1)..(79): Ceres Seq. ID no. 12589549
  misc_feature (1)..(79): NCBI GI NO: 38606523 NR Description: OSJNBa0016O02.10
MYLSVADARVVGGRVCLFAVVSEIGATVHSRGTDFTVTLRVIDESYKSGISVTFFADSTALLPCVKSCGDVISLHNVVV

SEQ ID NO: 22783 - DNA, 615 bp, Zea mays subsp. mays
  misc_feature (1)..(615): Ceres Seq. ID no. 13586784
cagctacgtaggccccccccccaataatggatttttcgagattgtatgaagtgtcaaatactgtagatgagcatagagatatgcgtctagatatagacagcatgacgtatgaggagcttttagcattagaagagcagattggagatgtcaatactggtctgacaaaaagtcacattgtagataaattgaggactagcctatatgttccaggaatatcgagcatgtctgatcagccatctaaatcttctctagagaatgatgcttgcataatatgccaggaggagtaccaggctagagactgcgttggcacccttgactgcggtcacaggtaccacgcggagtgcgtgaagcagtggctgatggtgaagaacttgtgccccatctgcaagacgacagcattgtctgccaacagaagacaaggacagtgagcgggaatggagaagcctgttggttatttgctttgacaaacgttcagctcaattttgtatataaagaagtggtagacaatggcgctacctgtatttgttgttcactttgttgtgactgggagtactcagcttcctgaaactgtacagccataacatttgttatttttcttcaaatgtagaatgtttt

SEQ ID NO: 22784 - protein, 133 aa, Zea mays subsp. mays
  peptide (1)..(133): Ceres Seq. ID no. 13586785
  misc_feature (80)..(120): Pfam Name: RING finger Pfam Description: Zinc finger, C3HC4 type
  misc_feature (1)..(132): NCBI GI NO: 34910942 NR Description: putative U2 snRNP auxiliary factor
  misc_feature (1)..(101): NCBI GI NO: 4768982 NR Description: hypothetical protein [Oryza sativa]
  misc_feature (10)..(131): NCBI GI NO: 20466834 NR Description: unknown protein [Arabidopsis thaliana]
  misc_feature (10)..(131): NCBI GI NO: 22330219 NR Description: zinc finger
  misc_feature (7)..(131): NCBI GI NO: 18400621 NR Description: zinc finger
  misc_feature (7)..(131): NCBI GI NO: 8777490 NR Description: RING-finger protein (C-terminal)-like
  misc_feature (14)..(131): NCBI GI NO: 15220067 NR Description: zinc finger
  misc_feature (1)..(131): NCBI GI NO: 11358785 NR Description: RING-H2 finger protein RHG1a
  misc_feature (14)..(127): NCBI GI NO: 38345496 NR Description: OSJNBa0010D21.9
  misc_feature (14)..(129): NCBI GI NO: 7486381 NR Description: hypothetical protein F3L17
MDFSRLYEVSNTVDEHRDMRLDIDSMTYEELLALEEQIGDVNTGLTKSHIVDKLRTSLYVPGISSMSDQPSKSSLENDACIICQEEYQARDCVGTLDCGHRYHAECVKQWLMVKNLCPICKTTALSANRRQGQ

SEQ ID NO: 22785 - protein, 115 aa, Zea mays subsp. mays
  peptide (1)..(115): Ceres Seq. ID no. 13586786
  misc_feature (62)..(102): Pfam Name: RING finger Pfam Description: Zinc finger, C3HC4 type
  misc_feature (1)..(114): NCBI GI NO: 34910942 NR Description: putative U2 snRNP auxiliary factor
  misc_feature (1)..(83): NCBI GI NO: 4768982 NR Description: hypothetical protein [Oryza sativa]
  misc_feature (1)..(113): NCBI GI NO: 20466834 NR Description: unknown protein [Arabidopsis thaliana]
  misc_feature (1)..(113): NCBI GI NO: 22330219 NR Description: zinc finger
  misc_feature (1)..(113): NCBI GI NO: 18400621 NR Description: zinc finger
  misc_feature (1)..(113): NCBI GI NO: 8777490 NR Description: RING-finger protein (C-terminal)-like
  misc_feature (1)..(113): NCBI GI NO: 15220067 NR Description: zinc finger
  misc_feature (1)..(113): NCBI GI NO: 11358785 NR Description: RING-H2 finger protein RHG1a
  misc_feature (1)..(109): NCBI GI NO: 38345496 NR Description: OSJNBa0010D21.9
  misc_feature (1)..(111): NCBI GI NO: 7486381 NR Description: hypothetical protein F3L17
MRLDIDSMTYEELLALEEQIGDVNTGLTKSHIVDKLRTSLYVPGISSMSDQPSKSSLENDACIICQEEYQARDCVGTLDCGHRYHAECVKQWLMVKNLCPICKTTALSANRRQGQ

SEQ ID NO: 22786 - protein, 108 aa, Zea mays subsp. mays
  peptide (1)..(108): Ceres Seq. ID no. 13586787
  misc_feature (55)..(95): Pfam Name: RING finger Pfam Description: Zinc finger, C3HC4 type
  misc_feature (1)..(107): NCBI GI NO: 34910942 NR Description: putative U2 snRNP auxiliary factor
  misc_feature (1)..(76): NCBI GI NO: 4768982 NR Description: hypothetical protein [Oryza sativa]
  misc_feature (1)..(106): NCBI GI NO: 20466834 NR Description: unknown protein [Arabidopsis thaliana]
  misc_feature (1)..(106): NCBI GI NO: 22330219 NR Description: zinc finger
  misc_feature (1)..(106): NCBI GI NO: 18400621 NR Description: zinc finger
  misc_feature (1)..(106): NCBI GI NO: 8777490 NR Description: RING-finger protein (C-terminal)-like
  misc_feature (1)..(106): NCBI GI NO: 15220067 NR Description: zinc finger
  misc_feature (1)..(106): NCBI GI NO: 11358785 NR Description: RING-H2 finger protein RHG1a
  misc_feature (1)..(102): NCBI GI NO: 38345496 NR Description: OSJNBa0010D21.9
  misc_feature (1)..(104): NCBI GI NO: 7486381 NR Description: hypothetical protein F3L17
MTYEELLALEEQIGDVNTGLTKSHIVDKLRTSLYVPGISSMSDQPSKSSLENDACIICQEEYQARDCVGTLDCGHRYHAECVKQWLMVKNLCPICKTTALSANRRQGQ

SEQ ID NO: 22787 - DNA, 581 bp, Zea mays subsp. mays
  misc_feature (1)..(581): Ceres Seq. ID no. 14305380
gttgtttccaagcagtttgaatcctgacattcttgaaggcctacttggatctgtgggtggtgtcatggctttcctcactttgcatgaaatgctgcctcttgcatttgactattgtggccagaagcaagctgtcaaagctgtctttgtgggcatggcctgcatgtctgcaagcttgtacttcttggaagtcagcttagcaaaggagataagcttgtagcatcgcgctgcaggtactgggaggccatagcctgtcagtagatcctgaattctaggaggaggaacagcacaataaaaccatgaacagtgactactggtgtgccgccattgatattgtccatcttaccgtgaaaggagggagaaactgcatttccccagaatgtattccccagattcctcgtgggaccatatgaaagaattgaaaaatgtactgtagtactctgtcgtccggcaatggaagcttcgaagtcgtcaactaaactatttctagcactctcgtcggttgacaatggaagattctatgtaaaaacccatcagatagatgttaacctttaatctttaatttcttaaaagtacattgaaac

SEQ ID NO: 22788 - protein, 71 aa, Zea mays subsp. mays
  peptide (1)..(71): Ceres Seq. ID no. 14305381
  misc_feature (1)..(58): Pfam Name: Pfam Description:  ZIP Zinc transporter
  misc_feature (1)..(71): NCBI GI NO: 9294414 NR Description: gene_id:MOE17.18~unknown protein
  misc_feature (1)..(71): NCBI GI NO: 18402783 NR Description: metal transporter family [Arabidopsis thaliana]
  misc_feature (1)..(55): NCBI GI NO: 38637282 NR Description: putative Zinc transporter zupT
LFPSSLNPDILEGLLGSVGGVMAFLTLHEMLPLAFDYCGQKQAVKAVFVGMACMSASLYFLEVSLAKEISL

SEQ ID NO: 22789 - protein, 50 aa, Zea mays subsp. mays
  peptide (1)..(50): Ceres Seq. ID no. 14305382
  misc_feature (1)..(50): NCBI GI NO: 9294414 NR Description: gene_id:MOE17.18~unknown protein
  misc_feature (1)..(50): NCBI GI NO: 18402783 NR Description: metal transporter family [Arabidopsis thaliana]
  misc_feature (1)..(34): NCBI GI NO: 38637282 NR Description: putative Zinc transporter zupT
MAFLTLHEMLPLAFDYCGQKQAVKAVFVGMACMSASLYFLEVSLAKEISL

SEQ ID NO: 22790 - protein, 42 aa, Zea mays subsp. mays
  peptide (1)..(42): Ceres Seq. ID no. 14305383
  misc_feature (1)..(42): NCBI GI NO: 9294414 NR Description: gene_id:MOE17.18~unknown protein
  misc_feature (1)..(42): NCBI GI NO: 18402783 NR Description: metal transporter family [Arabidopsis thaliana]
  misc_feature (1)..(26): NCBI GI NO: 38637282 NR Description: putative Zinc transporter zupT
MLPLAFDYCGQKQAVKAVFVGMACMSASLYFLEVSLAKEISL

SEQ ID NO: 22791 - DNA, 593 bp, Zea mays subsp. mays
  misc_feature (1)..(593): Ceres Seq. ID no. 13599038
agctacttgcatctcaacttcgtgcgtgcataataaaacctaatcatcggcacttcccgttcctctagctaggctctatagcttccgcctttaattcccccatcagaccagtcatcgtcccctcggccgccggcgagctcttcgtcttcccgtgtgatccttccttcccatccggtccggcctagactagatctgagagacacaaggagggatggggagggggaagatagtgataaggaggatagacaactccacgagcaggcaggttaccttctccaagaggcggagcgggctgctgaagaaggcgaaggagctctctatcctctgcgacgcggaggttggcctcatcatcttctccagcaccggcaggctctacgatttctccaacaccaacatgaaagctgtgatagaccgatatgggaaggcaaaagacgagcagcttggcaagaacgatgcaacttcagaactcatggtacggtgaggaaaatgtacctatttctagctaactagcagttggtagtacacacgtgccatatgatgtatgtggtcggaccaagatcaggagtttagtcctttattactcacaaatactg

SEQ ID NO: 22792 - protein, 89 aa, Zea mays subsp. mays
  peptide (1)..(89): Ceres Seq. ID no. 13599039
  misc_feature (1)..(88): NCBI GI NO: 30313689 NR Description: transcription factor MADS57
  misc_feature (1)..(88): NCBI GI NO: 29367491 NR Description: MADS box protein-like protein
  misc_feature (1)..(86): NCBI GI NO: 29611976 NR Description: MADS-box transcription factor MADS2 [Zea mays]
  misc_feature (1)..(86): NCBI GI NO: 30313677 NR Description: transcription factor MADS27
  misc_feature (1)..(86): NCBI GI NO: 9964296 NR Description: MADS box protein 2 [Zea mays]
  misc_feature (1)..(86): NCBI GI NO: 38567704 NR Description: B1358B12.2
  misc_feature (1)..(86): NCBI GI NO: 38344968 NR Description: OSJNBa0072F16.13
  misc_feature (1)..(86): NCBI GI NO: 11278951 NR Description: MADS-box transcription factor-like protein -Arabidopsis thaliana
  misc_feature (1)..(86): NCBI GI NO: 30694601 NR Description: MADS-box protein [Arabidopsis thaliana]
  misc_feature (1)..(76): NCBI GI NO: 15225607 NR Description: MADS-box protein ANR1 [Arabidopsis thaliana]
MGRGKIVIRRIDNSTSRQVTFSKRRSGLLKKAKELSILCDAEVGLIIFSSTGRLYDFSNTNMKAVIDRYGKAKDEQLGKNDATSELMVR

SEQ ID NO: 22793 - DNA, 988 bp, Zea mays subsp. mays
  misc_feature (1)..(988): Ceres Seq. ID no. 12634558
gacaagtgagtttgttgatcgagataactagaaacagtgtgatgaaaatgaaggtccttgttttcttcgttgctacaattttggtagcatggcaatgccatgcgtacgatatgttccctctccgaatgaacactggctatggtgcccgtactccggaggtgaaatgcgcaagttggaggcttgctgtggaagcacacaacatctttggctttgagaccattcctgaagagtgcgttgaagcaacaaaggaatacatccatggcgaacaatatagatcagactccaaaacagttaaccaacaagcttacttttatgccagagacctcgaagtccatcccaaggacacatttgtgttcagtatagatggcaccgtactctctaatattccatactacaaaaaacatggatatggggtggagaaatttaactcgaccttgtatgatgaatgggttaacaagggcaatgcaccggcactgcccgagactcttaagaattacaacaagctggtgtctcttggcttcaagattatattcttgtcaggaagaacactggacaaacaggccgtaacagaagcaaacttaaagaaggctggctaccacacatgggaaaaattaattctcaaggatccacaagatccttccactccaaatgcagtttcatacaaaacagcagcgagagagaaactgataaggcagggatacaacattgttgggatcattggagaccaatggagcgatctcctcggaggccacagaggcgaaagcaggacctttaagcttcctaatcccctgtactacattcagtagttccttcacctctcaacaatctagcttgctcctatctatctatatgtaataagatgcgttcaaataggggcactagcttcactttatgttgtttcagctgggggtcaacaagtcatgtaagagacttcactatgttgttttctctttcggggctttaataaattatgcgcccttgttccctt

SEQ ID NO: 22794 - protein, 267 aa, Zea mays subsp. mays
  peptide (1)..(267): Ceres Seq. ID no. 12634559
  misc_feature (41)..(267): Pfam Name: Acid phosphatase Pfam Description: HAD superfamily, subfamily IIIB
  misc_feature (17)..(267): NCBI GI NO: 1351033 NR Description: STEM 31 KD GLYCOPROTEIN PRECURSOR
  misc_feature (14)..(267): NCBI GI NO: 134145 NR Description: STEM 28 kDa glycoprotein precursor
  misc_feature (17)..(243): NCBI GI NO: 72304 NR Description: vegetative storage protein
  misc_feature (14)..(267): NCBI GI NO: 226866 NR Description: 31kD glycoprotein
  misc_feature (16)..(267): NCBI GI NO: 134146 NR Description: STEM 31 kDa glycoprotein precursor
  misc_feature (16)..(243): NCBI GI NO: 7488715 NR Description: storage protein homolog, 31K - soybean (fragment)
  misc_feature (16)..(265): NCBI GI NO: 2627233 NR Description: pod storage protein [Phaseolus vulgaris]
  misc_feature (16)..(265): NCBI GI NO: 7442055 NR Description: pod storage protein - kidney bean
  misc_feature (16)..(266): NCBI GI NO: 7442053 NR Description: acid phosphatase (EC 3.1.3.-) - soybean
  misc_feature (55)..(266): NCBI GI NO: 15234949 NR Description: acid phosphatase - like protein
QVSLLIEITRNSVMKMKVLVFFVATILVAWQCHAYDMFPLRMNTGYGARTPEVKCASWRLAVEAHNIFGFETIPEECVEATKEYIHGEQYRSDSKTVNQQAYFYARDLEVHPKDTFVFSIDGTVLSNIPYYKKHGYGVEKFNSTLYDEWVNKGNAPALPETLKNYNKLVSLGFKIIFLSGRTLDKQAVTEANLKKAGYHTWEKLILKDPQDPSTPNAVSYKTAAREKLIRQGYNIVGIIGDQWSDLLGGHRGESRTFKLPNPLYYIQ

SEQ ID NO: 22795 - protein, 254 aa, Zea mays subsp. mays
  peptide (1)..(254): Ceres Seq. ID no. 12634560
  misc_feature (28)..(254): Pfam Name: Acid phosphatase Pfam Description: HAD superfamily, subfamily IIIB
  misc_feature (4)..(254): NCBI GI NO: 1351033 NR Description: STEM 31 KD GLYCOPROTEIN PRECURSOR
  misc_feature (1)..(254): NCBI GI NO: 134145 NR Description: STEM 28 kDa glycoprotein precursor
  misc_feature (4)..(230): NCBI GI NO: 72304 NR Description: vegetative storage protein
  misc_feature (1)..(254): NCBI GI NO: 226866 NR Description: 31kD glycoprotein
  misc_feature (3)..(254): NCBI GI NO: 134146 NR Description: STEM 31 kDa glycoprotein precursor
  misc_feature (3)..(230): NCBI GI NO: 7488715 NR Description: storage protein homolog, 31K - soybean (fragment)
  misc_feature (3)..(252): NCBI GI NO: 2627233 NR Description: pod storage protein [Phaseolus vulgaris]
  misc_feature (3)..(252): NCBI GI NO: 7442055 NR Description: pod storage protein - kidney bean
  misc_feature (3)..(253): NCBI GI NO: 7442053 NR Description: acid phosphatase (EC 3.1.3.-) - soybean
  misc_feature (42)..(253): NCBI GI NO: 15234949 NR Description: acid phosphatase - like protein
MKMKVLVFFVATILVAWQCHAYDMFPLRMNTGYGARTPEVKCASWRLAVEAHNIFGFETIPEECVEATKEYIHGEQYRSDSKTVNQQAYFYARDLEVHPKDTFVFSIDGTVLSNIPYYKKHGYGVEKFNSTLYDEWVNKGNAPALPETLKNYNKLVSLGFKIIFLSGRTLDKQAVTEANLKKAGYHTWEKLILKDPQDPSTPNAVSYKTAAREKLIRQGYNIVGIIGDQWSDLLGGHRGESRTFKLPNPLYYIQ

SEQ ID NO: 22796 - protein, 252 aa, Zea mays subsp. mays
  peptide (1)..(252): Ceres Seq. ID no. 12634561
  misc_feature (26)..(252): Pfam Name: Acid phosphatase Pfam Description: HAD superfamily, subfamily IIIB
  misc_feature (2)..(252): NCBI GI NO: 1351033 NR Description: STEM 31 KD GLYCOPROTEIN PRECURSOR
  misc_feature (1)..(252): NCBI GI NO: 134145 NR Description: STEM 28 kDa glycoprotein precursor
  misc_feature (2)..(228): NCBI GI NO: 72304 NR Description: vegetative storage protein
  misc_feature (1)..(252): NCBI GI NO: 226866 NR Description: 31kD glycoprotein
  misc_feature (1)..(252): NCBI GI NO: 134146 NR Description: STEM 31 kDa glycoprotein precursor
  misc_feature (1)..(228): NCBI GI NO: 7488715 NR Description: storage protein homolog, 31K - soybean (fragment)
  misc_feature (1)..(250): NCBI GI NO: 2627233 NR Description: pod storage protein [Phaseolus vulgaris]
  misc_feature (1)..(250): NCBI GI NO: 7442055 NR Description: pod storage protein - kidney bean
  misc_feature (1)..(251): NCBI GI NO: 7442053 NR Description: acid phosphatase (EC 3.1.3.-) - soybean
  misc_feature (40)..(251): NCBI GI NO: 15234949 NR Description: acid phosphatase - like protein
MKVLVFFVATILVAWQCHAYDMFPLRMNTGYGARTPEVKCASWRLAVEAHNIFGFETIPEECVEATKEYIHGEQYRSDSKTVNQQAYFYARDLEVHPKDTFVFSIDGTVLSNIPYYKKHGYGVEKFNSTLYDEWVNKGNAPALPETLKNYNKLVSLGFKIIFLSGRTLDKQAVTEANLKKAGYHTWEKLILKDPQDPSTPNAVSYKTAAREKLIRQGYNIVGIIGDQWSDLLGGHRGESRTFKLPNPLYYIQ

SEQ ID NO: 22797 - DNA, 997 bp, Zea mays subsp. mays
  misc_feature (1)..(997): Ceres Seq. ID no. 13599044
tacgtaggcccccccccagttagtgctgtttcaattagaaggattccaagggttccttcagacatgcctctgtatgatatactgaatgagtttcagaaaggaagtagtcatatggctgctgttgtgaaggctaaacccaaaactgaaccaccccttgacaaaactgaaccaaacagggaagcagttggaccaacacaattgactgttcccttgttatctaatgctgaagaaagtgcagacaatgtggttgtggatatcgaaagaccacataacaggcagattaatgggaacacagcatcaaacgcagtgcctaggtcatcagaggatattgaggatggtgaggtcgttggaatcatcacacttgaggatgtattcgaagaactcctacaggaggaaatcgtggacgagactgatgaatatgttgatgtccataaaaggatccgagtagctgctgctgctgccgcatcatcggttgcaagggctccatccgttaggagattaacgggccaaaaggctgcaaaccttcagggagcacagaatcgccaaggacagcaacctcctggaattctcaagaaacctactgagggtgattcaaacccatcaaaacaagtgaaccttatggaacctcttctggaaaaggggaggtaactctaatggaacctcttctggaaaagaggaactctaaaatgcattgcgcaacgtagggaaccatgctggaagagcctatggttcttgctatattgtagcaagaggtaaatagagatgaactcattgttgcaaattccaacatgagcgaccgagcgatgtggttttggtgtcattatggacattacattagtgttgaattctttggatccccctccctttttttttgtgttttgggcttcgaaagtagagtcgccatttttgaatgtcaccgctaaccgcagtagcaagttagcaactgctttatatatatgtgcttcaaattcacaataaagttggaactggaggggtg

SEQ ID NO: 22798 - protein, 215 aa, Zea mays subsp. mays
  peptide (1)..(215): Ceres Seq. ID no. 15222498
  misc_feature (9)..(47): Pfam Name: Pfam Description:  CBS domain
  misc_feature (7)..(188): NCBI GI NO: 15236442 NR Description: hypothetical protein [Arabidopsis thaliana]
  misc_feature (6)..(181): NCBI GI NO: 15218765 NR Description: hypothetical protein [Arabidopsis thaliana]
  misc_feature (14)..(173): NCBI GI NO: 30682755 NR Description: expressed protein [Arabidopsis thaliana]
  misc_feature (14)..(173): NCBI GI NO: 7485191 NR Description: hypothetical protein - Arabidopsis thaliana
  misc_feature (114)..(173): NCBI GI NO: 4105780 NR Description: PGPS/D5 [Petunia x hybrida]
  misc_feature (114)..(212): NCBI GI NO: 25405200 NR Description: hypothetical protein T3F24.6
  misc_feature (6)..(56): NCBI GI NO: 25405200 NR Description: hypothetical protein T3F24.6
  misc_feature (114)..(212): NCBI GI NO: 22330087 NR Description: expressed protein [Arabidopsis thaliana]
  misc_feature (6)..(56): NCBI GI NO: 22330087 NR Description: expressed protein [Arabidopsis thaliana]
  misc_feature (12)..(157): NCBI GI NO: 15237264 NR Description: hypothetical protein [Arabidopsis thaliana]
YVGPPPVSAVSIRRIPRVPSDMPLYDILNEFQKGSSHMAAVVKAKPKTEPPLDKTEPNREAVGPTQLTVPLLSNAEESADNVVVDIERPHNRQINGNTASNAVPRSSEDIEDGEVVGIITLEDVFEELLQEEIVDETDEYVDVHKRIRVAAAAAASSVARAPSVRRLTGQKAANLQGAQNRQGQQPPGILKKPTEGDSNPSKQVNLMEPLLEKGR

SEQ ID NO: 22799 - protein, 194 aa, Zea mays subsp. mays
  peptide (1)..(194): Ceres Seq. ID no. 15222499
  misc_feature (1)..(167): NCBI GI NO: 15236442 NR Description: hypothetical protein [Arabidopsis thaliana]
  misc_feature (1)..(160): NCBI GI NO: 15218765 NR Description: hypothetical protein [Arabidopsis thaliana]
  misc_feature (1)..(152): NCBI GI NO: 30682755 NR Description: expressed protein [Arabidopsis thaliana]
  misc_feature (1)..(152): NCBI GI NO: 7485191 NR Description: hypothetical protein - Arabidopsis thaliana
  misc_feature (93)..(152): NCBI GI NO: 4105780 NR Description: PGPS/D5 [Petunia x hybrida]
  misc_feature (93)..(191): NCBI GI NO: 25405200 NR Description: hypothetical protein T3F24.6
  misc_feature (1)..(35): NCBI GI NO: 25405200 NR Description: hypothetical protein T3F24.6
  misc_feature (93)..(191): NCBI GI NO: 22330087 NR Description: expressed protein [Arabidopsis thaliana]
  misc_feature (1)..(35): NCBI GI NO: 22330087 NR Description: expressed protein [Arabidopsis thaliana]
  misc_feature (1)..(136): NCBI GI NO: 15237264 NR Description: hypothetical protein [Arabidopsis thaliana]
MPLYDILNEFQKGSSHMAAVVKAKPKTEPPLDKTEPNREAVGPTQLTVPLLSNAEESADNVVVDIERPHNRQINGNTASNAVPRSSEDIEDGEVVGIITLEDVFEELLQEEIVDETDEYVDVHKRIRVAAAAAASSVARAPSVRRLTGQKAANLQGAQNRQGQQPPGILKKPTEGDSNPSKQVNLMEPLLEKGR

SEQ ID NO: 22800 - protein, 178 aa, Zea mays subsp. mays
  peptide (1)..(178): Ceres Seq. ID no. 15222500
  misc_feature (1)..(151): NCBI GI NO: 15236442 NR Description: hypothetical protein [Arabidopsis thaliana]
  misc_feature (1)..(144): NCBI GI NO: 15218765 NR Description: hypothetical protein [Arabidopsis thaliana]
  misc_feature (1)..(136): NCBI GI NO: 30682755 NR Description: expressed protein [Arabidopsis thaliana]
  misc_feature (1)..(136): NCBI GI NO: 7485191 NR Description: hypothetical protein - Arabidopsis thaliana
  misc_feature (77)..(136): NCBI GI NO: 4105780 NR Description: PGPS/D5 [Petunia x hybrida]
  misc_feature (77)..(175): NCBI GI NO: 25405200 NR Description: hypothetical protein T3F24.6
  misc_feature (1)..(19): NCBI GI NO: 25405200 NR Description: hypothetical protein T3F24.6
  misc_feature (77)..(175): NCBI GI NO: 22330087 NR Description: expressed protein [Arabidopsis thaliana]
  misc_feature (1)..(19): NCBI GI NO: 22330087 NR Description: expressed protein [Arabidopsis thaliana]
  misc_feature (1)..(120): NCBI GI NO: 15237264 NR Description: hypothetical protein [Arabidopsis thaliana]
MAAVVKAKPKTEPPLDKTEPNREAVGPTQLTVPLLSNAEESADNVVVDIERPHNRQINGNTASNAVPRSSEDIEDGEVVGIITLEDVFEELLQEEIVDETDEYVDVHKRIRVAAAAAASSVARAPSVRRLTGQKAANLQGAQNRQGQQPPGILKKPTEGDSNPSKQVNLMEPLLEKGR

SEQ ID NO: 22801 - DNA, 832 bp, Zea mays subsp. mays
  misc_feature (1)..(832): Ceres Seq. ID no. 14305270
atgttgctccagacacatctaaatcacatcactccattccatctgaggaagtaaatgccatgaggggagacctcatgctgtggcctccagttgttgtgatacataacagctcgactggtcatgaggcaaaggatactgatgcaaagattgtgtccatagaagaaatcgaaggtgtattggcagatattggggtagcgcatgagaaggctagggttagccatggaagatcagccaatcagagcgtgttcctggtgaagttccagccaacaatatctgggttccaagaagccatgagagtgcatacccatttctccaccagaaaccatggcaaggaagagttccagctgatgaaaggcagcaaaggtaagaaggctgcctccactgatagcctggaagagctgctgtatgcgcatattggggtcgtggaagacctggggctgctggatgagggaacaaagaagagatgcaaggtcatgaggaagaaggaaattgaggcaaatgcagaggcaacactgaatttagaagtttattaggtctagtactaggatccgaaccatttgaagtggtcctcttttgcttcatcttgcagctgcttgcttgtccttgcggctgtaacgtcaaaagaagaaaagaagtgtaaattctgcttttgccattaaagagtgacgaaactcagttggcttctgtctgctggggaaggcctgcctcggtttgcatggcatggcaaggacataattttgtggctagatggggacaccttaacggcaaaagcagaattacctggtcgaagaaccgagtttaatctttatattatggaatcccttcttttttt

SEQ ID NO: 22802 - protein, 176 aa, Zea mays subsp. mays
  peptide (1)..(176): Ceres Seq. ID no. 14305271
  misc_feature (21)..(110): Pfam Name: Pfam Description:  XS domain
  misc_feature (3)..(164): NCBI GI NO: 22773240 NR Description: Hypothetical protein
  misc_feature (2)..(163): NCBI GI NO: 9293880 NR Description: gene_id:MCB17.19~unknown protein
  misc_feature (2)..(163): NCBI GI NO: 30686649 NR Description: expressed protein [Arabidopsis thaliana]
VAPDTSKSHHSIPSEEVNAMRGDLMLWPPVVVIHNSSTGHEAKDTDAKIVSIEEIEGVLADIGVAHEKARVSHGRSANQSVFLVKFQPTISGFQEAMRVHTHFSTRNHGKEEFQLMKGSKGKKAASTDSLEELLYAHIGVVEDLGLLDEGTKKRCKVMRKKEIEANAEATLNLEVY

SEQ ID NO: 22803 - protein, 157 aa, Zea mays subsp. mays
  peptide (1)..(157): Ceres Seq. ID no. 14305272
  misc_feature (2)..(91): Pfam Name: Pfam Description:  XS domain
  misc_feature (1)..(145): NCBI GI NO: 22773240 NR Description: Hypothetical protein
  misc_feature (1)..(144): NCBI GI NO: 9293880 NR Description: gene_id:MCB17.19~unknown protein
  misc_feature (1)..(144): NCBI GI NO: 30686649 NR Description: expressed protein [Arabidopsis thaliana]
MRGDLMLWPPVVVIHNSSTGHEAKDTDAKIVSIEEIEGVLADIGVAHEKARVSHGRSANQSVFLVKFQPTISGFQEAMRVHTHFSTRNHGKEEFQLMKGSKGKKAASTDSLEELLYAHIGVVEDLGLLDEGTKKRCKVMRKKEIEANAEATLNLEVY

SEQ ID NO: 22804 - protein, 152 aa, Zea mays subsp. mays
  peptide (1)..(152): Ceres Seq. ID no. 14305273
  misc_feature (1)..(86): Pfam Name: Pfam Description:  XS domain
  misc_feature (1)..(140): NCBI GI NO: 22773240 NR Description: Hypothetical protein
  misc_feature (1)..(139): NCBI GI NO: 9293880 NR Description: gene_id:MCB17.19~unknown protein
  misc_feature (1)..(139): NCBI GI NO: 30686649 NR Description: expressed protein [Arabidopsis thaliana]
MLWPPVVVIHNSSTGHEAKDTDAKIVSIEEIEGVLADIGVAHEKARVSHGRSANQSVFLVKFQPTISGFQEAMRVHTHFSTRNHGKEEFQLMKGSKGKKAASTDSLEELLYAHIGVVEDLGLLDEGTKKRCKVMRKKEIEANAEATLNLEVY

SEQ ID NO: 22805 - DNA, 1453 bp, Zea mays subsp. mays
  misc_feature (1)..(1453): Ceres Seq. ID no. 13599066
agacttttctggaaggaataggggcaagcagcaagtcctatcccaaccctaaccctaacttcgaaccttcgtcctttctctcttcttccttcagattcatccgtaccgttagttactactggattcgcggttgattgctgctaccgggtttctcctctttcacgtataagatgcacttccggtcatcattttaccaacatgcagattttgagttggtttctgaatataaatggacgccaaacggttcatccagctggttgaggagaagaagaagaaaattatggagagaaaggaagctcctttgaaatgggagcagaagctggaagctgctgctgaagctaaagagaggaagctgaaggttgcaaagcatacaaaaagatctggctctgatagtgacagcgattattacagtgatgatgagagtagaaagacaagtaaaagatctcacaggaagcacagaaagcattctcactacgactctggtgaccatgagaaaaggaaagaaaaaagttccaaacggaaaacaaagaaatggtcctctgaatctagtgattatagtagtgatgactctgagagtagctttgaggaggagagaagaagaaagaagaagcaaagcaagaagctgagagatcggggttcaagatcagattctagcaactatgattctactgctgatgaattaagcaagaggaaaagacagcacaaacggcaacgcccatcaaaatttagtggatcagactactctactgatgaaggagatagtctagttcagaaaagaaatcatggaatgcatagcaaacgccatcgacaatcagaatctagtgaatctgacttgtcaagtgatgacgctccccataagaaaggccacagaaagcaccataaacatcacaagcgatcacataatgtggagctgaggttgtctgattctgattatcgcagtcatggtcaaagaagcagatcaaagtcattggaagaaaattctgaagatgaaagcaaaaaaagatcaatggataagaagtctggtcgccatcaccaccatcgtcaccaccaccatcgccaccaccaccatcgccaccacttggatgatgagagaaactacatgcagcaacactctcctaaattcaatggaaagcatggcgaggagttagacaaaactgaaactgagaaaaaggatggtggtcatcatgaaagtagagctatggttgagaataatgatggtcaaattttttgatttttgagaatctgtcctgctatctgtttgtggtgcttttgtactggaattggtaacttactatttgatattcaaattaaagttaaaggaacaatttcattatttatgtcggttgtaatattggcggcagttattgacactattgaaactttgttgggtcattgttggctgatgacattaagttgatccttattcatctataaacagttgtatttgaagttc

SEQ ID NO: 22806 - protein, 333 aa, Zea mays subsp. mays
  peptide (1)..(333): Ceres Seq. ID no. 15222504
  misc_feature (28)..(321): Pfam Name: chromogranin or secretogranin Pfam Description: Granin
  misc_feature (1)..(288): NCBI GI NO: 34895374 NR Description: P0698A04.25
  misc_feature (1)..(246): NCBI GI NO: 18379151 NR Description: expressed protein [Arabidopsis thaliana]
  misc_feature (18)..(289): NCBI GI NO: 34895374 NR Description: P0698A04.25
  misc_feature (38)..(321): NCBI GI NO: 39580460 NR Description: Hypothetical protein CBG20540
  misc_feature (26)..(321): NCBI GI NO: 25151613 NR Description: Putative nuclear protein, nematode specific (80
  misc_feature (10)..(310): NCBI GI NO: 17542856 NR Description: Putative nuclear protein, nematode specific
  misc_feature (45)..(322): NCBI GI NO: 39580460 NR Description: Hypothetical protein CBG20540
  misc_feature (36)..(323): NCBI GI NO: 25151613 NR Description: Putative nuclear protein, nematode specific (80
  misc_feature (28)..(323): NCBI GI NO: 25151613 NR Description: Putative nuclear protein, nematode specific (80
  misc_feature (11)..(321): NCBI GI NO: 39580460 NR Description: Hypothetical protein CBG20540
MDAKRFIQLVEEKKKKIMERKEAPLKWEQKLEAAAEAKERKLKVAKHTKRSGSDSDSDYYSDDESRKTSKRSHRKHRKHSHYDSGDHEKRKEKSSKRKTKKWSSESSDYSSDDSESSFEEERRRKKKQSKKLRDRGSRSDSSNYDSTADELSKRKRQHKRQRPSKFSGSDYSTDEGDSLVQKRNHGMHSKRHRQSESSESDLSSDDAPHKKGHRKHHKHHKRSHNVELRLSDSDYRSHGQRSRSKSLEENSEDESKKRSMDKKSGRHHHHRHHHHRHHHHRHHLDDERNYMQQHSPKFNGKHGEELDKTETEKKDGGHHESRAMVENNDGQIF

SEQ ID NO: 22807 - protein, 316 aa, Zea mays subsp. mays
  peptide (1)..(316): Ceres Seq. ID no. 15222505
  misc_feature (11)..(304): Pfam Name: chromogranin or secretogranin Pfam Description: Granin
  misc_feature (1)..(271): NCBI GI NO: 34895374 NR Description: P0698A04.25
  misc_feature (1)..(229): NCBI GI NO: 18379151 NR Description: expressed protein [Arabidopsis thaliana]
  misc_feature (1)..(272): NCBI GI NO: 34895374 NR Description: P0698A04.25
  misc_feature (21)..(304): NCBI GI NO: 39580460 NR Description: Hypothetical protein CBG20540
  misc_feature (9)..(304): NCBI GI NO: 25151613 NR Description: Putative nuclear protein, nematode specific (80
  misc_feature (1)..(293): NCBI GI NO: 17542856 NR Description: Putative nuclear protein, nematode specific
  misc_feature (28)..(305): NCBI GI NO: 39580460 NR Description: Hypothetical protein CBG20540
  misc_feature (19)..(306): NCBI GI NO: 25151613 NR Description: Putative nuclear protein, nematode specific (80
  misc_feature (11)..(306): NCBI GI NO: 25151613 NR Description: Putative nuclear protein, nematode specific (80
  misc_feature (1)..(304): NCBI GI NO: 39580460 NR Description: Hypothetical protein CBG20540
MERKEAPLKWEQKLEAAAEAKERKLKVAKHTKRSGSDSDSDYYSDDESRKTSKRSHRKHRKHSHYDSGDHEKRKEKSSKRKTKKWSSESSDYSSDDSESSFEEERRRKKKQSKKLRDRGSRSDSSNYDSTADELSKRKRQHKRQRPSKFSGSDYSTDEGDSLVQKRNHGMHSKRHRQSESSESDLSSDDAPHKKGHRKHHKHHKRSHNVELRLSDSDYRSHGQRSRSKSLEENSEDESKKRSMDKKSGRHHHHRHHHHRHHHHRHHLDDERNYMQQHSPKFNGKHGEELDKTETEKKDGGHHESRAMVENNDGQIF

SEQ ID NO: 22808 - DNA, 530 bp, Zea mays subsp. mays
  misc_feature (1)..(530): Ceres Seq. ID no. 13589319
agctcgccatagttgattcatacacaatacaagcatcctctctactactgaagagatcaaattccattcagggtagatagaaatggcatcctccagcttttatcttctcagcgttcttctcatcgtgatcgcttctggcgcctgggctacggatcctagtcctctccaggacttctgcgttgcagacaaagaatcgcctgtacttgtcaatgggtttgcctgcaaggatgctaaggatgtcaaggtcgacgacttcttcctagcagccgacctcgacaagccaagggatacgacgatgagcaaggtcaagtcaaatgtcacattgatcaatgtgatgaagctggccggcctaaacaccttgggcatctccatggctagaattgactatgcccctcaaggacagaacccaccacatacgcatccccgtgccactgcgatcttaactgttcttgaaggatcactctatgttggttttgtcacttctaacccagacaacaaattcattagcaagctactcaacaagggagatg

SEQ ID NO: 22809 - protein, 149 aa, Zea mays subsp. mays
  peptide (1)..(149): Ceres Seq. ID no. 13589320
  misc_feature (62)..(148): Pfam Name: Pfam Description:  Cupin
  misc_feature (1)..(148): NCBI GI NO: 5499730 NR Description: germin-like protein 1 precursor [Oryza sativa]
  misc_feature (1)..(148): NCBI GI NO: 7447336 NR Description: germin-like protein 6 - rice
  misc_feature (1)..(148): NCBI GI NO: 40253800 NR Description: putative germin A
  misc_feature (1)..(148): NCBI GI NO: 7447340 NR Description: germin-like protein - barley
  misc_feature (1)..(148): NCBI GI NO: 5869973 NR Description: germin-like protein [Triticum aestivum]
  misc_feature (1)..(148): NCBI GI NO: 40253802 NR Description: putative germin A
  misc_feature (2)..(148): NCBI GI NO: 5869975 NR Description: germin-like protein [Triticum aestivum]
  misc_feature (1)..(148): NCBI GI NO: 5499732 NR Description: germin-like protein 2 precursor [Oryza sativa]
  misc_feature (1)..(148): NCBI GI NO: 40253804 NR Description: putative germin A
  misc_feature (3)..(148): NCBI GI NO: 9837111 NR Description: germin A [Hordeum vulgare]
MASSSFYLLSVLLIVIASGAWATDPSPLQDFCVADKESPVLVNGFACKDAKDVKVDDFFLAADLDKPRDTTMSKVKSNVTLINVMKLAGLNTLGISMARIDYAPQGQNPPHTHPRATAILTVLEGSLYVGFVTSNPDNKFISKLLNKGD

SEQ ID NO: 22810 - protein, 78 aa, Zea mays subsp. mays
  peptide (1)..(78): Ceres Seq. ID no. 13589321
  misc_feature (1)..(77): Pfam Name: Pfam Description:  Cupin
  misc_feature (1)..(77): NCBI GI NO: 5499730 NR Description: germin-like protein 1 precursor [Oryza sativa]
  misc_feature (1)..(77): NCBI GI NO: 7447336 NR Description: germin-like protein 6 - rice
  misc_feature (1)..(77): NCBI GI NO: 40253800 NR Description: putative germin A
  misc_feature (1)..(77): NCBI GI NO: 7447340 NR Description: germin-like protein - barley
  misc_feature (1)..(77): NCBI GI NO: 5869973 NR Description: germin-like protein [Triticum aestivum]
  misc_feature (1)..(77): NCBI GI NO: 40253802 NR Description: putative germin A
  misc_feature (1)..(77): NCBI GI NO: 5869975 NR Description: germin-like protein [Triticum aestivum]
  misc_feature (1)..(77): NCBI GI NO: 5499732 NR Description: germin-like protein 2 precursor [Oryza sativa]
  misc_feature (1)..(77): NCBI GI NO: 40253804 NR Description: putative germin A
  misc_feature (1)..(77): NCBI GI NO: 9837111 NR Description: germin A [Hordeum vulgare]
MSKVKSNVTLINVMKLAGLNTLGISMARIDYAPQGQNPPHTHPRATAILTVLEGSLYVGFVTSNPDNKFISKLLNKGD

SEQ ID NO: 22811 - DNA, 1240 bp, Zea mays subsp. mays
  misc_feature (1)..(1240): Ceres Seq. ID no. 12634623
taactaaattgacattgctgggaaggatgtgattgagggagttggaggctctactgcagtaatttgcattgccttgtcatgcactagatattaatcagttctttaagtgacatgcagccccacccccaccaaatgatatgacagtgagacaagtcgctgacaaactggcaagctttgttgccaaaaacgggagacagtttgagaatatcacaaggcagaggaatcctggagatacaccattcaagtttctatttgacaaacactgtccagactacaaatattatgagtttcagcttgctgaagaggaaagggctcttgctcagtcaaaggaggctgaagcatcgaaagctaactctggcactgcaagcttcaaggcaccaggtggtacttatagaagctcatttgaacagaagtctaactatcagacacctgcatcagctttgtacggggcatatgagggtagttcttcccaaggaagctcttctagttacggtgatcatacagctccaccatcagatcctgtagcattgatggaattctatgcaaagaaggctgcactggaagaacggaagaggccaccaaggcagtcgaaagatgaaatgccgccacctccttctcttcaaggtacatacacaacattattctcattgttgaaagaatgtagaagcttcaatgtttattccagcacaactaattcttatgcaggtcctcctaagaagggacaccacatgggtgatttcattcctcaagaagatcttgaaaagtttatggctcggtgtaatgatgttgcatcacaaaaggctgcctatgtagccgttgagaagtctaagattcaggcggtcaatattggccacacacttttatgtcagatgggttggagggaaggcgagggtcttgggagcgagagaagaggccgtgcagatcccgttatggctggagatgtgaagaaggatcatcttggtgttggggctgtccagcctggtgaggtcacatctgaagatgacatctatgagcaatacaagaaacggatgatgcttggataccgctataggccaaaccctctgaacaatccaaggaaatcatactactgatgcgggggagttcgtctgaggggagatgtaaggcgctgctttgctgcaattttgctcacagaactaatggttaggggatatcactaacagcattgaaagtttttgttcatcaacagaaatgtcaagaaagtcgttattcagcatatttc

SEQ ID NO: 22812 - protein, 317 aa, Zea mays subsp. mays
  peptide (1)..(317): Ceres Seq. ID no. 12634624
  misc_feature (4)..(58): Pfam Name: Pfam Description:  Surp module
  misc_feature (1)..(317): NCBI GI NO: 18409491 NR Description: gamma response I protein; protein id: At3g52120
  misc_feature (1)..(317): NCBI GI NO: 11357298 NR Description: gamma response I protein - Arabidopsis thaliana
  misc_feature (1)..(162): NCBI GI NO: 6807742 NR Description: hypothetical protein [Homo sapiens]
  misc_feature (196)..(317): NCBI GI NO: 6807742 NR Description: hypothetical protein [Homo sapiens]
  misc_feature (1)..(162): NCBI GI NO: 7512956 NR Description: hypothetical protein F23858_1 - human (fragment)
  misc_feature (196)..(317): NCBI GI NO: 7512956 NR Description: hypothetical protein F23858_1 - human (fragment)
  misc_feature (1)..(162): NCBI GI NO: 18482486 NR Description: RNA-binding protein splice variant a
  misc_feature (196)..(317): NCBI GI NO: 18482486 NR Description: RNA-binding protein splice variant a
  misc_feature (1)..(162): NCBI GI NO: 25992259 NR Description: splicing factor 4 [Homo sapiens]
  misc_feature (1)..(162): NCBI GI NO: 33469964 NR Description: splicing factor 4 isoform a; RNA-binding protein
MTVRQVADKLASFVAKNGRQFENITRQRNPGDTPFKFLFDKHCPDYKYYEFQLAEEERALAQSKEAEASKANSGTASFKAPGGTYRSSFEQKSNYQTPASALYGAYEGSSSQGSSSSYGDHTAPPSDPVALMEFYAKKAALEERKRPPRQSKDEMPPPPSLQGTYTTLFSLLKECRSFNVYSSTTNSYAGPPKKGHHMGDFIPQEDLEKFMARCNDVASQKAAYVAVEKSKIQAVNIGHTLLCQMGWREGEGLGSERRGRADPVMAGDVKKDHLGVGAVQPGEVTSEDDIYEQYKKRMMLGYRYRPNPLNNPRKSYY

SEQ ID NO: 22813 - protein, 186 aa, Zea mays subsp. mays
  peptide (1)..(186): Ceres Seq. ID no. 12634625
  misc_feature (103)..(147): Pfam Name: Pfam Description:  G-patch domain
  misc_feature (1)..(186): NCBI GI NO: 18409491 NR Description: gamma response I protein; protein id: At3g52120
  misc_feature (1)..(186): NCBI GI NO: 11357298 NR Description: gamma response I protein - Arabidopsis thaliana
  misc_feature (1)..(31): NCBI GI NO: 6807742 NR Description: hypothetical protein [Homo sapiens]
  misc_feature (65)..(186): NCBI GI NO: 6807742 NR Description: hypothetical protein [Homo sapiens]
  misc_feature (1)..(31): NCBI GI NO: 7512956 NR Description: hypothetical protein F23858_1 - human (fragment)
  misc_feature (65)..(186): NCBI GI NO: 7512956 NR Description: hypothetical protein F23858_1 - human (fragment)
  misc_feature (1)..(31): NCBI GI NO: 18482486 NR Description: RNA-binding protein splice variant a
  misc_feature (65)..(186): NCBI GI NO: 18482486 NR Description: RNA-binding protein splice variant a
  misc_feature (1)..(31): NCBI GI NO: 25992259 NR Description: splicing factor 4 [Homo sapiens]
  misc_feature (1)..(31): NCBI GI NO: 33469964 NR Description: splicing factor 4 isoform a; RNA-binding protein
MEFYAKKAALEERKRPPRQSKDEMPPPPSLQGTYTTLFSLLKECRSFNVYSSTTNSYAGPPKKGHHMGDFIPQEDLEKFMARCNDVASQKAAYVAVEKSKIQAVNIGHTLLCQMGWREGEGLGSERRGRADPVMAGDVKKDHLGVGAVQPGEVTSEDDIYEQYKKRMMLGYRYRPNPLNNPRKSYY

SEQ ID NO: 22814 - protein, 163 aa, Zea mays subsp. mays
  peptide (1)..(163): Ceres Seq. ID no. 12634626
  misc_feature (80)..(124): Pfam Name: Pfam Description:  G-patch domain
  misc_feature (1)..(163): NCBI GI NO: 18409491 NR Description: gamma response I protein; protein id: At3g52120
  misc_feature (1)..(163): NCBI GI NO: 11357298 NR Description: gamma response I protein - Arabidopsis thaliana
  misc_feature (42)..(163): NCBI GI NO: 6807742 NR Description: hypothetical protein [Homo sapiens]
  misc_feature (42)..(163): NCBI GI NO: 7512956 NR Description: hypothetical protein F23858_1 - human (fragment)
  misc_feature (42)..(163): NCBI GI NO: 18482486 NR Description: RNA-binding protein splice variant a
  misc_feature (42)..(163): NCBI GI NO: 25992259 NR Description: splicing factor 4 [Homo sapiens]
  misc_feature (42)..(163): NCBI GI NO: 33469964 NR Description: splicing factor 4 isoform a; RNA-binding protein
  misc_feature (42)..(163): NCBI GI NO: 39793920 NR Description: Unknown (protein for IMAGE:6205595) [Homo sapiens]
  misc_feature (42)..(163): NCBI GI NO: 34877669 NR Description: similar to splicing factor 4 [Rattus norvegicus]
  misc_feature (1)..(12): NCBI GI NO: 7512956 NR Description: hypothetical protein F23858_1 - human (fragment)
MPPPPSLQGTYTTLFSLLKECRSFNVYSSTTNSYAGPPKKGHHMGDFIPQEDLEKFMARCNDVASQKAAYVAVEKSKIQAVNIGHTLLCQMGWREGEGLGSERRGRADPVMAGDVKKDHLGVGAVQPGEVTSEDDIYEQYKKRMMLGYRYRPNPLNNPRKSYY

SEQ ID NO: 22815 - DNA, 724 bp, Zea mays subsp. mays
  misc_feature (1)..(724): Ceres Seq. ID no. 14306398
gaatttggtgaagaggaattaatggaacagaacgagaatggttctactatgattgagaagccatccacttctaacactattaaaacctctgtgcctgttcctgtcgacagtctcatgctgagcctgctcagtgagcaaactcggtggatttcaggttaccatgaacatgaagctctcctccaagaaaatgaagaagaaaagcttacaaaggaggagcaggacctggctttgttcgaatgggagtcattgaggaaagctgcatctgatcctgagagaaaatcaagcatgagcgcagttccaacatatcccaatcctgtgcggccacttaagcctgcttcaagaagccggcaactgcagcaacctaaggctaactcaaataaccaaaagaagtgcaccaacttaacccacttgctgactctgagaagccatggcacaaaagcagggtgcacgacaacctgtaacgagtgcggccaggaaattagttgggagactctaaacagagatggtagatcgagatgatgcctgtctctgtggcattgccagatttttttgggggtctttatgtaatgttaacgtccaggtagcagtatatatattgcgtatacgagagtattagagtaggtagaatgtagaatggacaaaaaatggctcttgtggtacacatggtagaacgcatgggatgcaaaaaatgaacgatcacattgttatggaatgtagtcgtaac

SEQ ID NO: 22816 - protein, 172 aa, Zea mays subsp. mays
  peptide (1)..(172): Ceres Seq. ID no. 14306399
  misc_feature (1)..(172): NCBI GI NO: 37535026 NR Description: putative zinc finger helicase
  misc_feature (1)..(172): NCBI GI NO: 14140291 NR Description: putative helicase
  misc_feature (6)..(163): NCBI GI NO: 15223265 NR Description: SNF2domain/helicase domain-containing protein
  misc_feature (6)..(163): NCBI GI NO: 7485004 NR Description: helicase homolog F22O13.8 - Arabidopsis thaliana
  misc_feature (6)..(163): NCBI GI NO: 25407048 NR Description: protein F22O13.8 [imported] - Arabidopsis thaliana
EFGEEELMEQNENGSTMIEKPSTSNTIKTSVPVPVDSLMLSLLSEQTRWISGYHEHEALLQENEEEKLTKEEQDLALFEWESLRKAASDPERKSSMSAVPTYPNPVRPLKPASRSRQLQQPKANSNNQKKCTNLTHLLTLRSHGTKAGCTTTCNECGQEISWETLNRDGRSR

SEQ ID NO: 22817 - protein, 165 aa, Zea mays subsp. mays
  peptide (1)..(165): Ceres Seq. ID no. 14306400
  misc_feature (1)..(165): NCBI GI NO: 37535026 NR Description: putative zinc finger helicase
  misc_feature (1)..(165): NCBI GI NO: 14140291 NR Description: putative helicase
  misc_feature (1)..(156): NCBI GI NO: 15223265 NR Description: SNF2domain/helicase domain-containing protein
  misc_feature (1)..(156): NCBI GI NO: 7485004 NR Description: helicase homolog F22O13.8 - Arabidopsis thaliana
  misc_feature (1)..(156): NCBI GI NO: 25407048 NR Description: protein F22O13.8 [imported] - Arabidopsis thaliana
MEQNENGSTMIEKPSTSNTIKTSVPVPVDSLMLSLLSEQTRWISGYHEHEALLQENEEEKLTKEEQDLALFEWESLRKAASDPERKSSMSAVPTYPNPVRPLKPASRSRQLQQPKANSNNQKKCTNLTHLLTLRSHGTKAGCTTTCNECGQEISWETLNRDGRSR

SEQ ID NO: 22818 - protein, 156 aa, Zea mays subsp. mays
  peptide (1)..(156): Ceres Seq. ID no. 14306401
  misc_feature (1)..(156): NCBI GI NO: 37535026 NR Description: putative zinc finger helicase
  misc_feature (1)..(156): NCBI GI NO: 14140291 NR Description: putative helicase
  misc_feature (1)..(147): NCBI GI NO: 15223265 NR Description: SNF2domain/helicase domain-containing protein
  misc_feature (1)..(147): NCBI GI NO: 7485004 NR Description: helicase homolog F22O13.8 - Arabidopsis thaliana
  misc_feature (1)..(147): NCBI GI NO: 25407048 NR Description: protein F22O13.8 [imported] - Arabidopsis thaliana
MIEKPSTSNTIKTSVPVPVDSLMLSLLSEQTRWISGYHEHEALLQENEEEKLTKEEQDLALFEWESLRKAASDPERKSSMSAVPTYPNPVRPLKPASRSRQLQQPKANSNNQKKCTNLTHLLTLRSHGTKAGCTTTCNECGQEISWETLNRDGRSR

SEQ ID NO: 22819 - DNA, 946 bp, Zea mays subsp. mays
  misc_feature (1)..(946): Ceres Seq. ID no. 12634652
ggctcaaaagaggttgagcaaccgagcccagtgtccatccttgagcctccaattaatgaagatatttgttttccacgatgtttcaactatgacttgcaagggatggctaacaaacagagaggttgccatcaatatcacaatgaatctgaagttaacatgtcaagtgatgatgaagaccattctttttaccaatctttggaagcatttcaggtcgaggaaaactgggacttctcatatcttctcgacatacttatatgctctggtatcatagttgttgactggcagctcatctgcaagtcatggtacttgcctggttaccctgttggccctcatgtctttgataggcttgaaaggaaatacaataaaatcgcaacatgggcaaagcctgagaggaggcttctttttgacctcgtgaattcaattctttccgaggtccttgcaccatgtgttgatgtgcacccatgggtgcagcctagtagacactgtgtggcattttggggccctgaagggcctgttgagaaggtttggcagacaattgttaggctgcaggaagactgtgtcacaaggcatcctgatgagatggttcttgatacaaattggctggaagtaggcaccgacatcaatatggtggggaagcagatagctaggatgttacatggcgacctcttggaagaagtcatagtggacttccttggttgagttggtagtttcatgtggacataactagtaactaacaacttcggcaacatggggttcgctcaaacttcaagcagattatgctgaatatgtaacggcttttcaagtgcacacatgctgcatttttcttctggttataataggagctatgtattatgtaattacattggagagcaaaatatacaggccaaaaaaacactactgcaggtatttttcgattctgtactgctaagctgtacttcctggtcct

SEQ ID NO: 22820 - protein, 232 aa, Zea mays subsp. mays
  peptide (1)..(232): Ceres Seq. ID no. 12634653
  misc_feature (3)..(232): NCBI GI NO: 34897354 NR Description: hypothetical protein [Oryza sativa]
  misc_feature (3)..(229): NCBI GI NO: 29124124 NR Description: hypothetical protein
  misc_feature (2)..(228): NCBI GI NO: 21928151 NR Description: AT3g53540/F4P12_240 [Arabidopsis thaliana]
  misc_feature (72)..(228): NCBI GI NO: 11357793 NR Description: hypothetical protein F4P12
  misc_feature (72)..(228): NCBI GI NO: 30693854 NR Description: expressed protein [Arabidopsis thaliana]
  misc_feature (2)..(227): NCBI GI NO: 15225467 NR Description: hypothetical protein; protein id: At2g39440.1
GSKEVEQPSPVSILEPPINEDICFPRCFNYDLQGMANKQRGCHQYHNESEVNMSSDDEDHSFYQSLEAFQVEENWDFSYLLDILICSGIIVVDWQLICKSWYLPGYPVGPHVFDRLERKYNKIATWAKPERRLLFDLVNSILSEVLAPCVDVHPWVQPSRHCVAFWGPEGPVEKVWQTIVRLQEDCVTRHPDEMVLDTNWLEVGTDINMVGKQIARMLHGDLLEEVIVDFLG

SEQ ID NO: 22821 - protein, 198 aa, Zea mays subsp. mays
  peptide (1)..(198): Ceres Seq. ID no. 12634654
  misc_feature (1)..(198): NCBI GI NO: 34897354 NR Description: hypothetical protein [Oryza sativa]
  misc_feature (1)..(195): NCBI GI NO: 29124124 NR Description: hypothetical protein
  misc_feature (1)..(194): NCBI GI NO: 21928151 NR Description: AT3g53540/F4P12_240 [Arabidopsis thaliana]
  misc_feature (38)..(194): NCBI GI NO: 11357793 NR Description: hypothetical protein F4P12
  misc_feature (38)..(194): NCBI GI NO: 30693854 NR Description: expressed protein [Arabidopsis thaliana]
  misc_feature (1)..(193): NCBI GI NO: 15225467 NR Description: hypothetical protein; protein id: At2g39440.1
MANKQRGCHQYHNESEVNMSSDDEDHSFYQSLEAFQVEENWDFSYLLDILICSGIIVVDWQLICKSWYLPGYPVGPHVFDRLERKYNKIATWAKPERRLLFDLVNSILSEVLAPCVDVHPWVQPSRHCVAFWGPEGPVEKVWQTIVRLQEDCVTRHPDEMVLDTNWLEVGTDINMVGKQIARMLHGDLLEEVIVDFLG

SEQ ID NO: 22822 - protein, 180 aa, Zea mays subsp. mays
  peptide (1)..(180): Ceres Seq. ID no. 12634655
  misc_feature (1)..(180): NCBI GI NO: 34897354 NR Description: hypothetical protein [Oryza sativa]
  misc_feature (1)..(177): NCBI GI NO: 29124124 NR Description: hypothetical protein
  misc_feature (1)..(176): NCBI GI NO: 21928151 NR Description: AT3g53540/F4P12_240 [Arabidopsis thaliana]
  misc_feature (20)..(176): NCBI GI NO: 11357793 NR Description: hypothetical protein F4P12
  misc_feature (20)..(176): NCBI GI NO: 30693854 NR Description: expressed protein [Arabidopsis thaliana]
  misc_feature (1)..(175): NCBI GI NO: 15225467 NR Description: hypothetical protein; protein id: At2g39440.1
MSSDDEDHSFYQSLEAFQVEENWDFSYLLDILICSGIIVVDWQLICKSWYLPGYPVGPHVFDRLERKYNKIATWAKPERRLLFDLVNSILSEVLAPCVDVHPWVQPSRHCVAFWGPEGPVEKVWQTIVRLQEDCVTRHPDEMVLDTNWLEVGTDINMVGKQIARMLHGDLLEEVIVDFLG

SEQ ID NO: 22823 - DNA, 864 bp, Zea mays subsp. mays
  misc_feature (1)..(864): Ceres Seq. ID no. 15224350
taccgggscccccctcgagtcagctacgtaggccccccccccccccagggccaagaaatttcaaaagaagtctttccctctctttgatgctcttggggaactatatgatgggcacattgctcaagggacctggaacataacatctacacagctaccacaagaatggaacacaatttcaaatgaagaagaacaagtgaacaccacaagaatggatgaggaaggcattattcaacaacaaccacaagaagaggattcaagattggaacaagatgaagatcctataattgaaaggactgaacagaggtctactgcaacgagaaggtctactgcatcaacaatcaatcaagataaggaagcaaagaggatgaagaaggattctttggaaggacttgttgggagatatctagatctaaaatcaaaacaagttgaggatgaggttacacaaatggcgaaaggaaaagaatccgctcaaggtaatgacttctccatcatgagatgcatttctgttcttagatccatgaatgtgacagcagatgagaagataaaagcagctgaggtgttcgacataccaaacaacagagagacatttatcagttttagtgttgatgaaccagaaactgccctcctatggttaagacagaagattgataagctctaagacaagaaatattggtcatatggagacagttctgcacagcgttctaagtgccagtatgagctatatatatgttgcatttctccatgtttgggctcagcatgtaatagaactgaaggaaggttgttgcaagacttgtatggcatgcttaaatttctggataaaatctagcttatactaagtctattacatgcttaaatttttcgctc

SEQ ID NO: 22824 - protein, 149 aa, Zea mays subsp. mays
  peptide (1)..(149): Ceres Seq. ID no. 15224351
  misc_feature (13)..(146): NCBI GI NO: 38344751 NR Description: OSJNBa0089K21.9
  misc_feature (39)..(146): NCBI GI NO: 34913838 NR Description: OSJNBa0042P21.26
  misc_feature (1)..(146): NCBI GI NO: 37535590 NR Description: hypothetical protein
  misc_feature (12)..(146): NCBI GI NO: 37535088 NR Description: hypothetical protein
  misc_feature (1)..(59): NCBI GI NO: 34907580 NR Description: B1078G07.31
MDEEGIIQQQPQEEDSRLEQDEDPIIERTEQRSTATRRSTASTINQDKEAKRMKKDSLEGLVGRYLDLKSKQVEDEVTQMAKGKESAQGNDFSIMRCISVLRSMNVTADEKIKAAEVFDIPNNRETFISFSVDEPETALLWLRQKIDKL

SEQ ID NO: 22825 - protein, 97 aa, Zea mays subsp. mays
  peptide (1)..(97): Ceres Seq. ID no. 15224352
  misc_feature (1)..(94): NCBI GI NO: 38344751 NR Description: OSJNBa0089K21.9
  misc_feature (1)..(94): NCBI GI NO: 34913838 NR Description: OSJNBa0042P21.26
  misc_feature (1)..(94): NCBI GI NO: 37535590 NR Description: hypothetical protein
  misc_feature (1)..(94): NCBI GI NO: 37535088 NR Description: hypothetical protein
MKKDSLEGLVGRYLDLKSKQVEDEVTQMAKGKESAQGNDFSIMRCISVLRSMNVTADEKIKAAEVFDIPNNRETFISFSVDEPETALLWLRQKIDKL

SEQ ID NO: 22826 - DNA, 1419 bp, Zea mays subsp. mays
  misc_feature (1)..(1419): Ceres Seq. ID no. 15224720
ccgggccccccctcgagtcagctacgtaggccccccccccccccccgaagacaaaggatccaatcatagtttcaattggttggaggcgatttcaaacaacccctgtgtatgcaatagaggatcggaatggtcgacaccgcatgctgaagtatacacctgagcatatgcattgctttgctatgttttggggaccacttgctccaccgaagagtggtgtattagcagtccagaatctttccaacaatcaggtgccatttaggataactgcaacaggatgggttcaagaattcaacaatactgccagaattgtgaagaagataaagctcacaggcacaccatgcaagatatttaagaagactgcactaatcaagggaatgttcacatccgatttagaggttgctaggtttgaaggtgctgccattcggactgtaagtggaatccgaggacaggttaaaaaggcagcaaagattgagccaggagatatgttgaagagaaaaggggaaaatacagaaggaatcgcaagatgtacatttgaggacagaattcttatgagtgacattgttttcctgcgtgcctgggtcaacgttgaagttcctacgtactctaaccctgtgaccactgctctgcaacctagagagcagacctggcaaggcatgagaacaactgctgagttgcggaaggcacacaatatccctaccccacacaacaaggattcagtttacaagcctatcgagcggaaaccacgcaagttcaatcccgtcgagatccccgcaaagctgcaacagttacttccctttaaatctaagcctaaggacacagcgaagcagaagaaagcaccagttgaaaacagggtgcctgtaatcatgcagcctagtgagaagaagacacacgcagctatachacagctaaggctgataaaacacgagaaggcaaagaagaagaaaattaaggaacaacagaagaaaaaagcatacgaggcagagaaagccaagaccgagctactgacgaagaagcgccagagggaagagaggcgtgtgagataccgggaagaagataagcagaagaaacgtgcacgcagatgaggcgaggaacggggtatgtgcaccaggaactcagcagcaaccgggcatgctctcttgtgcagaacatatgccaaaatcttagttcatatacggagagctataaaaggtgcagtaccacccatctgggcgaagaagcatgtcaagtcataaccagggcgcggagatgagcaagttaggttgcttgtttaagttatgtatcggttgccctaacgcggaatattgtctgagtgtttggcaaacgcatgtggactcccaagtaaatytggagtcataattttggagtgtatactacctcaggtaccgaatgttaggcaaacgcatgtggtctttagctccc

SEQ ID NO: 22827 - protein, 313 aa, Zea mays subsp. mays
  peptide (1)..(313): Ceres Seq. ID no. 15224721
  misc_feature (1)..(149): Pfam Name: DUF663 Pfam Description: Protein of unknown function
  misc_feature (1)..(313): NCBI GI NO: 14596139 NR Description: Unknown protein [Arabidopsis thaliana]
  misc_feature (1)..(313): NCBI GI NO: 15222176 NR Description: expressed protein [Arabidopsis thaliana]
  misc_feature (1)..(313): NCBI GI NO: 25372790 NR Description: hypothetical protein
  misc_feature (1)..(313): NCBI GI NO: 21410151 NR Description: BC030906 protein [Mus musculus]
  misc_feature (1)..(313): NCBI GI NO: 37359828 NR Description: mKIAA0187 protein [Mus musculus]
  misc_feature (1)..(313): NCBI GI NO: 27696627 NR Description: Ribosome biogenesis protein BMS1 homolog
  misc_feature (1)..(313): NCBI GI NO: 39930555 NR Description: BMS1-like, ribosome assembly protein
  misc_feature (1)..(313): NCBI GI NO: 7661980 NR Description: BMS1-like, ribosome assembly protein
  misc_feature (1)..(313): NCBI GI NO: 40788900 NR Description: KIAA0187 [Homo sapiens]
  misc_feature (1)..(311): NCBI GI NO: 39582203 NR Description: Hypothetical protein CBG08772
  misc_feature (254)..(254): Xaa is any aa, unknown or other
MLKYTPEHMHCFAMFWGPLAPPKSGVLAVQNLSNNQVPFRITATGWVQEFNNTARIVKKIKLTGTPCKIFKKTALIKGMFTSDLEVARFEGAAIRTVSGIRGQVKKAAKIEPGDMLKRKGENTEGIARCTFEDRILMSDIVFLRAWVNVEVPTYSNPVTTALQPREQTWQGMRTTAELRKAHNIPTPHNKDSVYKPIERKPRKFNPVEIPAKLQQLLPFKSKPKDTAKQKKAPVENRVPVIMQPSEKKTHAAIXQLRLIKHEKAKKKKIKEQQKKKAYEAEKAKTELLTKKRQREERRVRYREEDKQKKRARR

SEQ ID NO: 22828 - protein, 305 aa, Zea mays subsp. mays
  peptide (1)..(305): Ceres Seq. ID no. 15224722
  misc_feature (1)..(141): Pfam Name: DUF663 Pfam Description: Protein of unknown function
  misc_feature (1)..(305): NCBI GI NO: 14596139 NR Description: Unknown protein [Arabidopsis thaliana]
  misc_feature (1)..(305): NCBI GI NO: 25372790 NR Description: hypothetical protein
  misc_feature (1)..(305): NCBI GI NO: 15222176 NR Description: expressed protein [Arabidopsis thaliana]
  misc_feature (1)..(305): NCBI GI NO: 21410151 NR Description: BC030906 protein [Mus musculus]
  misc_feature (1)..(305): NCBI GI NO: 37359828 NR Description: mKIAA0187 protein [Mus musculus]
  misc_feature (1)..(305): NCBI GI NO: 27696627 NR Description: Ribosome biogenesis protein BMS1 homolog
  misc_feature (1)..(305): NCBI GI NO: 39930555 NR Description: BMS1-like, ribosome assembly protein
  misc_feature (1)..(305): NCBI GI NO: 7661980 NR Description: BMS1-like, ribosome assembly protein
  misc_feature (1)..(305): NCBI GI NO: 40788900 NR Description: KIAA0187 [Homo sapiens]
  misc_feature (1)..(303): NCBI GI NO: 39582203 NR Description: Hypothetical protein CBG08772
  misc_feature (246)..(246): Xaa is any aa, unknown or other
MHCFAMFWGPLAPPKSGVLAVQNLSNNQVPFRITATGWVQEFNNTARIVKKIKLTGTPCKIFKKTALIKGMFTSDLEVARFEGAAIRTVSGIRGQVKKAAKIEPGDMLKRKGENTEGIARCTFEDRILMSDIVFLRAWVNVEVPTYSNPVTTALQPREQTWQGMRTTAELRKAHNIPTPHNKDSVYKPIERKPRKFNPVEIPAKLQQLLPFKSKPKDTAKQKKAPVENRVPVIMQPSEKKTHAAIXQLRLIKHEKAKKKKIKEQQKKKAYEAEKAKTELLTKKRQREERRVRYREEDKQKKRARR

SEQ ID NO: 22829 - protein, 300 aa, Zea mays subsp. mays
  peptide (1)..(300): Ceres Seq. ID no. 15224723
  misc_feature (1)..(136): Pfam Name: DUF663 Pfam Description: Protein of unknown function
  misc_feature (1)..(300): NCBI GI NO: 14596139 NR Description: Unknown protein [Arabidopsis thaliana]
  misc_feature (1)..(300): NCBI GI NO: 25372790 NR Description: hypothetical protein
  misc_feature (1)..(300): NCBI GI NO: 15222176 NR Description: expressed protein [Arabidopsis thaliana]
  misc_feature (1)..(300): NCBI GI NO: 21410151 NR Description: BC030906 protein [Mus musculus]
  misc_feature (1)..(300): NCBI GI NO: 37359828 NR Description: mKIAA0187 protein [Mus musculus]
  misc_feature (1)..(300): NCBI GI NO: 27696627 NR Description: Ribosome biogenesis protein BMS1 homolog
  misc_feature (1)..(300): NCBI GI NO: 39930555 NR Description: BMS1-like, ribosome assembly protein
  misc_feature (1)..(300): NCBI GI NO: 7661980 NR Description: BMS1-like, ribosome assembly protein
  misc_feature (1)..(300): NCBI GI NO: 40788900 NR Description: KIAA0187 [Homo sapiens]
  misc_feature (1)..(298): NCBI GI NO: 39582203 NR Description: Hypothetical protein CBG08772
  misc_feature (241)..(241): Xaa is any aa, unknown or other
MFWGPLAPPKSGVLAVQNLSNNQVPFRITATGWVQEFNNTARIVKKIKLTGTPCKIFKKTALIKGMFTSDLEVARFEGAAIRTVSGIRGQVKKAAKIEPGDMLKRKGENTEGIARCTFEDRILMSDIVFLRAWVNVEVPTYSNPVTTALQPREQTWQGMRTTAELRKAHNIPTPHNKDSVYKPIERKPRKFNPVEIPAKLQQLLPFKSKPKDTAKQKKAPVENRVPVIMQPSEKKTHAAIXQLRLIKHEKAKKKKIKEQQKKKAYEAEKAKTELLTKKRQREERRVRYREEDKQKKRARR

SEQ ID NO: 22830 - DNA, 1083 bp, Zea mays subsp. mays
  misc_feature (1)..(1083): Ceres Seq. ID no. 14305132
gtagctccttctcctacacagaaaagccgtcgcctactcgcctccggccaaaaaactgactccacacacgacccaaatcttttcctctccacaggcgactcccaacgcaacagcagctcgtcgagcgagtcgtcgccggccggccggtatatacgcaagaaagccaagaaaaacacttctgcctcttcctccatatccaagaaccaaaggtagctagctagccgcgactcgttggctagacgattcaagcagcagcgcaggatggtggcgccggtggtgattgcgtcggccgggctgggcatgctggccggcgtggcgatggccaaccggtccctcgggaacgggctcccggcggcctccaggtgggacgcgcgcccgcgctgcgccacgtgcggcggctccggccgcgtggagtgcatctgcaaccgctggtccgacggcgactccggctgccggacctgcgctgggtcggggaggatgccctgccgcagctgcggcggctccggcacgggccgaccgctccctgcacggctcaccgtccagcaccagaagccgccgccgccgccgccgcccggctacaactgatcgatggtggatgattaggtatccgtatccgtggattatatacttctcgcgggcgatttgcgatgcgacccatacaagaaagaaatcagttaaactgcgatatgatgcgctctagctagttaatcatatatacatatatacacgtccgatccattcgtgtggatgacatccatgttgcatatgtacaagtacatgtctcttcttcaagagtcaagactagctgtaattgagctgagcatacttggtgttgctgttgttcagttaatttgcaaaaacgcacaacacaagaaagaaggaaaaaaaaaacagagtggaaatgtttttttttaagatctggagaacaacatgattgagaagggagggaaggtgattctgagcacagttttgttggaaaggctgtagttaattctggtggatgtaatatattatatgtatgtatatgcttagattcgttaatatatatgcatatatatgcacccacatgaatatgatttacag

SEQ ID NO: 22831 - protein, 107 aa, Zea mays subsp. mays
  peptide (1)..(107): Ceres Seq. ID no. 14305133
  misc_feature (1)..(99): NCBI GI NO: 38347221 NR Description: OSJNBa0044M19.3
  misc_feature (2)..(102): NCBI GI NO: 18422312 NR Description: expressed protein [Arabidopsis thaliana]
MVAPVVIASAGLGMLAGVAMANRSLGNGLPAASRWDARPRCATCGGSGRVECICNRWSDGDSGCRTCAGSGRMPCRSCGGSGTGRPLPARLTVQHQKPPPPPPPGYN

SEQ ID NO: 22832 - protein, 94 aa, Zea mays subsp. mays
  peptide (1)..(94): Ceres Seq. ID no. 14305134
  misc_feature (1)..(86): NCBI GI NO: 38347221 NR Description: OSJNBa0044M19.3
  misc_feature (1)..(89): NCBI GI NO: 18422312 NR Description: expressed protein [Arabidopsis thaliana]
MLAGVAMANRSLGNGLPAASRWDARPRCATCGGSGRVECICNRWSDGDSGCRTCAGSGRMPCRSCGGSGTGRPLPARLTVQHQKPPPPPPPGYN

SEQ ID NO: 22833 - protein, 88 aa, Zea mays subsp. mays
  peptide (1)..(88): Ceres Seq. ID no. 14305135
  misc_feature (1)..(80): NCBI GI NO: 38347221 NR Description: OSJNBa0044M19.3
  misc_feature (1)..(83): NCBI GI NO: 18422312 NR Description: expressed protein [Arabidopsis thaliana]
MANRSLGNGLPAASRWDARPRCATCGGSGRVECICNRWSDGDSGCRTCAGSGRMPCRSCGGSGTGRPLPARLTVQHQKPPPPPPPGYN

SEQ ID NO: 22834 - DNA, 977 bp, Zea mays subsp. mays
  misc_feature (1)..(977): Ceres Seq. ID no. 14305097
aatcaacaacaatatccagaccttctctgagaatcaaatcaaacaggaagctcacagaagtccaaaattacagttataattcatctgtcacccttgaccccagtctgatccagccatgtttagaaacaattacgataacgattcggtgactttctcaccgcaaggccgtatcttccaggtggaatatgctcaagaagctgtcaaacagggttccgttgtggtcggattagttagcaagacacatgctgttctcgtggggttgaagcgaaacgcagaagaactctcgtcgtaccagaaaaaagtcatcgaaatcgactcacacatgggcatcgccattgccggcctctcctccgacgcccgggtcctttccaacttcatgaaacagcaatctctcggctcacgaatgacatacggccgcgccatccccctagaccggatcgtcacccaaatcggtgatcgcgcacaaaccaacacacaacattacggcaaacgaccatacggtgttggcctcttagttgcgggtgtcgatgaggcaggcccgcatttattcgagtttcaaccttccggtatgacgcaggagatgcttgcatgcgcgattggggctcggtcacagatggcgaggacttatctggaaagaaatctggccgagtttgcggattgttcgcgcgaggagttgattaaccatggcctgaaggccttgagggagactctttcgcaggataaggagcttaggattgataataccacggttggagttgtgggacttgtccccaaggattcggcgacaccttcctccaagggtactaagctagagaactttaagctatatgatggacaggacgttggtgcgctattggaggcgttggatggcgcagctaccgagggtggtgaaatggaggttgatacacagtgatggattagcgttctatctcttcaatagatcaatttctcattatgaatggataatcatactcgtt

SEQ ID NO: 22835 - protein, 265 aa, Zea mays subsp. mays
  peptide (1)..(265): Ceres Seq. ID no. 14305098
  misc_feature (29)..(215): Pfam Name: Pfam Description:  Proteasome A-type and B-type
  misc_feature (1)..(264): NCBI GI NO: 40738697 NR Description: hypothetical protein AN6547.2
  misc_feature (1)..(264): NCBI GI NO: 32413036 NR Description: hypothetical protein [Neurospora crassa]
  misc_feature (1)..(250): NCBI GI NO: 19115013 NR Description: proteasome subunit C2 [Schizosaccharomyces pombe]
  misc_feature (1)..(251): NCBI GI NO: 4506179 NR Description: proteasome alpha 1 subunit isoform 2
  misc_feature (1)..(251): NCBI GI NO: 33563282 NR Description: proteasome
  misc_feature (1)..(251): NCBI GI NO: 23110935 NR Description: proteasome alpha 1 subunit isoform 1
  misc_feature (1)..(251): NCBI GI NO: 8394060 NR Description: proteasome
  misc_feature (1)..(251): NCBI GI NO: 13543551 NR Description: proteasome
  misc_feature (1)..(251): NCBI GI NO: 30584967 NR Description: Homo sapiens proteasome
  misc_feature (1)..(251): NCBI GI NO: 190447 NR Description: prosomal protein P30-33K
MFRNNYDNDSVTFSPQGRIFQVEYAQEAVKQGSVVVGLVSKTHAVLVGLKRNAEELSSYQKKVIEIDSHMGIAIAGLSSDARVLSNFMKQQSLGSRMTYGRAIPLDRIVTQIGDRAQTNTQHYGKRPYGVGLLVAGVDEAGPHLFEFQPSGMTQEMLACAIGARSQMARTYLERNLAEFADCSREELINHGLKALRETLSQDKELRIDNTTVGVVGLVPKDSATPSSKGTKLENFKLYDGQDVGALLEALDGAATEGGEMEVDTQ

SEQ ID NO: 22836 - protein, 196 aa, Zea mays subsp. mays
  peptide (1)..(196): Ceres Seq. ID no. 14305099
  misc_feature (1)..(146): Pfam Name: Pfam Description:  Proteasome A-type and B-type
  misc_feature (1)..(195): NCBI GI NO: 40738697 NR Description: hypothetical protein AN6547.2
  misc_feature (1)..(195): NCBI GI NO: 32413036 NR Description: hypothetical protein [Neurospora crassa]
  misc_feature (1)..(181): NCBI GI NO: 19115013 NR Description: proteasome subunit C2 [Schizosaccharomyces pombe]
  misc_feature (1)..(182): NCBI GI NO: 4506179 NR Description: proteasome alpha 1 subunit isoform 2
  misc_feature (1)..(182): NCBI GI NO: 33563282 NR Description: proteasome
  misc_feature (1)..(182): NCBI GI NO: 23110935 NR Description: proteasome alpha 1 subunit isoform 1
  misc_feature (1)..(182): NCBI GI NO: 8394060 NR Description: proteasome
  misc_feature (1)..(182): NCBI GI NO: 13543551 NR Description: proteasome
  misc_feature (1)..(182): NCBI GI NO: 30584967 NR Description: Homo sapiens proteasome
  misc_feature (1)..(182): NCBI GI NO: 190447 NR Description: prosomal protein P30-33K
MGIAIAGLSSDARVLSNFMKQQSLGSRMTYGRAIPLDRIVTQIGDRAQTNTQHYGKRPYGVGLLVAGVDEAGPHLFEFQPSGMTQEMLACAIGARSQMARTYLERNLAEFADCSREELINHGLKALRETLSQDKELRIDNTTVGVVGLVPKDSATPSSKGTKLENFKLYDGQDVGALLEALDGAATEGGEMEVDTQ

SEQ ID NO: 22837 - protein, 178 aa, Zea mays subsp. mays
  peptide (1)..(178): Ceres Seq. ID no. 14305100
  misc_feature (1)..(128): Pfam Name: Pfam Description:  Proteasome A-type and B-type
  misc_feature (1)..(177): NCBI GI NO: 40738697 NR Description: hypothetical protein AN6547.2
  misc_feature (1)..(177): NCBI GI NO: 32413036 NR Description: hypothetical protein [Neurospora crassa]
  misc_feature (1)..(163): NCBI GI NO: 19115013 NR Description: proteasome subunit C2 [Schizosaccharomyces pombe]
  misc_feature (1)..(164): NCBI GI NO: 4506179 NR Description: proteasome alpha 1 subunit isoform 2
  misc_feature (1)..(164): NCBI GI NO: 33563282 NR Description: proteasome
  misc_feature (1)..(164): NCBI GI NO: 23110935 NR Description: proteasome alpha 1 subunit isoform 1
  misc_feature (1)..(164): NCBI GI NO: 8394060 NR Description: proteasome
  misc_feature (1)..(164): NCBI GI NO: 13543551 NR Description: proteasome
  misc_feature (1)..(164): NCBI GI NO: 30584967 NR Description: Homo sapiens proteasome
  misc_feature (1)..(164): NCBI GI NO: 190447 NR Description: prosomal protein P30-33K
MKQQSLGSRMTYGRAIPLDRIVTQIGDRAQTNTQHYGKRPYGVGLLVAGVDEAGPHLFEFQPSGMTQEMLACAIGARSQMARTYLERNLAEFADCSREELINHGLKALRETLSQDKELRIDNTTVGVVGLVPKDSATPSSKGTKLENFKLYDGQDVGALLEALDGAATEGGEMEVDTQ

SEQ ID NO: 22838 - DNA, 898 bp, Zea mays subsp. mays
  misc_feature (1)..(898): Ceres Seq. ID no. 15225415
gcacccacaaggttgagagctgagactgatctgtgccatccgtccgttcccgcgagcgagagaggccggccgcagcatggcgtccgccgcccaccggtccatggggtctgccctcctgtccctcaacctcatcatgtacgtcgtcgtcgcggtcatcgctggctgggccatcaactacagcatcgacgagagcaggaactcgctgaagggcgcgacgccgccggtgcgcctgttcccgatctacttccccatcggcaacctggcgacggggttcttcgtcatcttcgcgctcgtcacgggcgtcgtcggcatctccacctcgctcgccggcctgcacgaggtcagccaggggtacccggccagcatgatgtccgccgccgcgtccgcccttgtcacctggaccctcaccgtcctcgccatggggctagcgtgcaaggagatcagcctcagcgtgaggcccgggagcctgcgcaccttggaggcgttcaccatcatcctgaccgccacgcagctgctctgcgccgtgtcgctccacgccggcgcgcacgcggtcatcctggagacgcctatcggcggcagagtctagctgaggtgcgcgatgacagctagcatgcgccatcttggcagagtgatcggtgttgtgtcgctttacaggtgccgtgtgtgtgctttctgggtacctaaaattcgtgtgagcctcattcatttgtaaaaaaatatgtcgtggactcataagtggtggtaaactatcggcgattcttcccatactactgcaagtcaaaattattgcgctttgcacagttccattatatgtactaagtgtctgtttgttttagcttatagattatataatcttgattatttactctagctagaataaaaaaaaaaaaaaaaaaaa

SEQ ID NO: 22839 - protein, 202 aa, Zea mays subsp. mays
  peptide (1)..(202): Ceres Seq. ID no. 15225416
APTRLRAETDLCHPSVPASERGRPQHGVRRPPVHGVCPPVPQPHHVRRRRGHRWLGHQLQHRREQELAEGRDAAGAPVPDLLPHRQPGDGVLRHLRARHGRRRHLHLARRPARGQPGVPGQHDVRRRVRPCHLDPHRPRHGASVQGDQPQREAREPAHLGGVHHHPDRHAAALRRVAPRRRARGHPGDAYRRQSLAEVRDDS

SEQ ID NO: 22840 - protein, 169 aa, Zea mays subsp. mays
  peptide (1)..(169): Ceres Seq. ID no. 15225417
  misc_feature (16)..(155): Pfam Name: Pfam Description:  AWPM-19-like family
  misc_feature (1)..(169): NCBI GI NO: 15239619 NR Description: plasma membrane associated protein -related
  misc_feature (1)..(155): NCBI GI NO: 34911480 NR Description: putative plasma membrane associated protein
  misc_feature (13)..(140): NCBI GI NO: 34904644 NR Description: putative ABA-induced plasma membrane protein
  misc_feature (133)..(160): NCBI GI NO: 34904644 NR Description: putative ABA-induced plasma membrane protein
  misc_feature (1)..(153): NCBI GI NO: 15218953 NR Description: plasma membrane associated protein -related
  misc_feature (7)..(155): NCBI GI NO: 7489659 NR Description: ABA-induced plasma membrane protein PM 19 - wheat
  misc_feature (7)..(155): NCBI GI NO: 6851373 NR Description: plasma membrane associated protein
  misc_feature (7)..(155): NCBI GI NO: 4097340 NR Description: hydrophobic LEA-like protein [Oryza sativa]
  misc_feature (1)..(156): NCBI GI NO: 18390408 NR Description: expressed protein [Arabidopsis thaliana]
  misc_feature (32)..(153): NCBI GI NO: 15237455 NR Description: hypothetical protein [Arabidopsis thaliana]
MASAAHRSMGSALLSLNLIMYVVVAVIAGWAINYSIDESRNSLKGATPPVRLFPIYFPIGNLATGFFVIFALVTGVVGISTSLAGLHEVSQGYPASMMSAAASALVTWTLTVLAMGLACKEISLSVRPGSLRTLEAFTIILTATQLLCAVSLHAGAHAVILETPIGGRV

SEQ ID NO: 22841 - protein, 161 aa, Zea mays subsp. mays
  peptide (1)..(161): Ceres Seq. ID no. 15225418
  misc_feature (8)..(147): Pfam Name: Pfam Description:  AWPM-19-like family
  misc_feature (1)..(161): NCBI GI NO: 15239619 NR Description: plasma membrane associated protein -related
  misc_feature (1)..(147): NCBI GI NO: 34911480 NR Description: putative plasma membrane associated protein
  misc_feature (5)..(132): NCBI GI NO: 34904644 NR Description: putative ABA-induced plasma membrane protein
  misc_feature (125)..(152): NCBI GI NO: 34904644 NR Description: putative ABA-induced plasma membrane protein
  misc_feature (1)..(145): NCBI GI NO: 15218953 NR Description: plasma membrane associated protein -related
  misc_feature (1)..(147): NCBI GI NO: 7489659 NR Description: ABA-induced plasma membrane protein PM 19 - wheat
  misc_feature (1)..(147): NCBI GI NO: 6851373 NR Description: plasma membrane associated protein
  misc_feature (1)..(147): NCBI GI NO: 4097340 NR Description: hydrophobic LEA-like protein [Oryza sativa]
  misc_feature (1)..(148): NCBI GI NO: 18390408 NR Description: expressed protein [Arabidopsis thaliana]
  misc_feature (24)..(145): NCBI GI NO: 15237455 NR Description: hypothetical protein [Arabidopsis thaliana]
MGSALLSLNLIMYVVVAVIAGWAINYSIDESRNSLKGATPPVRLFPIYFPIGNLATGFFVIFALVTGVVGISTSLAGLHEVSQGYPASMMSAAASALVTWTLTVLAMGLACKEISLSVRPGSLRTLEAFTIILTATQLLCAVSLHAGAHAVILETPIGGRV

SEQ ID NO: 22842 - DNA, 901 bp, Zea mays subsp. mays
  misc_feature (1)..(901): Ceres Seq. ID no. 14305614
cattccaaaactccgagcaatcagtccaaacccgtgtccaccgaaagtttgatgggatcaggcctctcaagcagcagcagccaccggagcagcggcgcgtcgtcgtcgcttcaccagccaccggcggcggccccggccctggtcgtcgcggtcgacggctcgctacgggagttcgtcacgccggcggcggtgccgctcctcccccccgtctccgtctccgacgtgctgggcgcgaatgcggacgacggccggtccttcgtgtgcagctccagcgcgctctacttcgagaccgacgtcccggcgctcggcgccagcgagctgctccggccggggcagctctacttcgtcctccccgcggcgatgctcggcaggccgctctcgggcgccgacatggccgcgctggccgtgcgcgccagccaggcgctggcggcgggagcgaggccgccgcgtggcgggcgacgccctcgcgggtccaccagggcgcgcgtcgtgccggcggcggcggcgcaccacgcgcacgcgcacggcgacgaggaggctgtcaacgagaagctcaaccagaggactcttggcggcttcgagacggctcctccacgtggtccggccaggaagcccgctgtcgcggcgcgaccggccccgcctgtgactgtgactgtgactgagaggagggcgctcagcaccatcgaagagggtgccgagtgatcgataaaatggctacaaggcgcgcgtgttcgattgattgatgattaggtttagttttttattgggttaattaaagacttaatgacacgcaaatagtttgaaaggatagggaaacttgttacttggttgatcgacgtctgtgtactactcacactaattacaaaattaaatgggaattttggttttcgacctggttctt

SEQ ID NO: 22843 - protein, 233 aa, Zea mays subsp. mays
  peptide (1)..(233): Ceres Seq. ID no. 14305615
  misc_feature (35)..(233): NCBI GI NO: 5441883 NR Description: Similar to Arabidopsis thaliana BAC genomicsequence
  misc_feature (41)..(232): NCBI GI NO: 5441882 NR Description: Similar to Arabidopsis thaliana DNA contigfragment
  misc_feature (41)..(210): NCBI GI NO: 5441884 NR Description: Similar to Arabidopsis thaliana DNA contigfragment
  misc_feature (30)..(158): NCBI GI NO: 34394505 NR Description: hypothetical protein
  misc_feature (18)..(142): NCBI GI NO: 13699079 NR Description: TMV response-related gene product
  misc_feature (42)..(185): NCBI GI NO: 18411155 NR Description: expressed protein [Arabidopsis thaliana]
  misc_feature (42)..(185): NCBI GI NO: 14596201 NR Description: Unknown protein [Arabidopsis thaliana]
  misc_feature (10)..(146): NCBI GI NO: 34904464 NR Description: OSJNBa0086P08.11
  misc_feature (32)..(145): NCBI GI NO: 18420002 NR Description: expressed protein [Arabidopsis thaliana]
  misc_feature (86)..(145): NCBI GI NO: 25371565 NR Description: hypothetical protein AT4g37240
HSKTPSNQSKPVSTESLMGSGLSSSSSHRSSGASSSLHQPPAAAPALVVAVDGSLREFVTPAAVPLLPPVSVSDVLGANADDGRSFVCSSSALYFETDVPALGASELLRPGQLYFVLPAAMLGRPLSGADMAALAVRASQALAAGARPPRGGRRPRGSTRARVVPAAAAHHAHAHGDEEAVNEKLNQRTLGGFETAPPRGPARKPAVAARPAPPVTVTVTERRALSTIEEGAE

SEQ ID NO: 22844 - protein, 219 aa, Zea mays subsp. mays
  peptide (1)..(219): Ceres Seq. ID no. 14305616
FQNSEQSVQTRVHRKFDGIRPLKQQQPPEQRRVVVASPATGGGPGPGRRGRRLATGVRHAGGGAAPPPRLRLRRAGRECGRRPVLRVQLQRALLRDRRPGARRQRAAPAGAALLRPPRGDARQAALGRRHGRAGRARQPGAGGGSEAAAWRATPSRVHQGARRAGGGGAPRARARRRGGCQREAQPEDSWRLRDGSSTWSGQEARCRGATGPACDCDCD

SEQ ID NO: 22845 - protein, 216 aa, Zea mays subsp. mays
  peptide (1)..(216): Ceres Seq. ID no. 14305617
  misc_feature (18)..(216): NCBI GI NO: 5441883 NR Description: Similar to Arabidopsis thaliana BAC genomicsequence
  misc_feature (24)..(215): NCBI GI NO: 5441882 NR Description: Similar to Arabidopsis thaliana DNA contigfragment
  misc_feature (24)..(193): NCBI GI NO: 5441884 NR Description: Similar to Arabidopsis thaliana DNA contigfragment
  misc_feature (13)..(141): NCBI GI NO: 34394505 NR Description: hypothetical protein
  misc_feature (1)..(125): NCBI GI NO: 13699079 NR Description: TMV response-related gene product
  misc_feature (25)..(168): NCBI GI NO: 18411155 NR Description: expressed protein [Arabidopsis thaliana]
  misc_feature (25)..(168): NCBI GI NO: 14596201 NR Description: Unknown protein [Arabidopsis thaliana]
  misc_feature (1)..(129): NCBI GI NO: 34904464 NR Description: OSJNBa0086P08.11
  misc_feature (15)..(128): NCBI GI NO: 18420002 NR Description: expressed protein [Arabidopsis thaliana]
  misc_feature (69)..(128): NCBI GI NO: 25371565 NR Description: hypothetical protein AT4g37240
MGSGLSSSSSHRSSGASSSLHQPPAAAPALVVAVDGSLREFVTPAAVPLLPPVSVSDVLGANADDGRSFVCSSSALYFETDVPALGASELLRPGQLYFVLPAAMLGRPLSGADMAALAVRASQALAAGARPPRGGRRPRGSTRARVVPAAAAHHAHAHGDEEAVNEKLNQRTLGGFETAPPRGPARKPAVAARPAPPVTVTVTERRALSTIEEGAE

SEQ ID NO: 22846 - DNA, 943 bp, Zea mays subsp. mays
  misc_feature (1)..(943): Ceres Seq. ID no. 12589584
agaaaaggggaaaaggggaaaatgatttcttaaaaaagaggagtgacccggtctaccggagcgtacggtgccgatcccgtcgccgccgctacccctcaatcgcgagcaacttcttccggattcgcaccaagctctccacaattctatcgctatgctgcggaaggccgtcgtcgccttcatcgcctgcaccgccttcttcctcgccttctctgcctactcccgtcgccagggcgttgcagaggttcaattaccagcagttactcacagggtctacctagatgtagaaattgatggccaacacataggtagaattgttattggtctctatggggaggtcgttccaaaaacagttgaaaactttagggctctttgtacaggtgaaaaaggtgtcgggtccaatggcaaacctcttcactataagggaacaccattccatcgtattatccctggcttcatgattcagggcggtgacatagttagaggcgacggtaaagggagtgagtctatatatggaggcatcttcccagatgagaatttcactgtaaaacatacacatccaggggttgttgctatggcgaattctggacttgattctaatggatctcagttttacataactactatcaagacaagctggttggatggggagcatgttgtcttcggcagggtgatccaaggaatggataccgtgtacgccatagaagggggcgctgggacttacaatggcaagccaaggaagaaggcggtgatcaccgacgctggtgagatacccaaggagaaatggggtgatcaggaagcgtagggtgttttctacttcttgtcaccttcaaatcaggtagccatgtacttcttttttccttgacctccatggtgtgccacggttcagcaagacttccggaatgttgtatatcgtagctagcttatggccagtcgaattgactcc

SEQ ID NO: 22847 - protein, 216 aa, Zea mays subsp. mays
  peptide (1)..(216): Ceres Seq. ID no. 12589585
  misc_feature (1)..(215): NCBI GI NO: 15236227 NR Description: cyclophilin - like protein; protein id: At4g34960
  misc_feature (5)..(207): NCBI GI NO: 15227674 NR Description: cyclophilin; protein id: At2g29960
  misc_feature (5)..(207): NCBI GI NO: 11270326 NR Description: peptidylprolyl isomerase (EC 5.2.1.8) CYP5
  misc_feature (5)..(207): NCBI GI NO: 21554007 NR Description: cyclophilin [Arabidopsis thaliana]
  misc_feature (1)..(207): NCBI GI NO: 32351008 NR Description: cyclophilin [Triticum aestivum]
  misc_feature (33)..(207): NCBI GI NO: 15237739 NR Description: cyclophilin ROC7; protein id: At5g58710
  misc_feature (33)..(206): NCBI GI NO: 18410386 NR Description: cyclophilin-like protein; protein id: At3g55920
  misc_feature (34)..(206): NCBI GI NO: 5731960 NR Description: cyclophilin B [Dictyostelium discoideum]
  misc_feature (39)..(206): NCBI GI NO: 17566266 NR Description: CYcloPhilin family CYP-7 (18.4 kD) (cyp-7)
  misc_feature (39)..(206): NCBI GI NO: 39582839 NR Description: Hypothetical protein CBG18577
MLRKAVVAFIACTAFFLAFSAYSRRQGVAEVQLPAVTHRVYLDVEIDGQHIGRIVIGLYGEVVPKTVENFRALCTGEKGVGSNGKPLHYKGTPFHRIIPGFMIQGGDIVRGDGKGSESIYGGIFPDENFTVKHTHPGVVAMANSGLDSNGSQFYITTIKTSWLDGEHVVFGRVIQGMDTVYAIEGGAGTYNGKPRKKAVITDAGEIPKEKWGDQEA

SEQ ID NO: 22848 - protein, 115 aa, Zea mays subsp. mays
  peptide (1)..(115): Ceres Seq. ID no. 12589586
  misc_feature (1)..(114): NCBI GI NO: 15236227 NR Description: cyclophilin - like protein; protein id: At4g34960
  misc_feature (1)..(106): NCBI GI NO: 15227674 NR Description: cyclophilin; protein id: At2g29960
  misc_feature (1)..(106): NCBI GI NO: 11270326 NR Description: peptidylprolyl isomerase (EC 5.2.1.8) CYP5
  misc_feature (1)..(106): NCBI GI NO: 21554007 NR Description: cyclophilin [Arabidopsis thaliana]
  misc_feature (1)..(106): NCBI GI NO: 32351008 NR Description: cyclophilin [Triticum aestivum]
  misc_feature (1)..(106): NCBI GI NO: 15237739 NR Description: cyclophilin ROC7; protein id: At5g58710
  misc_feature (1)..(105): NCBI GI NO: 18410386 NR Description: cyclophilin-like protein; protein id: At3g55920
  misc_feature (1)..(105): NCBI GI NO: 5731960 NR Description: cyclophilin B [Dictyostelium discoideum]
  misc_feature (1)..(105): NCBI GI NO: 17566266 NR Description: CYcloPhilin family CYP-7 (18.4 kD) (cyp-7)
  misc_feature (1)..(105): NCBI GI NO: 39582839 NR Description: Hypothetical protein CBG18577
MIQGGDIVRGDGKGSESIYGGIFPDENFTVKHTHPGVVAMANSGLDSNGSQFYITTIKTSWLDGEHVVFGRVIQGMDTVYAIEGGAGTYNGKPRKKAVITDAGEIPKEKWGDQEA

SEQ ID NO: 22849 - DNA, 1119 bp, Zea mays subsp. mays
  misc_feature (1)..(1119): Ceres Seq. ID no. 14305675
acagctaccagacaacagtcaccggcacgcagacgctcagcaagagccaacaggacatcgtcgctcagcaagaaacaaggggggcaataatggcggagtaccagggcgagtatggacacccgtacccgcgcgtcgaccagtacgggaaccccgtgccgccggtggaccagtacggcaacccgctcccgagggagccggcgtccggtttcggcgccatcgctcccccctacagcgctggcgacagcgccgcggggcacgtggcggcgcctgtcgagtacggtgccgacgccaagtatccgcacgatggcacggggagcggtggcggcggcggcgtcaccgctccgaccggtgtggtggcgtactccagcggtggcgtcgcaccagccgagacggcgcttgcgtcgtacgaggagggcatggtccacctccagccgaccggggaggagcacacgtttggtatggcctcgcagctccagccgacccacggggaggagcacacgtttggcatggcctcgcagctccagccgaccggggaggagcacacgaccctcggagagaagctgaggcgctccggcagctccagctcgtcctcagaggatgacgagcaaggtgggcgccggaagaagagcatcaaggagaagataaaggagaagctcccgggcacccacaagcacgaggagcagaaggctgggcacgtgacgacgacgacgacggggacgcatgcagcggggacgcacgagaagaagggtttcatggagaagatcaaggagaagctaccgggacaccaccatgctcactgagcgtgtgtacctcagttgaggactcggatttgaggggtccagaatcgtgtgtcgtgcacaggtctctgcagtctctatatatgttgtgtacgacttcggtagcctcgacctcgatcgcttgtacctagtcatgctcatgcgtgcatattgctgtgctccttatatatgtagcattagaagctgcgcgcaagtagaatttgggttctagtctatatatacactgttatcgtcgtgtaggtttggctctggctcggagttgagtaattatgttgggctcgtttggtttgtgtttgtagtaatccatatgcatgttggctct

SEQ ID NO: 22850 - protein, 265 aa, Zea mays subsp. mays
  peptide (1)..(265): Ceres Seq. ID no. 14305676
  misc_feature (41)..(262): Pfam Name: Pfam Description:  Dehydrin
  misc_feature (30)..(262): NCBI GI NO: 4105101 NR Description: dehydrin 11 [Hordeum vulgare]
  misc_feature (30)..(263): NCBI GI NO: 34911522 NR Description: putative Oryza dehydrin rab25
  misc_feature (30)..(263): NCBI GI NO: 231984 NR Description: DEHYDRIN RAB25
  misc_feature (36)..(262): NCBI GI NO: 12053699 NR Description: putative dehydrin [Helianthus annuus]
  misc_feature (35)..(262): NCBI GI NO: 27526438 NR Description: putative dehydrin [Helianthus annuus]
  misc_feature (36)..(262): NCBI GI NO: 12053703 NR Description: putative dehydrin [Helianthus annuus]
  misc_feature (36)..(262): NCBI GI NO: 12053705 NR Description: putative dehydrin [Helianthus annuus]
  misc_feature (36)..(262): NCBI GI NO: 12053701 NR Description: putative dehydrin [Helianthus annuus]
  misc_feature (36)..(262): NCBI GI NO: 40643329 NR Description: putative dehydrin [Helianthus annuus]
  misc_feature (36)..(262): NCBI GI NO: 2624085 NR Description: dehydrin-like protein [Helianthus annuus]
SYQTTVTGTQTLSKSQQDIVAQQETRGAIMAEYQGEYGHPYPRVDQYGNPVPPVDQYGNPLPREPASGFGAIAPPYSAGDSAAGHVAAPVEYGADAKYPHDGTGSGGGGGVTAPTGVVAYSSGGVAPAETALASYEEGMVHLQPTGEEHTFGMASQLQPTHGEEHTFGMASQLQPTGEEHTTLGEKLRRSGSSSSSSEDDEQGGRRKKSIKEKIKEKLPGTHKHEEQKAGHVTTTTTGTHAAGTHEKKGFMEKIKEKLPGHHHAH

SEQ ID NO: 22851 - protein, 236 aa, Zea mays subsp. mays
  peptide (1)..(236): Ceres Seq. ID no. 14305677
  misc_feature (12)..(233): Pfam Name: Pfam Description:  Dehydrin
  misc_feature (1)..(233): NCBI GI NO: 4105101 NR Description: dehydrin 11 [Hordeum vulgare]
  misc_feature (1)..(234): NCBI GI NO: 34911522 NR Description: putative Oryza dehydrin rab25
  misc_feature (1)..(234): NCBI GI NO: 231984 NR Description: DEHYDRIN RAB25
  misc_feature (7)..(233): NCBI GI NO: 12053699 NR Description: putative dehydrin [Helianthus annuus]
  misc_feature (6)..(233): NCBI GI NO: 27526438 NR Description: putative dehydrin [Helianthus annuus]
  misc_feature (7)..(233): NCBI GI NO: 12053703 NR Description: putative dehydrin [Helianthus annuus]
  misc_feature (7)..(233): NCBI GI NO: 12053705 NR Description: putative dehydrin [Helianthus annuus]
  misc_feature (7)..(233): NCBI GI NO: 12053701 NR Description: putative dehydrin [Helianthus annuus]
  misc_feature (7)..(233): NCBI GI NO: 40643329 NR Description: putative dehydrin [Helianthus annuus]
  misc_feature (7)..(233): NCBI GI NO: 2624085 NR Description: dehydrin-like protein [Helianthus annuus]
MAEYQGEYGHPYPRVDQYGNPVPPVDQYGNPLPREPASGFGAIAPPYSAGDSAAGHVAAPVEYGADAKYPHDGTGSGGGGGVTAPTGVVAYSSGGVAPAETALASYEEGMVHLQPTGEEHTFGMASQLQPTHGEEHTFGMASQLQPTGEEHTTLGEKLRRSGSSSSSSEDDEQGGRRKKSIKEKIKEKLPGTHKHEEQKAGHVTTTTTGTHAAGTHEKKGFMEKIKEKLPGHHHAH

SEQ ID NO: 22852 - protein, 199 aa, Zea mays subsp. mays
  peptide (1)..(199): Ceres Seq. ID no. 14305678
QLPDNSHRHADAQQEPTGHRRSARNKGGNNGGVPGRVWTPVPARRPVREPRAAGGPVRQPAPEGAGVRFRRHRSPLQRWRQRRGARGGACRVRCRRQVSARWHGERWRRRRHRSDRCGGVLQRWRRTSRDGACVVRGGHGPPPADRGGAHVWYGLAAPADPRGGAHVWHGLAAPADRGGAHDPRREAEALRQLQLVLRG

SEQ ID NO: 22853 - DNA, 879 bp, Zea mays subsp. mays
  misc_feature (1)..(879): Ceres Seq. ID no. 15225880
atcaagtctcaactctcaagaggcagctaaaccaaccagcggtgatctgtagtagcaacttggttcttggtaggtgagataacgatacagcaggtagctcgagcgagaatgagccaggagcagccgaggaggccgtccggccatgacgagacgagcggcggagagcagggcgccgtccgctacggcgacgtgttcccggcggtgagcgggggcctcgcggagaagcccgtggcgccgcaggacgcggccacgatgcagtcggcggagaacctggtgttcggccagacgctcaagggcggcccggcggcggccatgcagtccgcggccaccgccaacgagcgcatgggcgccgtcgggcacgaccaggccacggacgccaccgccgtgcagggcgtcaccgtctccgagacccgcgtcccgggcggcggccgcatcgtcaccgagttcgtcgccgggcaggctgtcggccagtacctcgcgcgggacgacgatggcggcggcggcatcgccggccccggcgccggagcgggagttgcgggtaaggatatcacgaaggtgacgatcggcgaggcgctcgaggcgacggcgctcgcggcgggtgacgcgccggtggagcgcagcgacgcggccgccatccaggcggcggaggcgcgcgccacggggctggacgcgaacgtgcccggcgggctggccgcgcaggcgcagtcggccgcggcggccaactcgtgggcgtggggagacgaggacaaggccacgctcggcgacgtcctggcggtacgagtcacgaacacgacgtgccatcgttttcgtttcgtgccgctgctgctatatatctgacagtgcgtgttggtggtgcaacagagcagagatcttttgacc

SEQ ID NO: 22854 - protein, 242 aa, Zea mays subsp. mays
  peptide (1)..(242): Ceres Seq. ID no. 15225881
  misc_feature (148)..(210): Pfam Name: Pfam Description:  Seed maturation protein
  misc_feature (1)..(222): NCBI GI NO: 100920 NR Description: rab28 protein - maize
  misc_feature (1)..(222): NCBI GI NO: 22773242 NR Description: Putative abscisic acid-induced protein
  misc_feature (1)..(221): NCBI GI NO: 126078 NR Description: LATE EMBRYOGENESIS ABUNDANT PROTEIN D-34
  misc_feature (1)..(224): NCBI GI NO: 82045 NR Description: embryonic protein ecp31 - carrot
  misc_feature (1)..(217): NCBI GI NO: 6648966 NR Description: seed maturation protein PM25 [Glycine max]
  misc_feature (1)..(222): NCBI GI NO: 2129632 NR Description: embryonic protein LEA
  misc_feature (1)..(222): NCBI GI NO: 6648968 NR Description: seed maturation protein PM26 [Glycine max]
  misc_feature (1)..(222): NCBI GI NO: 15228768 NR Description: LEA protein -related [Arabidopsis thaliana]
  misc_feature (1)..(221): NCBI GI NO: 6648964 NR Description: seed maturation protein PM24 [Glycine max]
  misc_feature (1)..(221): NCBI GI NO: 15228770 NR Description: LEA protein -related [Arabidopsis thaliana]
MSQEQPRRPSGHDETSGGEQGAVRYGDVFPAVSGGLAEKPVAPQDAATMQSAENLVFGQTLKGGPAAAMQSAATANERMGAVGHDQATDATAVQGVTVSETRVPGGGRIVTEFVAGQAVGQYLARDDDGGGGIAGPGAGAGVAGKDITKVTIGEALEATALAAGDAPVERSDAAAIQAAEARATGLDANVPGGLAAQAQSAAAANSWAWGDEDKATLGDVLAVRVTNTTCHRFRFVPLLLYI

SEQ ID NO: 22855 - protein, 194 aa, Zea mays subsp. mays
  peptide (1)..(194): Ceres Seq. ID no. 15225882
  misc_feature (100)..(162): Pfam Name: Pfam Description:  Seed maturation protein
  misc_feature (1)..(174): NCBI GI NO: 100920 NR Description: rab28 protein - maize
  misc_feature (1)..(174): NCBI GI NO: 22773242 NR Description: Putative abscisic acid-induced protein
  misc_feature (1)..(173): NCBI GI NO: 126078 NR Description: LATE EMBRYOGENESIS ABUNDANT PROTEIN D-34
  misc_feature (1)..(176): NCBI GI NO: 82045 NR Description: embryonic protein ecp31 - carrot
  misc_feature (1)..(169): NCBI GI NO: 6648966 NR Description: seed maturation protein PM25 [Glycine max]
  misc_feature (1)..(174): NCBI GI NO: 2129632 NR Description: embryonic protein LEA
  misc_feature (1)..(174): NCBI GI NO: 6648968 NR Description: seed maturation protein PM26 [Glycine max]
  misc_feature (1)..(174): NCBI GI NO: 15228768 NR Description: LEA protein -related [Arabidopsis thaliana]
  misc_feature (1)..(173): NCBI GI NO: 6648964 NR Description: seed maturation protein PM24 [Glycine max]
  misc_feature (1)..(173): NCBI GI NO: 15228770 NR Description: LEA protein -related [Arabidopsis thaliana]
MQSAENLVFGQTLKGGPAAAMQSAATANERMGAVGHDQATDATAVQGVTVSETRVPGGGRIVTEFVAGQAVGQYLARDDDGGGGIAGPGAGAGVAGKDITKVTIGEALEATALAAGDAPVERSDAAAIQAAEARATGLDANVPGGLAAQAQSAAAANSWAWGDEDKATLGDVLAVRVTNTTCHRFRFVPLLLYI

SEQ ID NO: 22856 - protein, 174 aa, Zea mays subsp. mays
  peptide (1)..(174): Ceres Seq. ID no. 15225883
  misc_feature (80)..(142): Pfam Name: Pfam Description:  Seed maturation protein
  misc_feature (1)..(154): NCBI GI NO: 100920 NR Description: rab28 protein - maize
  misc_feature (1)..(154): NCBI GI NO: 22773242 NR Description: Putative abscisic acid-induced protein
  misc_feature (1)..(153): NCBI GI NO: 126078 NR Description: LATE EMBRYOGENESIS ABUNDANT PROTEIN D-34
  misc_feature (1)..(156): NCBI GI NO: 82045 NR Description: embryonic protein ecp31 - carrot
  misc_feature (1)..(149): NCBI GI NO: 6648966 NR Description: seed maturation protein PM25 [Glycine max]
  misc_feature (1)..(154): NCBI GI NO: 2129632 NR Description: embryonic protein LEA
  misc_feature (1)..(154): NCBI GI NO: 6648968 NR Description: seed maturation protein PM26 [Glycine max]
  misc_feature (1)..(154): NCBI GI NO: 15228768 NR Description: LEA protein -related [Arabidopsis thaliana]
  misc_feature (1)..(153): NCBI GI NO: 6648964 NR Description: seed maturation protein PM24 [Glycine max]
  misc_feature (1)..(153): NCBI GI NO: 15228770 NR Description: LEA protein -related [Arabidopsis thaliana]
MQSAATANERMGAVGHDQATDATAVQGVTVSETRVPGGGRIVTEFVAGQAVGQYLARDDDGGGGIAGPGAGAGVAGKDITKVTIGEALEATALAAGDAPVERSDAAAIQAAEARATGLDANVPGGLAAQAQSAAAANSWAWGDEDKATLGDVLAVRVTNTTCHRFRFVPLLLYI

SEQ ID NO: 22857 - DNA, 851 bp, Zea mays subsp. mays
  misc_feature (1)..(851): Ceres Seq. ID no. 14305917
gcacaacgcttaggacttccttttgcttcttacatttgattttctaatgcccaggcagcaccgccagcgacagccgccgagtgtccggcccaacggctgctccctcgtctgctatggcatcgtcgtggccaccgcgtcgctgctcctgctcgccatactcgctgccacagtcagcatcgtcaaggcgtgcgccctcgccggcgctgtcgcggtggtgttcagcgctgcgggctatgtctctcggtggtgcgcagcagaggacggcgctgctcatgcgctggcgctgcccacgacgatggcgacgccagccgcgcgcggccgcgcggtgtgtggcctcgttgacgcggcgatcgacgcgctgccggcgttcgcgtacgcgcgccctgccacgtgtggcgcagaaagtagcagcaagtccggaagactcgcactctgcccggtatgcctggaggaggtcgaggccggcgagatggtccggcagctgcctgcgtgcggccacctgttccacgtggagtgcatcgacatgtggctgcactcgcatgcgtcgtgccctctgtgccgatgcgacgtctcgccgcaggcagttgctatgacggtcacggaagctgcagatccaccgcatggtgcgctgccggtgatggtgagctgctgagatcatactcacggccgggagtgcgactaaggtcgtcgatttttgctcatgtcctactatgagcccttggcttcacccaaaaatggagagattggatagctactaagctattatccttcgttcatcttctaaaattattattaatagtcagcaaaccaaaaccatcaagcacatgagagtggtgcgtcagagagatccg

SEQ ID NO: 22858 - protein, 201 aa, Zea mays subsp. mays
  peptide (1)..(201): Ceres Seq. ID no. 14305918
  misc_feature (130)..(171): Pfam Name: RING finger Pfam Description: Zinc finger, C3HC4 type
  misc_feature (96)..(177): NCBI GI NO: 34903930 NR Description: OSJNBa0038J17.10
  misc_feature (28)..(194): NCBI GI NO: 8698835 NR Description: RING finger 1
  misc_feature (19)..(181): NCBI GI NO: 40539017 NR Description: putative RING-H2 zinc finger protein
  misc_feature (96)..(188): NCBI GI NO: 34903920 NR Description: OSJNBa0038J17.5
  misc_feature (54)..(188): NCBI GI NO: 34907968 NR Description: P0446G04.15
  misc_feature (10)..(172): NCBI GI NO: 37536508 NR Description: putative ring finger protein
  misc_feature (96)..(191): NCBI GI NO: 30017522 NR Description: putative ring-H2 zinc finger protein
  misc_feature (38)..(178): NCBI GI NO: 28558782 NR Description: RING/C3HC4/PHD zinc finger-like protein
  misc_feature (25)..(186): NCBI GI NO: 27261477 NR Description: Hypothetical protein
  misc_feature (96)..(179): NCBI GI NO: 7487705 NR Description: hypothetical protein T5J17
MPRQHRQRQPPSVRPNGCSLVCYGIVVATASLLLLAILAATVSIVKACALAGAVAVVFSAAGYVSRWCAAEDGAAHALALPTTMATPAARGRAVCGLVDAAIDALPAFAYARPATCGAESSSKSGRLALCPVCLEEVEAGEMVRQLPACGHLFHVECIDMWLHSHASCPLCRCDVSPQAVAMTVTEAADPPHGALPVMVSC

SEQ ID NO: 22859 - protein, 159 aa, Zea mays subsp. mays
  peptide (1)..(159): Ceres Seq. ID no. 14305919
MASSWPPRRCSCSPYSLPQSASSRRAPSPALSRWCSALRAMSLGGAQQRTALLMRWRCPRRWRRQPRAAARCVASLTRRSTRCRRSRTRALPRVAQKVAASPEDSHSARYAWRRSRPARWSGSCLRAATCSTWSASTCGCTRMRRALCADATSRRRQLL

SEQ ID NO: 22860 - protein, 119 aa, Zea mays subsp. mays
  peptide (1)..(119): Ceres Seq. ID no. 14305920
MSLGGAQQRTALLMRWRCPRRWRRQPRAAARCVASLTRRSTRCRRSRTRALPRVAQKVAASPEDSHSARYAWRRSRPARWSGSCLRAATCSTWSASTCGCTRMRRALCADATSRRRQLL

SEQ ID NO: 22861 - DNA, 905 bp, Zea mays subsp. mays
  misc_feature (1)..(905): Ceres Seq. ID no. 14312614
atatagggcaccaaccatttcatcctctccgactccgacatcgtccggtccgatacgccacaggatcgaccaccaatgcagactgccgtggcggtgctgttatcaggcgtggtggcgctgttcggagtgacgagcgccgtgctggcgttcatagccgaggcaaagaggctcacagcggatgaaatccgcgtgtcaggtcgcgagtgcgtgtacccggccaacgccgctcacacgctggggatatgcgccatcttcctgcttgccgcggcccagatcatcgcctcggtggccggtggctgctgcggctgctgcaggccaccgggcggcggcggtccttctcccagtcccagctccactaggcgacgcgtcgtgggagtcatcgcctctgtcctctcatgggtagcggcggcgattgctgtggtctacgactgggtgggcgcggcgctgaacgcgcccgtgacgcgcgaagccaggctcgcgggctccgacgaggagtgctacctactcaggggcggcatcttcgtcagggcggccgtgctcagcctcgtcgccacctcgcttgggatcatgtcctgcatcttgctccgcctgccgccgccggctacgcacgcgccggaacaaggccaccgcgcggtcgggctgccgcagtggcccgcgcaagagacgtacccgtaccccgcgcacgggtacgcccacgcatcggaccccaagttcgctcctcctgctcctcacggtcaggcgaacgagcaagtgtacgtgtagtgcgtagatgacgtgatgagtagtgatggtgtgatctccgtattattttttccttttgttttgtacgtaggtaatatgtgcgtcgtgattactagtgatggtgtgctctctgtattaattttttcttttattgttagtttgcc

SEQ ID NO: 22862 - protein, 228 aa, Zea mays subsp. mays
  peptide (1)..(228): Ceres Seq. ID no. 14312615
  misc_feature (7)..(203): NCBI GI NO: 18418215 NR Description: expressed protein [Arabidopsis thaliana]
  misc_feature (7)..(203): NCBI GI NO: 34897938 NR Description: ESTs AU082454
  misc_feature (43)..(203): NCBI GI NO: 10177066 NR Description: dbj|BAA92731
  misc_feature (1)..(148): NCBI GI NO: 34393261 NR Description: unknown protein
MQTAVAVLLSGVVALFGVTSAVLAFIAEAKRLTADEIRVSGRECVYPANAAHTLGICAIFLLAAAQIIASVAGGCCGCCRPPGGGGPSPSPSSTRRRVVGVIASVLSWVAAAIAVVYDWVGAALNAPVTREARLAGSDEECYLLRGGIFVRAAVLSLVATSLGIMSCILLRLPPPATHAPEQGHRAVGLPQWPAQETYPYPAHGYAHASDPKFAPPAPHGQANEQVYV

SEQ ID NO: 22863 - protein, 125 aa, Zea mays subsp. mays
  peptide (1)..(125): Ceres Seq. ID no. 14312616
  misc_feature (1)..(51): Pfam Name: Pfam Description:  Aminotransferase class-III
MGSGGDCCGLRLGGRGAERARDARSQARGLRRGVLPTQGRHLRQGGRAQPRRHLAWDHVLHLAPPAAAGYARAGTRPPRGRAAAVARARDVPVPRARVRPRIGPQVRSSCSSRSGERASVRVVRR

SEQ ID NO: 22864 - DNA, 789 bp, Zea mays subsp. mays
  misc_feature (1)..(789): Ceres Seq. ID no. 13599127
acaagaaaccaaaccgtgacgcagcacagccatggggaagcagctctgcgacatgcaccgctcgcgccgccgcgcccgcatcgtcgccgccgccctcctctccgccttcgccgccgccgccgccgcgctcacggtgtacctcgtcttccgtccgctgaagccgcaggcctccgtggtgcgcgtcgccgtgtaccgcatggccacggccgccgggaactcctcggaggggcgggccccgccgccgtacacgctcgcggcgagcgcgcggttcacggcgctgctgcacaacccgagcgaccgcgccgtggtgttctacgacggcctcttcgcctacgtgacgtaccgcggggagatggtggcgccccccgcgccgctgcccggggtggcccagggccgcggcgccgacgtggcgctgtcgccgcatttcggccttcgcggcgcggtgcccgtgccggtgtcggcagacgcggcacaagcgctggagggagactgcgcggcgggccgcgtggagctacgcctcgtcgtcatgggccgggtcaagtacatgagcgggccattcaggaccggatggcgcgggctatacctgcgctgcgatgtcaccgtcggcctcggggtggacgccaccgcgggcgacgacggagccggggacgtgccactgctcgagtaccccaagtgctccgtcgacgcttgagttgatccttgatcggcgcaatgcatgagcgctcagatgatcagattttcagaattctggtggagaataaggaattgggaaaagcatttttctgtgtc

SEQ ID NO: 22865 - protein, 231 aa, Zea mays subsp. mays
  peptide (1)..(231): Ceres Seq. ID no. 13599128
  misc_feature (44)..(217): Pfam Name: Pfam Description:  Aminotransferase class-III
  misc_feature (11)..(227): NCBI GI NO: 22960097 NR Description: hypothetical protein [Rhodobacter sphaeroides]
TRNQTVTQHSHGEAALRHAPLAPPRPHRRRRPPLRLRRRRRRAHGVPRLPSAEAAGLRGARRRVPHGHGRRELLGGAGPAAVHARGERAVHGAAAQPERPRRGVLRRPLRLRDVPRGDGGAPRAAARGGPGPRRRRGAVAAFRPSRRGARAGVGRRGTSAGGRLRGGPRGATPRRHGPGQVHERAIQDRMARAIPALRCHRRPRGGRHRGRRRSRGRATARVPQVLRRRLS

SEQ ID NO: 22866 - protein, 219 aa, Zea mays subsp. mays
  peptide (1)..(219): Ceres Seq. ID no. 13599129
  misc_feature (2)..(218): NCBI GI NO: 7486355 NR Description: hypothetical protein F3D13
  misc_feature (13)..(218): NCBI GI NO: 15234173 NR Description: harpin-induced protein 1 family (HIN1)
  misc_feature (7)..(200): NCBI GI NO: 15240001 NR Description: harpin-induced protein, putative (HIN1)
  misc_feature (6)..(217): NCBI GI NO: 18399308 NR Description: harpin-induced protein 1 family (HIN1)
  misc_feature (6)..(217): NCBI GI NO: 28392929 NR Description: putative VAMP protein SEC22 [Arabidopsis thaliana]
  misc_feature (1)..(218): NCBI GI NO: 38344036 NR Description: OJ991214_12.17
  misc_feature (1)..(218): NCBI GI NO: 15229906 NR Description: harpin-induced protein 1 family (HIN1)
  misc_feature (1)..(218): NCBI GI NO: 22326984 NR Description: harpin-induced protein 1 family (HIN1)
  misc_feature (35)..(218): NCBI GI NO: 15227538 NR Description: harpin-induced protein 1 family (HIN1)
  misc_feature (6)..(206): NCBI GI NO: 38637038 NR Description: harpin-induced protein 1 family (HIN1)-like
MGKQLCDMHRSRRRARIVAAALLSAFAAAAAALTVYLVFRPLKPQASVVRVAVYRMATAAGNSSEGRAPPPYTLAASARFTALLHNPSDRAVVFYDGLFAYVTYRGEMVAPPAPLPGVAQGRGADVALSPHFGLRGAVPVPVSADAAQALEGDCAAGRVELRLVVMGRVKYMSGPFRTGWRGLYLRCDVTVGLGVDATAGDDGAGDVPLLEYPKCSVDA

SEQ ID NO: 22867 - protein, 212 aa, Zea mays subsp. mays
  peptide (1)..(212): Ceres Seq. ID no. 13599130
  misc_feature (1)..(211): NCBI GI NO: 7486355 NR Description: hypothetical protein F3D13
  misc_feature (6)..(211): NCBI GI NO: 15234173 NR Description: harpin-induced protein 1 family (HIN1)
  misc_feature (1)..(193): NCBI GI NO: 15240001 NR Description: harpin-induced protein, putative (HIN1)
  misc_feature (1)..(210): NCBI GI NO: 18399308 NR Description: harpin-induced protein 1 family (HIN1)
  misc_feature (1)..(210): NCBI GI NO: 28392929 NR Description: putative VAMP protein SEC22 [Arabidopsis thaliana]
  misc_feature (1)..(211): NCBI GI NO: 38344036 NR Description: OJ991214_12.17
  misc_feature (1)..(211): NCBI GI NO: 15229906 NR Description: harpin-induced protein 1 family (HIN1)
  misc_feature (1)..(211): NCBI GI NO: 22326984 NR Description: harpin-induced protein 1 family (HIN1)
  misc_feature (28)..(211): NCBI GI NO: 15227538 NR Description: harpin-induced protein 1 family (HIN1)
  misc_feature (1)..(199): NCBI GI NO: 38637038 NR Description: harpin-induced protein 1 family (HIN1)-like
MHRSRRRARIVAAALLSAFAAAAAALTVYLVFRPLKPQASVVRVAVYRMATAAGNSSEGRAPPPYTLAASARFTALLHNPSDRAVVFYDGLFAYVTYRGEMVAPPAPLPGVAQGRGADVALSPHFGLRGAVPVPVSADAAQALEGDCAAGRVELRLVVMGRVKYMSGPFRTGWRGLYLRCDVTVGLGVDATAGDDGAGDVPLLEYPKCSVDA

SEQ ID NO: 22868 - DNA, 980 bp, Zea mays subsp. mays
  misc_feature (1)..(980): Ceres Seq. ID no. 12638136
atcagtagtagtcatcactgagtagactgcagagcaggaggagatgttcacttacgtgctcgcggccgccgccgtgcttatcgtgttcctctacgccgtcgaagcagcaacagcaagctccctccgtcgcccccgtcgctgccgctgatcggccacctccaacgcggtggtcactcgcgcggccaccaggggccgccggggcaacagcaggatgtgctgccggacgcggcgctgatggtgggcttccaaccgcaggatgtgctgccggacgcgccagcgaggtttgtgagatgggcgacgggccttgataagaagctcgccgacatggccgaggcgtgggacaggttgctgtccgagatggtggccgcgcacaaggaggggaccgggcggccggccacgcaggggaggaggatgaggacttcttggacgtgctgctgcggcttagggaagatggcgcggatgggctcgagctcacagacgaccgcatcaaaggcatcctcgaggacatgataggcggtgggactgaaacaaccatccaaacgctggaatgggccatggctgcatggcagagctcatagccaacccgtgggtgatggccaagctcaaggacgagatcgcgcgagtggtcgccgccgatcagcctaccatctcggagtcggatctcggcagaatggaatacctaaaagcagagcaagatgttcaaaaaaattatgaacttctgttacctctttagatgcggctacaagagctagctataattgatgagcaaagcagtgaacacaatatgcataagggcactcttctgcaaactttgcctgaagtccatttcactctccacgcatattactagcaccatcatatccttgtctacgaatattttgaacatctaatttatgatgtgacaaaacaaagtccaactcctttttaagagtggtagatgatgtatcatgaacatgaataagatcaagaaagcgctctcg

SEQ ID NO: 22869 - protein, 91 aa, Zea mays subsp. mays
  peptide (1)..(91): Ceres Seq. ID no. 12638137
  misc_feature (1)..(13): NCBI GI NO: 117188 NR Description: CYTOCHROME P450 71A1 (CYPLXXIA1) (ARP-2)
  misc_feature (1)..(13): NCBI GI NO: 25282608 NR Description: cytochrome P-450LXXIA1 [similarity] - avocado
MVGFQPQDVLPDAPARFVRWATGLDKKLADMAEAWDRLLSEMVAAHKEGTGRPATQGRRMRTSWTCCCGLGKMARMGSSSQTTASKASSRT

SEQ ID NO: 22870 - protein, 61 aa, Zea mays subsp. mays
  peptide (1)..(61): Ceres Seq. ID no. 12638138
MAEAWDRLLSEMVAAHKEGTGRPATQGRRMRTSWTCCCGLGKMARMGSSSQTTASKASSRT

SEQ ID NO: 22871 - protein, 61 aa, Zea mays subsp. mays
  peptide (1)..(61): Ceres Seq. ID no. 12638139
  misc_feature (6)..(47): NCBI GI NO: 19909892 NR Description: P450 [Triticum aestivum]
  misc_feature (6)..(61): NCBI GI NO: 26452759 NR Description: putative cytochrome P450 [Arabidopsis thaliana]
  misc_feature (6)..(61): NCBI GI NO: 13878362 NR Description: Cytochrome P450 71A12
  misc_feature (6)..(61): NCBI GI NO: 30684709 NR Description: cytochrome p450 71A12 [Arabidopsis thaliana]
  misc_feature (6)..(47): NCBI GI NO: 19909894 NR Description: P450 [Triticum aestivum]
MGHGCMAELIANPWVMAKLKDEIARVVAADQPTISESDLGRMEYLKAEQDVQKNYELLLPL

SEQ ID NO: 22872 - DNA, 769 bp, Zea mays subsp. mays
  misc_feature (1)..(769): Ceres Seq. ID no. 12589616
atgcttctttaaattctgctgccattctgctaccgtgggcgtcgtacagcccccgttcccatagaggacagtctgctgccgcaagcctagcttcgtccacctctgaatcaagaaacaaaacaactaggcatggacgaccgcacctacaagggcggcatcaaggcgtactggaagcgccggggctactaccgcatggacggcgacgccgcgcggcgccgccagccgctccccaccgtggagctcggaggtggcgtcgcccaggcccaggcccaggcccagccgccgacgggggatggctcgggccggcgccggtgccgcgggtggcgcgtgcgccgcggccagctggggcggcggctgctccgcgcgctgtcccctcgccggtggctcatgcggctccgcgacgcgtacgtgtccgccatgctgcggctggcctcctcccccgccgtcgggtacggcgccggcgcgcccttttgcgccacggcgacccacggcgcggcggcggcggcggccttcgcgcggccggcgcagctcaaggagtacgacgagaaggtgctggtggagatctacaggtccatactcgcgcgcggcgggcctctcgccggcgcgcctgccgccgccacgctgcggctaccgacggctgtttgagcttgagcggcagaagagacgtgtgttcttcttgcttatttttattcttatgtgtcgcgacttgtactgagttgtaacttgcgtgcgccccacaagctagcgtttcttcttcgttcccaattcg

SEQ ID NO: 22873 - protein, 239 aa, Zea mays subsp. mays
  peptide (1)..(239): Ceres Seq. ID no. 12589617
ASLNSAAILLPWASYSPRSHRGQSAAASLASSTSESRNKTTRHGRPHLQGRHQGVLEAPGLLPHGRRRRAAPPAAPHRGARRWRRPGPGPGPAADGGWLGPAPVPRVARAPRPAGAAAAPRAVPSPVAHAAPRRVRVRHAAAGLLPRRRVRRRRALLRHGDPRRGGGGGLRAAGAAQGVRREGAGGDLQVHTRARRASRRRACRRHAAATDGCLSLSGRRDVCSSCLFLFLCVATCTEL

SEQ ID NO: 22874 - protein, 171 aa, Zea mays subsp. mays
  peptide (1)..(171): Ceres Seq. ID no. 12589618
  misc_feature (13)..(156): NCBI GI NO: 7487567 NR Description: probable mitochondrial carrier protein
  misc_feature (60)..(169): NCBI GI NO: 15228820 NR Description: putative protein; protein id: At3g62650
MDDRTYKGGIKAYWKRRGYYRMDGDAARRRQPLPTVELGGGVAQAQAQAQPPTGDGSGRRRCRGWRVRRGQLGRRLLRALSPRRWLMRLRDAYVSAMLRLASSPAVGYGAGAPFCATATHGAAAAAAFARPAQLKEYDEKVLVEIYRSILARGGPLAGAPAAATLRLPTAV

SEQ ID NO: 22875 - protein, 150 aa, Zea mays subsp. mays
  peptide (1)..(150): Ceres Seq. ID no. 12589619
  misc_feature (1)..(135): NCBI GI NO: 7487567 NR Description: probable mitochondrial carrier protein
  misc_feature (39)..(148): NCBI GI NO: 15228820 NR Description: putative protein; protein id: At3g62650
MDGDAARRRQPLPTVELGGGVAQAQAQAQPPTGDGSGRRRCRGWRVRRGQLGRRLLRALSPRRWLMRLRDAYVSAMLRLASSPAVGYGAGAPFCATATHGAAAAAAFARPAQLKEYDEKVLVEIYRSILARGGPLAGAPAAATLRLPTAV

SEQ ID NO: 22876 - DNA, 898 bp, Zea mays subsp. mays
  misc_feature (1)..(898): Ceres Seq. ID no. 13599083
aaaagtagggctagaaaagctatatatacctggcgtgaaatctcactccagtcctctctcgatctaccttgatctttgatttcatttgtttctcaattctttgttaatttatatggctaatcgtacagtgttttgcaggtgagtgtcccggggaacagcatgctcagcatggtgacagttcggtgtgggcactgcacaaatctactgtcagtgaatctgagagcactcatgcactcagtcccagaacaagatcagctccagcaggagaacatcagggtccatggcacgttgcgtgagcatcatcagtgcggcggcggccaccatctggagctgggctcttcgtcgtcctcaaggttccggctgccgatgatgatgtcgtacgcgccgcagaacgagcacttgctgcaggaacagacactgaacaacgctcgtccggctcctgagaagaggcagcgggttccgtcggcgtataacagattcatcaaggaagagattcgcaggatcaaggcgaacaaccccgacattagccacagggaagccttcagcacagcagccaagaactgggcacattatccgaacatccatttcgacttaaactccggccgagagggtggcaagaataagctcgtggacgaggctgtcgcggcggtggcggtggctccgaagaagatccaaggtttctactgatcgatgccggtcgatcgagggatcagcgctcgtcgtcatcaactggccggccgggtgtggaagaattaataataccacacaaattataaatgtactgtgatgagtaaattaaagagttatagtggggaatgaagggagagagagatatatagcaatacgtatattaccttaccttattaatgagtgcaaaaaaacacttgtgaaggtttct

SEQ ID NO: 22877 - protein, 175 aa, Zea mays subsp. mays
  peptide (1)..(175): Ceres Seq. ID no. 13599084
  misc_feature (1)..(145): Pfam Name: Pfam Description:  YABBY protein
  misc_feature (1)..(175): NCBI GI NO: 11280864 NR Description: hypothetical protein 2 [imported] - rice
  misc_feature (57)..(145): NCBI GI NO: 30683176 NR Description: expressed protein [Arabidopsis thaliana]
  misc_feature (1)..(48): NCBI GI NO: 30683176 NR Description: expressed protein [Arabidopsis thaliana]
  misc_feature (1)..(93): NCBI GI NO: 37551421 NR Description: FIL-like protein [Triticum aestivum]
  misc_feature (91)..(151): NCBI GI NO: 37551421 NR Description: FIL-like protein [Triticum aestivum]
  misc_feature (1)..(175): NCBI GI NO: 4928751 NR Description: YABBY2 [Arabidopsis thaliana]
  misc_feature (11)..(153): NCBI GI NO: 37535908 NR Description: hypothetical protein
  misc_feature (1)..(24): NCBI GI NO: 37535908 NR Description: hypothetical protein
  misc_feature (1)..(175): NCBI GI NO: 18406725 NR Description: abnormal floral organs protein
  misc_feature (1)..(145): NCBI GI NO: 27804377 NR Description: MADS-box transcription factor CDM51
MLSMVTVRCGHCTNLLSVNLRALMHSVPEQDQLQQENIRVHGTLREHHQCGGGHHLELGSSSSSRFRLPMMMSYAPQNEHLLQEQTLNNARPAPEKRQRVPSAYNRFIKEEIRRIKANNPDISHREAFSTAAKNWAHYPNIHFDLNSGREGGKNKLVDEAVAAVAVAPKKIQGFY

SEQ ID NO: 22878 - protein, 172 aa, Zea mays subsp. mays
  peptide (1)..(172): Ceres Seq. ID no. 13599085
  misc_feature (1)..(142): Pfam Name: Pfam Description:  YABBY protein
  misc_feature (1)..(172): NCBI GI NO: 11280864 NR Description: hypothetical protein 2 [imported] - rice
  misc_feature (54)..(142): NCBI GI NO: 30683176 NR Description: expressed protein [Arabidopsis thaliana]
  misc_feature (1)..(45): NCBI GI NO: 30683176 NR Description: expressed protein [Arabidopsis thaliana]
  misc_feature (1)..(90): NCBI GI NO: 37551421 NR Description: FIL-like protein [Triticum aestivum]
  misc_feature (88)..(148): NCBI GI NO: 37551421 NR Description: FIL-like protein [Triticum aestivum]
  misc_feature (1)..(172): NCBI GI NO: 4928751 NR Description: YABBY2 [Arabidopsis thaliana]
  misc_feature (8)..(150): NCBI GI NO: 37535908 NR Description: hypothetical protein
  misc_feature (1)..(21): NCBI GI NO: 37535908 NR Description: hypothetical protein
  misc_feature (1)..(172): NCBI GI NO: 18406725 NR Description: abnormal floral organs protein
  misc_feature (1)..(142): NCBI GI NO: 27804377 NR Description: MADS-box transcription factor CDM51
MVTVRCGHCTNLLSVNLRALMHSVPEQDQLQQENIRVHGTLREHHQCGGGHHLELGSSSSSRFRLPMMMSYAPQNEHLLQEQTLNNARPAPEKRQRVPSAYNRFIKEEIRRIKANNPDISHREAFSTAAKNWAHYPNIHFDLNSGREGGKNKLVDEAVAAVAVAPKKIQGFY

SEQ ID NO: 22879 - protein, 152 aa, Zea mays subsp. mays
  peptide (1)..(152): Ceres Seq. ID no. 13599086
  misc_feature (1)..(122): Pfam Name: Pfam Description:  YABBY protein
  misc_feature (1)..(152): NCBI GI NO: 11280864 NR Description: hypothetical protein 2 [imported] - rice
  misc_feature (34)..(122): NCBI GI NO: 30683176 NR Description: expressed protein [Arabidopsis thaliana]
  misc_feature (1)..(25): NCBI GI NO: 30683176 NR Description: expressed protein [Arabidopsis thaliana]
  misc_feature (1)..(70): NCBI GI NO: 37551421 NR Description: FIL-like protein [Triticum aestivum]
  misc_feature (68)..(128): NCBI GI NO: 37551421 NR Description: FIL-like protein [Triticum aestivum]
  misc_feature (1)..(152): NCBI GI NO: 4928751 NR Description: YABBY2 [Arabidopsis thaliana]
  misc_feature (1)..(130): NCBI GI NO: 37535908 NR Description: hypothetical protein
  misc_feature (1)..(152): NCBI GI NO: 18406725 NR Description: abnormal floral organs protein
  misc_feature (1)..(122): NCBI GI NO: 27804377 NR Description: MADS-box transcription factor CDM51
  misc_feature (60)..(122): NCBI GI NO: 38605890 NR Description: OSJNBb0020O11.2
MHSVPEQDQLQQENIRVHGTLREHHQCGGGHHLELGSSSSSRFRLPMMMSYAPQNEHLLQEQTLNNARPAPEKRQRVPSAYNRFIKEEIRRIKANNPDISHREAFSTAAKNWAHYPNIHFDLNSGREGGKNKLVDEAVAAVAVAPKKIQGFY

SEQ ID NO: 22880 - DNA, 2352 bp, Zea mays subsp. mays
  misc_feature (1)..(2352): Ceres Seq. ID no. 13599132
gacacgcctcgcctccatcttctctgccgtgcgcagccccacctcagccccgccccacactctccgccgcgctctcccaagcttcagctaccggcgagcgcatccatctcagccccgcatgtcctcctcttcagccgcctcctccgcgccgccggccgccgagaagcctacagtggcgccgttcgggtcctggaggtcgcccatcactgcggacgtcgtatctggcgcggataggcgcctcggcggtatcgctctcgctggagatggacgccttctctggatcgagggccgccccgaggagaaagggcgtatggttattgtaaaggaggaggataatcctgtggatgtcatacctcaggaatttgcagcacgcacactggctcaagaatatggaggtggtgcatttgcagtcgacaagagtgttgttgtgttctcaaattacaaggatcaacgtctatacaagcaaacaataggaactggtggtccacctgtgcctcttacacccgattatggtgcgccaaatgtcagttatgctgatggtgtatttgatcctcacttcgaccgttatgttactgtgatggaagatcgtcgaaaggatagcttgaatcccaccacaacaattgctgctataaacttgagtggcagtgatgttcatgaaccaaaggtgctgatcagcggcaacgatttctatgcatttcctcgcattgatcaaaataaaaagcggatagcatggattgaatggagccatccaaacatgccctgggataaatcagaactctgggttggttacttcgccgaaagcggagacttgaccaaacgggtctgtattgccggtggcaatcggctgctgattgaatctcctagtgaacctaaatggtcaccgaaaggagaactgttttttgttactgacagagggagtggattttggaatatttataaatgggttgaacaaaccaatgaaattgttccagtgtattcactagatgctgaatttacgagaccattgtgggtttttggcatcagctcgtatgattttcttggaaacagcgaccacattgttttcagttatagacagcaaggaaagtcacatcttggtgtgcttgattgtgattcaggttctatttcattgcttgacatccctttctctgatttatctgatgtggttgctgcagatgattacttctatattgaaggtgcttccgcgagtattccacggtcgattgctaaggtgacattaaatgaaagcaaaaccaaagtagtcaatttctcaatagcctggtcgtcctcaccagacctcgtacaatatagacctttcttcagcacaccagaacttgttgagttccctacatccaagtctggccagaaagcttatgcctatttctacccaccatcaaatcccaattttcaaggtttgcctgatgaaaagcctcctttgcttgtcaaaacacatggaggaccaactgctgaaacacgtgcaattctggacctcagtgtccagtattggacaagtagagggtgggcatatgtcgatgtcaactatggaggaagcactggttatggaagagagtatcgggagagactattgaacaaatggggtattgttgatgttgatgattgctgcggctgtgcgagattcctggtggagagtgggaaagtagatgggcagcgcctttgtattactggtagatcagcaggtggatacactactttagcttcacttgcattcagagacacgttcaaggctggagcttctctctatggtgttggggacttgactctgttgagagcggagacgcacaaatttgagtctcattatatggacaatcttgtaggaaatgaaagagcttactacgagagatcaccaatcaactttgtcaaccagtttacttgtccagtcattttgtttcaagggttggaggataaggttgtgccaccagatcaggcacgcaaaatatacagtgccttgaaagagaaaggtttgcctgttgctttggttgaatatgaaggagagcagcatgggttccgtaaggcggagaacatcaagttcaccttggagcagcagatgttgttctttgcaagattagttgggaagtttgaggtggcagacgatataactccaatcaagattgagaacttcgattgatctcttggagagtggtgtccggttcgaagttttgttcacgtaacccgattatatgttcagtacattagccgttgcagtaccttttaggaatacgacttcatcttatttttgagggttgatggaaatctcttttttgcgctgtaacgatgaagtcaccttgttttctgttcggttctagaatgaaatagaacggaatgacactatcctct

SEQ ID NO: 22881 - protein, 713 aa, Zea mays subsp. mays
  peptide (1)..(713): Ceres Seq. ID no. 15222521
  misc_feature (504)..(568): Pfam Name: Pfam Description:  Prolyl oligopeptidase family
  misc_feature (46)..(713): NCBI GI NO: 15239342 NR Description: acyl-peptide hydrolase-related
  misc_feature (222)..(711): NCBI GI NO: 37521039 NR Description: probable peptidase [Gloeobacter violaceus]
  misc_feature (59)..(287): NCBI GI NO: 37521039 NR Description: probable peptidase [Gloeobacter violaceus]
  misc_feature (160)..(711): NCBI GI NO: 23043087 NR Description: hypothetical protein
  misc_feature (173)..(696): NCBI GI NO: 16331709 NR Description: hypothetical protein [Synechocystis sp. PCC 6803]
  misc_feature (53)..(691): NCBI GI NO: 23029170 NR Description: hypothetical protein
  misc_feature (58)..(710): NCBI GI NO: 23019244 NR Description: hypothetical protein [Thermobifida fusca]
  misc_feature (223)..(696): NCBI GI NO: 22972830 NR Description: hypothetical protein [Chloroflexus aurantiacus]
  misc_feature (221)..(706): NCBI GI NO: 29654820 NR Description: prolyl oligopeptidase family  protein
  misc_feature (388)..(696): NCBI GI NO: 23062020 NR Description: hypothetical protein
TRLASIFSAVRSPTSAPPHTLRRALPSFSYRRAHPSQPRMSSSSAASSAPPAAEKPTVAPFGSWRSPITADVVSGADRRLGGIALAGDGRLLWIEGRPEEKGRMVIVKEEDNPVDVIPQEFAARTLAQEYGGGAFAVDKSVVVFSNYKDQRLYKQTIGTGGPPVPLTPDYGAPNVSYADGVFDPHFDRYVTVMEDRRKDSLNPTTTIAAINLSGSDVHEPKVLISGNDFYAFPRIDQNKKRIAWIEWSHPNMPWDKSELWVGYFAESGDLTKRVCIAGGNRLLIESPSEPKWSPKGELFFVTDRGSGFWNIYKWVEQTNEIVPVYSLDAEFTRPLWVFGISSYDFLGNSDHIVFSYRQQGKSHLGVLDCDSGSISLLDIPFSDLSDVVAADDYFYIEGASASIPRSIAKVTLNESKTKVVNFSIAWSSSPDLVQYRPFFSTPELVEFPTSKSGQKAYAYFYPPSNPNFQGLPDEKPPLLVKTHGGPTAETRAILDLSVQYWTSRGWAYVDVNYGGSTGYGREYRERLLNKWGIVDVDDCCGCARFLVESGKVDGQRLCITGRSAGGYTTLASLAFRDTFKAGASLYGVGDLTLLRAETHKFESHYMDNLVGNERAYYERSPINFVNQFTCPVILFQGLEDKVVPPDQARKIYSALKEKGLPVALVEYEGEQHGFRKAENIKFTLEQQMLFFARLVGKFEVADDITPIKIENFD

SEQ ID NO: 22882 - protein, 674 aa, Zea mays subsp. mays
  peptide (1)..(674): Ceres Seq. ID no. 15222522
  misc_feature (465)..(529): Pfam Name: Pfam Description:  Prolyl oligopeptidase family
  misc_feature (7)..(674): NCBI GI NO: 15239342 NR Description: acyl-peptide hydrolase-related
  misc_feature (183)..(672): NCBI GI NO: 37521039 NR Description: probable peptidase [Gloeobacter violaceus]
  misc_feature (20)..(248): NCBI GI NO: 37521039 NR Description: probable peptidase [Gloeobacter violaceus]
  misc_feature (121)..(672): NCBI GI NO: 23043087 NR Description: hypothetical protein
  misc_feature (134)..(657): NCBI GI NO: 16331709 NR Description: hypothetical protein [Synechocystis sp. PCC 6803]
  misc_feature (14)..(652): NCBI GI NO: 23029170 NR Description: hypothetical protein
  misc_feature (19)..(671): NCBI GI NO: 23019244 NR Description: hypothetical protein [Thermobifida fusca]
  misc_feature (184)..(657): NCBI GI NO: 22972830 NR Description: hypothetical protein [Chloroflexus aurantiacus]
  misc_feature (182)..(667): NCBI GI NO: 29654820 NR Description: prolyl oligopeptidase family  protein
  misc_feature (349)..(657): NCBI GI NO: 23062020 NR Description: hypothetical protein
MSSSSAASSAPPAAEKPTVAPFGSWRSPITADVVSGADRRLGGIALAGDGRLLWIEGRPEEKGRMVIVKEEDNPVDVIPQEFAARTLAQEYGGGAFAVDKSVVVFSNYKDQRLYKQTIGTGGPPVPLTPDYGAPNVSYADGVFDPHFDRYVTVMEDRRKDSLNPTTTIAAINLSGSDVHEPKVLISGNDFYAFPRIDQNKKRIAWIEWSHPNMPWDKSELWVGYFAESGDLTKRVCIAGGNRLLIESPSEPKWSPKGELFFVTDRGSGFWNIYKWVEQTNEIVPVYSLDAEFTRPLWVFGISSYDFLGNSDHIVFSYRQQGKSHLGVLDCDSGSISLLDIPFSDLSDVVAADDYFYIEGASASIPRSIAKVTLNESKTKVVNFSIAWSSSPDLVQYRPFFSTPELVEFPTSKSGQKAYAYFYPPSNPNFQGLPDEKPPLLVKTHGGPTAETRAILDLSVQYWTSRGWAYVDVNYGGSTGYGREYRERLLNKWGIVDVDDCCGCARFLVESGKVDGQRLCITGRSAGGYTTLASLAFRDTFKAGASLYGVGDLTLLRAETHKFESHYMDNLVGNERAYYERSPINFVNQFTCPVILFQGLEDKVVPPDQARKIYSALKEKGLPVALVEYEGEQHGFRKAENIKFTLEQQMLFFARLVGKFEVADDITPIKIENFD

SEQ ID NO: 22883 - protein, 610 aa, Zea mays subsp. mays
  peptide (1)..(610): Ceres Seq. ID no. 15222523
  misc_feature (401)..(465): Pfam Name: Pfam Description:  Prolyl oligopeptidase family
  misc_feature (1)..(610): NCBI GI NO: 15239342 NR Description: acyl-peptide hydrolase-related
  misc_feature (119)..(608): NCBI GI NO: 37521039 NR Description: probable peptidase [Gloeobacter violaceus]
  misc_feature (1)..(184): NCBI GI NO: 37521039 NR Description: probable peptidase [Gloeobacter violaceus]
  misc_feature (57)..(608): NCBI GI NO: 23043087 NR Description: hypothetical protein
  misc_feature (70)..(593): NCBI GI NO: 16331709 NR Description: hypothetical protein [Synechocystis sp. PCC 6803]
  misc_feature (1)..(588): NCBI GI NO: 23029170 NR Description: hypothetical protein
  misc_feature (1)..(607): NCBI GI NO: 23019244 NR Description: hypothetical protein [Thermobifida fusca]
  misc_feature (120)..(593): NCBI GI NO: 22972830 NR Description: hypothetical protein [Chloroflexus aurantiacus]
  misc_feature (118)..(603): NCBI GI NO: 29654820 NR Description: prolyl oligopeptidase family  protein
  misc_feature (285)..(593): NCBI GI NO: 23062020 NR Description: hypothetical protein
MVIVKEEDNPVDVIPQEFAARTLAQEYGGGAFAVDKSVVVFSNYKDQRLYKQTIGTGGPPVPLTPDYGAPNVSYADGVFDPHFDRYVTVMEDRRKDSLNPTTTIAAINLSGSDVHEPKVLISGNDFYAFPRIDQNKKRIAWIEWSHPNMPWDKSELWVGYFAESGDLTKRVCIAGGNRLLIESPSEPKWSPKGELFFVTDRGSGFWNIYKWVEQTNEIVPVYSLDAEFTRPLWVFGISSYDFLGNSDHIVFSYRQQGKSHLGVLDCDSGSISLLDIPFSDLSDVVAADDYFYIEGASASIPRSIAKVTLNESKTKVVNFSIAWSSSPDLVQYRPFFSTPELVEFPTSKSGQKAYAYFYPPSNPNFQGLPDEKPPLLVKTHGGPTAETRAILDLSVQYWTSRGWAYVDVNYGGSTGYGREYRERLLNKWGIVDVDDCCGCARFLVESGKVDGQRLCITGRSAGGYTTLASLAFRDTFKAGASLYGVGDLTLLRAETHKFESHYMDNLVGNERAYYERSPINFVNQFTCPVILFQGLEDKVVPPDQARKIYSALKEKGLPVALVEYEGEQHGFRKAENIKFTLEQQMLFFARLVGKFEVADDITPIKIENFD

SEQ ID NO: 22884 - DNA, 963 bp, Zea mays subsp. mays
  misc_feature (1)..(963): Ceres Seq. ID no. 14305967
atgtcatatacgtactgatacagggcgtgccgactttccagggcgccaattcccctccaagatccgtcttctccggccgctccacccaattcgtcgtcctccccgcctccggatctgaacatgagcgacgcgaccacggcccccgccaccggagccggggaccacgttgtcgatgccgccgcgcacaagccgccggctgccccgtcgccggacatggcaagcatcagacggggcgggagctccgtgaccgagacagtcacccaggcaacgcagcagcagcagtcgcggctggacgacgaccagctggcggagctgcgggagatattccggtccttcgaccgcaacgccgacggcagcctgacgcagctggagctgggctccttgctccggtccctgggcctgacgcccagcgccgaccagctcgacgcgctcatcacccgtgccgacaccaactccaacggcctcatcgagttctccgagtttgtggcgctcgtggcccccgacctcctccaagaccggtccccttactcggaggaccagctccgcaagctcttcgccatcttcgaccgcgacggcaacgggttcatcaccgcggccgagctggcgcactccatggccaagctcggccacgcgctcaccgtcaaggagctcacgggaatgatcaaggaggcagacaccgacggcgatggccgcatcaatttccaggagttctcgcgcgccatcaccgccgccgcatttgacaacatcttctcctgaccgaccgaccgaccgaggccgcaaacaggatgcgttgtgtcgatcatcgattcagttcttggtgattctcagttttcaatttgttcgtcttcttttggggagattaatttaggaagctatagatgaggtgaggtgttcttatgaataacagatcaaacaaaaaaggaatcaatttagggacaaattacatgcatggttgattgtgtt

SEQ ID NO: 22885 - protein, 245 aa, Zea mays subsp. mays
  peptide (1)..(245): Ceres Seq. ID no. 14305968
  misc_feature (21)..(239): Pfam Name: Pfam Description:  APC basic domain
VIYVLIQGVPTFQGANSPPRSVFSGRSTQFVVLPASGSEHERRDHGPRHRSRGPRCRCRRAQAAGCPVAGHGKHQTGRELRDRDSHPGNAAAAVAAGRRPAGGAAGDIPVLRPQRRRQPDAAGAGLLAPVPGPDAQRRPARRAHHPCRHQLQRPHRVLRVCGARGPRPPPRPVPLLGGPAPQALRHLRPRRQRVHHRGRAGALHGQARPRAHRQGAHGNDQGGRHRRRWPHQFPGVLARHHRRRI

SEQ ID NO: 22886 - protein, 211 aa, Zea mays subsp. mays
  peptide (1)..(211): Ceres Seq. ID no. 14305969
  misc_feature (176)..(204): Pfam Name: Pfam Description:  EF hand
  misc_feature (1)..(211): NCBI GI NO: 13359053 NR Description: P0436D06.14
  misc_feature (55)..(208): NCBI GI NO: 15228441 NR Description: calmodulin, putative [Arabidopsis thaliana]
  misc_feature (56)..(210): NCBI GI NO: 15222618 NR Description: calmodulin, putative [Arabidopsis thaliana]
  misc_feature (59)..(207): NCBI GI NO: 15221797 NR Description: calmodulin, putative [Arabidopsis thaliana]
  misc_feature (60)..(207): NCBI GI NO: 15230858 NR Description: calmodulin, putative [Arabidopsis thaliana]
  misc_feature (60)..(207): NCBI GI NO: 28393082 NR Description: putative calmodulin [Arabidopsis thaliana]
  misc_feature (54)..(207): NCBI GI NO: 34912426 NR Description: P0681B11.17
  misc_feature (56)..(208): NCBI GI NO: 115506 NR Description: Calmodulin
  misc_feature (56)..(208): NCBI GI NO: 225024 NR Description: calmodulin
  misc_feature (57)..(203): NCBI GI NO: 19114252 NR Description: calmodulin [Schizosaccharomyces pombe]
MSDATTAPATGAGDHVVDAAAHKPPAAPSPDMASIRRGGSSVTETVTQATQQQQSRLDDDQLAELREIFRSFDRNADGSLTQLELGSLLRSLGLTPSADQLDALITRADTNSNGLIEFSEFVALVAPDLLQDRSPYSEDQLRKLFAIFDRDGNGFITAAELAHSMAKLGHALTVKELTGMIKEADTDGDGRINFQEFSRAITAAAFDNIFS

SEQ ID NO: 22887 - protein, 180 aa, Zea mays subsp. mays
  peptide (1)..(180): Ceres Seq. ID no. 14305970
  misc_feature (145)..(173): Pfam Name: Pfam Description:  EF hand
  misc_feature (1)..(180): NCBI GI NO: 13359053 NR Description: P0436D06.14
  misc_feature (24)..(177): NCBI GI NO: 15228441 NR Description: calmodulin, putative [Arabidopsis thaliana]
  misc_feature (25)..(179): NCBI GI NO: 15222618 NR Description: calmodulin, putative [Arabidopsis thaliana]
  misc_feature (28)..(176): NCBI GI NO: 15221797 NR Description: calmodulin, putative [Arabidopsis thaliana]
  misc_feature (29)..(176): NCBI GI NO: 15230858 NR Description: calmodulin, putative [Arabidopsis thaliana]
  misc_feature (29)..(176): NCBI GI NO: 28393082 NR Description: putative calmodulin [Arabidopsis thaliana]
  misc_feature (23)..(176): NCBI GI NO: 34912426 NR Description: P0681B11.17
  misc_feature (25)..(177): NCBI GI NO: 115506 NR Description: Calmodulin
  misc_feature (25)..(177): NCBI GI NO: 225024 NR Description: calmodulin
  misc_feature (26)..(172): NCBI GI NO: 19114252 NR Description: calmodulin [Schizosaccharomyces pombe]
MASIRRGGSSVTETVTQATQQQQSRLDDDQLAELREIFRSFDRNADGSLTQLELGSLLRSLGLTPSADQLDALITRADTNSNGLIEFSEFVALVAPDLLQDRSPYSEDQLRKLFAIFDRDGNGFITAAELAHSMAKLGHALTVKELTGMIKEADTDGDGRINFQEFSRAITAAAFDNIFS

SEQ ID NO: 22888 - DNA, 1024 bp, Zea mays subsp. mays
  misc_feature (1)..(1024): Ceres Seq. ID no. 13599133
ttttttccccgattctctaatcgcccgcccccacctagtattctggaattgcggacacaaggagatgctgtccgtgcaggaagcccttgagcttgcgtcgtccagctgcggcacgacgatggacgttaccacgtgcgggttcacgccgtgggggcccgagtcgtgccctggcctggagcaggtgatggcgtcgacgccggccgcggcagcgaggcacccggaccccgaggaggaggagaggcgccggcggcagcgccgcaagctgtcgaaccggctgtcggcgcgccggtcgcgagcgcggaagcagcagcggctggaggagctccgcgcggaggcggcgcggctccgcggccagaagcgggagctggaggccaggctgcaggccctggcgcggcacggcctcgccgtgcgctgccagaacgcgcggctccgcgccgaggccgccgcgctcgcgcgcaggctcctcgcgatcgcgtcgtacgcccagcagccgcagcataaggccggagtcgcgcccgcgccggcggcggcgctgctggggctggcgtcgctgacgacgtaggcggctggcgagagggacgttcttctgcccggtggaacgaagtctcgcgcccactcgcagttgcagtctcgcgctctcgcatgctatggtgaactggaaacatgcatgggctgagggcagttgggcacacacaccgaggcttgctagtacggtgcatgcagcggtcagccggtagcactatactattagtccctgtttgggaacaaagtttttgaaaactacagtttttgaaatattatactatactttagttatgacaataccgtagtttataataccgcagttttgaaaactgaggtccagagctaagtttagaatgccttaaaacaactatagtatttgcaatacttcagttttgaaaacagagattttacccagcttgccaaacaccattatgtatataatactgcagtatttgagaatactgcagtattcttccaaaactgcagaaaaactttgttc

SEQ ID NO: 22889 - protein, 186 aa, Zea mays subsp. mays
  peptide (1)..(186): Ceres Seq. ID no. 13599134
  misc_feature (78)..(142): Pfam Name: Pfam Description:  bZIP transcription factor
  misc_feature (46)..(174): NCBI GI NO: 40539061 NR Description: putative transcription factor
  misc_feature (77)..(154): NCBI GI NO: 33146418 NR Description: hypothetical protein
  misc_feature (68)..(177): NCBI GI NO: 12039274 NR Description: hypothetical protein [Oryza sativa]
  misc_feature (52)..(177): NCBI GI NO: 34913702 NR Description: OSJNBa0062A24.22
  misc_feature (73)..(171): NCBI GI NO: 2130123 NR Description: DNA-binding factor LIP 15 - maize
  misc_feature (82)..(174): NCBI GI NO: 479696 NR Description: oxidase lip19 - rice
  misc_feature (82)..(174): NCBI GI NO: 14289165 NR Description: glip19 [Oryza sativa]
  misc_feature (79)..(171): NCBI GI NO: 1352613 NR Description: OCS-element binding factor 1 (OCSBF-1)
  misc_feature (82)..(171): NCBI GI NO: 40019253 NR Description: ocs-element binding factor 1 [Secale cereale]
  misc_feature (62)..(162): NCBI GI NO: 7489118 NR Description: DNA-binding protein tbz17 - common tobacco
FFPDSLIARPHLVFWNCGHKEMLSVQEALELASSSCGTTMDVTTCGFTPWGPESCPGLEQVMASTPAAAARHPDPEEEERRRRQRRKLSNRLSARRSRARKQQRLEELRAEAARLRGQKRELEARLQALARHGLAVRCQNARLRAEAAALARRLLAIASYAQQPQHKAGVAPAPAAALLGLASLTT

SEQ ID NO: 22890 - protein, 165 aa, Zea mays subsp. mays
  peptide (1)..(165): Ceres Seq. ID no. 13599135
  misc_feature (57)..(121): Pfam Name: Pfam Description:  bZIP transcription factor
  misc_feature (25)..(153): NCBI GI NO: 40539061 NR Description: putative transcription factor
  misc_feature (56)..(133): NCBI GI NO: 33146418 NR Description: hypothetical protein
  misc_feature (47)..(156): NCBI GI NO: 12039274 NR Description: hypothetical protein [Oryza sativa]
  misc_feature (31)..(156): NCBI GI NO: 34913702 NR Description: OSJNBa0062A24.22
  misc_feature (52)..(150): NCBI GI NO: 2130123 NR Description: DNA-binding factor LIP 15 - maize
  misc_feature (61)..(153): NCBI GI NO: 479696 NR Description: oxidase lip19 - rice
  misc_feature (61)..(153): NCBI GI NO: 14289165 NR Description: glip19 [Oryza sativa]
  misc_feature (58)..(150): NCBI GI NO: 1352613 NR Description: OCS-element binding factor 1 (OCSBF-1)
  misc_feature (61)..(150): NCBI GI NO: 40019253 NR Description: ocs-element binding factor 1 [Secale cereale]
  misc_feature (41)..(141): NCBI GI NO: 7489118 NR Description: DNA-binding protein tbz17 - common tobacco
MLSVQEALELASSSCGTTMDVTTCGFTPWGPESCPGLEQVMASTPAAAARHPDPEEEERRRRQRRKLSNRLSARRSRARKQQRLEELRAEAARLRGQKRELEARLQALARHGLAVRCQNARLRAEAAALARRLLAIASYAQQPQHKAGVAPAPAAALLGLASLTT

SEQ ID NO: 22891 - protein, 147 aa, Zea mays subsp. mays
  peptide (1)..(147): Ceres Seq. ID no. 13599136
  misc_feature (39)..(103): Pfam Name: Pfam Description:  bZIP transcription factor
  misc_feature (7)..(135): NCBI GI NO: 40539061 NR Description: putative transcription factor
  misc_feature (38)..(115): NCBI GI NO: 33146418 NR Description: hypothetical protein
  misc_feature (29)..(138): NCBI GI NO: 12039274 NR Description: hypothetical protein [Oryza sativa]
  misc_feature (13)..(138): NCBI GI NO: 34913702 NR Description: OSJNBa0062A24.22
  misc_feature (34)..(132): NCBI GI NO: 2130123 NR Description: DNA-binding factor LIP 15 - maize
  misc_feature (43)..(135): NCBI GI NO: 479696 NR Description: oxidase lip19 - rice
  misc_feature (43)..(135): NCBI GI NO: 14289165 NR Description: glip19 [Oryza sativa]
  misc_feature (40)..(132): NCBI GI NO: 1352613 NR Description: OCS-element binding factor 1 (OCSBF-1)
  misc_feature (43)..(132): NCBI GI NO: 40019253 NR Description: ocs-element binding factor 1 [Secale cereale]
  misc_feature (23)..(123): NCBI GI NO: 7489118 NR Description: DNA-binding protein tbz17 - common tobacco
MDVTTCGFTPWGPESCPGLEQVMASTPAAAARHPDPEEEERRRRQRRKLSNRLSARRSRARKQQRLEELRAEAARLRGQKRELEARLQALARHGLAVRCQNARLRAEAAALARRLLAIASYAQQPQHKAGVAPAPAAALLGLASLTT

SEQ ID NO: 22892 - DNA, 838 bp, Zea mays subsp. mays
  misc_feature (1)..(838): Ceres Seq. ID no. 14312640
actacgcggtcttcgctcgctcctcgagttcagtcctcacctccccaccgagctccattaatggcgcctcccctaattttgccataagtgccgagaccacgtggggtctgggaaggaaaggctactgccacttcagaggtcggcctgggaggctgcatcgcatccacatggggtaccagcccatgcacggcaacggcgggacagccggtgccgggacatcaggctccggcggcggcggcggcggagaccacttgcgccaccaccagcagcagcgcctgcacagcccccgcatggccggcggaggctccatgacgcgccgggccagctcgttcaagcgcggcgggggcggcgagatcgagctccagatcggctctccgcgctcgccgaggtgcgacgggttggggagccctccctcggactccgtggagtcgtccggtagcggcctcctcctccaccagagccagcagaaccagcacctccggttccggctcttcaagccgccggtctccggcggcagcgcggtcggacttggtctggggatccgcgagaggaggaagctcgggaacatgctgttcctcgccttgtgcggcgtgtgcttgctcctcggcgtcgtcaagatcttggcgggcggctggttcgccctccctggcaatgacaaagacgccgatttgaaggtaaataattaggatttttatgtgcaatggtagctgttattatttgatacgcctatgttgttcaccctcctgagtcatgatcaacagctcctggagagtcacctaaatgtcttatcccaacttgtcatgatgaataaacatgctctcagcctacttgttcagtt

SEQ ID NO: 22893 - protein, 227 aa, Zea mays subsp. mays
  peptide (1)..(227): Ceres Seq. ID no. 14312641
  misc_feature (77)..(225): NCBI GI NO: 22327354 NR Description: axi 1
  misc_feature (77)..(225): NCBI GI NO: 10176802 NR Description: axi 1
YAVFARSSSSVLTSPPSSINGASPNFAISAETTWGLGRKGYCHFRGRPGRLHRIHMGYQPMHGNGGTAGAGTSGSGGGGGGDHLRHHQQQRLHSPRMAGGGSMTRRASSFKRGGGGEIELQIGSPRSPRCDGLGSPPSDSVESSGSGLLLHQSQQNQHLRFRLFKPPVSGGSAVGLGLGIRERRKLGNMLFLALCGVCLLLGVVKILAGGWFALPGNDKDADLKVNN

SEQ ID NO: 22894 - protein, 172 aa, Zea mays subsp. mays
  peptide (1)..(172): Ceres Seq. ID no. 14312642
  misc_feature (22)..(170): NCBI GI NO: 22327354 NR Description: axi 1
  misc_feature (22)..(170): NCBI GI NO: 10176802 NR Description: axi 1
MGYQPMHGNGGTAGAGTSGSGGGGGGDHLRHHQQQRLHSPRMAGGGSMTRRASSFKRGGGGEIELQIGSPRSPRCDGLGSPPSDSVESSGSGLLLHQSQQNQHLRFRLFKPPVSGGSAVGLGLGIRERRKLGNMLFLALCGVCLLLGVVKILAGGWFALPGNDKDADLKVNN

SEQ ID NO: 22895 - protein, 167 aa, Zea mays subsp. mays
  peptide (1)..(167): Ceres Seq. ID no. 14312643
  misc_feature (17)..(165): NCBI GI NO: 22327354 NR Description: axi 1
  misc_feature (17)..(165): NCBI GI NO: 10176802 NR Description: axi 1
MHGNGGTAGAGTSGSGGGGGGDHLRHHQQQRLHSPRMAGGGSMTRRASSFKRGGGGEIELQIGSPRSPRCDGLGSPPSDSVESSGSGLLLHQSQQNQHLRFRLFKPPVSGGSAVGLGLGIRERRKLGNMLFLALCGVCLLLGVVKILAGGWFALPGNDKDADLKVNN

SEQ ID NO: 22896 - DNA, 966 bp, Zea mays subsp. mays
  misc_feature (1)..(966): Ceres Seq. ID no. 13599097
aaaatcaacgcttccccatcgctcgcgtccccgcatctgccgccatccgcgcgtccccgcatccgccgccatccacgcccacggccccaaacacctcgatccgaacctccctccccacacactcacacgttgctgccggctaccctcctcccaccccactcgtcccctccgaacccaactccgatccatccatccccaagtttctcctctcagcgcgtggggcagtggcggcggcagcatgggcgtgcaggctgctacgggcacaggagcagcgggggctgcacaaccgtgcaggcagctgtcggcatgcggcacagtgactgcgggagcccaggcggcgccggtgcggctgcagccggcggcgggcgaccgtgaggcggctgcgggagtggtgcaagcccggtggcgcatgctttgttttttcttcctgtttttgatttgcgaaagcacttgtgaaggtgtccgacgtgccattagactagcttgtcccaaacgtcaagatttgggctaatgaagtcaggggctgtcctatgatattgaggacagactcgactccttcatggtgcgcatggagggtcttgattcaaccaagcgcaaaaccatcatgggattcattcaacaaactcatggcttggtcaccaagttcaggattcgccatggaatatctgataacattatagacatcgagagcaaagtaaagaaggtgaaggagcggtatggcaggtccaatgtgcatcgtattgtagctagtcttgtcgcaaccacagttgaccctcgtctcttagctatgcataatttgtttgaagatggtgatgagccagcgaaaaagatcaagacagtcttgttgttagatttggaggactcggcaagactactcttgttaaagcagtctatgacaaggttaaggagtttgattgcagtgcttttgtatcaataggtcagaaatgtgatatcaataaagttttc

SEQ ID NO: 22897 - protein, 169 aa, Zea mays subsp. mays
  peptide (1)..(169): Ceres Seq. ID no. 13599098
KSTLPHRSRPRICRHPRVPASAAIHAHGPKHLDPNLPPHTLTRCCRLPSSHPTRPLRTQLRSIHPQVSPLSAWGSGGGSMGVQAATGTGAAGAAQPCRQLSACGTVTAGAQAAPVRLQPAAGDREAAAGVVQARWRMLCFFFLFLICESTCEGVRRAIRLACPKRQDLG

SEQ ID NO: 22898 - protein, 125 aa, Zea mays subsp. mays
  peptide (1)..(125): Ceres Seq. ID no. 13599099
  misc_feature (1)..(83): NCBI GI NO: 22208466 NR Description: putative Mla1 [Sorghum bicolor]
  misc_feature (1)..(76): NCBI GI NO: 22208465 NR Description: putative stripe rust resistance protein Yr10
  misc_feature (1)..(108): NCBI GI NO: 40253772 NR Description: putative RGH1A
  misc_feature (1)..(78): NCBI GI NO: 11612210 NR Description: MLA1 [Hordeum vulgare subsp. vulgare]
  misc_feature (1)..(77): NCBI GI NO: 21321592 NR Description: NBS-LRR-like [Aegilops tauschii]
  misc_feature (1)..(95): NCBI GI NO: 37573036 NR Description: putative MLA1
  misc_feature (1)..(83): NCBI GI NO: 11990497 NR Description: stripe rust resistance protein Yr10
  misc_feature (1)..(83): NCBI GI NO: 11990500 NR Description: stripe rust resistance protein Yr10
MVRMEGLDSTKRKTIMGFIQQTHGLVTKFRIRHGISDNIIDIESKVKKVKERYGRSNVHRIVASLVATTVDPRLLAMHNLFEDGDEPAKKIKTVLLLDLEDSARLLLLKQSMTRLRSLIAVLLYQ

SEQ ID NO: 22899 - protein, 124 aa, Zea mays subsp. mays
  peptide (1)..(124): Ceres Seq. ID no. 13599100
KINASPSLASPHLPPSARPRIRRHPRPRPQTPRSEPPSPHTHTLLPATLLPPHSSPPNPTPIHPSPSFSSQRVGQWRRQHGRAGCYGHRSSGGCTTVQAAVGMRHSDCGSPGGAGAAAAGGGRP

SEQ ID NO: 22900 - DNA, 1299 bp, Zea mays subsp. mays
  misc_feature (1)..(1299): Ceres Seq. ID no. 13600673
atctcggggatccggcactcgcctcccttttccctttccgcgccccatcaccattgccacaaatagcaaccaaggcagtaagcctagccaagccaaccgacggcggcgagagtatatatacacacacacctgacgcctctgctgctgctgggatcaacgcggcagcttagtgacgacgacgactcttctgtctctgcgttgattaatggacagtaacagatccatggcgacgagcggcgtggctccgttcgtggccaagacgtaccgcatggtggatgacccggcgaccgacggcgtggtcgcgtggggcagggacaacaacagcttcgtcgtggccgaccccttcgccctctcgcagacgctcctgcccgcgcacttcaagcactccaacttctccagcttcgtgcgccagctcaacacctacggcttccggaaggtcgatccggaccggtgggagttcgcgcacgtgtccttccttcgcggccagacgcatctcctgggccagatcgtccgccggagcagcggcggcaagcgcaaggacgacggcaacggcgccggcgccggctccgccgacgacgaggacgcggtggccatggaggtggtccggctgaggcgggagcagcgggccatcgaggagcaggtggccgcgatgtggcgccgcgtgcaggagacggagcgccggcccaagcagatgctcgcgttcctcgtcaaggtcgcgggcgacccgcaggtgctgcgccgcctcgtctccggcgccgggggcgacgccgtgttcgccgccgcggagccggaggacggcgcgagcatcaagagggcgcggctgcttctcgatgccggaagcggcggcgacggcgccgtckgacttcmrcgggctctatagcacaaccgccggaagcgaagacgacggcgtcgggttcggcagcgattacctgcagccgccaccgccgtacgtgttccccgtcaacagcggcggctactgactgatggcggtctggtagtccagcatctatccgagcgatgtggcgtgcttcgtcgtcgttagttgcccctcccgagtgacgtgttggactgaagtggcaacggcgccgacggacggtgagcaaccaacccaagataattagctaggaggtggtacaaagtgtaaagcctttggtttaggcaggtctgcggtgatctttaatttgcttgttgcaatgttttccttccctaccttgtcaagtgaatgctacggatcagcggcggcaaaagccgttagctgcagctagtttgccgctgctcttcatacagctgcacgccgtt

SEQ ID NO: 22901 - protein, 224 aa, Zea mays subsp. mays
  peptide (1)..(224): Ceres Seq. ID no. 15218992
  misc_feature (13)..(181): Pfam Name: Pfam Description:  HSF-type DNA-binding
  misc_feature (2)..(181): NCBI GI NO: 15230127 NR Description: heat shock transcription factor family
  misc_feature (12)..(214): NCBI GI NO: 34910182 NR Description: putative heat shock transcription factor
  misc_feature (10)..(179): NCBI GI NO: 15225255 NR Description: heat shock transcription factor family
  misc_feature (14)..(104): NCBI GI NO: 11386827 NR Description: Heat shock factor protein HSF8
  misc_feature (124)..(181): NCBI GI NO: 11386827 NR Description: Heat shock factor protein HSF8
  misc_feature (14)..(104): NCBI GI NO: 729775 NR Description: HEAT SHOCK FACTOR PROTEIN HSF8
  misc_feature (124)..(181): NCBI GI NO: 729775 NR Description: HEAT SHOCK FACTOR PROTEIN HSF8
  misc_feature (10)..(182): NCBI GI NO: 33087081 NR Description: heat stress protein
  misc_feature (10)..(182): NCBI GI NO: 28971956 NR Description: putative heat shock transcription factor
  misc_feature (11)..(179): NCBI GI NO: 729774 NR Description: HEAT SHOCK FACTOR PROTEIN HSF30
  misc_feature (219)..(219): Xaa is any aa, unknown or other
  misc_feature (221)..(221): Xaa is any aa, unknown or other
MDSNRSMATSGVAPFVAKTYRMVDDPATDGVVAWGRDNNSFVVADPFALSQTLLPAHFKHSNFSSFVRQLNTYGFRKVDPDRWEFAHVSFLRGQTHLLGQIVRRSSGGKRKDDGNGAGAGSADDEDAVAMEVVRLRREQRAIEEQVAAMWRRVQETERRPKQMLAFLVKVAGDPQVLRRLVSGAGGDAVFAAAEPEDGASIKRARLLLDAGSGGDGAVXLXRAL

SEQ ID NO: 22902 - protein, 218 aa, Zea mays subsp. mays
  peptide (1)..(218): Ceres Seq. ID no. 15218993
  misc_feature (7)..(175): Pfam Name: Pfam Description:  HSF-type DNA-binding
  misc_feature (1)..(175): NCBI GI NO: 15230127 NR Description: heat shock transcription factor family
  misc_feature (6)..(208): NCBI GI NO: 34910182 NR Description: putative heat shock transcription factor
  misc_feature (4)..(173): NCBI GI NO: 15225255 NR Description: heat shock transcription factor family
  misc_feature (8)..(98): NCBI GI NO: 11386827 NR Description: Heat shock factor protein HSF8
  misc_feature (118)..(175): NCBI GI NO: 11386827 NR Description: Heat shock factor protein HSF8
  misc_feature (8)..(98): NCBI GI NO: 729775 NR Description: HEAT SHOCK FACTOR PROTEIN HSF8
  misc_feature (118)..(175): NCBI GI NO: 729775 NR Description: HEAT SHOCK FACTOR PROTEIN HSF8
  misc_feature (4)..(176): NCBI GI NO: 33087081 NR Description: heat stress protein
  misc_feature (4)..(176): NCBI GI NO: 28971956 NR Description: putative heat shock transcription factor
  misc_feature (5)..(173): NCBI GI NO: 729774 NR Description: HEAT SHOCK FACTOR PROTEIN HSF30
  misc_feature (213)..(213): Xaa is any aa, unknown or other
  misc_feature (215)..(215): Xaa is any aa, unknown or other
MATSGVAPFVAKTYRMVDDPATDGVVAWGRDNNSFVVADPFALSQTLLPAHFKHSNFSSFVRQLNTYGFRKVDPDRWEFAHVSFLRGQTHLLGQIVRRSSGGKRKDDGNGAGAGSADDEDAVAMEVVRLRREQRAIEEQVAAMWRRVQETERRPKQMLAFLVKVAGDPQVLRRLVSGAGGDAVFAAAEPEDGASIKRARLLLDAGSGGDGAVXLXRAL

SEQ ID NO: 22903 - protein, 203 aa, Zea mays subsp. mays
  peptide (1)..(203): Ceres Seq. ID no. 15218994
  misc_feature (1)..(160): Pfam Name: Pfam Description:  HSF-type DNA-binding
  misc_feature (1)..(160): NCBI GI NO: 15230127 NR Description: heat shock transcription factor family
  misc_feature (1)..(193): NCBI GI NO: 34910182 NR Description: putative heat shock transcription factor
  misc_feature (1)..(158): NCBI GI NO: 15225255 NR Description: heat shock transcription factor family
  misc_feature (1)..(83): NCBI GI NO: 11386827 NR Description: Heat shock factor protein HSF8
  misc_feature (103)..(160): NCBI GI NO: 11386827 NR Description: Heat shock factor protein HSF8
  misc_feature (1)..(83): NCBI GI NO: 729775 NR Description: HEAT SHOCK FACTOR PROTEIN HSF8
  misc_feature (103)..(160): NCBI GI NO: 729775 NR Description: HEAT SHOCK FACTOR PROTEIN HSF8
  misc_feature (1)..(161): NCBI GI NO: 33087081 NR Description: heat stress protein
  misc_feature (1)..(161): NCBI GI NO: 28971956 NR Description: putative heat shock transcription factor
  misc_feature (1)..(158): NCBI GI NO: 729774 NR Description: HEAT SHOCK FACTOR PROTEIN HSF30
  misc_feature (198)..(198): Xaa is any aa, unknown or other
  misc_feature (200)..(200): Xaa is any aa, unknown or other
MVDDPATDGVVAWGRDNNSFVVADPFALSQTLLPAHFKHSNFSSFVRQLNTYGFRKVDPDRWEFAHVSFLRGQTHLLGQIVRRSSGGKRKDDGNGAGAGSADDEDAVAMEVVRLRREQRAIEEQVAAMWRRVQETERRPKQMLAFLVKVAGDPQVLRRLVSGAGGDAVFAAAEPEDGASIKRARLLLDAGSGGDGAVXLXRAL

SEQ ID NO: 22904 - DNA, 1079 bp, Zea mays subsp. mays
  misc_feature (1)..(1079): Ceres Seq. ID no. 13599102
accgcagcccgccccactaactattgactgtcggattccctacccgtcggcgacaatccgctgcccccaatctgcctggtaggtctcgcacctccggtcatggctgccgaagctggcccaatctccaaggtcctcatcgtcatagcaatgcagaaggaggcgacgccgctcgtccacaagttcaatctcgtcgaggcgcccgcccaccaatccacttttcctaaaggtgccccatgggtttggtaccatggcagctacaaaggcctccacattgaccttgtattgcctggaatggatgctgttcttggagtcgacagtgttggtacagtaccagtagctgttgtgactagtttctccattcaaacattgaagccagaccttatcattaatgcgggcactgctggtggcttcaaggccaaaggagcaagcattactgatgtattccttgcatcagatgttgcattccatgacaggaggataccaatacctatttttgacatgtatggaactggagcacgcaaaacttttgcagctcctaatatcttgaaggagctcaatttgaaggttggcaagttgtcgactggggattctctggatatgtgtccccaggataaggagttgatactgcgcaatgatgctacaataaaggacatggagggagctgctgtagcatatgtcgctgacatgttctcgacaccagcgatctttgtgaaagctgtgactgatatcgtggatggggtgaagccaacgtatgaggagtttctgcagaacctgattgccgtgacgacggcactggagctggcagtcaccaaagtggtggatttcatcagcgggaaacgcatctccgatctttgaaagctcgtggtcacgaaatccaacatccccctgctctgatgcacgatgctaggctaggatacaatacaacgttgggtcaatgattttttttggaggtgttctatacgtgaggttttaccccttttgcaatggctcttgatctattcctgaataccgaccagagcagttgtctcttgctaaacagaaggaatgtaaagtgagcaaacatgccattgatcgttgcg

SEQ ID NO: 22905 - protein, 251 aa, Zea mays subsp. mays
  peptide (1)..(251): Ceres Seq. ID no. 13599103
  misc_feature (10)..(235): Pfam Name: Pfam Description:  Phosphorylase family
  misc_feature (5)..(251): NCBI GI NO: 34897892 NR Description: ESTs C28489
  misc_feature (5)..(251): NCBI GI NO: 18087497 NR Description: methylthioadenosine/ S-adenosyl homocysteinenucleosidase
  misc_feature (1)..(251): NCBI GI NO: 7406708 NR Description: putative ripening-related protein [Vitis vinifera]
  misc_feature (7)..(251): NCBI GI NO: 15234791 NR Description: expressed protein [Arabidopsis thaliana]
  misc_feature (4)..(251): NCBI GI NO: 30690140 NR Description: expressed protein [Arabidopsis thaliana]
  misc_feature (53)..(251): NCBI GI NO: 7486865 NR Description: hypothetical protein T11I11
  misc_feature (64)..(238): NCBI GI NO: 16079781 NR Description: similar to purine nucleoside phosphorylase
  misc_feature (62)..(240): NCBI GI NO: 15642376 NR Description: MTA/SAH nucleosidase [Vibrio cholerae]
  misc_feature (65)..(243): NCBI GI NO: 28897253 NR Description: MTA/SAH nucleosidase
  misc_feature (64)..(222): NCBI GI NO: 23037085 NR Description: hypothetical protein [Oenococcus oeni MCW]
MAAEAGPISKVLIVIAMQKEATPLVHKFNLVEAPAHQSTFPKGAPWVWYHGSYKGLHIDLVLPGMDAVLGVDSVGTVPVAVVTSFSIQTLKPDLIINAGTAGGFKAKGASITDVFLASDVAFHDRRIPIPIFDMYGTGARKTFAAPNILKELNLKVGKLSTGDSLDMCPQDKELILRNDATIKDMEGAAVAYVADMFSTPAIFVKAVTDIVDGVKPTYEEFLQNLIAVTTALELAVTKVVDFISGKRISDL

SEQ ID NO: 22906 - protein, 235 aa, Zea mays subsp. mays
  peptide (1)..(235): Ceres Seq. ID no. 13599104
  misc_feature (1)..(219): Pfam Name: Pfam Description:  Phosphorylase family
  misc_feature (1)..(235): NCBI GI NO: 34897892 NR Description: ESTs C28489
  misc_feature (1)..(235): NCBI GI NO: 18087497 NR Description: methylthioadenosine/ S-adenosyl homocysteinenucleosidase
  misc_feature (1)..(235): NCBI GI NO: 7406708 NR Description: putative ripening-related protein [Vitis vinifera]
  misc_feature (1)..(235): NCBI GI NO: 15234791 NR Description: expressed protein [Arabidopsis thaliana]
  misc_feature (1)..(235): NCBI GI NO: 30690140 NR Description: expressed protein [Arabidopsis thaliana]
  misc_feature (37)..(235): NCBI GI NO: 7486865 NR Description: hypothetical protein T11I11
  misc_feature (48)..(222): NCBI GI NO: 16079781 NR Description: similar to purine nucleoside phosphorylase
  misc_feature (46)..(224): NCBI GI NO: 15642376 NR Description: MTA/SAH nucleosidase [Vibrio cholerae]
  misc_feature (49)..(227): NCBI GI NO: 28897253 NR Description: MTA/SAH nucleosidase
  misc_feature (48)..(206): NCBI GI NO: 23037085 NR Description: hypothetical protein [Oenococcus oeni MCW]
MQKEATPLVHKFNLVEAPAHQSTFPKGAPWVWYHGSYKGLHIDLVLPGMDAVLGVDSVGTVPVAVVTSFSIQTLKPDLIINAGTAGGFKAKGASITDVFLASDVAFHDRRIPIPIFDMYGTGARKTFAAPNILKELNLKVGKLSTGDSLDMCPQDKELILRNDATIKDMEGAAVAYVADMFSTPAIFVKAVTDIVDGVKPTYEEFLQNLIAVTTALELAVTKVVDFISGKRISDL

SEQ ID NO: 22907 - protein, 187 aa, Zea mays subsp. mays
  peptide (1)..(187): Ceres Seq. ID no. 13599105
  misc_feature (1)..(171): Pfam Name: Pfam Description:  Phosphorylase family
  misc_feature (1)..(187): NCBI GI NO: 34897892 NR Description: ESTs C28489
  misc_feature (1)..(187): NCBI GI NO: 18087497 NR Description: methylthioadenosine/ S-adenosyl homocysteinenucleosidase
  misc_feature (1)..(187): NCBI GI NO: 7406708 NR Description: putative ripening-related protein [Vitis vinifera]
  misc_feature (1)..(187): NCBI GI NO: 15234791 NR Description: expressed protein [Arabidopsis thaliana]
  misc_feature (1)..(187): NCBI GI NO: 30690140 NR Description: expressed protein [Arabidopsis thaliana]
  misc_feature (1)..(187): NCBI GI NO: 7486865 NR Description: hypothetical protein T11I11
  misc_feature (1)..(174): NCBI GI NO: 16079781 NR Description: similar to purine nucleoside phosphorylase
  misc_feature (1)..(176): NCBI GI NO: 15642376 NR Description: MTA/SAH nucleosidase [Vibrio cholerae]
  misc_feature (1)..(179): NCBI GI NO: 28897253 NR Description: MTA/SAH nucleosidase
  misc_feature (1)..(158): NCBI GI NO: 23037085 NR Description: hypothetical protein [Oenococcus oeni MCW]
MDAVLGVDSVGTVPVAVVTSFSIQTLKPDLIINAGTAGGFKAKGASITDVFLASDVAFHDRRIPIPIFDMYGTGARKTFAAPNILKELNLKVGKLSTGDSLDMCPQDKELILRNDATIKDMEGAAVAYVADMFSTPAIFVKAVTDIVDGVKPTYEEFLQNLIAVTTALELAVTKVVDFISGKRISDL

SEQ ID NO: 22908 - DNA, 1154 bp, Zea mays subsp. mays
  misc_feature (1)..(1154): Ceres Seq. ID no. 12634732
gaaacaagtccatctagaccgttcctcctctaatccccatcctcgctccccccaaccctcaccgccatggcgaccaccgaggactccgccgccgcgggcgaggcccgacgcctgttcgccctcctcgagtcccagcagcaggtactctctgactgccacggcgcctggtcgcgcgccctcgcacactttgcctcgcgcgaggaggacctcgcctcccgctccgctgcactcgacgaagccctagccgccgccgacgtttccacttccgagactctcgcagcgctcgaggcccgcgagtcctccattcccgcgcgcctcgctgaggcctccgccgcgctctccgccgccgtcgctgaggccgagactgaatccaccgggccaccacccaccgacatcaagggcgcgctccggtggatatgccgccgcatggacgctgctgcgctctggcgcttcatggccgcacgccgccgggagctcgcggtagtccggagggaggccggccccgccgtcgccatggccgtcgacccgccccgccttgtcctcgacgtggaagaggcaaacagcttggagggcaatgcatacaggtccgtcataaggtgcgtcgagtcctgccagctacaatcggtgtttcctttagaggtcctgaggaagaagttagggaagttggagaaagagaagtctgataggaagaaggcagctggtccaagcagattcccgaacaagcgatcccgcggcgcagctggaccctatcccttccctgctgccaaggctgctaggggctcaagctttggtccgcgtttccagaacccagtctcacgttccttaaactacgcacctcatgctggatatataaacccagcagctgcatcaccattctctgtccctgggagcgtgtcggggagacgaggtggtgtaccatatggcggacctggagccacgtatggtggctcccctagctttgcaaccggtggtgggcagcaaccattccgtcgttaggtctagggctgtttgttgtaactgaatgctccttgttttctggctaatagggataatgtatgcctccagctattcaagcatacttgttcagttcttgatggatgctggatattgaacgtcgtgtagtacacattctatggtactgtgtttgctttgtt

SEQ ID NO: 22909 - protein, 309 aa, Zea mays subsp. mays
  peptide (1)..(309): Ceres Seq. ID no. 12634733
  misc_feature (143)..(222): Pfam Name: Pfam Description:  Atrophin-1 family
  misc_feature (1)..(160): NCBI GI NO: 34906200 NR Description: OJ1174_D05.18
  misc_feature (8)..(160): NCBI GI NO: 34394453 NR Description: putative hydroxyproline-rich glycoprotein
  misc_feature (164)..(270): NCBI GI NO: 34394453 NR Description: putative hydroxyproline-rich glycoprotein
  misc_feature (8)..(160): NCBI GI NO: 34394454 NR Description: putative hydroxyproline-rich glycoprotein
  misc_feature (164)..(210): NCBI GI NO: 34394454 NR Description: putative hydroxyproline-rich glycoprotein
  misc_feature (13)..(160): NCBI GI NO: 18403383 NR Description: hydroxyproline-rich glycoprotein family
  misc_feature (168)..(296): NCBI GI NO: 18403383 NR Description: hydroxyproline-rich glycoprotein family
  misc_feature (17)..(160): NCBI GI NO: 18414336 NR Description: hydroxyproline-rich glycoprotein homolog
  misc_feature (168)..(303): NCBI GI NO: 18414336 NR Description: hydroxyproline-rich glycoprotein homolog
  misc_feature (27)..(160): NCBI GI NO: 16974572 NR Description: AT4g14900/dl3490c [Arabidopsis thaliana]
MATTEDSAAAGEARRLFALLESQQQVLSDCHGAWSRALAHFASREEDLASRSAALDEALAAADVSTSETLAALEARESSIPARLAEASAALSAAVAEAETESTGPPPTDIKGALRWICRRMDAAALWRFMAARRRELAVVRREAGPAVAMAVDPPRLVLDVEEANSLEGNAYRSVIRCVESCQLQSVFPLEVLRKKLGKLEKEKSDRKKAAGPSRFPNKRSRGAAGPYPFPAAKAARGSSFGPRFQNPVSRSLNYAPHAGYINPAAASPFSVPGSVSGRRGGVPYGGPGATYGGSPSFATGGGQQPFRR

SEQ ID NO: 22910 - protein, 189 aa, Zea mays subsp. mays
  peptide (1)..(189): Ceres Seq. ID no. 12634734
  misc_feature (23)..(102): Pfam Name: Pfam Description:  Atrophin-1 family
  misc_feature (1)..(40): NCBI GI NO: 34906200 NR Description: OJ1174_D05.18
  misc_feature (1)..(40): NCBI GI NO: 34394453 NR Description: putative hydroxyproline-rich glycoprotein
  misc_feature (44)..(150): NCBI GI NO: 34394453 NR Description: putative hydroxyproline-rich glycoprotein
  misc_feature (1)..(40): NCBI GI NO: 34394454 NR Description: putative hydroxyproline-rich glycoprotein
  misc_feature (44)..(90): NCBI GI NO: 34394454 NR Description: putative hydroxyproline-rich glycoprotein
  misc_feature (1)..(40): NCBI GI NO: 18403383 NR Description: hydroxyproline-rich glycoprotein family
  misc_feature (48)..(176): NCBI GI NO: 18403383 NR Description: hydroxyproline-rich glycoprotein family
  misc_feature (1)..(40): NCBI GI NO: 18414336 NR Description: hydroxyproline-rich glycoprotein homolog
  misc_feature (48)..(183): NCBI GI NO: 18414336 NR Description: hydroxyproline-rich glycoprotein homolog
  misc_feature (1)..(40): NCBI GI NO: 16974572 NR Description: AT4g14900/dl3490c [Arabidopsis thaliana]
MDAAALWRFMAARRRELAVVRREAGPAVAMAVDPPRLVLDVEEANSLEGNAYRSVIRCVESCQLQSVFPLEVLRKKLGKLEKEKSDRKKAAGPSRFPNKRSRGAAGPYPFPAAKAARGSSFGPRFQNPVSRSLNYAPHAGYINPAAASPFSVPGSVSGRRGGVPYGGPGATYGGSPSFATGGGQQPFRR

SEQ ID NO: 22911 - protein, 180 aa, Zea mays subsp. mays
  peptide (1)..(180): Ceres Seq. ID no. 12634735
  misc_feature (14)..(93): Pfam Name: Pfam Description:  Atrophin-1 family
  misc_feature (1)..(31): NCBI GI NO: 34906200 NR Description: OJ1174_D05.18
  misc_feature (1)..(31): NCBI GI NO: 34394453 NR Description: putative hydroxyproline-rich glycoprotein
  misc_feature (35)..(141): NCBI GI NO: 34394453 NR Description: putative hydroxyproline-rich glycoprotein
  misc_feature (1)..(31): NCBI GI NO: 34394454 NR Description: putative hydroxyproline-rich glycoprotein
  misc_feature (35)..(81): NCBI GI NO: 34394454 NR Description: putative hydroxyproline-rich glycoprotein
  misc_feature (1)..(31): NCBI GI NO: 18403383 NR Description: hydroxyproline-rich glycoprotein family
  misc_feature (39)..(167): NCBI GI NO: 18403383 NR Description: hydroxyproline-rich glycoprotein family
  misc_feature (1)..(31): NCBI GI NO: 18414336 NR Description: hydroxyproline-rich glycoprotein homolog
  misc_feature (39)..(174): NCBI GI NO: 18414336 NR Description: hydroxyproline-rich glycoprotein homolog
  misc_feature (1)..(31): NCBI GI NO: 16974572 NR Description: AT4g14900/dl3490c [Arabidopsis thaliana]
MAARRRELAVVRREAGPAVAMAVDPPRLVLDVEEANSLEGNAYRSVIRCVESCQLQSVFPLEVLRKKLGKLEKEKSDRKKAAGPSRFPNKRSRGAAGPYPFPAAKAARGSSFGPRFQNPVSRSLNYAPHAGYINPAAASPFSVPGSVSGRRGGVPYGGPGATYGGSPSFATGGGQQPFRR

SEQ ID NO: 22912 - DNA, 717 bp, Zea mays subsp. mays
  misc_feature (1)..(717): Ceres Seq. ID no. 14306032
atcagaaaccgatccttgtccctagcagcgcgcgacacgcacgtacccagcgcgcgagaaatcttacatcgatcatcacctgcgagccagccggccgagcagcaccgatggcggcgtacatgcgcgtgacgcaccgcgacgaggaaggcaagaaggtgacggagaagatgccggtcccggaaacgcggcgcccggacacggccaagcacttcgagcgcaagctggaggagcagggcctccaccgcttcgagcggcacccggcgaacgcgccccggggcgtgggcatcggcgccccgccgcccaagtccgggcgcggcggcaagtacacctgggagggccccggcagcgtcgtcgaggaccagctcgacccggcgccgcccgccatcgaccccaacgaccccaactacgaggaggcggaggacgacgaggcggccagggaggtggtcgtcggggaggtggaggtcgctaaggtcgccgagggcagggacggcgtcgccagggtcgacgtcgcgccgggcctgctccaggaccagaagcagtaaaaagacttgtcttttctggatacgtctagagtctagatcgactcggtgtgtgtcagtgtgttcgagtttattccgtgcagagagtgcacgtcaactccgctttaattaatctgcttttgttaatatttctactgatcagtaatatgaaccagtggttgatatttggatggacctt

SEQ ID NO: 22913 - protein, 179 aa, Zea mays subsp. mays
  peptide (1)..(179): Ceres Seq. ID no. 14306033
  misc_feature (40)..(174): NCBI GI NO: 18398726 NR Description: expressed protein [Arabidopsis thaliana]
QKPILVPSSARHARTQRARNLTSIITCEPAGRAAPMAAYMRVTHRDEEGKKVTEKMPVPETRRPDTAKHFERKLEEQGLHRFERHPANAPRGVGIGAPPPKSGRGGKYTWEGPGSVVEDQLDPAPPAIDPNDPNYEEAEDDEAAREVVVGEVEVAKVAEGRDGVARVDVAPGLLQDQKQ

SEQ ID NO: 22914 - protein, 144 aa, Zea mays subsp. mays
  peptide (1)..(144): Ceres Seq. ID no. 14306034
  misc_feature (5)..(139): NCBI GI NO: 18398726 NR Description: expressed protein [Arabidopsis thaliana]
MAAYMRVTHRDEEGKKVTEKMPVPETRRPDTAKHFERKLEEQGLHRFERHPANAPRGVGIGAPPPKSGRGGKYTWEGPGSVVEDQLDPAPPAIDPNDPNYEEAEDDEAAREVVVGEVEVAKVAEGRDGVARVDVAPGLLQDQKQ

SEQ ID NO: 22915 - protein, 140 aa, Zea mays subsp. mays
  peptide (1)..(140): Ceres Seq. ID no. 14306035
  misc_feature (1)..(135): NCBI GI NO: 18398726 NR Description: expressed protein [Arabidopsis thaliana]
MRVTHRDEEGKKVTEKMPVPETRRPDTAKHFERKLEEQGLHRFERHPANAPRGVGIGAPPPKSGRGGKYTWEGPGSVVEDQLDPAPPAIDPNDPNYEEAEDDEAAREVVVGEVEVAKVAEGRDGVARVDVAPGLLQDQKQ

SEQ ID NO: 22916 - DNA, 1165 bp, Zea mays subsp. mays
  misc_feature (1)..(1165): Ceres Seq. ID no. 13599119
ctctccttccggcttccggccccgctcctccccaaaatcccccaaaacctgacgagctggagggccgatccgcggctccccgccgcctgatccgagcagtctactcggcccagccggggatccaagcgggatggggtacttgagctccgtgatcggccaccccaccgatggatcctccgtcagcggcggcggcctcagccagaatggtagatttagctatggctatgcaagctcccctggtaaaagggcatccatggaagacttctatgagacaaaaattgattgtgttgatggtcagatagttggtctttttggagtttttgatggtcatggtggtgctaaggtagcagagtatgttaaagaaaacctgttcaacaatcttgttagtcatccaaagttcatcagtgatactaaagtcgctatagatgatgcttataaaagcaccgacagtgaattcttagaatctgacagtagtcaaaatcaatgcgggtcaactgcatcaactgctgtacttgttggtgatcgtctcttcgtcgcaaatgttggtgactctagggctatcatatgcagggaaggaaatgctattgctgtttcaaaggatcacaagcctgatcaaactgatgagcggcagcgtattgaagatgctggaggttttgtgatgtgggcaggaacatggcgcgttggtggtgtacttgctgtttcgcgtgcttttggtgacaaactcttaaagcaatatgtggttgtggatccggagatccgagaggaagttgttgatgacacactcgagtttcttatccttgcaagtgatgggctgtgggatgtggtctctaacgaggaagctgttgcgatgactagatccattaaggacccagaagaggctgcaaagatgctcttgcaagaggcgtacaagagggagagcagtgacaacataacttgcgtcgtcgtgcacttcttgcatgggcaaggtagcagcggatacgcttaaagcgtagcagtaaaattattttacgcagtggtgtgctctgatgtacatgcgtcgattgatttcccgatgttaaatggagaaacgtaactacgtaaggtaggaaacgtgtattatgatgggttgaactgggaaatgcgtgtaccctatactatatatatatactgtagtgtggtcgcggac

SEQ ID NO: 22917 - protein, 284 aa, Zea mays subsp. mays
  peptide (1)..(284): Ceres Seq. ID no. 13599120
  misc_feature (43)..(267): Pfam Name: Pfam Description:  Protein phosphatase 2C
  misc_feature (1)..(284): NCBI GI NO: 38345197 NR Description: OSJNBa0015K02.7
  misc_feature (42)..(284): NCBI GI NO: 19387276 NR Description: putative protein phosphatase 2C
  misc_feature (1)..(284): NCBI GI NO: 30689144 NR Description: protein phosphatase 2C (PP2C), putative
  misc_feature (1)..(275): NCBI GI NO: 20146110 NR Description: protein phosphatase 2C
  misc_feature (23)..(210): NCBI GI NO: 7486331 NR Description: hypothetical protein F28M20
  misc_feature (199)..(284): NCBI GI NO: 7486331 NR Description: hypothetical protein F28M20
  misc_feature (1)..(281): NCBI GI NO: 18416366 NR Description: protein phosphatase 2C (PP2C) -related
  misc_feature (1)..(281): NCBI GI NO: 15238651 NR Description: protein phosphatase 2C (PP2C), putative
  misc_feature (1)..(281): NCBI GI NO: 11358728 NR Description: protein phosphatase 2C-like protein
  misc_feature (1)..(274): NCBI GI NO: 30693757 NR Description: protein phosphatase 2C (PP2C), putative
MGYLSSVIGHPTDGSSVSGGGLSQNGRFSYGYASSPGKRASMEDFYETKIDCVDGQIVGLFGVFDGHGGAKVAEYVKENLFNNLVSHPKFISDTKVAIDDAYKSTDSEFLESDSSQNQCGSTASTAVLVGDRLFVANVGDSRAIICREGNAIAVSKDHKPDQTDERQRIEDAGGFVMWAGTWRVGGVLAVSRAFGDKLLKQYVVVDPEIREEVVDDTLEFLILASDGLWDVVSNEEAVAMTRSIKDPEEAAKMLLQEAYKRESSDNITCVVVHFLHGQGSSGYA

SEQ ID NO: 22918 - protein, 243 aa, Zea mays subsp. mays
  peptide (1)..(243): Ceres Seq. ID no. 13599121
  misc_feature (2)..(226): Pfam Name: Pfam Description:  Protein phosphatase 2C
  misc_feature (1)..(243): NCBI GI NO: 38345197 NR Description: OSJNBa0015K02.7
  misc_feature (1)..(243): NCBI GI NO: 19387276 NR Description: putative protein phosphatase 2C
  misc_feature (1)..(243): NCBI GI NO: 30689144 NR Description: protein phosphatase 2C (PP2C), putative
  misc_feature (1)..(234): NCBI GI NO: 20146110 NR Description: protein phosphatase 2C
  misc_feature (1)..(169): NCBI GI NO: 7486331 NR Description: hypothetical protein F28M20
  misc_feature (158)..(243): NCBI GI NO: 7486331 NR Description: hypothetical protein F28M20
  misc_feature (1)..(240): NCBI GI NO: 18416366 NR Description: protein phosphatase 2C (PP2C) -related
  misc_feature (1)..(240): NCBI GI NO: 15238651 NR Description: protein phosphatase 2C (PP2C), putative
  misc_feature (1)..(240): NCBI GI NO: 11358728 NR Description: protein phosphatase 2C-like protein
  misc_feature (1)..(233): NCBI GI NO: 30693757 NR Description: protein phosphatase 2C (PP2C), putative
MEDFYETKIDCVDGQIVGLFGVFDGHGGAKVAEYVKENLFNNLVSHPKFISDTKVAIDDAYKSTDSEFLESDSSQNQCGSTASTAVLVGDRLFVANVGDSRAIICREGNAIAVSKDHKPDQTDERQRIEDAGGFVMWAGTWRVGGVLAVSRAFGDKLLKQYVVVDPEIREEVVDDTLEFLILASDGLWDVVSNEEAVAMTRSIKDPEEAAKMLLQEAYKRESSDNITCVVVHFLHGQGSSGYA

SEQ ID NO: 22919 - DNA, 763 bp, Zea mays subsp. mays
  misc_feature (1)..(763): Ceres Seq. ID no. 13599144
ttcgcacgagacctttattgtgtttaaacactagaacatcctaatcgaaaaatacctaaagatttagcctgaatagaagtgcatggaaaacaactattcatgtgtctgaatcttaatcgtggtttctattggtttttaactctagcctaccctaacttgcttgagataaaagactttgttgttgttgttatagacttatagtgttaacttttcatgttgtatccatgttattttcataaacctgtcgtagatgtcactgggcttgcatgtagagatttttgttatgtttgttttcttgttgcagggaggatgggagaatgatgaaactgttgaagaggcagcagctcgagaagctatagaagaagctggagttcgaggtgatatagtgcattttctggggctctatgacttcaaaagcaagacgcatcaagatgcgtgctgccctgagggtatgtgcagagctgcagtgtttgcgctgcatgtaaaggaagagctggcctcatggcctgagcagagcacccgacagaggacctggctcacggtccctgaagctgcatcaagttgccgataccagtggatgcaagaggccttgctgacaggcttctctgactggcacgacaagtggagcagaggcggcggcggcacaaactgtgacccggcctaactgctgacaggcccatctgcagtcgtccaatttgttcatctcctctctttccctaggcccccaaccttgcagaatgcaataatacagtgtacttgtctt

SEQ ID NO: 22920 - protein, 137 aa, Zea mays subsp. mays
  peptide (1)..(137): Ceres Seq. ID no. 15222524
  misc_feature (18)..(119): Pfam Name: Pfam Description:  NUDIX domain
  misc_feature (18)..(137): NCBI GI NO: 34900054 NR Description: MutT-like protein~contains ESTsAU085960
  misc_feature (18)..(137): NCBI GI NO: 38175436 NR Description: MutT-like protein
  misc_feature (18)..(128): NCBI GI NO: 18399682 NR Description: MutT/nudix family protein [Arabidopsis thaliana]
  misc_feature (18)..(114): NCBI GI NO: 15231598 NR Description: MutT/nudix family protein [Arabidopsis thaliana]
  misc_feature (18)..(114): NCBI GI NO: 18391450 NR Description: MutT/nudix family protein [Arabidopsis thaliana]
  misc_feature (18)..(114): NCBI GI NO: 25518008 NR Description: F13K23.14 protein - Arabidopsis thaliana
  misc_feature (18)..(114): NCBI GI NO: 18379275 NR Description: MutT/nudix family protein [Arabidopsis thaliana]
  misc_feature (18)..(114): NCBI GI NO: 21595695 NR Description: unknown [Arabidopsis thaliana]
  misc_feature (18)..(114): NCBI GI NO: 15223919 NR Description: MutT/nudix family protein [Arabidopsis thaliana]
  misc_feature (18)..(114): NCBI GI NO: 15221055 NR Description: MutT/nudix family protein [Arabidopsis thaliana]
MSLGLHVEIFVMFVFLLQGGWENDETVEEAAAREAIEEAGVRGDIVHFLGLYDFKSKTHQDACCPEGMCRAAVFALHVKEELASWPEQSTRQRTWLTVPEAASSCRYQWMQEALLTGFSDWHDKWSRGGGGTNCDPA

SEQ ID NO: 22921 - protein, 126 aa, Zea mays subsp. mays
  peptide (1)..(126): Ceres Seq. ID no. 15222525
  misc_feature (7)..(108): Pfam Name: Pfam Description:  NUDIX domain
  misc_feature (7)..(126): NCBI GI NO: 34900054 NR Description: MutT-like protein~contains ESTsAU085960
  misc_feature (7)..(126): NCBI GI NO: 38175436 NR Description: MutT-like protein
  misc_feature (7)..(117): NCBI GI NO: 18399682 NR Description: MutT/nudix family protein [Arabidopsis thaliana]
  misc_feature (7)..(103): NCBI GI NO: 15231598 NR Description: MutT/nudix family protein [Arabidopsis thaliana]
  misc_feature (7)..(103): NCBI GI NO: 18391450 NR Description: MutT/nudix family protein [Arabidopsis thaliana]
  misc_feature (7)..(103): NCBI GI NO: 25518008 NR Description: F13K23.14 protein - Arabidopsis thaliana
  misc_feature (7)..(103): NCBI GI NO: 18379275 NR Description: MutT/nudix family protein [Arabidopsis thaliana]
  misc_feature (7)..(103): NCBI GI NO: 21595695 NR Description: unknown [Arabidopsis thaliana]
  misc_feature (7)..(103): NCBI GI NO: 15223919 NR Description: MutT/nudix family protein [Arabidopsis thaliana]
  misc_feature (7)..(103): NCBI GI NO: 15221055 NR Description: MutT/nudix family protein [Arabidopsis thaliana]
MFVFLLQGGWENDETVEEAAAREAIEEAGVRGDIVHFLGLYDFKSKTHQDACCPEGMCRAAVFALHVKEELASWPEQSTRQRTWLTVPEAASSCRYQWMQEALLTGFSDWHDKWSRGGGGTNCDPA

SEQ ID NO: 22922 - protein, 70 aa, Zea mays subsp. mays
  peptide (1)..(70): Ceres Seq. ID no. 15222526
  misc_feature (1)..(52): Pfam Name: Pfam Description:  NUDIX domain
  misc_feature (1)..(70): NCBI GI NO: 34900054 NR Description: MutT-like protein~contains ESTsAU085960
  misc_feature (1)..(70): NCBI GI NO: 38175436 NR Description: MutT-like protein
  misc_feature (1)..(61): NCBI GI NO: 18399682 NR Description: MutT/nudix family protein [Arabidopsis thaliana]
  misc_feature (1)..(47): NCBI GI NO: 15231598 NR Description: MutT/nudix family protein [Arabidopsis thaliana]
  misc_feature (1)..(47): NCBI GI NO: 18391450 NR Description: MutT/nudix family protein [Arabidopsis thaliana]
  misc_feature (1)..(47): NCBI GI NO: 25518008 NR Description: F13K23.14 protein - Arabidopsis thaliana
  misc_feature (1)..(47): NCBI GI NO: 18379275 NR Description: MutT/nudix family protein [Arabidopsis thaliana]
  misc_feature (1)..(47): NCBI GI NO: 21595695 NR Description: unknown [Arabidopsis thaliana]
  misc_feature (1)..(47): NCBI GI NO: 15223919 NR Description: MutT/nudix family protein [Arabidopsis thaliana]
  misc_feature (1)..(47): NCBI GI NO: 15221055 NR Description: MutT/nudix family protein [Arabidopsis thaliana]
MCRAAVFALHVKEELASWPEQSTRQRTWLTVPEAASSCRYQWMQEALLTGFSDWHDKWSRGGGGTNCDPA

SEQ ID NO: 22923 - DNA, 998 bp, Zea mays subsp. mays
  misc_feature (1)..(998): Ceres Seq. ID no. 14306078
agctcttctcagggaatataccatccacagaaaaaaagcgtcccgcctcatcccgagatcagaatcagaggccacgcggcgatggcgatggcgatgccgatggcagtggcgcgggtgaccagcctcgcctgcgccccccgacaggcgcagcatcgccgccgccatagccttgccccgccgtgcgcctcgggtgcggtggaggtgcgggtctgcacgaaccgcacgtgcgcgcggcagggggggcgcgaggtcctggctgcgctcgcgggcctcgcaccgccggcggtcgacgtggcctcctgcgggtgcctcgggcgctgcggcgccgggcccaacgttgcggcgtccgtccctgggagcaccgcggtgttcggccacgtgggcacggcggcgcgaggcgcgcagctactggagcacctcctcggccccgcggaattcgatgcggccctagggctcaccgcgctggccacgagggagaaggcggaggctgccctcgagaagggaaacgcggacgaagcggaagcccttctcaccgaggtctggactggacgcatacgccagtctgcgattgtgcatgctctctcagttgctggatccgagtttgatgattacacttgtatgtttgcataggttattgggttcaatgcttgtggtggtctgcatttggtgtacatgagcaggtttgttccattgtttcgtgttcaatgtgcgacttgccgacttgtgtgctttgtgtaagtttggcatgaaacatcctgttgaaattacgcaggtctaaggcgagattggaaattggggatatccctggtgcacttggggatgctgaggaagcaataagaatagctcccagatttcctcaggtacttgctttagttagaacctccaaagttattgagtataacctttcttgtacaaccatattcatgttcttacatccatgggagtatattagtgtaaggttgaagaaatacaaatatcagtattggatgtctatgtct

SEQ ID NO: 22924 - protein, 209 aa, Zea mays subsp. mays
  peptide (1)..(209): Ceres Seq. ID no. 14306079
  misc_feature (34)..(179): NCBI GI NO: 38344917 NR Description: OSJNBa0018M05.8
  misc_feature (67)..(179): NCBI GI NO: 9294156 NR Description: gb|AAF19538
  misc_feature (67)..(179): NCBI GI NO: 15229091 NR Description: hypothetical protein [Arabidopsis thaliana]
SSSQGIYHPQKKSVPPHPEIRIRGHAAMAMAMPMAVARVTSLACAPRQAQHRRRHSLAPPCASGAVEVRVCTNRTCARQGGREVLAALAGLAPPAVDVASCGCLGRCGAGPNVAASVPGSTAVFGHVGTAARGAQLLEHLLGPAEFDAALGLTALATREKAEAALEKGNADEAEALLTEVWTGRIRQSAIVHALSVAGSEFDDYTCMFA

SEQ ID NO: 22925 - protein, 182 aa, Zea mays subsp. mays
  peptide (1)..(182): Ceres Seq. ID no. 14306080
  misc_feature (7)..(152): NCBI GI NO: 38344917 NR Description: OSJNBa0018M05.8
  misc_feature (40)..(152): NCBI GI NO: 9294156 NR Description: gb|AAF19538
  misc_feature (40)..(152): NCBI GI NO: 15229091 NR Description: hypothetical protein [Arabidopsis thaliana]
MAMAMPMAVARVTSLACAPRQAQHRRRHSLAPPCASGAVEVRVCTNRTCARQGGREVLAALAGLAPPAVDVASCGCLGRCGAGPNVAASVPGSTAVFGHVGTAARGAQLLEHLLGPAEFDAALGLTALATREKAEAALEKGNADEAEALLTEVWTGRIRQSAIVHALSVAGSEFDDYTCMFA

SEQ ID NO: 22926 - protein, 180 aa, Zea mays subsp. mays
  peptide (1)..(180): Ceres Seq. ID no. 14306081
  misc_feature (5)..(150): NCBI GI NO: 38344917 NR Description: OSJNBa0018M05.8
  misc_feature (38)..(150): NCBI GI NO: 9294156 NR Description: gb|AAF19538
  misc_feature (38)..(150): NCBI GI NO: 15229091 NR Description: hypothetical protein [Arabidopsis thaliana]
MAMPMAVARVTSLACAPRQAQHRRRHSLAPPCASGAVEVRVCTNRTCARQGGREVLAALAGLAPPAVDVASCGCLGRCGAGPNVAASVPGSTAVFGHVGTAARGAQLLEHLLGPAEFDAALGLTALATREKAEAALEKGNADEAEALLTEVWTGRIRQSAIVHALSVAGSEFDDYTCMFA

SEQ ID NO: 22927 - DNA, 1112 bp, Zea mays subsp. mays
  misc_feature (1)..(1112): Ceres Seq. ID no. 14306402
actagagcaaatactctcaagtcccaactaaccaaaactgggaggaagagaaaagctgcagacacggtctctctctcacccttcaccgcttcacgtagcagcaagaaaaagaaagaaaataaaaagagagagagagacagagatggcttgcaccttgaaactccaaaacccaccacgaaaaaagaccttctctggcccctgaccctgagagagagttgctgttgctgccattcggtcggtgcctccttttcggtacgccgctggtatgtggtatcactggtatggttgttctcccatcccaaggcgacgagggaataggaagctagaaagttcgtctgcagtctgcacctttgcccatggcctaggcgcctagctcaggccgtagctcagcgtccgtccatgggccagggagtctgaaaccttgcttgccttgcctgcccgctcctctcacttctctctctcctcctcgctcgtgtccccggcgttctgctggtccctggggactggagagcgaaggtctgtctcctttgcgcctgctctgcttcttcaatgctgggcgtcggtggcttgggctcgggctcgggcatggaaccaggtaccagctgcggtgctctgctcagagagcttcagcaaatctgggcagaagtaggggaaagtgagggcgagaagaacaaggcgttgctggacatcgaaagagagtgcctggaagtctaccgcaggaaggtggacgatgccaatcggactagggtccagctgcaccagtcagtggctgccaaagaagctgaggttgcatctctgatggcaacccttggggagcacaagctgtacttgaaggtatacaactatacacggtgatgggctgatgatgaggtgacgcactaattaggttggttggcgtattggacatgcatggttcgcttcttgctgaaatggacatggactgtagatatatgaagcctcttgaggagacttgtttttctacgaatgctgaactttactttctcaccaagctttagtcagttctttctaaactgccgtgaattaataacattaccaatgttacacagtagtttgggttgcatatgttctacagcgttcattttattgcctac

SEQ ID NO: 22928 - protein, 105 aa, Zea mays subsp. mays
  peptide (1)..(105): Ceres Seq. ID no. 14306403
TRANTLKSQLTKTGRKRKAADTVSLSPFTASRSSKKKKENKKRERDRDGLHLETPKPTTKKDLLWPLTLRESCCCCHSVGASFSVRRWYVVSLVWLFSHPKATRE

SEQ ID NO: 22929 - protein, 101 aa, Zea mays subsp. mays
  peptide (1)..(101): Ceres Seq. ID no. 14306404
  misc_feature (17)..(88): NCBI GI NO: 21539547 NR Description: unknown protein [Arabidopsis thaliana]
  misc_feature (17)..(88): NCBI GI NO: 8778239 NR Description: F10B6.9 [Arabidopsis thaliana]
  misc_feature (7)..(88): NCBI GI NO: 25410943 NR Description: hypothetical protein At2g01910
  misc_feature (17)..(95): NCBI GI NO: 15242132 NR Description: microtubule associated protein (MAP65/ASE1) family
  misc_feature (3)..(100): NCBI GI NO: 28301942 NR Description: unknown protein
  misc_feature (17)..(89): NCBI GI NO: 27357984 NR Description: Unknown protein
  misc_feature (17)..(100): NCBI GI NO: 28200790 NR Description: 65kD microtubule associated protein
  misc_feature (17)..(98): NCBI GI NO: 34911266 NR Description: cytokinesis regulating protein - like
  misc_feature (13)..(95): NCBI GI NO: 15224935 NR Description: microtubule associated protein (MAP65/ASE1) family
  misc_feature (17)..(96): NCBI GI NO: 11558252 NR Description: microtubule-associated protein MAP65-1a
MLGVGGLGSGSGMEPGTSCGALLRELQQIWAEVGESEGEKNKALLDIERECLEVYRRKVDDANRTRVQLHQSVAAKEAEVASLMATLGEHKLYLKVYNYTR

SEQ ID NO: 22930 - protein, 89 aa, Zea mays subsp. mays
  peptide (1)..(89): Ceres Seq. ID no. 14306405
  misc_feature (5)..(76): NCBI GI NO: 21539547 NR Description: unknown protein [Arabidopsis thaliana]
  misc_feature (5)..(76): NCBI GI NO: 8778239 NR Description: F10B6.9 [Arabidopsis thaliana]
  misc_feature (1)..(76): NCBI GI NO: 25410943 NR Description: hypothetical protein At2g01910
  misc_feature (5)..(83): NCBI GI NO: 15242132 NR Description: microtubule associated protein (MAP65/ASE1) family
  misc_feature (1)..(88): NCBI GI NO: 28301942 NR Description: unknown protein
  misc_feature (5)..(77): NCBI GI NO: 27357984 NR Description: Unknown protein
  misc_feature (5)..(88): NCBI GI NO: 28200790 NR Description: 65kD microtubule associated protein
  misc_feature (5)..(86): NCBI GI NO: 34911266 NR Description: cytokinesis regulating protein - like
  misc_feature (1)..(83): NCBI GI NO: 15224935 NR Description: microtubule associated protein (MAP65/ASE1) family
  misc_feature (5)..(84): NCBI GI NO: 11558252 NR Description: microtubule-associated protein MAP65-1a
MEPGTSCGALLRELQQIWAEVGESEGEKNKALLDIERECLEVYRRKVDDANRTRVQLHQSVAAKEAEVASLMATLGEHKLYLKVYNYTR

SEQ ID NO: 22931 - DNA, 978 bp, Zea mays subsp. mays
  misc_feature (1)..(978): Ceres Seq. ID no. 15175941
atcgcaaaaaccacccaaggccaagtcgcatcgcagcagccaggcagatcgatcaacaccttaaaatcgagcgagctaagatgtgcccaatcaagagggagacgacgagcgccgagtccggctcgccgtgcagtagctccacctccacctcgtcgtcgtcggaacaccaccagaccgcgtgggcgtcgccgccgaagaagcggccggcggggcgcaccaagttccgggagacgcggcacccggtgttccgcggcgtgcggcgccggggccgcgccgggcggtgggtctgcgaggtgcgcgtgcccgggaggcgcggctgcaggctctggctcggcaccttcgacaccgccgaggccgcggcccgcgcgcacgacgccgcgatgctcgccgtcgccgccggcgccgcgcgcctcaacttcgcggactcggcgtggctgctcgccgtgccgacggcctcgtacgccagcttcgccgacgtccgccgcgccgtggcggaggccgtggagagcttcctgcgccgccgcgaggaggaggagggggacgcgctctcggccgcgtcctcgacgtcgcccaacgacaaggacggcgacgagtcctcctcggccaccaccaccgacgacgactcgccgttcgagctggacatgttcggtggcatgagctgggacctgtactacgcgaacttggcgcaggcgatgctcgtggagccaccgcccattgtccccgcgttatgcgacgacggcgtggcttccgaattgccgctctggagctactaggctaggactagtggtcgctgtactttcggtttttaccttttctcgttctcgtcgtgtcctgtgccacaatttggtaactgcacaaaggttactgctgcttctattaacgaaacagagcagattgggaaaaaaacagagcatggccgttgactttgtaatggtagcaaaaagtcttgagcttattattattatagtgttgactctc

SEQ ID NO: 22932 - protein, 256 aa, Zea mays subsp. mays
  peptide (1)..(256): Ceres Seq. ID no. 15175942
  misc_feature (79)..(145): Pfam Name: Pfam Description:  AP2 domain
  misc_feature (27)..(256): NCBI GI NO: 22594969 NR Description: DRE-binding protein 1A [Oryza sativa]
  misc_feature (27)..(256): NCBI GI NO: 33321848 NR Description: apetala2 domain-containing CBF1-like protein
  misc_feature (27)..(256): NCBI GI NO: 33637698 NR Description: transcription factor RCBF3 [Oryza sativa]
  misc_feature (56)..(256): NCBI GI NO: 27228310 NR Description: putative DRE-binding protein 1B
  misc_feature (56)..(256): NCBI GI NO: 22594973 NR Description: putative DRE-binding protein 1B [Oryza sativa]
  misc_feature (56)..(256): NCBI GI NO: 32480955 NR Description: Dre-binding protein [Oryza sativa]
  misc_feature (39)..(217): NCBI GI NO: 12581489 NR Description: CRT/DRE-binding factor
  misc_feature (39)..(217): NCBI GI NO: 12658321 NR Description: CBF3-like protein BCBF3
  misc_feature (41)..(213): NCBI GI NO: 25991254 NR Description: DREB-like protein [Zea mays]
  misc_feature (38)..(201): NCBI GI NO: 12581492 NR Description: CRT/DRE binding factor [Oryza sativa]
RKNHPRPSRIAAARQIDQHLKIERAKMCPIKRETTSAESGSPCSSSTSTSSSSEHHQTAWASPPKKRPAGRTKFRETRHPVFRGVRRRGRAGRWVCEVRVPGRRGCRLWLGTFDTAEAAARAHDAAMLAVAAGAARLNFADSAWLLAVPTASYASFADVRRAVAEAVESFLRRREEEEGDALSAASSTSPNDKDGDESSSATTTDDDSPFELDMFGGMSWDLYYANLAQAMLVEPPPIVPALCDDGVASELPLWSY

SEQ ID NO: 22933 - protein, 230 aa, Zea mays subsp. mays
  peptide (1)..(230): Ceres Seq. ID no. 15175943
  misc_feature (53)..(119): Pfam Name: Pfam Description:  AP2 domain
  misc_feature (1)..(230): NCBI GI NO: 22594969 NR Description: DRE-binding protein 1A [Oryza sativa]
  misc_feature (1)..(230): NCBI GI NO: 33321848 NR Description: apetala2 domain-containing CBF1-like protein
  misc_feature (1)..(230): NCBI GI NO: 33637698 NR Description: transcription factor RCBF3 [Oryza sativa]
  misc_feature (30)..(230): NCBI GI NO: 27228310 NR Description: putative DRE-binding protein 1B
  misc_feature (30)..(230): NCBI GI NO: 22594973 NR Description: putative DRE-binding protein 1B [Oryza sativa]
  misc_feature (30)..(230): NCBI GI NO: 32480955 NR Description: Dre-binding protein [Oryza sativa]
  misc_feature (13)..(191): NCBI GI NO: 12581489 NR Description: CRT/DRE-binding factor
  misc_feature (13)..(191): NCBI GI NO: 12658321 NR Description: CBF3-like protein BCBF3
  misc_feature (15)..(187): NCBI GI NO: 25991254 NR Description: DREB-like protein [Zea mays]
  misc_feature (12)..(175): NCBI GI NO: 12581492 NR Description: CRT/DRE binding factor [Oryza sativa]
MCPIKRETTSAESGSPCSSSTSTSSSSEHHQTAWASPPKKRPAGRTKFRETRHPVFRGVRRRGRAGRWVCEVRVPGRRGCRLWLGTFDTAEAAARAHDAAMLAVAAGAARLNFADSAWLLAVPTASYASFADVRRAVAEAVESFLRRREEEEGDALSAASSTSPNDKDGDESSSATTTDDDSPFELDMFGGMSWDLYYANLAQAMLVEPPPIVPALCDDGVASELPLWSY

SEQ ID NO: 22934 - protein, 218 aa, Zea mays subsp. mays
  peptide (1)..(218): Ceres Seq. ID no. 15175944
  misc_feature (35)..(191): Pfam Name: Dystrophin-associated glycoprotein 1 Pfam Description: Dystroglycan
  misc_feature (16)..(212): NCBI GI NO: 25143299 NR Description: pre-mRNA splicing SR protein related (68
  misc_feature (32)..(218): NCBI GI NO: 25989119 NR Description: unknown [Streptomyces aureofaciens]
  misc_feature (34)..(210): NCBI GI NO: 25143299 NR Description: pre-mRNA splicing SR protein related (68
  misc_feature (76)..(218): NCBI GI NO: 7248459 NR Description: arabinogalactan protein [Zea mays]
  misc_feature (2)..(213): NCBI GI NO: 15807127 NR Description: conserved hypothetical protein
  misc_feature (14)..(204): NCBI GI NO: 25989119 NR Description: unknown [Streptomyces aureofaciens]
IAKTTQGQVASQQPGRSINTLKSSELRCAQSRGRRRAPSPARRAVAPPPPRRRRNTTRPRGRRRRRSGRRGAPSSGRRGTRCSAACGAGAAPGGGSARCACPGGAAAGSGSAPSTPPRPRPARTTPRCSPSPPAPRASTSRTRRGCSPCRRPRTPASPTSAAPWRRPWRASCAAARRRRGTRSRPRPRRRPTTRTATSPPRPPPPTTTRRSSWTCSVA

SEQ ID NO: 22935 - DNA, 1062 bp, Zea mays subsp. mays
  misc_feature (1)..(1062): Ceres Seq. ID no. 14306100
ataaacagagtgagagactggtagcagccgcatgtgctagagctagacagaagtcagtctccttcccctctctctagtgctcgccggctctttccgtcgccatggacgtcctcctctgctgctgcctgctgcttctcctggcctccgccgcgtccgccggcagcgagcggtgcgtgcggcaggggaaggcggcctactcttcctcgctctctccggcccctcacgatgagatgccgagacgcaaggctgtgcagcgccgggggagtgcgggtggtgctgaccgacttccacaggagcaaccgtacggacttcctgctcgccgggccggcgttcgcgggcctggccaagcccgggatggcccagcagttgaacaggcgagacgccctctccgtagagtacaaaaggattccctgcgagtacaaggagaagaacctgtcgatccgggtggaagaagcgggcgacaggagccggggcaagctggtggtgaagctgctgtaccagggcgggcagaccgacgtactggcggtggaggtggcccccgtggggtcgtcgtcggagtggcggttcatgacaagggcgtacgggccggtgtggagcacggaccgggcccccgccggcccgctgcagttccgcgcggtcgtcacgggcggctacgacggcaagtgggtgtgggccgagcaggaggtgctgccggccgactggcgccccggccaggtctacgacaccggcgtccgcatcgttgacgtcgcccgggacgcatcccgcggctgcaccgccgccgccatggacgactggaagtgaagtgaggatatggctgggtagattaaaaatacgtatgaatacatactaacacgtcgccacatcggtgctgcgacactctggtaagaagaggacagcatgcaatggctccaagaacagcatcccccccaagcgcgtccggctgtccagaggagaggaggaagaagattggagtagctagcagctagggtgtaattgtgtatgcaggatcttctatcaaggtcgatccgattagatgcaggcaaaaaaaaagagctgggatcc

SEQ ID NO: 22936 - protein, 213 aa, Zea mays subsp. mays
  peptide (1)..(213): Ceres Seq. ID no. 14306101
  misc_feature (1)..(40): NCBI GI NO: 34901594 NR Description: P0571D04.11
MDVLLCCCLLLLLASAASAGSERCVRQGKAAYSSSLSPAPHDEMPRRKAVQRRGSAGGADRLPQEQPYGLPARRAGVRGPGQARDGPAVEQARRPLRRVQKDSLRVQGEEPVDPGGRSGRQEPGQAGGEAAVPGRADRRTGGGGGPRGVVVGVAVHDKGVRAGVEHGPGPRRPAAVPRGRHGRLRRQVGVGRAGGAAGRLAPRPGLRHRRPHR

SEQ ID NO: 22937 - protein, 191 aa, Zea mays subsp. mays
  peptide (1)..(191): Ceres Seq. ID no. 14306102
  misc_feature (70)..(156): Pfam Name: Pfam Description:  Pollen allergen
  misc_feature (1)..(191): NCBI GI NO: 34901594 NR Description: P0571D04.11
  misc_feature (1)..(191): NCBI GI NO: 21654743 NR Description: expansin-like protein 1 [Oryza sativa]
  misc_feature (1)..(191): NCBI GI NO: 25136297 NR Description: expansin-like protein
  misc_feature (1)..(191): NCBI GI NO: 37536544 NR Description: putative pollen allergen
  misc_feature (1)..(191): NCBI GI NO: 20502989 NR Description: Putative pollen allergen
  misc_feature (1)..(184): NCBI GI NO: 15231303 NR Description: expansin protein family (EXPL1)
  misc_feature (1)..(184): NCBI GI NO: 21555265 NR Description: Expansin-like 1 precursor
  misc_feature (1)..(191): NCBI GI NO: 33111959 NR Description: expansin-like protein [Quercus robur]
  misc_feature (1)..(182): NCBI GI NO: 20138389 NR Description: Expansin-like 3 precursor
  misc_feature (1)..(182): NCBI GI NO: 30692657 NR Description: expansin protein family (EXPL3)
MRCRDARLCSAGGVRVVLTDFHRSNRTDFLLAGPAFAGLAKPGMAQQLNRRDALSVEYKRIPCEYKEKNLSIRVEEAGDRSRGKLVVKLLYQGGQTDVLAVEVAPVGSSSEWRFMTRAYGPVWSTDRAPAGPLQFRAVVTGGYDGKWVWAEQEVLPADWRPGQVYDTGVRIVDVARDASRGCTAAAMDDWK

SEQ ID NO: 22938 - protein, 170 aa, Zea mays subsp. mays
  peptide (1)..(170): Ceres Seq. ID no. 14306103
MPRRKAVQRRGSAGGADRLPQEQPYGLPARRAGVRGPGQARDGPAVEQARRPLRRVQKDSLRVQGEEPVDPGGRSGRQEPGQAGGEAAVPGRADRRTGGGGGPRGVVVGVAVHDKGVRAGVEHGPGPRRPAAVPRGRHGRLRRQVGVGRAGGAAGRLAPRPGLRHRRPHR

SEQ ID NO: 22939 - DNA, 635 bp, Zea mays subsp. mays
  misc_feature (1)..(635): Ceres Seq. ID no. 12634810
ccacacttccagacttggtaaccccaacggctacaagagaagagaagagcagcagagcagagcaggcagcacgcgaaagagagagagagacaactcgggcgcgatggacgtgtacatcgcggaggagtacgtggcccagcggcgcgccgagaggagggccgcgcgcgtcgccgcggctgcacgctgcggagaggagaaggcgcgggcggacagcgagcagaagcggcggtggacggaggacggcaagcggcctgccgacggcggcgatgccggcggtggcgccgccgccgccgcctggctgcaggcaggggaggacgccgttctcagctacttgtcggcttaggacacgtgcgtgcggtacgggcggacgtgtctccctgcgtgcgtacgtccagctaggcaatgcaaatagacacacatacacacacacatgcgccaatgccatgcacaatttgcgtggattgcgtttggtggagccaagtcagtcgcgtgcatgtggttgctgggcgataccagttcagctcatccacccttttttttttttttgccatggccaattggccgccaccgcgccacgtctcgcggatatagaagttcatgtctggcagtaaaaataaactggcctcgcttgatct

SEQ ID NO: 22940 - protein, 202 aa, Zea mays subsp. mays
  peptide (1)..(202): Ceres Seq. ID no. 12634811
TLPDLVTPTATREEKSSRAEQAARERERETTRARWTCTSRRSTWPSGAPRGGPRASPRLHAAERRRRGRTASRSGGGRRTASGLPTAAMPAVAPPPPPGCRQGRTPFSATCRLRTRACGTGGRVSLRAYVQLGNANRHTYTHTCANAMHNLRGLRLVEPSQSRACGCWAIPVQLIHPFFFFCHGQLAATAPRLADIEVHVWQ

SEQ ID NO: 22941 - protein, 114 aa, Zea mays subsp. mays
  peptide (1)..(114): Ceres Seq. ID no. 12634812
MPAVAPPPPPGCRQGRTPFSATCRLRTRACGTGGRVSLRAYVQLGNANRHTYTHTCANAMHNLRGLRLVEPSQSRACGCWAIPVQLIHPFFFFCHGQLAATAPRLADIEVHVWQ

SEQ ID NO: 22942 - protein, 113 aa, Zea mays subsp. mays
  peptide (1)..(113): Ceres Seq. ID no. 12634813
  misc_feature (34)..(113): NCBI GI NO: 37535828 NR Description: hypothetical protein
  misc_feature (35)..(113): NCBI GI NO: 22758346 NR Description: hypothetical protein
HTSRLGNPNGYKRREEQQSRAGSTRKRERDNSGAMDVYIAEEYVAQRRAERRAARVAAAARCGEEKARADSEQKRRWTEDGKRPADGGDAGGGAAAAAWLQAGEDAVLSYLSA

SEQ ID NO: 22943 - DNA, 815 bp, Zea mays subsp. mays
  misc_feature (1)..(815): Ceres Seq. ID no. 12638267
cagcgttgttggtattaattaacaaaattaaatagaaaatcttggctaaactaccgaaacattcaagcaaggaaggtaggtagcgcaggaggttggcgtttccaaatccagacgagacgacggcagcagcagcaggatgccgcgcgcacagtttagcgagccggcgtcgtgtggaccgaccagccgcaccgcaacgcaccgcacagcgcagaagccacaaccagccgctgtctactcgtcgtcgccgccgccgccgccgccgaatagcgccgacctgtagtagaggagggcggcgatgagggcgagcgcgagcgcgaccccgacgggcgagccgccgacgcggtgcacggagtccggggagccgccgagggagagggcgccggcgagcgcggcggcgccgcggtcggaggagaggacgcggatgacgaggacgaggccgacggggagcaggagcaggcccgtggggccgagcaggtccgccacggcggaggtgaccgcctcgccgccctcgcccaggaacagcgggcccgccaccaccagccccaccaccaccgccatgatcaggccgtgcggcgcgccgccgccggggccgtgctgctgctgctgctggtggtaccggtactcgtcgtcgccccgcatcatcgtcggggcggatgcggagatcgcgaggcgggtgtggagggaggttgggagtgggagggtagtgaagtcaggaggaggtactgagtagctaggtgcgtggtggcgtggtgggatgagggagttggaaggaattgagtgtgtcgacgacgacgacgacgagggaaggagaagat

SEQ ID NO: 22944 - protein, 144 aa, Zea mays subsp. mays
  peptide (1)..(144): Ceres Seq. ID no. 12638268
  misc_feature (1)..(98): NCBI GI NO: 25152834 NR Description: Q/N-rich domain Prion like protein PQN-75 (50
  misc_feature (1)..(98): NCBI GI NO: 25152832 NR Description: Q/N-rich domain Prion like protein PQN-75 (pqn-75)
  misc_feature (1)..(98): NCBI GI NO: 25152837 NR Description: Q/N-rich domain Prion like protein PQN-75 (52
MRASASATPTGEPPTRCTESGEPPRERAPASAAAPRSEERTRMTRTRPTGSRSRPVGPSRSATAEVTASPPSPRNSGPATTSPTTTAMIRPCGAPPPGPCCCCCWWYRYSSSPRIIVGADAEIARRVWREVGSGRVVKSGGGTE

SEQ ID NO: 22945 - protein, 102 aa, Zea mays subsp. mays
  peptide (1)..(102): Ceres Seq. ID no. 12638269
  misc_feature (1)..(56): NCBI GI NO: 25152834 NR Description: Q/N-rich domain Prion like protein PQN-75 (50
  misc_feature (1)..(56): NCBI GI NO: 25152832 NR Description: Q/N-rich domain Prion like protein PQN-75 (pqn-75)
  misc_feature (1)..(56): NCBI GI NO: 25152837 NR Description: Q/N-rich domain Prion like protein PQN-75 (52
MTRTRPTGSRSRPVGPSRSATAEVTASPPSPRNSGPATTSPTTTAMIRPCGAPPPGPCCCCCWWYRYSSSPRIIVGADAEIARRVWREVGSGRVVKSGGGTE

SEQ ID NO: 22946 - DNA, 1484 bp, Zea mays subsp. mays
  misc_feature (1)..(1484): Ceres Seq. ID no. 13600617
gttcgaacccgccatggccgcctccaagcccctgcggctacgcctcgcggtgccgctcgccctcgccctcctcctcgcgctcgccctcgtcaccaacttcctctgggcctcatcctcccgacgagtctccccgctgtcggccccgtcttcttccagaacggtgatggggaagcgcgccaaggcagtgtggcgcctcaacgccacgtacgcagacttgccggcgccgcactgggactgggaggagatgcccgcggcgcctgtgccacgcctcgacggggcgtcggtgcagattggggatctcctctacgtcttcgccgggtacgggaacatcgaccatgtccattctcatgttgatgtttataatttcacctctaacacatggacccaaaggtttcatatgcccaaggagatggcgcattctcatttaggaatggcctcagatggcagatacatctatgcagtttcaggacagtatggaccacagtgccgcgcctcgattaatcgcaactttgtttttgacactgagactagagagtggcatgggttgccccctttaccacttcctaggtatgcaccagctactcagctttggcgtgggcggctccatgtgatgggtggaggcaaagaggaccgccatgaacctggattggagcattggagccttgctgtcaaggatggcaaggcactggagaacgagtggcgagctgaagtacccataccacgtggtggacctcatagggcgtgtattgtagctaatgataaactatttgtgattggtggacaagagggagactttatggctaaaccaggatcacctatttttaaatgtgtacggaggcatgaggttgtgtatggcgatgtgtatatgctagatgatggagcgaagtggaaggaactgtctccaatgccaaagccagattcccacattgaatttgcatgggttgtcgttaacaactccatagtaattgttggtggaactacagagaagcatcctatcaccaaaaagatgattcttgttggtgaagtcttccgttttgatttggaagcactgacctggtcagtcattgggcgcatgcctttccgaatcaagacagccttagctgggtactgggaggggtggctctattttacttctgggcagcgggatcgtgggcctgataatccagctccaaagaaagttgttggaagtatgtggaggacgaggctacacttgtgacggtagaagtgaaagtttttctgaaaattgtagatttgcatctgatttctagtccaacagctaggtccctctcagagaattgcttttatcctgtattttgttgtttggaatgcatattatctatttttactagatattttaaatttaacatttaggctatcagcttgtaaattgcctgaatactaacagcaaaacaatgtaaatactgccaaaaaaaaataagaaaaagcttatcgattccgtcgtcctcgaggggggggccggtacg

SEQ ID NO: 22947 - protein, 404 aa, Zea mays subsp. mays
  peptide (1)..(404): Ceres Seq. ID no. 15218985
  misc_feature (242)..(303): Pfam Name: Pfam Description:  Kelch motif
  misc_feature (3)..(404): NCBI GI NO: 29150199 NR Description: hypothetical protein
  misc_feature (3)..(404): NCBI GI NO: 38344229 NR Description: OJ991113_30.6
  misc_feature (24)..(404): NCBI GI NO: 15217949 NR Description: Kelch repeat-containing protein
  misc_feature (24)..(404): NCBI GI NO: 28416695 NR Description: At1g51540 [Arabidopsis thaliana]
  misc_feature (65)..(402): NCBI GI NO: 18405273 NR Description: Kelch repeats protein family
  misc_feature (65)..(402): NCBI GI NO: 15912245 NR Description: AT3g27220/K17E12_4 [Arabidopsis thaliana]
  misc_feature (79)..(325): NCBI GI NO: 37522944 NR Description: unknown protein [Gloeobacter violaceus]
FEPAMAASKPLRLRLAVPLALALLLALALVTNFLWASSSRRVSPLSAPSSSRTVMGKRAKAVWRLNATYADLPAPHWDWEEMPAAPVPRLDGASVQIGDLLYVFAGYGNIDHVHSHVDVYNFTSNTWTQRFHMPKEMAHSHLGMASDGRYIYAVSGQYGPQCRASINRNFVFDTETREWHGLPPLPLPRYAPATQLWRGRLHVMGGGKEDRHEPGLEHWSLAVKDGKALENEWRAEVPIPRGGPHRACIVANDKLFVIGGQEGDFMAKPGSPIFKCVRRHEVVYGDVYMLDDGAKWKELSPMPKPDSHIEFAWVVVNNSIVIVGGTTEKHPITKKMILVGEVFRFDLEALTWSVIGRMPFRIKTALAGYWEGWLYFTSGQRDRGPDNPAPKKVVGSMWRTRLHL

SEQ ID NO: 22948 - protein, 400 aa, Zea mays subsp. mays
  peptide (1)..(400): Ceres Seq. ID no. 15218986
  misc_feature (238)..(299): Pfam Name: Pfam Description:  Kelch motif
  misc_feature (1)..(400): NCBI GI NO: 29150199 NR Description: hypothetical protein
  misc_feature (1)..(400): NCBI GI NO: 38344229 NR Description: OJ991113_30.6
  misc_feature (20)..(400): NCBI GI NO: 15217949 NR Description: Kelch repeat-containing protein
  misc_feature (20)..(400): NCBI GI NO: 28416695 NR Description: At1g51540 [Arabidopsis thaliana]
  misc_feature (61)..(398): NCBI GI NO: 18405273 NR Description: Kelch repeats protein family
  misc_feature (61)..(398): NCBI GI NO: 15912245 NR Description: AT3g27220/K17E12_4 [Arabidopsis thaliana]
  misc_feature (75)..(321): NCBI GI NO: 37522944 NR Description: unknown protein [Gloeobacter violaceus]
MAASKPLRLRLAVPLALALLLALALVTNFLWASSSRRVSPLSAPSSSRTVMGKRAKAVWRLNATYADLPAPHWDWEEMPAAPVPRLDGASVQIGDLLYVFAGYGNIDHVHSHVDVYNFTSNTWTQRFHMPKEMAHSHLGMASDGRYIYAVSGQYGPQCRASINRNFVFDTETREWHGLPPLPLPRYAPATQLWRGRLHVMGGGKEDRHEPGLEHWSLAVKDGKALENEWRAEVPIPRGGPHRACIVANDKLFVIGGQEGDFMAKPGSPIFKCVRRHEVVYGDVYMLDDGAKWKELSPMPKPDSHIEFAWVVVNNSIVIVGGTTEKHPITKKMILVGEVFRFDLEALTWSVIGRMPFRIKTALAGYWEGWLYFTSGQRDRGPDNPAPKKVVGSMWRTRLHL

SEQ ID NO: 22949 - protein, 350 aa, Zea mays subsp. mays
  peptide (1)..(350): Ceres Seq. ID no. 15218987
  misc_feature (188)..(249): Pfam Name: Pfam Description:  Kelch motif
  misc_feature (1)..(350): NCBI GI NO: 29150199 NR Description: hypothetical protein
  misc_feature (1)..(350): NCBI GI NO: 38344229 NR Description: OJ991113_30.6
  misc_feature (1)..(350): NCBI GI NO: 15217949 NR Description: Kelch repeat-containing protein
  misc_feature (1)..(350): NCBI GI NO: 28416695 NR Description: At1g51540 [Arabidopsis thaliana]
  misc_feature (11)..(348): NCBI GI NO: 18405273 NR Description: Kelch repeats protein family
  misc_feature (11)..(348): NCBI GI NO: 15912245 NR Description: AT3g27220/K17E12_4 [Arabidopsis thaliana]
  misc_feature (25)..(271): NCBI GI NO: 37522944 NR Description: unknown protein [Gloeobacter violaceus]
MGKRAKAVWRLNATYADLPAPHWDWEEMPAAPVPRLDGASVQIGDLLYVFAGYGNIDHVHSHVDVYNFTSNTWTQRFHMPKEMAHSHLGMASDGRYIYAVSGQYGPQCRASINRNFVFDTETREWHGLPPLPLPRYAPATQLWRGRLHVMGGGKEDRHEPGLEHWSLAVKDGKALENEWRAEVPIPRGGPHRACIVANDKLFVIGGQEGDFMAKPGSPIFKCVRRHEVVYGDVYMLDDGAKWKELSPMPKPDSHIEFAWVVVNNSIVIVGGTTEKHPITKKMILVGEVFRFDLEALTWSVIGRMPFRIKTALAGYWEGWLYFTSGQRDRGPDNPAPKKVVGSMWRTRLHL

SEQ ID NO: 22950 - DNA, 735 bp, Zea mays subsp. mays
  misc_feature (1)..(735): Ceres Seq. ID no. 14306110
agtggtgcccacagctaaagccttgtgcaaaattatcattaagctgtcatcaatcatcatggctgccattacggcaggtctgctggtactcctcgctgctgccgtcgccgctccggcgcacgccacggactacacggtcggcgactcgtccgggtggagcagcggcgtggactacgccacctgggcgagcggcaagaccttcgctgctggggacaacctagtgttccagtacagcgcgatgcacacggtggtggaggtgagctccgcggactacggcgcgtgctcggccagcaactccatccagtcctacagcgaccagaacaccaagatcgcgctcacagcgcccggcacgcgctacttcatctgcggcaccccgggccactgcggcaacggcatgaagctcgccgtcacggtcgccgctgggaccgccaccaccaccccggcgtcatccccgcccgccgctgactcgcctccagagacagccacgccgtccgggtctacgcccacggcaacgacgtcgccgtcggcgcccacgacgaagcccacctcgagcagcactggcgctgcctgcggtggggaggcccggctcgctatgggcgttttggcctgggccgcgggcctcgccgggctcgccctgatgggttaggcaagaggcagtgctgtttccgttccatgcttttcctgttgcaggcttttgtggcccgttgtgtttaatctgaattcacgtctatggcc

SEQ ID NO: 22951 - protein, 214 aa, Zea mays subsp. mays
  peptide (1)..(214): Ceres Seq. ID no. 14306111
  misc_feature (52)..(132): Pfam Name: Pfam Description:  Plastocyanin-like domain
  misc_feature (25)..(214): NCBI GI NO: 14140127 NR Description: uclacyanin 3-like protein [Oryza sativa]
  misc_feature (20)..(205): NCBI GI NO: 38346158 NR Description: OSJNBa0079A21.5
  misc_feature (15)..(200): NCBI GI NO: 25453521 NR Description: blue copper-binding protein II
  misc_feature (15)..(200): NCBI GI NO: 25453522 NR Description: blue copper-binding protein II
  misc_feature (15)..(200): NCBI GI NO: 15224960 NR Description: uclacyanin II [Arabidopsis thaliana]
  misc_feature (15)..(200): NCBI GI NO: 21554060 NR Description: phytocyanin [Arabidopsis thaliana]
  misc_feature (20)..(189): NCBI GI NO: 15232289 NR Description: uclacyanin 3 [Arabidopsis thaliana]
  misc_feature (20)..(186): NCBI GI NO: 2493318 NR Description: Blue copper protein precursor
  misc_feature (22)..(198): NCBI GI NO: 15232287 NR Description: plastocyanin-like domain containing protein
  misc_feature (27)..(184): NCBI GI NO: 15225223 NR Description: uclacyanin I [Arabidopsis thaliana]
VVPTAKALCKIIIKLSSIIMAAITAGLLVLLAAAVAAPAHATDYTVGDSSGWSSGVDYATWASGKTFAAGDNLVFQYSAMHTVVEVSSADYGACSASNSIQSYSDQNTKIALTAPGTRYFICGTPGHCGNGMKLAVTVAAGTATTTPASSPPAADSPPETATPSGSTPTATTSPSAPTTKPTSSSTGAACGGEARLAMGVLAWAAGLAGLALMG

SEQ ID NO: 22952 - protein, 195 aa, Zea mays subsp. mays
  peptide (1)..(195): Ceres Seq. ID no. 14306112
  misc_feature (33)..(113): Pfam Name: Pfam Description:  Plastocyanin-like domain
  misc_feature (6)..(195): NCBI GI NO: 14140127 NR Description: uclacyanin 3-like protein [Oryza sativa]
  misc_feature (1)..(186): NCBI GI NO: 38346158 NR Description: OSJNBa0079A21.5
  misc_feature (1)..(181): NCBI GI NO: 25453521 NR Description: blue copper-binding protein II
  misc_feature (1)..(181): NCBI GI NO: 25453522 NR Description: blue copper-binding protein II
  misc_feature (1)..(181): NCBI GI NO: 15224960 NR Description: uclacyanin II [Arabidopsis thaliana]
  misc_feature (1)..(181): NCBI GI NO: 21554060 NR Description: phytocyanin [Arabidopsis thaliana]
  misc_feature (1)..(170): NCBI GI NO: 15232289 NR Description: uclacyanin 3 [Arabidopsis thaliana]
  misc_feature (1)..(167): NCBI GI NO: 2493318 NR Description: Blue copper protein precursor
  misc_feature (3)..(179): NCBI GI NO: 15232287 NR Description: plastocyanin-like domain containing protein
  misc_feature (8)..(165): NCBI GI NO: 15225223 NR Description: uclacyanin I [Arabidopsis thaliana]
MAAITAGLLVLLAAAVAAPAHATDYTVGDSSGWSSGVDYATWASGKTFAAGDNLVFQYSAMHTVVEVSSADYGACSASNSIQSYSDQNTKIALTAPGTRYFICGTPGHCGNGMKLAVTVAAGTATTTPASSPPAADSPPETATPSGSTPTATTSPSAPTTKPTSSSTGAACGGEARLAMGVLAWAAGLAGLALMG

SEQ ID NO: 22953 - protein, 135 aa, Zea mays subsp. mays
  peptide (1)..(135): Ceres Seq. ID no. 14306113
  misc_feature (1)..(53): Pfam Name: Pfam Description:  Plastocyanin-like domain
  misc_feature (1)..(135): NCBI GI NO: 14140127 NR Description: uclacyanin 3-like protein [Oryza sativa]
  misc_feature (1)..(126): NCBI GI NO: 38346158 NR Description: OSJNBa0079A21.5
  misc_feature (1)..(121): NCBI GI NO: 25453521 NR Description: blue copper-binding protein II
  misc_feature (1)..(121): NCBI GI NO: 25453522 NR Description: blue copper-binding protein II
  misc_feature (1)..(121): NCBI GI NO: 15224960 NR Description: uclacyanin II [Arabidopsis thaliana]
  misc_feature (1)..(121): NCBI GI NO: 21554060 NR Description: phytocyanin [Arabidopsis thaliana]
  misc_feature (1)..(110): NCBI GI NO: 15232289 NR Description: uclacyanin 3 [Arabidopsis thaliana]
  misc_feature (1)..(107): NCBI GI NO: 2493318 NR Description: Blue copper protein precursor
  misc_feature (1)..(119): NCBI GI NO: 15232287 NR Description: plastocyanin-like domain containing protein
  misc_feature (1)..(105): NCBI GI NO: 15225223 NR Description: uclacyanin I [Arabidopsis thaliana]
MHTVVEVSSADYGACSASNSIQSYSDQNTKIALTAPGTRYFICGTPGHCGNGMKLAVTVAAGTATTTPASSPPAADSPPETATPSGSTPTATTSPSAPTTKPTSSSTGAACGGEARLAMGVLAWAAGLAGLALMG

SEQ ID NO: 22954 - DNA, 903 bp, Zea mays subsp. mays
  misc_feature (1)..(903): Ceres Seq. ID no. 14306117
tcttccttttacttttttctgatatttctatcggctacgatctcatgcgttagcgagtgccgccccgcccgcgctatccactcgtctctccgtccccatggccacttatctcaacgcaccgccggcagccaccacgacgactgcaagctgccgccatgccttctccggtggcagcctccgtctactccggccgagccgaccgacgctgcacgtgacgtgccaagccgccgcctcctcccagcagccgtcgtccccgtccaggaggtcagcctgcctcctcggcatcgcgtgcgccgtcctgctccgcccacgtgccgcctccgccgccgaaaccgacgacgagccggccaacaacggctggtggctgaccgagttccccttgcccgtgcccaagatcgtcaacaaggagatcaacaacgcggagacgggcacgcgctccttcctcaagaacggcatctacatggcggacatcgggcccagcttcgcggcgcacgcgtaccggctgcgcagcacggccttcgacctgctggcgctggaggacctgctgggcaaggacgcctccaactacgtcaacaagtacctccgcctcaagtccaccttcatgtactacgacttcgacaagctcatctccgccgccgaagacaagccgcccttcgtcgacctcgccaaccgcctcttcgacagcttcgagacgctccaggaggccgtcacagccaaggacgacgccaggatcggcgaccgctacgccgagacaaagctcatcctccaggagctcatggccaagatggcctagcagaaccacaatttttcattcatatatcatgatgtgtaaatgaatacttgaaactcacaaggggtattgcagaattcccagagcagggaaatacaattatcatgtcagac

SEQ ID NO: 22955 - protein, 274 aa, Zea mays subsp. mays
  peptide (1)..(274): Ceres Seq. ID no. 14306118
SSFYFFLIFLSATISCVSECRPARAIHSSLRPHGHLSQRTAGSHHDDCKLPPCLLRWQPPSTPAEPTDAARDVPSRRLLPAAVVPVQEVSLPPRHRVRRPAPPTCRLRRRNRRRAGQQRLVADRVPLARAQDRQQGDQQRGDGHALLPQERHLHGGHRAQLRGARVPAAQHGLRPAGAGGPAGQGRLQLRQQVPPPQVHLHVLRLRQAHLRRRRQAALRRPRQPPLRQLRDAPGGRHSQGRRQDRRPLRRDKAHPPGAHGQDGLAEPQFFIHIS

SEQ ID NO: 22956 - protein, 231 aa, Zea mays subsp. mays
  peptide (1)..(231): Ceres Seq. ID no. 14306119
  misc_feature (28)..(231): Pfam Name: PsbQ Pfam Description: Oxygen evolving enhancer protein 3
  misc_feature (1)..(231): NCBI GI NO: 34915502 NR Description: hypothetical protein~similar to Arabidopsisthaliana chromosome 3
  misc_feature (41)..(231): NCBI GI NO: 18395819 NR Description: PsbQ domain protein family, putative
  misc_feature (41)..(231): NCBI GI NO: 21537394 NR Description: unknown [Arabidopsis thaliana]
MATYLNAPPAATTTTASCRHAFSGGSLRLLRPSRPTLHVTCQAAASSQQPSSPSRRSACLLGIACAVLLRPRAASAAETDDEPANNGWWLTEFPLPVPKIVNKEINNAETGTRSFLKNGIYMADIGPSFAAHAYRLRSTAFDLLALEDLLGKDASNYVNKYLRLKSTFMYYDFDKLISAAEDKPPFVDLANRLFDSFETLQEAVTAKDDARIGDRYAETKLILQELMAKMA

SEQ ID NO: 22957 - DNA, 918 bp, Zea mays subsp. mays
  misc_feature (1)..(918): Ceres Seq. ID no. 14306120
gacacccgcgcgcgccctcgcgcggacaaagccgtgaggggcagagccgagggaggcggggctgtgccggccacgcaatgcagcagccggagcctgccgatctgccgggctgggccttcccgccacgggcgggaccggcgcctgccgccgcgcgcggggcgcaccaccgccgggccagatctgaggttgccttccgcctgccggacgacctcggcctcggcggcggcggcggccccgatggcgacgccttcgacgagatcggttcggaggacgacctcttctccaccttcatggacatcgagaagatctccacctccgggccctccgaccgcgccgccgagaactcgtctccgccgcgccccaagcaccgccacagcagctccgtcgatggctcgggcttcttcttctcacccggcgccggcggtggcgcggggaaggatgccgccgcgtcgctggctgaggtcttggaggccaagaagtccatgactcccgagcaactggccgagctcgccgccatcgaccccaagcgcgccaagaggtaccgcctcctcgatcgcggcaatccatccacttctttagttacggaggtggcgaggaattgactaaggcgtcgaggacaatcatgtgctcatgctttatgatgggaatggctggagattaataaggtgtttggtttgaggaataagctatctagaataagttgatccatcatcactttattagtcagttagcattaacatgaaaaataatgtcgtcccaccaaattaaatttgaggaatggacttatgacgcaccaacccatcttggatggagtgaacacatccttaaggtgtttggtttaggaatgaggtggtctatttcttctcacttctcacttttttatttggttcgtggaataaaatgggttgatccatcacc

SEQ ID NO: 22958 - protein, 199 aa, Zea mays subsp. mays
  peptide (1)..(199): Ceres Seq. ID no. 14306121
  misc_feature (47)..(191): NCBI GI NO: 39579226 NR Description: bZIP transcription factor RF2b
  misc_feature (28)..(179): NCBI GI NO: 15226727 NR Description: bZip DNA binding protein [Arabidopsis thaliana]
  misc_feature (28)..(179): NCBI GI NO: 25453519 NR Description: b-Zip DNA binding protein
  misc_feature (97)..(191): NCBI GI NO: 34394739 NR Description: putative transcription activator RF2a
  misc_feature (51)..(179): NCBI GI NO: 7489564 NR Description: probable transcription activator RF2a - rice
  misc_feature (42)..(142): NCBI GI NO: 34914582 NR Description: P0455H0310.26
  misc_feature (29)..(191): NCBI GI NO: 17065884 NR Description: AtbZIP transcription factor [Arabidopsis thaliana]
  misc_feature (29)..(191): NCBI GI NO: 15222213 NR Description: bZIP protein [Arabidopsis thaliana]
  misc_feature (29)..(191): NCBI GI NO: 25406943 NR Description: hypothetical protein
  misc_feature (43)..(191): NCBI GI NO: 21740783 NR Description: OSJNBa0067K08.2
HPRAPSRGQSREGQSRGRRGCAGHAMQQPEPADLPGWAFPPRAGPAPAAARGAHHRRARSEVAFRLPDDLGLGGGGGPDGDAFDEIGSEDDLFSTFMDIEKISTSGPSDRAAENSSPPRPKHRHSSSVDGSGFFFSPGAGGGAGKDAAASLAEVLEAKKSMTPEQLAELAAIDPKRAKRYRLLDRGNPSTSLVTEVARN

SEQ ID NO: 22959 - protein, 174 aa, Zea mays subsp. mays
  peptide (1)..(174): Ceres Seq. ID no. 14306122
  misc_feature (22)..(166): NCBI GI NO: 39579226 NR Description: bZIP transcription factor RF2b
  misc_feature (3)..(154): NCBI GI NO: 15226727 NR Description: bZip DNA binding protein [Arabidopsis thaliana]
  misc_feature (3)..(154): NCBI GI NO: 25453519 NR Description: b-Zip DNA binding protein
  misc_feature (72)..(166): NCBI GI NO: 34394739 NR Description: putative transcription activator RF2a
  misc_feature (26)..(154): NCBI GI NO: 7489564 NR Description: probable transcription activator RF2a - rice
  misc_feature (17)..(117): NCBI GI NO: 34914582 NR Description: P0455H0310.26
  misc_feature (4)..(166): NCBI GI NO: 17065884 NR Description: AtbZIP transcription factor [Arabidopsis thaliana]
  misc_feature (4)..(166): NCBI GI NO: 15222213 NR Description: bZIP protein [Arabidopsis thaliana]
  misc_feature (4)..(166): NCBI GI NO: 25406943 NR Description: hypothetical protein
  misc_feature (18)..(166): NCBI GI NO: 21740783 NR Description: OSJNBa0067K08.2
MQQPEPADLPGWAFPPRAGPAPAAARGAHHRRARSEVAFRLPDDLGLGGGGGPDGDAFDEIGSEDDLFSTFMDIEKISTSGPSDRAAENSSPPRPKHRHSSSVDGSGFFFSPGAGGGAGKDAAASLAEVLEAKKSMTPEQLAELAAIDPKRAKRYRLLDRGNPSTSLVTEVARN

SEQ ID NO: 22960 - protein, 161 aa, Zea mays subsp. mays
  peptide (1)..(161): Ceres Seq. ID no. 14306123
  misc_feature (33)..(161): Pfam Name: Pfam Description:  Progesterone receptor
  misc_feature (1)..(161): NCBI GI NO: 141449 NR Description: Hypothetical 35.5 kDa protein in transposon TN4556
  misc_feature (49)..(161): NCBI GI NO: 1657601 NR Description: unknown [Nannocystis exedens]
  misc_feature (1)..(161): NCBI GI NO: 17551258 NR Description: COLlagen structural gene (col-41)
  misc_feature (33)..(161): NCBI GI NO: 17939907 NR Description: UL36 protein [Pseudorabies virus]
DTRARPRADKAVRGRAEGGGAVPATQCSSRSLPICRAGPSRHGRDRRLPPRAGRTTAGPDLRLPSACRTTSASAAAAAPMATPSTRSVRRTTSSPPSWTSRRSPPPGPPTAPPRTRLRRAPSTATAAPSMARASSSHPAPAVARGRMPPRRWLRSWRPRSP

SEQ ID NO: 22961 - DNA, 930 bp, Zea mays subsp. mays
  misc_feature (1)..(930): Ceres Seq. ID no. 15178954
accgcttcaccatccccgccaggcccaccaccaccatggcctctccttcccccgcccgcgcctccggccggcgcgtgccgcccccgtgctgcacgaccgacgagaccctcgcgctcgcgcgggcctacaccgcgcgccgcctcgccgtcggccgtgagcacctgacctccgctgactgggccgccgtcgccgcggccgctccgtccaagacggccaggcagtgccgccacaaggtcgagaagctccgccgacgcctccggtccaaccgccgccgcccgtgcccgctcctcgacgccatcgacctcctcgacgtcccttccccgcccttcttctccaagtcccagtcccgatccacgtcccggtcctcgtcgccgccgccgccggcggcggcgatctcttcgccgtctcccccttcccctcccgcatccccgcccagaaagaggcggcgggacgatgccggggacgaggacggtgtgagcgatgtggtgggggctctgagggccatcggagagggtttcctgcgagcggaggagaggaggatggaggccgcccgggagacgcagaggatgcggatggagatggcgcttcggcaccttgatgcacagaggaggctcatggacgcgcttgtcggccgcatcgtcgacgccttggactgaagtggtgtcacaaagatgtctcatcgaggtttcttgcttgtcctcgttgcatgctagcttgcgagtttaggagtttcttagcgctgtttatgtgtagtagctgtgatggatctgtgatgtagttgaagcggacaagccttagtgatttcccacccttgtatttgcttaaaaggggagtttcttatgaagaagaggttgcacgtctgttgcctatgcctacttgcttctttgctctcatgtatcatgctatttaatttgtttgattttgtgttcc

SEQ ID NO: 22962 - protein, 217 aa, Zea mays subsp. mays
  peptide (1)..(217): Ceres Seq. ID no. 15178955
  misc_feature (12)..(217): NCBI GI NO: 21741318 NR Description: OSJNBb0103I08.19
  misc_feature (18)..(91): NCBI GI NO: 26451533 NR Description: unknown protein [Arabidopsis thaliana]
  misc_feature (154)..(216): NCBI GI NO: 26451533 NR Description: unknown protein [Arabidopsis thaliana]
  misc_feature (3)..(160): NCBI GI NO: 15230214 NR Description: proline-rich protein family [Arabidopsis thaliana]
  misc_feature (142)..(217): NCBI GI NO: 15230214 NR Description: proline-rich protein family [Arabidopsis thaliana]
  misc_feature (105)..(170): NCBI GI NO: 20138131 NR Description: Vegetative cell wall protein gp1 precursor
  misc_feature (3)..(95): NCBI GI NO: 15224948 NR Description: expressed protein [Arabidopsis thaliana]
  misc_feature (149)..(214): NCBI GI NO: 15224948 NR Description: expressed protein [Arabidopsis thaliana]
  misc_feature (6)..(168): NCBI GI NO: 37536908 NR Description: hypothetical protein
  misc_feature (105)..(144): NCBI GI NO: 100210 NR Description: extensin precursor - tomato
RFTIPARPTTTMASPSPARASGRRVPPPCCTTDETLALARAYTARRLAVGREHLTSADWAAVAAAAPSKTARQCRHKVEKLRRRLRSNRRRPCPLLDAIDLLDVPSPPFFSKSQSRSTSRSSSPPPPAAAISSPSPPSPPASPPRKRRRDDAGDEDGVSDVVGALRAIGEGFLRAEERRMEAARETQRMRMEMALRHLDAQRRLMDALVGRIVDALD

SEQ ID NO: 22963 - protein, 206 aa, Zea mays subsp. mays
  peptide (1)..(206): Ceres Seq. ID no. 15178956
  misc_feature (1)..(206): NCBI GI NO: 21741318 NR Description: OSJNBb0103I08.19
  misc_feature (7)..(80): NCBI GI NO: 26451533 NR Description: unknown protein [Arabidopsis thaliana]
  misc_feature (143)..(205): NCBI GI NO: 26451533 NR Description: unknown protein [Arabidopsis thaliana]
  misc_feature (1)..(149): NCBI GI NO: 15230214 NR Description: proline-rich protein family [Arabidopsis thaliana]
  misc_feature (131)..(206): NCBI GI NO: 15230214 NR Description: proline-rich protein family [Arabidopsis thaliana]
  misc_feature (94)..(159): NCBI GI NO: 20138131 NR Description: Vegetative cell wall protein gp1 precursor
  misc_feature (1)..(84): NCBI GI NO: 15224948 NR Description: expressed protein [Arabidopsis thaliana]
  misc_feature (138)..(203): NCBI GI NO: 15224948 NR Description: expressed protein [Arabidopsis thaliana]
  misc_feature (1)..(157): NCBI GI NO: 37536908 NR Description: hypothetical protein
  misc_feature (94)..(133): NCBI GI NO: 100210 NR Description: extensin precursor - tomato
MASPSPARASGRRVPPPCCTTDETLALARAYTARRLAVGREHLTSADWAAVAAAAPSKTARQCRHKVEKLRRRLRSNRRRPCPLLDAIDLLDVPSPPFFSKSQSRSTSRSSSPPPPAAAISSPSPPSPPASPPRKRRRDDAGDEDGVSDVVGALRAIGEGFLRAEERRMEAARETQRMRMEMALRHLDAQRRLMDALVGRIVDALD

SEQ ID NO: 22964 - DNA, 1226 bp, Zea mays subsp. mays
  misc_feature (1)..(1226): Ceres Seq. ID no. 13586843
agtgcgtgccagtcctccggcccaaaccccccgcacccaacccccagccccggcaaccgatggcggggtccgcggccgacgcggagcaggagcaaaagcgggcagcggcggcggcgtacgactacgagggcgacgcgcgctgggccgagtactggtccaacgtactcgtcccgccgaacctcgcctcccgccccgacgtcgtcgaccacttgaagcgcaagttctaccagcgctacatcgaccatgatctggtcgttgagccaaggtcattcaccagttccactcaggccagcaggccagatgtaaggtcttcgtcttcgtcatccaccgagaacgtcagggagcgtaattcaggatctactgcaaggtcagcgcctccaccaccgccaccaacacatacagacagtgccgtcaaccctttacggttcgacgcacgcactatacatttctccatcaacgcatggatacttgtggttgctggtctgggaatgcttcctattttgccaaaacaccttgccgacagagcttgcaaactttcacttctgggaacaatattgtcatcagggtattctctatacagtacttatgggaaaccaagagcatggaacatgccagcaattcaagcttggttgcagtctatacttgcaacaaaggattttatccatttaatgttctcttctatgctcttcacatcccaattgcacttgaagattgctgcactacctgtgttttgctgggcgcttgaccatgttgccagattcttaaggcgtaattttgcgcgatcctctttctataggagatacctggaagaaccttgtctttgggtagagacaaataacactacactaagcctccttagttcgaatgcggagattgccttgggttttcttctgatcatatcactgttctcgtggcgccgtagcatagttcagacattcatgtactggcaggtgttgaagctgatgtaccatgctcccgtgacatccagctatcaccagagtacctgggcgaaaatcggccggattgtgaacccgtacatccaccgctacgctccgttcctccagacgcccatttctgcgatccaaagatggtggttcaggtagagagacaggccgagctgcaaacatagcacagtcgagtcgccgcgttcttatgtaatgctgtaaccttttcccagaattctggagggccattatcataacaagaaggtttttagctgcagggcc

SEQ ID NO: 22965 - protein, 366 aa, Zea mays subsp. mays
  peptide (1)..(366): Ceres Seq. ID no. 13586844
  misc_feature (123)..(360): Pfam Name: UPF0121 Pfam Description: Uncharacterised protein family
  misc_feature (20)..(366): NCBI GI NO: 18396183 NR Description: expressed protein [Arabidopsis thaliana]
  misc_feature (22)..(236): NCBI GI NO: 34912430 NR Description: P0681B11.19
  misc_feature (255)..(292): NCBI GI NO: 4894630 NR Description: NT6 [Nicotiana tabacum]
  misc_feature (140)..(195): NCBI GI NO: 34911634 NR Description: P0039G05.19
CVPVLRPKPPAPNPQPRQPMAGSAADAEQEQKRAAAAAYDYEGDARWAEYWSNVLVPPNLASRPDVVDHLKRKFYQRYIDHDLVVEPRSFTSSTQASRPDVRSSSSSSTENVRERNSGSTARSAPPPPPPTHTDSAVNPLRFDARTIHFSINAWILVVAGLGMLPILPKHLADRACKLSLLGTILSSGYSLYSTYGKPRAWNMPAIQAWLQSILATKDFIHLMFSSMLFTSQLHLKIAALPVFCWALDHVARFLRRNFARSSFYRRYLEEPCLWVETNNTTLSLLSSNAEIALGFLLIISLFSWRRSIVQTFMYWQVLKLMYHAPVTSSYHQSTWAKIGRIVNPYIHRYAPFLQTPISAIQRWWFR

SEQ ID NO: 22966 - protein, 347 aa, Zea mays subsp. mays
  peptide (1)..(347): Ceres Seq. ID no. 13586845
  misc_feature (104)..(341): Pfam Name: UPF0121 Pfam Description: Uncharacterised protein family
  misc_feature (1)..(347): NCBI GI NO: 18396183 NR Description: expressed protein [Arabidopsis thaliana]
  misc_feature (3)..(217): NCBI GI NO: 34912430 NR Description: P0681B11.19
  misc_feature (236)..(273): NCBI GI NO: 4894630 NR Description: NT6 [Nicotiana tabacum]
  misc_feature (121)..(176): NCBI GI NO: 34911634 NR Description: P0039G05.19
MAGSAADAEQEQKRAAAAAYDYEGDARWAEYWSNVLVPPNLASRPDVVDHLKRKFYQRYIDHDLVVEPRSFTSSTQASRPDVRSSSSSSTENVRERNSGSTARSAPPPPPPTHTDSAVNPLRFDARTIHFSINAWILVVAGLGMLPILPKHLADRACKLSLLGTILSSGYSLYSTYGKPRAWNMPAIQAWLQSILATKDFIHLMFSSMLFTSQLHLKIAALPVFCWALDHVARFLRRNFARSSFYRRYLEEPCLWVETNNTTLSLLSSNAEIALGFLLIISLFSWRRSIVQTFMYWQVLKLMYHAPVTSSYHQSTWAKIGRIVNPYIHRYAPFLQTPISAIQRWWFR

SEQ ID NO: 22967 - protein, 204 aa, Zea mays subsp. mays
  peptide (1)..(204): Ceres Seq. ID no. 13586846
  misc_feature (1)..(198): Pfam Name: UPF0121 Pfam Description: Uncharacterised protein family
  misc_feature (1)..(204): NCBI GI NO: 18396183 NR Description: expressed protein [Arabidopsis thaliana]
  misc_feature (1)..(74): NCBI GI NO: 34912430 NR Description: P0681B11.19
  misc_feature (93)..(130): NCBI GI NO: 4894630 NR Description: NT6 [Nicotiana tabacum]
  misc_feature (1)..(33): NCBI GI NO: 34911634 NR Description: P0039G05.19
MLPILPKHLADRACKLSLLGTILSSGYSLYSTYGKPRAWNMPAIQAWLQSILATKDFIHLMFSSMLFTSQLHLKIAALPVFCWALDHVARFLRRNFARSSFYRRYLEEPCLWVETNNTTLSLLSSNAEIALGFLLIISLFSWRRSIVQTFMYWQVLKLMYHAPVTSSYHQSTWAKIGRIVNPYIHRYAPFLQTPISAIQRWWFR

SEQ ID NO: 22968 - DNA, 1223 bp, Zea mays subsp. mays
  misc_feature (1)..(1223): Ceres Seq. ID no. 13599131
ataacccccaccccagccgaagccatccgatacgggagggcccatccagcggcccaggtcacgctctcacgccacgcacgcatgctcccccgcctgctcaacgggccccaccgcctgctccttggcgggccccacgcctcgggcgccgcgcccctccaccgccgccgcgtcctcgccggccgccgggccatgtccgcctccgcctcgcccgcgcccgcgcccgggcagaagcgtccgctgcgcggggtggtcttcgacatggacggcaccctcacggtgccagtcatcgatttcccggccatgtaccgcgaggtgctcggcggggacgccgcctacgccgcggcgcgcggcgcggggggaggctccgtcgacatcctccactgcatcgaggactgggcgcccgacaagcagcgccacgcgtacgaggtcatcgcgcgcttcgagcgggagggcctcgaccgcctccagatcatgcccggggcctcggagctgtgtggcttcctggacgcgaagcagatcagaagaggtttgatcacccgtaatgtgaaggacgcagttgatttgttccaccaaagatttggtatgacgttcactcctgcactgagcagagaatttcgcccctataaaccaaatcctgctccactgcttcacatatgctccgcttggaacattccaccacacgaagtgatcatggttggcgacagtctcaaggatgatgttgtttgtggaaagagggcaggagctttcacttgcttgcttgatgaaacggggcgatatggtcctcacgattctttacctgaggaagtaaaacctgacttcaaggtgtcctcactgacagaagtattcgctgtgctggaggagcacttcgatttggcaccagtgcctgacgagagtagaatatgacagggaagttttattggacctcccttctaaggtgaaatcggctacccaaccaacagcttgaataatgtggatgacgttgatgggactttcaagtatcagaagcccctgctagatgagcctgcagccagagcccagaaggacgatggctgttccaaaggtggattgaatgtatttggaaaggcaatgaagtgattcagttcgttgtaaatctattatattatgttgccccagactaaaccagcttgtgtggtttagtgactgaaatgaccacacgtatctggagattcagaatataacaatcgatttccacgggagggggg

SEQ ID NO: 22969 - protein, 300 aa, Zea mays subsp. mays
  peptide (1)..(300): Ceres Seq. ID no. 15222518
  misc_feature (80)..(256): Pfam Name: Pfam Description:  haloacid dehalogenase-like hydrolase
  misc_feature (77)..(293): NCBI GI NO: 20196855 NR Description: unknown protein [Arabidopsis thaliana]
  misc_feature (77)..(293): NCBI GI NO: 30685622 NR Description: haloacid dehalogenase-like hydrolase family
  misc_feature (77)..(293): NCBI GI NO: 25408252 NR Description: hypothetical protein At2g33250
  misc_feature (80)..(286): NCBI GI NO: 6324705 NR Description: Hypothetical ORF; Yor131cp
  misc_feature (80)..(254): NCBI GI NO: 23470846 NR Description: hypothetical protein
  misc_feature (87)..(254): NCBI GI NO: 28871791 NR Description: HAD-superfamily hydrolase
  misc_feature (80)..(276): NCBI GI NO: 24375526 NR Description: hydrolase, haloacid dehalogenase-like family
  misc_feature (122)..(224): NCBI GI NO: 21622506 NR Description: conserved hypothetical protein [Neurospora crassa]
  misc_feature (80)..(254): NCBI GI NO: 26991442 NR Description: hydrolase, haloacid dehalogenase-like family
  misc_feature (51)..(256): NCBI GI NO: 23104575 NR Description: hypothetical protein [Azotobacter vinelandii]
ITPTPAEAIRYGRAHPAAQVTLSRHARMLPRLLNGPHRLLLGGPHASGAAPLHRRRVLAGRRAMSASASPAPAPGQKRPLRGVVFDMDGTLTVPVIDFPAMYREVLGGDAAYAAARGAGGGSVDILHCIEDWAPDKQRHAYEVIARFEREGLDRLQIMPGASELCGFLDAKQIRRGLITRNVKDAVDLFHQRFGMTFTPALSREFRPYKPNPAPLLHICSAWNIPPHEVIMVGDSLKDDVVCGKRAGAFTCLLDETGRYGPHDSLPEEVKPDFKVSSLTEVFAVLEEHFDLAPVPDESRI

SEQ ID NO: 22970 - protein, 273 aa, Zea mays subsp. mays
  peptide (1)..(273): Ceres Seq. ID no. 15222519
  misc_feature (53)..(229): Pfam Name: Pfam Description:  haloacid dehalogenase-like hydrolase
  misc_feature (50)..(266): NCBI GI NO: 20196855 NR Description: unknown protein [Arabidopsis thaliana]
  misc_feature (50)..(266): NCBI GI NO: 30685622 NR Description: haloacid dehalogenase-like hydrolase family
  misc_feature (50)..(266): NCBI GI NO: 25408252 NR Description: hypothetical protein At2g33250
  misc_feature (53)..(259): NCBI GI NO: 6324705 NR Description: Hypothetical ORF; Yor131cp
  misc_feature (53)..(227): NCBI GI NO: 23470846 NR Description: hypothetical protein
  misc_feature (60)..(227): NCBI GI NO: 28871791 NR Description: HAD-superfamily hydrolase
  misc_feature (53)..(249): NCBI GI NO: 24375526 NR Description: hydrolase, haloacid dehalogenase-like family
  misc_feature (95)..(197): NCBI GI NO: 21622506 NR Description: conserved hypothetical protein [Neurospora crassa]
  misc_feature (53)..(227): NCBI GI NO: 26991442 NR Description: hydrolase, haloacid dehalogenase-like family
  misc_feature (24)..(229): NCBI GI NO: 23104575 NR Description: hypothetical protein [Azotobacter vinelandii]
MLPRLLNGPHRLLLGGPHASGAAPLHRRRVLAGRRAMSASASPAPAPGQKRPLRGVVFDMDGTLTVPVIDFPAMYREVLGGDAAYAAARGAGGGSVDILHCIEDWAPDKQRHAYEVIARFEREGLDRLQIMPGASELCGFLDAKQIRRGLITRNVKDAVDLFHQRFGMTFTPALSREFRPYKPNPAPLLHICSAWNIPPHEVIMVGDSLKDDVVCGKRAGAFTCLLDETGRYGPHDSLPEEVKPDFKVSSLTEVFAVLEEHFDLAPVPDESRI

SEQ ID NO: 22971 - protein, 237 aa, Zea mays subsp. mays
  peptide (1)..(237): Ceres Seq. ID no. 15222520
  misc_feature (17)..(193): Pfam Name: Pfam Description:  haloacid dehalogenase-like hydrolase
  misc_feature (14)..(230): NCBI GI NO: 20196855 NR Description: unknown protein [Arabidopsis thaliana]
  misc_feature (14)..(230): NCBI GI NO: 30685622 NR Description: haloacid dehalogenase-like hydrolase family
  misc_feature (14)..(230): NCBI GI NO: 25408252 NR Description: hypothetical protein At2g33250
  misc_feature (17)..(223): NCBI GI NO: 6324705 NR Description: Hypothetical ORF; Yor131cp
  misc_feature (17)..(191): NCBI GI NO: 23470846 NR Description: hypothetical protein
  misc_feature (24)..(191): NCBI GI NO: 28871791 NR Description: HAD-superfamily hydrolase
  misc_feature (17)..(213): NCBI GI NO: 24375526 NR Description: hydrolase, haloacid dehalogenase-like family
  misc_feature (59)..(161): NCBI GI NO: 21622506 NR Description: conserved hypothetical protein [Neurospora crassa]
  misc_feature (17)..(191): NCBI GI NO: 26991442 NR Description: hydrolase, haloacid dehalogenase-like family
  misc_feature (1)..(193): NCBI GI NO: 23104575 NR Description: hypothetical protein [Azotobacter vinelandii]
MSASASPAPAPGQKRPLRGVVFDMDGTLTVPVIDFPAMYREVLGGDAAYAAARGAGGGSVDILHCIEDWAPDKQRHAYEVIARFEREGLDRLQIMPGASELCGFLDAKQIRRGLITRNVKDAVDLFHQRFGMTFTPALSREFRPYKPNPAPLLHICSAWNIPPHEVIMVGDSLKDDVVCGKRAGAFTCLLDETGRYGPHDSLPEEVKPDFKVSSLTEVFAVLEEHFDLAPVPDESRI

SEQ ID NO: 22972 - DNA, 623 bp, Zea mays subsp. mays
  misc_feature (1)..(623): Ceres Seq. ID no. 14306148
acacgcaaacaaaaaaatggctcacctcttcagagagctgtctctgggtcactccaagcgagagacgacgccgccgccaccgtcgatggcatccacgattccctccgatctaccaccgtctccactcggacaactcgccgtccagttctccgaatccgacctccgcctcatttcctacgagatcttcgtcgccgcatgccgtagcgccaccgggaagcctctctcatccgccgtctcgtcactctccgttgctaatccggactctccgagcaacggcgcctctcccgcttctccagctgcccagcgttctctgaccgcagccgccgcgagcaagatgaagaaggccttggggatgaagtcgttgtcatccttatcgcctggatctaccaagagccctggctcgggctctggttcgggctctggctcgggtggtaagtcgaagcgccccactactgtcggtgagctgatgcggatccaaatgcgagtatcggagtccgtcgattcgcgcgttcgtagagctttccttaggatcgctgctagtcaggttagctcagttttttttttttttttttttttttgaattaaaatgttaaatttaaactcaaaaaaaaaaagacctttac

SEQ ID NO: 22973 - protein, 192 aa, Zea mays subsp. mays
  peptide (1)..(192): Ceres Seq. ID no. 14306149
  misc_feature (48)..(182): Pfam Name: DUF810 Pfam Description: Protein of unknown function
  misc_feature (6)..(182): NCBI GI NO: 15225193 NR Description: expressed protein [Arabidopsis thaliana]
  misc_feature (39)..(182): NCBI GI NO: 25411952 NR Description: hypothetical protein At2g20010
  misc_feature (6)..(182): NCBI GI NO: 40253418 NR Description: hypothetical protein
  misc_feature (41)..(182): NCBI GI NO: 37535276 NR Description: hypothetical protein
HANKKMAHLFRELSLGHSKRETTPPPPSMASTIPSDLPPSPLGQLAVQFSESDLRLISYEIFVAACRSATGKPLSSAVSSLSVANPDSPSNGASPASPAAQRSLTAAAASKMKKALGMKSLSSLSPGSTKSPGSGSGSGSGSGGKSKRPTTVGELMRIQMRVSESVDSRVRRAFLRIAASQVSSVFFFFFFF

SEQ ID NO: 22974 - protein, 187 aa, Zea mays subsp. mays
  peptide (1)..(187): Ceres Seq. ID no. 14306150
  misc_feature (43)..(177): Pfam Name: DUF810 Pfam Description: Protein of unknown function
  misc_feature (1)..(177): NCBI GI NO: 15225193 NR Description: expressed protein [Arabidopsis thaliana]
  misc_feature (34)..(177): NCBI GI NO: 25411952 NR Description: hypothetical protein At2g20010
  misc_feature (1)..(177): NCBI GI NO: 40253418 NR Description: hypothetical protein
  misc_feature (36)..(177): NCBI GI NO: 37535276 NR Description: hypothetical protein
MAHLFRELSLGHSKRETTPPPPSMASTIPSDLPPSPLGQLAVQFSESDLRLISYEIFVAACRSATGKPLSSAVSSLSVANPDSPSNGASPASPAAQRSLTAAAASKMKKALGMKSLSSLSPGSTKSPGSGSGSGSGSGGKSKRPTTVGELMRIQMRVSESVDSRVRRAFLRIAASQVSSVFFFFFFF

SEQ ID NO: 22975 - protein, 164 aa, Zea mays subsp. mays
  peptide (1)..(164): Ceres Seq. ID no. 14306151
  misc_feature (20)..(154): Pfam Name: DUF810 Pfam Description: Protein of unknown function
  misc_feature (1)..(154): NCBI GI NO: 15225193 NR Description: expressed protein [Arabidopsis thaliana]
  misc_feature (11)..(154): NCBI GI NO: 25411952 NR Description: hypothetical protein At2g20010
  misc_feature (1)..(154): NCBI GI NO: 40253418 NR Description: hypothetical protein
  misc_feature (13)..(154): NCBI GI NO: 37535276 NR Description: hypothetical protein
MASTIPSDLPPSPLGQLAVQFSESDLRLISYEIFVAACRSATGKPLSSAVSSLSVANPDSPSNGASPASPAAQRSLTAAAASKMKKALGMKSLSSLSPGSTKSPGSGSGSGSGSGGKSKRPTTVGELMRIQMRVSESVDSRVRRAFLRIAASQVSSVFFFFFFF

SEQ ID NO: 22976 - DNA, 831 bp, Zea mays subsp. mays
  misc_feature (1)..(831): Ceres Seq. ID no. 12638203
agttttcgggttcttggataggagaaagcggggcgctcaattccccccctcctgatccttgttccttgatcgccgccatgagcaacacgctgcttcgagtctacccttccgacctgaagatgccattcgagctcaggaagcagaactcagcgtgtcttgagctcgtcaacaagaccgaccggtgggtggctttcaaggtcaagacgacgaaccctaggaagtactcggtgcgctctgcctccggtgtcgtgccgcccaggggatcctgtggcatcacaataacgatgcaagcgcccaaggagatgcccccggactaccactgcaaggacaagtttcttgttcagagcattgctgtggaggaggggacgacgcagaaggacattgtccctgacatggatgattctacatccaagttggaactggaaagaagatacgcacaggaaaacaagaagattcagaaagagctggatctcctccggaaaacaaaggcgtctcctcggggcttctctgcgtttgtgctgcttgtcttcttgttatcttcacttcttggatacctgatgttcggaagcagagcttagcaagttagcagctaatggctgcacatcatttgcggcaccggcagcggtacggctctatcggcttttgtctattgctccttttagtacagtgtacagatatatacattaatagtgaagtagtcagtacataacagatatatagggcgttcttgggtttcaagtgtccataagaacatatcttcagttttgaaatatgtgtgtgtttgctagtaccgttcatgtttatactctatccaaatatatgatgtttact

SEQ ID NO: 22977 - protein, 191 aa, Zea mays subsp. mays
  peptide (1)..(191): Ceres Seq. ID no. 12638204
  misc_feature (26)..(131): NCBI GI NO: 38345482 NR Description: OSJNBa0010H02.20
  misc_feature (136)..(186): NCBI GI NO: 38345482 NR Description: OSJNBa0010H02.20
  misc_feature (30)..(131): NCBI GI NO: 18411240 NR Description: putative proline-rich protein
  misc_feature (30)..(131): NCBI GI NO: 21592874 NR Description: putative proline-rich protein
  misc_feature (23)..(131): NCBI GI NO: 11288305 NR Description: hypothetical protein T4C21
  misc_feature (23)..(131): NCBI GI NO: 18411661 NR Description: putative protein; protein id: At3g60600
  misc_feature (26)..(131): NCBI GI NO: 21554053 NR Description: putative VAMP-associated protein
  misc_feature (26)..(131): NCBI GI NO: 15225415 NR Description: putative VAMP-associated protein
  misc_feature (26)..(131): NCBI GI NO: 11288307 NR Description: 27k vesicle-associated membrane protein-associatedprotein
  misc_feature (26)..(149): NCBI GI NO: 34907216 NR Description: P0504E02.2
FSGSWIGESGALNSPPPDPCSLIAAMSNTLLRVYPSDLKMPFELRKQNSACLELVNKTDRWVAFKVKTTNPRKYSVRSASGVVPPRGSCGITITMQAPKEMPPDYHCKDKFLVQSIAVEEGTTQKDIVPDMDDSTSKLELERRYAQENKKIQKELDLLRKTKASPRGFSAFVLLVFLLSSLLGYLMFGSRA

SEQ ID NO: 22978 - protein, 166 aa, Zea mays subsp. mays
  peptide (1)..(166): Ceres Seq. ID no. 12638205
  misc_feature (1)..(106): NCBI GI NO: 38345482 NR Description: OSJNBa0010H02.20
  misc_feature (111)..(161): NCBI GI NO: 38345482 NR Description: OSJNBa0010H02.20
  misc_feature (5)..(106): NCBI GI NO: 18411240 NR Description: putative proline-rich protein
  misc_feature (5)..(106): NCBI GI NO: 21592874 NR Description: putative proline-rich protein
  misc_feature (1)..(106): NCBI GI NO: 11288305 NR Description: hypothetical protein T4C21
  misc_feature (1)..(106): NCBI GI NO: 18411661 NR Description: putative protein; protein id: At3g60600
  misc_feature (1)..(106): NCBI GI NO: 21554053 NR Description: putative VAMP-associated protein
  misc_feature (1)..(106): NCBI GI NO: 15225415 NR Description: putative VAMP-associated protein
  misc_feature (1)..(106): NCBI GI NO: 11288307 NR Description: 27k vesicle-associated membrane protein-associatedprotein
  misc_feature (1)..(124): NCBI GI NO: 34907216 NR Description: P0504E02.2
MSNTLLRVYPSDLKMPFELRKQNSACLELVNKTDRWVAFKVKTTNPRKYSVRSASGVVPPRGSCGITITMQAPKEMPPDYHCKDKFLVQSIAVEEGTTQKDIVPDMDDSTSKLELERRYAQENKKIQKELDLLRKTKASPRGFSAFVLLVFLLSSLLGYLMFGSRA

SEQ ID NO: 22979 - protein, 152 aa, Zea mays subsp. mays
  peptide (1)..(152): Ceres Seq. ID no. 12638206
  misc_feature (1)..(92): NCBI GI NO: 38345482 NR Description: OSJNBa0010H02.20
  misc_feature (97)..(147): NCBI GI NO: 38345482 NR Description: OSJNBa0010H02.20
  misc_feature (1)..(92): NCBI GI NO: 18411240 NR Description: putative proline-rich protein
  misc_feature (1)..(92): NCBI GI NO: 21592874 NR Description: putative proline-rich protein
  misc_feature (1)..(92): NCBI GI NO: 11288305 NR Description: hypothetical protein T4C21
  misc_feature (1)..(92): NCBI GI NO: 18411661 NR Description: putative protein; protein id: At3g60600
  misc_feature (1)..(92): NCBI GI NO: 21554053 NR Description: putative VAMP-associated protein
  misc_feature (1)..(92): NCBI GI NO: 15225415 NR Description: putative VAMP-associated protein
  misc_feature (1)..(92): NCBI GI NO: 11288307 NR Description: 27k vesicle-associated membrane protein-associatedprotein
  misc_feature (1)..(110): NCBI GI NO: 34907216 NR Description: P0504E02.2
MPFELRKQNSACLELVNKTDRWVAFKVKTTNPRKYSVRSASGVVPPRGSCGITITMQAPKEMPPDYHCKDKFLVQSIAVEEGTTQKDIVPDMDDSTSKLELERRYAQENKKIQKELDLLRKTKASPRGFSAFVLLVFLLSSLLGYLMFGSRA

SEQ ID NO: 22980 - DNA, 700 bp, Zea mays subsp. mays
  misc_feature (1)..(700): Ceres Seq. ID no. 14306156
aagacttcactagaatctactcgtcgagtcaccaaagataaggctctatcggactcggagtctcggacagcacagcaaagcaagagccgctactcaagtatagtctctgacaccggccgaccctgccctccaacccaagccatggcggacaacaacaaccggcggaaccacgggcagaccttgctcgccggcgcgggcctgggcctgctcgccgtgaactcgggcctcgccatctaccgcgcgaggggcgacacggccgccgtcctcttcgtcgcggggtcctgcgccaccctgctcctcctcttcgcctgcctccgcgcctacgagcgggcggcgcccgggtcgccggcccgggaccgggcgcggcgcgccgtgtggccgctcgccacgctgctcacgctctcgttcgcctggaaggtggcggcggccatgccttccgccgccgcggccgccctcgtatggggcctggccgtggccaccaccgccggcggcttcgtggcactgtacgtgcagcaggcatgaacacgtgggcgcgggacggactaggcaagcagctgcagacttgcagttcgttcagggatctagatctgggcgccgcgcgcttgtgtagaaatgtacagtgtatttggctagcttttcgattttgtgcatatgtatgtagctgactggctgatactataaaacagagtggcctctgtgt

SEQ ID NO: 22981 - protein, 173 aa, Zea mays subsp. mays
  peptide (1)..(173): Ceres Seq. ID no. 14306157
  misc_feature (60)..(170): NCBI GI NO: 34912134 NR Description: OSJNBb0024F06.19
  misc_feature (62)..(172): NCBI GI NO: 34904462 NR Description: OSJNBa0086P08.10
  misc_feature (69)..(170): NCBI GI NO: 34910564 NR Description: B1131B07.10
  misc_feature (65)..(173): NCBI GI NO: 34906268 NR Description: P0489A01.19
KTSLESTRRVTKDKALSDSESRTAQQSKSRYSSIVSDTGRPCPPTQAMADNNNRRNHGQTLLAGAGLGLLAVNSGLAIYRARGDTAAVLFVAGSCATLLLLFACLRAYERAAPGSPARDRARRAVWPLATLLTLSFAWKVAAAMPSAAAAALVWGLAVATTAGGFVALYVQQA

SEQ ID NO: 22982 - protein, 126 aa, Zea mays subsp. mays
  peptide (1)..(126): Ceres Seq. ID no. 14306158
  misc_feature (13)..(123): NCBI GI NO: 34912134 NR Description: OSJNBb0024F06.19
  misc_feature (15)..(125): NCBI GI NO: 34904462 NR Description: OSJNBa0086P08.10
  misc_feature (22)..(123): NCBI GI NO: 34910564 NR Description: B1131B07.10
  misc_feature (18)..(126): NCBI GI NO: 34906268 NR Description: P0489A01.19
MADNNNRRNHGQTLLAGAGLGLLAVNSGLAIYRARGDTAAVLFVAGSCATLLLLFACLRAYERAAPGSPARDRARRAVWPLATLLTLSFAWKVAAAMPSAAAAALVWGLAVATTAGGFVALYVQQA

SEQ ID NO: 22983 - DNA, 910 bp, Zea mays subsp. mays
  misc_feature (1)..(910): Ceres Seq. ID no. 13600585
ctctctacagctacctagctagtatctacccgccattgcattgcaccacctctgtcctcgatctctcttgctcgaccacacacacacgcacacgatcgactaacaaccctgtatctgtatggatatggcaatgagccagcacagctccgacacctcgtccacgtcctcctactcgtccgacccctcctccacgtcgtccaccaccagcggcaagaagcgcccgcgcccgcacgccgccgccgccccggcgtaccgcggcgtccgcatgcgcgcgtggggcaagtgggtgtcggagatcagggagccccgcaagaagtcgcgcatctggctgggcaccttcccgcgcccggagatggcggcgcgcgcgcacgacgccgccgcgctcagcgtcaagggcgcgcgcgccgtgctcaacttcccggccctcgcgcgccacctcccgcgcccggcctccctggcgccgcgcgacgtccaggccgccgccgcgcgcgccgccgtcatgcacgagccagagcctcaacaacctgatgagcccggacggcagcccgtggaggaggtggccctggccgccgagctggtgttcgacgacctggcgcctctgtgggtggaggacgtggtggagttgggcccgtgcccgtcccagcatagctcgtggacgccgtgcgatgggctcgacgccgccgcctgtctgcactctctccctctcttgtgggactactagctgctactaggctccttgctccgtttgtacatggccttgaaccattttcgtttccgcttgtttttttttttttttggttttcacttgttttcatatatccaccggagctacctacaaagagtaaatccctactcgcactgtactacttctcgtatatttggactaaattttggcgggtagccatcgctt

SEQ ID NO: 22984 - protein, 200 aa, Zea mays subsp. mays
  peptide (1)..(200): Ceres Seq. ID no. 13600586
  misc_feature (42)..(104): Pfam Name: Pfam Description:  AP2 domain
  misc_feature (3)..(129): NCBI GI NO: 34903650 NR Description: B1015E06.8
  misc_feature (2)..(200): NCBI GI NO: 38605848 NR Description: OSJNBb0034G17.6
  misc_feature (32)..(199): NCBI GI NO: 21908034 NR Description: DRE binding factor 2 [Zea mays]
  misc_feature (32)..(199): NCBI GI NO: 25990951 NR Description: DREB-like protein [Zea mays]
  misc_feature (1)..(139): NCBI GI NO: 38605845 NR Description: OSJNBb0034G17.3
  misc_feature (13)..(179): NCBI GI NO: 15239113 NR Description: AP2 domain transcription factor TINY, putative
  misc_feature (6)..(131): NCBI GI NO: 14140163 NR Description: putative AP2 domain containing protein
  misc_feature (26)..(128): NCBI GI NO: 15223860 NR Description: AP2 domain transcription factor TINY, putative
  misc_feature (12)..(128): NCBI GI NO: 15239501 NR Description: AP2 domain transcription factor TINY
  misc_feature (5)..(156): NCBI GI NO: 15235858 NR Description: transcription factor TINY, putative
MDMAMSQHSSDTSSTSSYSSDPSSTSSTTSGKKRPRPHAAAAPAYRGVRMRAWGKWVSEIREPRKKSRIWLGTFPRPEMAARAHDAAALSVKGARAVLNFPALARHLPRPASLAPRDVQAAAARAAVMHEPEPQQPDEPGRQPVEEVALAAELVFDDLAPLWVEDVVELGPCPSQHSSWTPCDGLDAAACLHSLPLLWDY

SEQ ID NO: 22985 - protein, 198 aa, Zea mays subsp. mays
  peptide (1)..(198): Ceres Seq. ID no. 13600587
  misc_feature (40)..(102): Pfam Name: Pfam Description:  AP2 domain
  misc_feature (1)..(127): NCBI GI NO: 34903650 NR Description: B1015E06.8
  misc_feature (1)..(198): NCBI GI NO: 38605848 NR Description: OSJNBb0034G17.6
  misc_feature (30)..(197): NCBI GI NO: 21908034 NR Description: DRE binding factor 2 [Zea mays]
  misc_feature (30)..(197): NCBI GI NO: 25990951 NR Description: DREB-like protein [Zea mays]
  misc_feature (1)..(137): NCBI GI NO: 38605845 NR Description: OSJNBb0034G17.3
  misc_feature (11)..(177): NCBI GI NO: 15239113 NR Description: AP2 domain transcription factor TINY, putative
  misc_feature (4)..(129): NCBI GI NO: 14140163 NR Description: putative AP2 domain containing protein
  misc_feature (24)..(126): NCBI GI NO: 15223860 NR Description: AP2 domain transcription factor TINY, putative
  misc_feature (10)..(126): NCBI GI NO: 15239501 NR Description: AP2 domain transcription factor TINY
  misc_feature (3)..(154): NCBI GI NO: 15235858 NR Description: transcription factor TINY, putative
MAMSQHSSDTSSTSSYSSDPSSTSSTTSGKKRPRPHAAAAPAYRGVRMRAWGKWVSEIREPRKKSRIWLGTFPRPEMAARAHDAAALSVKGARAVLNFPALARHLPRPASLAPRDVQAAAARAAVMHEPEPQQPDEPGRQPVEEVALAAELVFDDLAPLWVEDVVELGPCPSQHSSWTPCDGLDAAACLHSLPLLWDY

SEQ ID NO: 22986 - protein, 196 aa, Zea mays subsp. mays
  peptide (1)..(196): Ceres Seq. ID no. 13600588
  misc_feature (38)..(100): Pfam Name: Pfam Description:  AP2 domain
  misc_feature (1)..(125): NCBI GI NO: 34903650 NR Description: B1015E06.8
  misc_feature (1)..(196): NCBI GI NO: 38605848 NR Description: OSJNBb0034G17.6
  misc_feature (28)..(195): NCBI GI NO: 21908034 NR Description: DRE binding factor 2 [Zea mays]
  misc_feature (28)..(195): NCBI GI NO: 25990951 NR Description: DREB-like protein [Zea mays]
  misc_feature (1)..(135): NCBI GI NO: 38605845 NR Description: OSJNBb0034G17.3
  misc_feature (9)..(175): NCBI GI NO: 15239113 NR Description: AP2 domain transcription factor TINY, putative
  misc_feature (2)..(127): NCBI GI NO: 14140163 NR Description: putative AP2 domain containing protein
  misc_feature (22)..(124): NCBI GI NO: 15223860 NR Description: AP2 domain transcription factor TINY, putative
  misc_feature (8)..(124): NCBI GI NO: 15239501 NR Description: AP2 domain transcription factor TINY
  misc_feature (1)..(152): NCBI GI NO: 15235858 NR Description: transcription factor TINY, putative
MSQHSSDTSSTSSYSSDPSSTSSTTSGKKRPRPHAAAAPAYRGVRMRAWGKWVSEIREPRKKSRIWLGTFPRPEMAARAHDAAALSVKGARAVLNFPALARHLPRPASLAPRDVQAAAARAAVMHEPEPQQPDEPGRQPVEEVALAAELVFDDLAPLWVEDVVELGPCPSQHSSWTPCDGLDAAACLHSLPLLWDY

SEQ ID NO: 22987 - DNA, 1018 bp, Zea mays subsp. mays
  misc_feature (1)..(1018): Ceres Seq. ID no. 15227057
acacagacaacaacgagttaacgaaagccttttatccaagctcagggaagggaagctcacagtttcgttggatccaatcttttatccaagctcagcgatggcttctcgtcagcagcatcctactagctaccacgccggcgagaccaaggcccgtgccgaggagaagacgggtcaagtgatgggggcgacgcaggagaaagggagggaggccaagcacaaggcgtccgacgcctccgaccgcgccatgggaatgggccacgacgccatggaggcgaccagggagaaggcgcgcgccgccgcggaccgaaccatggggatgggccacgacgccggggaggcggccaaggacagggcgtaccgggccaaggacgcggcctccggtgccgctggccgcgccagggacactgcgtccgacgcggccggcgctgccggggaccgcgcccgcgacggcgcgcagcagaccgggagctacgtcgcgcagacggccgaggccgccaggcagaaggcggccggcgccgcgctgtacgccaaggacaccgtggtggccggcaaggacaagaccggcgccctcctgcagcaggcaggggagaaggtgatgagcacggccgtgggggccaaggacacggttgtcagcacggccgtgggggccaaggacacggttgtcagcaccgccgtgggagccaaggacgcgatgatgaactcgctcggcatggccggcgaggacaaggacggcaccaccaccaccgacgccggcaaggacaccagcacccgcaagcctggcagggactattagaggacacggcagccaaacttctcagtgtttctgttccagaagtttctgatcccatcatttaggttcaaaagtttctcatttcatttcaaactttcagtgtttggtgcatgctgtaaactctcttcaggacgggtcgtttgacatttgtgtcgactgaagcctccgcgctttcgactcaacgatgtatatgtaataataaagtcgcaaagctgttgttttattttc

SEQ ID NO: 22988 - protein, 263 aa, Zea mays subsp. mays
  peptide (1)..(263): Ceres Seq. ID no. 15227058
  misc_feature (134)..(207): Pfam Name: Pfam Description:  Late embryogenesis abundant protein
  misc_feature (33)..(241): NCBI GI NO: 34910364 NR Description: WSI18 protein
  misc_feature (33)..(241): NCBI GI NO: 1076757 NR Description: WSI18 protein - rice
  misc_feature (37)..(263): NCBI GI NO: 1076757 NR Description: WSI18 protein - rice
  misc_feature (33)..(229): NCBI GI NO: 7489493 NR Description: LEA protein - rice
  misc_feature (33)..(229): NCBI GI NO: 7489569 NR Description: protein LEA type 1 - rice
  misc_feature (33)..(229): NCBI GI NO: 4105441 NR Description: group 3 LEA protein [Oryza sativa]
  misc_feature (33)..(212): NCBI GI NO: 7387829 NR Description: Late embryogenesis abundant protein, group 3 (LEA)
  misc_feature (33)..(248): NCBI GI NO: 126081 NR Description: ABA-inducible protein PHV A1
  misc_feature (33)..(227): NCBI GI NO: 25989707 NR Description: LEA3 protein [Triticum aestivum]
  misc_feature (33)..(248): NCBI GI NO: 7387828 NR Description: Late embryogenesis abundant protein, group 3
HRQQRVNESLLSKLREGKLTVSLDPIFYPSSAMASRQQHPTSYHAGETKARAEEKTGQVMGATQEKGREAKHKASDASDRAMGMGHDAMEATREKARAAADRTMGMGHDAGEAAKDRAYRAKDAASGAAGRARDTASDAAGAAGDRARDGAQQTGSYVAQTAEAARQKAAGAALYAKDTVVAGKDKTGALLQQAGEKVMSTAVGAKDTVVSTAVGAKDTVVSTAVGAKDAMMNSLGMAGEDKDGTTTTDAGKDTSTRKPGRDY

SEQ ID NO: 22989 - protein, 231 aa, Zea mays subsp. mays
  peptide (1)..(231): Ceres Seq. ID no. 15227059
  misc_feature (102)..(175): Pfam Name: Pfam Description:  Late embryogenesis abundant protein
  misc_feature (1)..(209): NCBI GI NO: 34910364 NR Description: WSI18 protein
  misc_feature (1)..(209): NCBI GI NO: 1076757 NR Description: WSI18 protein - rice
  misc_feature (5)..(231): NCBI GI NO: 1076757 NR Description: WSI18 protein - rice
  misc_feature (1)..(197): NCBI GI NO: 7489493 NR Description: LEA protein - rice
  misc_feature (1)..(197): NCBI GI NO: 7489569 NR Description: protein LEA type 1 - rice
  misc_feature (1)..(197): NCBI GI NO: 4105441 NR Description: group 3 LEA protein [Oryza sativa]
  misc_feature (1)..(180): NCBI GI NO: 7387829 NR Description: Late embryogenesis abundant protein, group 3 (LEA)
  misc_feature (1)..(216): NCBI GI NO: 126081 NR Description: ABA-inducible protein PHV A1
  misc_feature (1)..(195): NCBI GI NO: 25989707 NR Description: LEA3 protein [Triticum aestivum]
  misc_feature (1)..(216): NCBI GI NO: 7387828 NR Description: Late embryogenesis abundant protein, group 3
MASRQQHPTSYHAGETKARAEEKTGQVMGATQEKGREAKHKASDASDRAMGMGHDAMEATREKARAAADRTMGMGHDAGEAAKDRAYRAKDAASGAAGRARDTASDAAGAAGDRARDGAQQTGSYVAQTAEAARQKAAGAALYAKDTVVAGKDKTGALLQQAGEKVMSTAVGAKDTVVSTAVGAKDTVVSTAVGAKDAMMNSLGMAGEDKDGTTTTDAGKDTSTRKPGRDY

SEQ ID NO: 22990 - protein, 204 aa, Zea mays subsp. mays
  peptide (1)..(204): Ceres Seq. ID no. 15227060
  misc_feature (75)..(148): Pfam Name: Pfam Description:  Late embryogenesis abundant protein
  misc_feature (1)..(182): NCBI GI NO: 34910364 NR Description: WSI18 protein
  misc_feature (1)..(182): NCBI GI NO: 1076757 NR Description: WSI18 protein - rice
  misc_feature (1)..(204): NCBI GI NO: 1076757 NR Description: WSI18 protein - rice
  misc_feature (1)..(170): NCBI GI NO: 7489493 NR Description: LEA protein - rice
  misc_feature (1)..(170): NCBI GI NO: 7489569 NR Description: protein LEA type 1 - rice
  misc_feature (1)..(170): NCBI GI NO: 4105441 NR Description: group 3 LEA protein [Oryza sativa]
  misc_feature (1)..(153): NCBI GI NO: 7387829 NR Description: Late embryogenesis abundant protein, group 3 (LEA)
  misc_feature (1)..(189): NCBI GI NO: 126081 NR Description: ABA-inducible protein PHV A1
  misc_feature (1)..(168): NCBI GI NO: 25989707 NR Description: LEA3 protein [Triticum aestivum]
  misc_feature (1)..(189): NCBI GI NO: 7387828 NR Description: Late embryogenesis abundant protein, group 3
MGATQEKGREAKHKASDASDRAMGMGHDAMEATREKARAAADRTMGMGHDAGEAAKDRAYRAKDAASGAAGRARDTASDAAGAAGDRARDGAQQTGSYVAQTAEAARQKAAGAALYAKDTVVAGKDKTGALLQQAGEKVMSTAVGAKDTVVSTAVGAKDTVVSTAVGAKDAMMNSLGMAGEDKDGTTTTDAGKDTSTRKPGRDY

SEQ ID NO: 22991 - DNA, 834 bp, Zea mays subsp. mays
  misc_feature (1)..(834): Ceres Seq. ID no. 12590539
aaatcagatcgtataggccgtgtctgctggctagctagggccggcggagtaaaatgtcccttattttgtttagtaaatctattttcgtaagggatttttattttttcaaagtaaaattatataattttgtttggaaaaataaaaatcccgcgggaaaaatgaagtttctaaactaggtaggttaagatttcatggtgacgtttgtttaattaatgggtgtttattaattgcttgcagtgcgagagcatggtagcggtggagcggcggctgaaggagatcggcatcccgtacgtgcagcgctgcgtggaggagggcggcatcaacgtggaccagatcttcttccacgaccccgacggcttcatgatcgagatctgcaactgcgacaacctccccgtcgtcccgctagccggcgaccagcagcgcgcgccggccgcctgcaggcgggctccggcggcggtcaataccgtcaagcagcagcagcagggcagcgtggtgcctgcttcttccgctccggtcacgacggcggcggcggcgcccgcgcagtgcatgccgtcggcggccacggccgcgcaagccatccgcgtcgccgaggagtcgtcgtcgcacatttcgtgcgcgtgattaattactagcttgttgacgacgacgccagcgcaaggattcggcgcggacggtgacgaagcaggcacgatggatcgacgagcgccgagtcacggccacatcaaggcgtctctgtacatgcgcgtgcgtgcgtgtaggtgctgtatgtgcagtgcactcaaactgcctagctttttttttagtaaagaataaacccatggtacggtgggagtg

SEQ ID NO: 22992 - protein, 124 aa, Zea mays subsp. mays
  peptide (1)..(124): Ceres Seq. ID no. 12590540
  misc_feature (1)..(60): NCBI GI NO: 18394235 NR Description: expressed protein; protein id: At1g15380
  misc_feature (1)..(60): NCBI GI NO: 18412683 NR Description: expressed protein; protein id: At1g80160
  misc_feature (1)..(60): NCBI GI NO: 25406639 NR Description: hypothetical protein F18B13.24
  misc_feature (1)..(82): NCBI GI NO: 34910246 NR Description: OSJNBa0089K24.9
  misc_feature (1)..(68): NCBI GI NO: 15529260 NR Description: At2g28420/T1B3.6 [Arabidopsis thaliana]
  misc_feature (1)..(68): NCBI GI NO: 18401734 NR Description: expressed protein; protein id: At2g28420
  misc_feature (1)..(55): NCBI GI NO: 34395261 NR Description: glyoxalase family-like protein
  misc_feature (1)..(55): NCBI GI NO: 34899038 NR Description: hypothetical protein~similar to Arabidopsisthaliana chromosome 2
  misc_feature (1)..(53): NCBI GI NO: 21740426 NR Description: OSJNBa0091D06.24
MVAVERRLKEIGIPYVQRCVEEGGINVDQIFFHDPDGFMIEICNCDNLPVVPLAGDQQRAPAACRRAPAAVNTVKQQQQGSVVPASSAPVTTAAAAPAQCMPSAATAAQAIRVAEESSSHISCA

SEQ ID NO: 22993 - protein, 86 aa, Zea mays subsp. mays
  peptide (1)..(86): Ceres Seq. ID no. 12590541
  misc_feature (1)..(22): NCBI GI NO: 18394235 NR Description: expressed protein; protein id: At1g15380
  misc_feature (1)..(22): NCBI GI NO: 18412683 NR Description: expressed protein; protein id: At1g80160
  misc_feature (1)..(22): NCBI GI NO: 25406639 NR Description: hypothetical protein F18B13.24
  misc_feature (1)..(44): NCBI GI NO: 34910246 NR Description: OSJNBa0089K24.9
  misc_feature (1)..(30): NCBI GI NO: 15529260 NR Description: At2g28420/T1B3.6 [Arabidopsis thaliana]
  misc_feature (1)..(30): NCBI GI NO: 18401734 NR Description: expressed protein; protein id: At2g28420
  misc_feature (1)..(17): NCBI GI NO: 34395261 NR Description: glyoxalase family-like protein
  misc_feature (1)..(17): NCBI GI NO: 34899038 NR Description: hypothetical protein~similar to Arabidopsisthaliana chromosome 2
  misc_feature (1)..(15): NCBI GI NO: 21740426 NR Description: OSJNBa0091D06.24
MIEICNCDNLPVVPLAGDQQRAPAACRRAPAAVNTVKQQQQGSVVPASSAPVTTAAAAPAQCMPSAATAAQAIRVAEESSSHISCA

SEQ ID NO: 22994 - DNA, 1533 bp, Zea mays subsp. mays
  misc_feature (1)..(1533): Ceres Seq. ID no. 13573778
cctaatcgaaaaactccactcctaaatccaaagcaaatccgaaagcaccacgaaacacggcggcagcagcctgcgtgcctgcctgcctatccaccccctcctccagcctccgcctccgacacccccgcgcgccctcgcgcggacaaagccgtaaggggcagagccgagggaggcggggctgtgccggcctcgcaatgcagcagccggagcctgccgatctgccgggctgggccttccagccacgggcggcgccggcgcctgccgccgcgcgcggggcgcaccaccgccgggccagatctgaggttgccttccgcctgccggacgacctcggcctcggcggcggcgccggccccgatggcgacgccttcgacgagatcggctcggaggacgacctcttctccaccttcatggacatcgagaagatctccacctccgggccctccgaccgcgccgccgagaactcgtctccgccgcgccccaagcaccgccacagcagctccgtcgatggctcgggcttcttcttctcacccggcgccggcggtggcgcggggaaggatgcagcggcgtcgctggctgaggtcttggaggccaagaagtccatgactcccgagcaactggccgagctcgccgccatcgaccccaagcgcgccaagagaattctagccaacagacaatcagcagctagatcaaaagaaagaaaggctcgttatatgacagaccttgagcggaaggtccaaactcttcagactgaagccaccaccctgtcagctcaacttacactatttcagagggacacgaccggactttctacagaaaatgcagagcttaagataaggttacaggccatggaacaacaggctcaactccgtgatgctctgaatgatgcactaaagcaggagctggagaggcttaaacatgctactggtgagatgaccaattccagcgaggcatataacatgagattccaacatgttccatacaattcttccttcttcccgctttcccagcaaaatgcatccccacaccttggtagcacccagctgccactgccgttccacccaccccatcccaacgtgccaaaccaccagatgcgaaacactctcccggacataatgcagcaagagtctctcggacggctgcagggtttggacattgggaaggggcctctggttgtgaagttagagagcagctcgatctctgcaagtgaaagcagcagcaccttctaacgaggcctacaagtgaaaacccaccgtttcagtaggttccattgttcatagtagcctgacatccttgtgctgcttcctgctctgtaagcccatttgttatttaattcattcatttagttgaaattatacgctgtcgcactggctgatcaatcatgttgtagaatggtccaggaacccttcaattatgtttgttttgggctcgtttcctgtttctgtgactggtatcatcagggcatttgggttttggagtgaaattctctagtggtaacaactaaaaaaaaaaagcttatctataccgtcaacctct

SEQ ID NO: 22995 - protein, 343 aa, Zea mays subsp. mays
  peptide (1)..(343): Ceres Seq. ID no. 13573779
  misc_feature (147)..(210): Pfam Name: Pfam Description:  bZIP transcription factor
  misc_feature (22)..(343): NCBI GI NO: 39579226 NR Description: bZIP transcription factor RF2b
  misc_feature (72)..(343): NCBI GI NO: 34394739 NR Description: putative transcription activator RF2a
  misc_feature (3)..(309): NCBI GI NO: 15226727 NR Description: bZip DNA binding protein [Arabidopsis thaliana]
  misc_feature (3)..(309): NCBI GI NO: 25453519 NR Description: b-Zip DNA binding protein
  misc_feature (4)..(343): NCBI GI NO: 15222213 NR Description: bZIP protein [Arabidopsis thaliana]
  misc_feature (4)..(337): NCBI GI NO: 25406943 NR Description: hypothetical protein
  misc_feature (26)..(325): NCBI GI NO: 7489564 NR Description: probable transcription activator RF2a - rice
  misc_feature (4)..(249): NCBI GI NO: 17065884 NR Description: AtbZIP transcription factor [Arabidopsis thaliana]
  misc_feature (1)..(339): NCBI GI NO: 21740783 NR Description: OSJNBa0067K08.24
  misc_feature (70)..(253): NCBI GI NO: 15224665 NR Description: bZIP transcription factor (POSF21)
MQQPEPADLPGWAFQPRAAPAPAAARGAHHRRARSEVAFRLPDDLGLGGGAGPDGDAFDEIGSEDDLFSTFMDIEKISTSGPSDRAAENSSPPRPKHRHSSSVDGSGFFFSPGAGGGAGKDAAASLAEVLEAKKSMTPEQLAELAAIDPKRAKRILANRQSAARSKERKARYMTDLERKVQTLQTEATTLSAQLTLFQRDTTGLSTENAELKIRLQAMEQQAQLRDALNDALKQELERLKHATGEMTNSSEAYNMRFQHVPYNSSFFPLSQQNASPHLGSTQLPLPFHPPHPNVPNHQMRNTLPDIMQQESLGRLQGLDIGKGPLVVKLESSSISASESSSTF

SEQ ID NO: 22996 - protein, 272 aa, Zea mays subsp. mays
  peptide (1)..(272): Ceres Seq. ID no. 13573780
  misc_feature (76)..(139): Pfam Name: Pfam Description:  bZIP transcription factor
  misc_feature (1)..(272): NCBI GI NO: 39579226 NR Description: bZIP transcription factor RF2b
  misc_feature (1)..(272): NCBI GI NO: 34394739 NR Description: putative transcription activator RF2a
  misc_feature (1)..(238): NCBI GI NO: 15226727 NR Description: bZip DNA binding protein [Arabidopsis thaliana]
  misc_feature (1)..(238): NCBI GI NO: 25453519 NR Description: b-Zip DNA binding protein
  misc_feature (1)..(272): NCBI GI NO: 15222213 NR Description: bZIP protein [Arabidopsis thaliana]
  misc_feature (1)..(266): NCBI GI NO: 25406943 NR Description: hypothetical protein
  misc_feature (1)..(254): NCBI GI NO: 7489564 NR Description: probable transcription activator RF2a - rice
  misc_feature (1)..(178): NCBI GI NO: 17065884 NR Description: AtbZIP transcription factor [Arabidopsis thaliana]
  misc_feature (1)..(268): NCBI GI NO: 21740783 NR Description: OSJNBa0067K08.24
  misc_feature (1)..(182): NCBI GI NO: 15224665 NR Description: bZIP transcription factor (POSF21)
MDIEKISTSGPSDRAAENSSPPRPKHRHSSSVDGSGFFFSPGAGGGAGKDAAASLAEVLEAKKSMTPEQLAELAAIDPKRAKRILANRQSAARSKERKARYMTDLERKVQTLQTEATTLSAQLTLFQRDTTGLSTENAELKIRLQAMEQQAQLRDALNDALKQELERLKHATGEMTNSSEAYNMRFQHVPYNSSFFPLSQQNASPHLGSTQLPLPFHPPHPNVPNHQMRNTLPDIMQQESLGRLQGLDIGKGPLVVKLESSSISASESSSTF

SEQ ID NO: 22997 - protein, 208 aa, Zea mays subsp. mays
  peptide (1)..(208): Ceres Seq. ID no. 13573781
  misc_feature (12)..(75): Pfam Name: Pfam Description:  bZIP transcription factor
  misc_feature (1)..(208): NCBI GI NO: 39579226 NR Description: bZIP transcription factor RF2b
  misc_feature (1)..(208): NCBI GI NO: 34394739 NR Description: putative transcription activator RF2a
  misc_feature (1)..(174): NCBI GI NO: 15226727 NR Description: bZip DNA binding protein [Arabidopsis thaliana]
  misc_feature (1)..(174): NCBI GI NO: 25453519 NR Description: b-Zip DNA binding protein
  misc_feature (1)..(208): NCBI GI NO: 15222213 NR Description: bZIP protein [Arabidopsis thaliana]
  misc_feature (1)..(202): NCBI GI NO: 25406943 NR Description: hypothetical protein
  misc_feature (1)..(190): NCBI GI NO: 7489564 NR Description: probable transcription activator RF2a - rice
  misc_feature (1)..(114): NCBI GI NO: 17065884 NR Description: AtbZIP transcription factor [Arabidopsis thaliana]
  misc_feature (1)..(204): NCBI GI NO: 21740783 NR Description: OSJNBa0067K08.24
  misc_feature (1)..(118): NCBI GI NO: 15224665 NR Description: bZIP transcription factor (POSF21)
MTPEQLAELAAIDPKRAKRILANRQSAARSKERKARYMTDLERKVQTLQTEATTLSAQLTLFQRDTTGLSTENAELKIRLQAMEQQAQLRDALNDALKQELERLKHATGEMTNSSEAYNMRFQHVPYNSSFFPLSQQNASPHLGSTQLPLPFHPPHPNVPNHQMRNTLPDIMQQESLGRLQGLDIGKGPLVVKLESSSISASESSSTF

SEQ ID NO: 22998 - DNA, 1558 bp, Zea mays subsp. mays
  misc_feature (1)..(1558): Ceres Seq. ID no. 13599205
atcgacccagccatctcctcaccctcgttcaccacacagtccgccactcctttagtagcttgtgatttgtacgtcgacgagatcactggtcgggtggcggacgacgacacatggggaagggtagtgtgggtgcatcatggtgggcgttcctcctgctcgccggcgtgctgctggtcgtagcagccacggccggggcggaggacggagtggtcgaacgggaccgcaaggaggacctgcggtggtgcaagcaggcgtgcgagtggcagtacggaaaggacaccccgcggaagagggaatgcgagagcgagtgccgcgagcggcaccagcaagctgacgcgggcgaggacggcgacagcggcgtggacgcctacgtctcccgctccgggaggggcgagtgccggcgccagtgcctgcgccgccacgagggccagccgtgggagacccaggagtgcatgaggcggtgccgccgccgcggactggccgtcgacatggagcaagagtacggtcgcggcagcgagagcgcgggcaagtgccgggagaggtgcgagcgccaccaccgcggggactggtgggagaggcagcgctgcctgatggactgcaagagccgggagcgggaggaggagggcggcagcggcggccggcgcggcgaggaggaggaggacagcggcgaccgctgcccttgcgagaagcagtgcgagggccaccacgaccgggaaagcaggcagcagtgcgtccaggcttgcgagcgccggcgacagcagcgcggcggcagccgtgactccaacgtcgacgaggacgacagcgaccggcggtgccagatgaaatgccggcgccacagcgatcggcaggcgaggcagtggtgcgtgcagcgctgcgagcgtaagcaacaggaggaggacgccgccgccgacgacgacaacagcggccggtgccagaagagatgccagcaccacagcgatcggcaggcgaggcagtggtgcgtgcagcgctgcgagcgtaagcaacaggaggacgccgccgccgacgacgacgagaacagcgaccggtgccagaaaagatgccagcagcacagcgactggatgaaaaggctgcggtgcatgcaacggtgcgggcgacaggaggagggcggcgcacgcgacgacgctgacgacgacgccagccacggcgaccggtgcgagaagaagtgccagcagcaccaccgcgactacgacaagcagcagcagtgcgtgcgcgactgccgccgcggccgtggctgggaaacggtggccggcgccatccttgaggtggtgtgacgatcgacgacgtgcatggcgtggcgcagagctaataataaaagggtagtgtacgcttaccgcgtacgtacgtgtcaccgggcgtggcactctccagtctccagggacccatccaccaagtgctactgctccttcgtagggagacgtgggaataaagagtggtagctgcatgcgcgtacggcggccatggctctccgatgagagagctagctgtgtacgtgtgttcgtgatgttgttccatgcatgacatgtatacgtcttgcctg

SEQ ID NO: 22999 - protein, 393 aa, Zea mays subsp. mays
  peptide (1)..(393): Ceres Seq. ID no. 13599206
  misc_feature (121)..(262): Pfam Name: Pfam Description:  Vicilin N terminal region
  misc_feature (6)..(296): NCBI GI NO: 4105681 NR Description: unknown [Oryza sativa]
  misc_feature (181)..(296): NCBI GI NO: 4096175 NR Description: early embryogenesis protein [Oryza sativa]
  misc_feature (123)..(380): NCBI GI NO: 4105681 NR Description: unknown [Oryza sativa]
  misc_feature (38)..(218): NCBI GI NO: 4105681 NR Description: unknown [Oryza sativa]
  misc_feature (92)..(218): NCBI GI NO: 4096175 NR Description: early embryogenesis protein [Oryza sativa]
  misc_feature (260)..(380): NCBI GI NO: 4096175 NR Description: early embryogenesis protein [Oryza sativa]
  misc_feature (221)..(336): NCBI GI NO: 4096175 NR Description: early embryogenesis protein [Oryza sativa]
  misc_feature (63)..(380): NCBI GI NO: 11357142 NR Description: protein PV100 [imported] - winter squash
  misc_feature (28)..(301): NCBI GI NO: 11357142 NR Description: protein PV100 [imported] - winter squash
MGKGSVGASWWAFLLLAGVLLVVAATAGAEDGVVERDRKEDLRWCKQACEWQYGKDTPRKRECESECRERHQQADAGEDGDSGVDAYVSRSGRGECRRQCLRRHEGQPWETQECMRRCRRRGLAVDMEQEYGRGSESAGKCRERCERHHRGDWWERQRCLMDCKSREREEEGGSGGRRGEEEEDSGDRCPCEKQCEGHHDRESRQQCVQACERRRQQRGGSRDSNVDEDDSDRRCQMKCRRHSDRQARQWCVQRCERKQQEEDAAADDDNSGRCQKRCQHHSDRQARQWCVQRCERKQQEDAAADDDENSDRCQKRCQQHSDWMKRLRCMQRCGRQEEGGARDDADDDASHGDRCEKKCQQHHRDYDKQQQCVRDCRRGRGWETVAGAILEVV

SEQ ID NO: 23000 - protein, 279 aa, Zea mays subsp. mays
  peptide (1)..(279): Ceres Seq. ID no. 13599207
  misc_feature (7)..(148): Pfam Name: Pfam Description:  Vicilin N terminal region
  misc_feature (1)..(182): NCBI GI NO: 4105681 NR Description: unknown [Oryza sativa]
  misc_feature (67)..(182): NCBI GI NO: 4096175 NR Description: early embryogenesis protein [Oryza sativa]
  misc_feature (9)..(266): NCBI GI NO: 4105681 NR Description: unknown [Oryza sativa]
  misc_feature (1)..(104): NCBI GI NO: 4105681 NR Description: unknown [Oryza sativa]
  misc_feature (1)..(104): NCBI GI NO: 4096175 NR Description: early embryogenesis protein [Oryza sativa]
  misc_feature (146)..(266): NCBI GI NO: 4096175 NR Description: early embryogenesis protein [Oryza sativa]
  misc_feature (107)..(222): NCBI GI NO: 4096175 NR Description: early embryogenesis protein [Oryza sativa]
  misc_feature (1)..(266): NCBI GI NO: 11357142 NR Description: protein PV100 [imported] - winter squash
  misc_feature (1)..(187): NCBI GI NO: 11357142 NR Description: protein PV100 [imported] - winter squash
MRRCRRRGLAVDMEQEYGRGSESAGKCRERCERHHRGDWWERQRCLMDCKSREREEEGGSGGRRGEEEEDSGDRCPCEKQCEGHHDRESRQQCVQACERRRQQRGGSRDSNVDEDDSDRRCQMKCRRHSDRQARQWCVQRCERKQQEEDAAADDDNSGRCQKRCQHHSDRQARQWCVQRCERKQQEDAAADDDENSDRCQKRCQQHSDWMKRLRCMQRCGRQEEGGARDDADDDASHGDRCEKKCQQHHRDYDKQQQCVRDCRRGRGWETVAGAILEVV

SEQ ID NO: 23001 - protein, 267 aa, Zea mays subsp. mays
  peptide (1)..(267): Ceres Seq. ID no. 13599208
  misc_feature (1)..(136): Pfam Name: Pfam Description:  Vicilin N terminal region
  misc_feature (1)..(170): NCBI GI NO: 4105681 NR Description: unknown [Oryza sativa]
  misc_feature (55)..(170): NCBI GI NO: 4096175 NR Description: early embryogenesis protein [Oryza sativa]
  misc_feature (1)..(254): NCBI GI NO: 4105681 NR Description: unknown [Oryza sativa]
  misc_feature (1)..(92): NCBI GI NO: 4105681 NR Description: unknown [Oryza sativa]
  misc_feature (1)..(92): NCBI GI NO: 4096175 NR Description: early embryogenesis protein [Oryza sativa]
  misc_feature (134)..(254): NCBI GI NO: 4096175 NR Description: early embryogenesis protein [Oryza sativa]
  misc_feature (95)..(210): NCBI GI NO: 4096175 NR Description: early embryogenesis protein [Oryza sativa]
  misc_feature (1)..(254): NCBI GI NO: 11357142 NR Description: protein PV100 [imported] - winter squash
  misc_feature (1)..(175): NCBI GI NO: 11357142 NR Description: protein PV100 [imported] - winter squash
MEQEYGRGSESAGKCRERCERHHRGDWWERQRCLMDCKSREREEEGGSGGRRGEEEEDSGDRCPCEKQCEGHHDRESRQQCVQACERRRQQRGGSRDSNVDEDDSDRRCQMKCRRHSDRQARQWCVQRCERKQQEEDAAADDDNSGRCQKRCQHHSDRQARQWCVQRCERKQQEDAAADDDENSDRCQKRCQQHSDWMKRLRCMQRCGRQEEGGARDDADDDASHGDRCEKKCQQHHRDYDKQQQCVRDCRRGRGWETVAGAILEVV

SEQ ID NO: 23002 - DNA, 1074 bp, Zea mays subsp. mays
  misc_feature (1)..(1074): Ceres Seq. ID no. 14306242
aacagcactagctagctagctagaatcgaaacagaatggatgcctctactaccttcctcttcctcgcgcttgcatgcatggcggccactaatactctccctcactgtgccaacgcaaggcatttcctccctcctagtcgtagccatggcagcagcactggcacgaggagctctagcgccgtcgacgccgccgccgccgccgccagcagcagcaagctctcgtggccactgctaccgtggaagaagcctggccgtggcggcagcagccgtggctccgggagcgggcacggtttcggctggaccgtctcgcacaacgggtcggacaccgacgtcgggttcggcggcggcgccggcgccggcacgagcagctccggaggtggctcgagcgcgggcgggggagctggtctcggcgtcggcatccacgtcggcaacgacggagtggacgtcgcgatcggcgtcgccggaggcggcgccgtcgtcgtcagtaccagcaacggcggcggcgtgggtgtcggcgctggcggtggaggaggagtcgggatccacctgggccccgacgtcgtggccgtcacccgtggcggtggcggtggcgccggcggcgatgattcgtcgtctggcagcggaaccggggtgggacgcgccggaagcgctgtgggcagcgcccatgggtatgggaatgcaagcggtggaacaggggccggtggcgggagtggagctggctctggcggccaaggtggatacggcggcggcggtggcggtggcaccggaagtagcggtggccatccatgacgaccatgagcttgcattggtgaccgactgatgactgctgcatgatggttggatccggtgcctttggtttggggataaaaatgctgctttcgttggatccagcgcctttggggattgtattcaaaactatatactttttatagctgtctagtattgttgtggttactttgttttacgttgctgattgatgaggttcgttgattagtacgtactgttatccagcgcagtaatataacgcggttttcactcttcttggatgcactaaaacaatgtcagttggtggagt

SEQ ID NO: 23003 - protein, 259 aa, Zea mays subsp. mays
  peptide (1)..(259): Ceres Seq. ID no. 14306243
MPLLPSSSSRLHAWRPLILSLTVPTQGISSLLVVAMAAALARGALAPSTPPPPPPAAASSRGHCYRGRSLAVAAAAVAPGAGTVSAGPSRTTGRTPTSGSAAAPAPARAAPEVARARAGELVSASASTSATTEWTSRSASPEAAPSSSVPATAAAWVSALAVEEESGSTWAPTSWPSPVAVAVAPAAMIRRLAAEPGWDAPEALWAAPMGMGMQAVEQGPVAGVELALAAKVDTAAAVAVAPEVAVAIHDDHELALVTD

SEQ ID NO: 23004 - protein, 250 aa, Zea mays subsp. mays
  peptide (1)..(250): Ceres Seq. ID no. 14306244
  misc_feature (155)..(248): Pfam Name: Pfam Description:  Herpesvirus large structural phospho protein UL32
  misc_feature (51)..(250): NCBI GI NO: 38344707 NR Description: OSJNBb0115I09.11
  misc_feature (72)..(249): NCBI GI NO: 30679122 NR Description: expressed protein [Arabidopsis thaliana]
  misc_feature (72)..(248): NCBI GI NO: 30679122 NR Description: expressed protein [Arabidopsis thaliana]
  misc_feature (72)..(248): NCBI GI NO: 322647 NR Description: glycine-rich protein GRP22 - rape
  misc_feature (37)..(248): NCBI GI NO: 15234690 NR Description: hypothetical protein [Arabidopsis thaliana]
  misc_feature (74)..(249): NCBI GI NO: 30679126 NR Description: expressed protein [Arabidopsis thaliana]
  misc_feature (74)..(249): NCBI GI NO: 30679126 NR Description: expressed protein [Arabidopsis thaliana]
  misc_feature (72)..(248): NCBI GI NO: 30679122 NR Description: expressed protein [Arabidopsis thaliana]
  misc_feature (72)..(248): NCBI GI NO: 30679126 NR Description: expressed protein [Arabidopsis thaliana]
  misc_feature (74)..(248): NCBI GI NO: 34898126 NR Description: putative glycine-rich cell wall protein precursor
MDASTTFLFLALACMAATNTLPHCANARHFLPPSRSHGSSTGTRSSSAVDAAAAAASSSKLSWPLLPWKKPGRGGSSRGSGSGHGFGWTVSHNGSDTDVGFGGGAGAGTSSSGGGSSAGGGAGLGVGIHVGNDGVDVAIGVAGGGAVVVSTSNGGGVGVGAGGGGGVGIHLGPDVVAVTRGGGGGAGGDDSSSGSGTGVGRAGSAVGSAHGYGNASGGTGAGGGSGAGSGGQGGYGGGGGGGTGSSGGHP

SEQ ID NO: 23005 - protein, 236 aa, Zea mays subsp. mays
  peptide (1)..(236): Ceres Seq. ID no. 14306245
  misc_feature (141)..(234): Pfam Name: Pfam Description:  Herpesvirus large structural phospho protein UL32
  misc_feature (37)..(236): NCBI GI NO: 38344707 NR Description: OSJNBb0115I09.11
  misc_feature (58)..(235): NCBI GI NO: 30679122 NR Description: expressed protein [Arabidopsis thaliana]
  misc_feature (58)..(234): NCBI GI NO: 30679122 NR Description: expressed protein [Arabidopsis thaliana]
  misc_feature (58)..(234): NCBI GI NO: 322647 NR Description: glycine-rich protein GRP22 - rape
  misc_feature (23)..(234): NCBI GI NO: 15234690 NR Description: hypothetical protein [Arabidopsis thaliana]
  misc_feature (60)..(235): NCBI GI NO: 30679126 NR Description: expressed protein [Arabidopsis thaliana]
  misc_feature (60)..(235): NCBI GI NO: 30679126 NR Description: expressed protein [Arabidopsis thaliana]
  misc_feature (58)..(234): NCBI GI NO: 30679122 NR Description: expressed protein [Arabidopsis thaliana]
  misc_feature (58)..(234): NCBI GI NO: 30679126 NR Description: expressed protein [Arabidopsis thaliana]
  misc_feature (60)..(234): NCBI GI NO: 34898126 NR Description: putative glycine-rich cell wall protein precursor
MAATNTLPHCANARHFLPPSRSHGSSTGTRSSSAVDAAAAAASSSKLSWPLLPWKKPGRGGSSRGSGSGHGFGWTVSHNGSDTDVGFGGGAGAGTSSSGGGSSAGGGAGLGVGIHVGNDGVDVAIGVAGGGAVVVSTSNGGGVGVGAGGGGGVGIHLGPDVVAVTRGGGGGAGGDDSSSGSGTGVGRAGSAVGSAHGYGNASGGTGAGGGSGAGSGGQGGYGGGGGGGTGSSGGHP

SEQ ID NO: 23006 - DNA, 936 bp, Zea mays subsp. mays
  misc_feature (1)..(936): Ceres Seq. ID no. 13600563
aaaaaaaagaatagaacggaatgaaattctttccgtcacaaactgaggaccctaatcccaaatcgagaggctgaagcgctggactccagctactgttgctcgcctggttcgggacggccgattgggtgccgggttgccaaggacatggaggattcgagcggctgctcgtcgtctccagccgtcctacggaacaagtactgggtcctccgccacggccgcagcgtccccaacgagcgcggtctcatcgtgtcatctctggagaacggcacgaagccggagttcgggctggccccgcagggagtcgagcaggcgcgcgcggccggcgaaaagttccggaaggagcttgacgagattggtgtgccggtgggttccgtcaagattcgttactcgccgttctcacggaccaccgagacggctagagtggtcgccggtgtgctcggcatcccctttgaagctcctagttgcgaagcggtgctgggacttcgtgagcgctactttgggccatcatatgagttactttcacatgataagtatgcagacatatggtcagtagatgaagcacatccctgtatggctcctgaaggtggcgagagcgtcgcagatgttgctagtagattttcagctgtgctgtcatctacagagacacattttcatggctctgcaattcttattgtcagccatggggacccactacaaatctttcaagctgtcctcagtggagccaaggagaacatgtctttccttcacgatctcaccaacctgaaggtgaaagatactgacgatctcaccaacctggaagtgaaagacacgatggtggcatccattctgtcacagcatcgtaagtttgcgctcatcacaggagagctgcgccgagttgtgtaacttgctgctgcttgggtttaacgtcgcctgtcagttgaccatatgtaaacctgc

SEQ ID NO: 23007 - protein, 245 aa, Zea mays subsp. mays
  peptide (1)..(245): Ceres Seq. ID no. 13600564
  misc_feature (16)..(240): Pfam Name: Pfam Description:  Phosphoglycerate mutase family
  misc_feature (3)..(245): NCBI GI NO: 38344128 NR Description: OSJNBb0072N21.7
  misc_feature (16)..(245): NCBI GI NO: 18420226 NR Description: expressed protein [Arabidopsis thaliana]
  misc_feature (16)..(245): NCBI GI NO: 21592519 NR Description: unknown [Arabidopsis thaliana]
  misc_feature (113)..(245): NCBI GI NO: 7485952 NR Description: hypothetical protein F22I13
  misc_feature (16)..(122): NCBI GI NO: 7485952 NR Description: hypothetical protein F22I13
MEDSSGCSSSPAVLRNKYWVLRHGRSVPNERGLIVSSLENGTKPEFGLAPQGVEQARAAGEKFRKELDEIGVPVGSVKIRYSPFSRTTETARVVAGVLGIPFEAPSCEAVLGLRERYFGPSYELLSHDKYADIWSVDEAHPCMAPEGGESVADVASRFSAVLSSTETHFHGSAILIVSHGDPLQIFQAVLSGAKENMSFLHDLTNLKVKDTDDLTNLEVKDTMVASILSQHRKFALITGELRRVV

SEQ ID NO: 23008 - DNA, 1278 bp, Zea mays subsp. mays
  misc_feature (1)..(1278): Ceres Seq. ID no. 13600580
atgcgcgcgctactgcatctgcggctcatcaatccgtgcagtcccagagcaccccgtcttcccgctactcccgcaagggcgctcgtcgcttccttctccggggcgtggcaggcaccttctggtagagcgagagcgagagcagcgccgccggcagttcgcgctatggcgtcccagcaggtgttccgggctcagcagcagcagcagcagcagttcccggctcagcagcaggagtcccagccggggaaggagcacgcgatggacccccggcccgaggccatcgtccaggactacaaggccgccaacaagctcaaggacaaggtggcgctcgtgaccggcggcgactccggcatcgggcgcgccgtgtgcctgtgcttcgcgaaggagggcgcgacggtggccttcaccttcsgtgagggggcaggaggagaaggacgcggaggagacgctgcgtgcgctgcgcgacatcgggtccgagacgggcgcgcgcgagccgatggccctgcccgccgacctcgggtacgaggccaactgccgggaggtggtggagcgggtggcgtcggcgtacggcgggcgcatcgacgtggtggtgaacaacgcggcggagcagtacgagcgggagagcatcggggacgtgacggaggcggacctggagcgcgtgttccgcaccaacatcttctcctacttcctggtgtccaagcacgcggtgccgcgcatggagcccggcgcctgcatcatcaacacctcctccgtcaacgcgtacaagggcaacaagacgctgctggactacacggccaccaagggcgccatcgtggccttcacgcgcgcgctctcgctgcagctggccgacaggggcatccgcgtcaacggcgtcgcgccgggccccgtctggacgccgctcatcccggcgtccttcggcaaggagaaggtggagcagttcgggtcccaggtgcccatgaagcgcgccgcgcagccggccgagatcgcgcccagcttcgtcttcctcgccagcaaccaggattcgtcctacatgtctggccagatcctccacgtcaacggaggcgtcatcgtcaatagctagatacggaagctgttttgctgtcgtgtgatcgtgtccaagtccaagggaacaaagcgagtgtccgtgtgtaccagtcagtaccaggtagcagtgtcagtacgcgcacgcaggaaggcaaggcagggttcagttgtagcggtgtgtaatgctgtcagcacagcacttgtaaagaaggaacgtgtctgaataaatatgcgtcc

SEQ ID NO: 23009 - protein, 357 aa, Zea mays subsp. mays
  peptide (1)..(357): Ceres Seq. ID no. 15218975
  misc_feature (69)..(139): NCBI GI NO: 7431022 NR Description: glucose and ribitol dehydrogenase homolog - barley
  misc_feature (74)..(139): NCBI GI NO: 18405090 NR Description: short-chain dehydrogenase/reductase family protein
  misc_feature (68)..(139): NCBI GI NO: 9622153 NR Description: seed maturation protein PM34 [Glycine max]
  misc_feature (74)..(139): NCBI GI NO: 12322163 NR Description: dormancy related protein, putative
  misc_feature (71)..(163): NCBI GI NO: 15229944 NR Description: short-chain dehydrogenase/reductase family protein
  misc_feature (71)..(163): NCBI GI NO: 16226575 NR Description: AT3g05260/T12H1_23 [Arabidopsis thaliana]
  misc_feature (68)..(139): NCBI GI NO: 23194375 NR Description: putative TAG factor protein
  misc_feature (66)..(138): NCBI GI NO: 37519989 NR Description: probable oxidoreductase [Gloeobacter violaceus]
  misc_feature (63)..(136): NCBI GI NO: 17232674 NR Description: oxidoreductase [Nostoc sp. PCC 7120]
  misc_feature (62)..(136): NCBI GI NO: 23128182 NR Description: hypothetical protein [Nostoc punctiforme]
  misc_feature (137)..(137): Xaa is any aa, unknown or other
MRALLHLRLINPCSPRAPRLPATPARALVASFSGAWQAPSGRARARAAPPAVRAMASQQVFRAQQQQQQQFPAQQQESQPGKEHAMDPRPEAIVQDYKAANKLKDKVALVTGGDSGIGRAVCLCFAKEGATVAFTFXEGAGGEGRGGDAACAARHRVRDGRARADGPARRPRVRGQLPGGGGAGGVGVRRAHRRGGEQRGGAVRAGEHRGRDGGGPGARVPHQHLLLLPGVQARGAAHGARRLHHQHLLRQRVQGQQDAAGLHGHQGRHRGLHARALAAAGRQGHPRQRRRAGPRLDAAHPGVLRQGEGGAVRVPGAHEARRAAGRDRAQLRLPRQQPGFVLHVWPDPPRQRRRHRQ

SEQ ID NO: 23010 - protein, 303 aa, Zea mays subsp. mays
  peptide (1)..(303): Ceres Seq. ID no. 15218976
  misc_feature (15)..(85): NCBI GI NO: 7431022 NR Description: glucose and ribitol dehydrogenase homolog - barley
  misc_feature (20)..(85): NCBI GI NO: 18405090 NR Description: short-chain dehydrogenase/reductase family protein
  misc_feature (14)..(85): NCBI GI NO: 9622153 NR Description: seed maturation protein PM34 [Glycine max]
  misc_feature (20)..(85): NCBI GI NO: 12322163 NR Description: dormancy related protein, putative
  misc_feature (17)..(109): NCBI GI NO: 15229944 NR Description: short-chain dehydrogenase/reductase family protein
  misc_feature (17)..(109): NCBI GI NO: 16226575 NR Description: AT3g05260/T12H1_23 [Arabidopsis thaliana]
  misc_feature (14)..(85): NCBI GI NO: 23194375 NR Description: putative TAG factor protein
  misc_feature (12)..(84): NCBI GI NO: 37519989 NR Description: probable oxidoreductase [Gloeobacter violaceus]
  misc_feature (9)..(82): NCBI GI NO: 17232674 NR Description: oxidoreductase [Nostoc sp. PCC 7120]
  misc_feature (8)..(82): NCBI GI NO: 23128182 NR Description: hypothetical protein [Nostoc punctiforme]
  misc_feature (83)..(83): Xaa is any aa, unknown or other
MASQQVFRAQQQQQQQFPAQQQESQPGKEHAMDPRPEAIVQDYKAANKLKDKVALVTGGDSGIGRAVCLCFAKEGATVAFTFXEGAGGEGRGGDAACAARHRVRDGRARADGPARRPRVRGQLPGGGGAGGVGVRRAHRRGGEQRGGAVRAGEHRGRDGGGPGARVPHQHLLLLPGVQARGAAHGARRLHHQHLLRQRVQGQQDAAGLHGHQGRHRGLHARALAAAGRQGHPRQRRRAGPRLDAAHPGVLRQGEGGAVRVPGAHEARRAAGRDRAQLRLPRQQPGFVLHVWPDPPRQRRRHRQ

SEQ ID NO: 23011 - protein, 272 aa, Zea mays subsp. mays
  peptide (1)..(272): Ceres Seq. ID no. 15218977
  misc_feature (1)..(54): NCBI GI NO: 7431022 NR Description: glucose and ribitol dehydrogenase homolog - barley
  misc_feature (1)..(54): NCBI GI NO: 18405090 NR Description: short-chain dehydrogenase/reductase family protein
  misc_feature (1)..(54): NCBI GI NO: 9622153 NR Description: seed maturation protein PM34 [Glycine max]
  misc_feature (1)..(54): NCBI GI NO: 12322163 NR Description: dormancy related protein, putative
  misc_feature (1)..(78): NCBI GI NO: 15229944 NR Description: short-chain dehydrogenase/reductase family protein
  misc_feature (1)..(78): NCBI GI NO: 16226575 NR Description: AT3g05260/T12H1_23 [Arabidopsis thaliana]
  misc_feature (1)..(54): NCBI GI NO: 23194375 NR Description: putative TAG factor protein
  misc_feature (1)..(53): NCBI GI NO: 37519989 NR Description: probable oxidoreductase [Gloeobacter violaceus]
  misc_feature (1)..(51): NCBI GI NO: 17232674 NR Description: oxidoreductase [Nostoc sp. PCC 7120]
  misc_feature (1)..(51): NCBI GI NO: 23128182 NR Description: hypothetical protein [Nostoc punctiforme]
  misc_feature (52)..(52): Xaa is any aa, unknown or other
MDPRPEAIVQDYKAANKLKDKVALVTGGDSGIGRAVCLCFAKEGATVAFTFXEGAGGEGRGGDAACAARHRVRDGRARADGPARRPRVRGQLPGGGGAGGVGVRRAHRRGGEQRGGAVRAGEHRGRDGGGPGARVPHQHLLLLPGVQARGAAHGARRLHHQHLLRQRVQGQQDAAGLHGHQGRHRGLHARALAAAGRQGHPRQRRRAGPRLDAAHPGVLRQGEGGAVRVPGAHEARRAAGRDRAQLRLPRQQPGFVLHVWPDPPRQRRRHRQ

SEQ ID NO: 23012 - DNA, 1500 bp, Zea mays subsp. mays
  misc_feature (1)..(1500): Ceres Seq. ID no. 13600581
cccmcctagamcagttcctaacgaaaaagagtttcccgcatcggcctccgccacccaccgccgccgccgccccgccccgccccgccaaaggaacggaggatggaagccccgggctcgccctacgcctcctcgccggaatccgcccccaagcgtgcccctcgctccccaccgcagcagcagcctccctccgaggaaggagatgacaaggagaaaccaatacatttgaggtttctggtgtctaatgcgtcagcaggatgtatcattggcaagggtggatcaactattaatgactttcagtcccaatctggggctcgtattcagttatcacgtagccatgagtttttccctggtactaatgacagaatcatcatggtttctggactgtttggtgaagtaatgaaggccatggagttgattcttgagaaacttttggctgagggtgaagaattcaatgaagctgaagctagacctaaagttagacttgtagttcctaacaactcttgtggcgggataattggtaaaggtggagcaacaataaagtcatttattgaagaatcacatgctggaatcaaaatttcgccacaggataacaattatgttggtttgcatgataggcttgttacagttacaggaacctttgataatcagatgaatgcgatagatttgatactgaaaaagttatctgaggatgttcactacccagctaatttgagctccccatttccatatgcaggtcttactttcccaagctaccctggtgttcctgttggttatatgattccgcaggtgccatataataatgctgtgaactatggacctaataacgggtatggaggaaggtaccaaaacaacaagcccagtacacctatgagatctcctgctagtaatgaagcccaagaatctctgaccattggtattgccgatgaacacattggtgctgttgtaggacgtgctggaaggaacataacagagattattcaggctagtggtgctcggatcaagatatcggataggggtgacttcatatctgggacatctgacaggaaggtgacgattactggaacatcagaagctatccggaccgcggagtccatgatcatgcagagggtgtcagccagttcggagaggctatgataccagatatgtttgacggactgtgggggccgttgttgagtccgagcagcatgtttgatgcaagttattattgtttgttgcgttgcgccaatggtttagtcgaagatatataggtgcagcgtttgaatggatttgggaatagggctgagttatatcccgtggatgccacaacaaggcaggcaggcgccgctctgtgctagtggctgagtaggttgacaattcggtatgttgatttcctggtacccccccttcctttttttttgagtcttgtgtatgtagatctgagtatgggttctttctttcacgtggccagaaagagcatggttggaagctaaacacaataaagcttaksgaacgggagggggg

SEQ ID NO: 23013 - protein, 344 aa, Zea mays subsp. mays
  peptide (1)..(344): Ceres Seq. ID no. 15218978
  misc_feature (127)..(178): Pfam Name: Pfam Description:  KH domain
  misc_feature (116)..(343): NCBI GI NO: 542190 NR Description: hypothetical protein 1087 - maize
  misc_feature (1)..(343): NCBI GI NO: 30680512 NR Description: KH domain protein Nova, putative
  misc_feature (1)..(211): NCBI GI NO: 15237716 NR Description: KH domain protein Nova, putative
  misc_feature (234)..(343): NCBI GI NO: 15237716 NR Description: KH domain protein Nova, putative
  misc_feature (1)..(240): NCBI GI NO: 33516919 NR Description: RNA-binding protein Nova-1
  misc_feature (242)..(338): NCBI GI NO: 33516919 NR Description: RNA-binding protein Nova-1
  misc_feature (37)..(237): NCBI GI NO: 19527741 NR Description: AT03366p [Drosophila melanogaster]
  misc_feature (259)..(344): NCBI GI NO: 19527741 NR Description: AT03366p [Drosophila melanogaster]
  misc_feature (26)..(237): NCBI GI NO: 24645370 NR Description: pasilla CG8144-PC [Drosophila melanogaster]
  misc_feature (259)..(344): NCBI GI NO: 24645370 NR Description: pasilla CG8144-PC [Drosophila melanogaster]
MEAPGSPYASSPESAPKRAPRSPPQQQPPSEEGDDKEKPIHLRFLVSNASAGCIIGKGGSTINDFQSQSGARIQLSRSHEFFPGTNDRIIMVSGLFGEVMKAMELILEKLLAEGEEFNEAEARPKVRLVVPNNSCGGIIGKGGATIKSFIEESHAGIKISPQDNNYVGLHDRLVTVTGTFDNQMNAIDLILKKLSEDVHYPANLSSPFPYAGLTFPSYPGVPVGYMIPQVPYNNAVNYGPNNGYGGRYQNNKPSTPMRSPASNEAQESLTIGIADEHIGAVVGRAGRNITEIIQASGARIKISDRGDFISGTSDRKVTITGTSEAIRTAESMIMQRVSASSERL

SEQ ID NO: 23014 - protein, 254 aa, Zea mays subsp. mays
  peptide (1)..(254): Ceres Seq. ID no. 15218979
  misc_feature (37)..(88): Pfam Name: Pfam Description:  KH domain
  misc_feature (26)..(253): NCBI GI NO: 542190 NR Description: hypothetical protein 1087 - maize
  misc_feature (1)..(253): NCBI GI NO: 30680512 NR Description: KH domain protein Nova, putative
  misc_feature (1)..(121): NCBI GI NO: 15237716 NR Description: KH domain protein Nova, putative
  misc_feature (144)..(253): NCBI GI NO: 15237716 NR Description: KH domain protein Nova, putative
  misc_feature (1)..(150): NCBI GI NO: 33516919 NR Description: RNA-binding protein Nova-1
  misc_feature (152)..(248): NCBI GI NO: 33516919 NR Description: RNA-binding protein Nova-1
  misc_feature (1)..(147): NCBI GI NO: 19527741 NR Description: AT03366p [Drosophila melanogaster]
  misc_feature (169)..(254): NCBI GI NO: 19527741 NR Description: AT03366p [Drosophila melanogaster]
  misc_feature (1)..(147): NCBI GI NO: 24645370 NR Description: pasilla CG8144-PC [Drosophila melanogaster]
  misc_feature (169)..(254): NCBI GI NO: 24645370 NR Description: pasilla CG8144-PC [Drosophila melanogaster]
MVSGLFGEVMKAMELILEKLLAEGEEFNEAEARPKVRLVVPNNSCGGIIGKGGATIKSFIEESHAGIKISPQDNNYVGLHDRLVTVTGTFDNQMNAIDLILKKLSEDVHYPANLSSPFPYAGLTFPSYPGVPVGYMIPQVPYNNAVNYGPNNGYGGRYQNNKPSTPMRSPASNEAQESLTIGIADEHIGAVVGRAGRNITEIIQASGARIKISDRGDFISGTSDRKVTITGTSEAIRTAESMIMQRVSASSERL

SEQ ID NO: 23015 - protein, 245 aa, Zea mays subsp. mays
  peptide (1)..(245): Ceres Seq. ID no. 15218980
  misc_feature (28)..(79): Pfam Name: Pfam Description:  KH domain
  misc_feature (17)..(244): NCBI GI NO: 542190 NR Description: hypothetical protein 1087 - maize
  misc_feature (1)..(244): NCBI GI NO: 30680512 NR Description: KH domain protein Nova, putative
  misc_feature (1)..(112): NCBI GI NO: 15237716 NR Description: KH domain protein Nova, putative
  misc_feature (135)..(244): NCBI GI NO: 15237716 NR Description: KH domain protein Nova, putative
  misc_feature (1)..(141): NCBI GI NO: 33516919 NR Description: RNA-binding protein Nova-1
  misc_feature (143)..(239): NCBI GI NO: 33516919 NR Description: RNA-binding protein Nova-1
  misc_feature (1)..(138): NCBI GI NO: 19527741 NR Description: AT03366p [Drosophila melanogaster]
  misc_feature (160)..(245): NCBI GI NO: 19527741 NR Description: AT03366p [Drosophila melanogaster]
  misc_feature (1)..(138): NCBI GI NO: 24645370 NR Description: pasilla CG8144-PC [Drosophila melanogaster]
  misc_feature (160)..(245): NCBI GI NO: 24645370 NR Description: pasilla CG8144-PC [Drosophila melanogaster]
MKAMELILEKLLAEGEEFNEAEARPKVRLVVPNNSCGGIIGKGGATIKSFIEESHAGIKISPQDNNYVGLHDRLVTVTGTFDNQMNAIDLILKKLSEDVHYPANLSSPFPYAGLTFPSYPGVPVGYMIPQVPYNNAVNYGPNNGYGGRYQNNKPSTPMRSPASNEAQESLTIGIADEHIGAVVGRAGRNITEIIQASGARIKISDRGDFISGTSDRKVTITGTSEAIRTAESMIMQRVSASSERL

SEQ ID NO: 23016 - DNA, 991 bp, Zea mays subsp. mays
  misc_feature (1)..(991): Ceres Seq. ID no. 13586919
aggcttcacccgttttgctctcgagtctctcccggttcggatccaaattcagcaatccgacctgagaccaagaccgcgcaccacgcggctcgccgccgatggcgaacgccgacgccgacgaagcgccgctgctctctgtggaacacctccgtccaggatcctgcagccgcgagctcgagctgcgggagttccgcgaccgctacgtgatccgttcgctcgacggcgccgccgctttcgccgtccttcgctccggcggctccatccgccctctctccccagaggaagccgtagctgagagcgactgcaaggtttccagaatatacggcgtggtcggcaccataagattgctcgctggaagctatgtactcgttatcacttctcagaaagatgctggctcttatctgggctcccctgtgtaccaagtgaactcaatgaaattcttatgctgcaacgaggctatcaagcacttgactccacaggaaagaagggatgaggcatacttcatgtctctcctgagaattgcagaaactacttgtggattgtattattcatatgacagggatttgacactaaagtaagtgctttgtcatgcatgtatctgaataaggcaaccaaaagacattggcttaatattcagaaaaggccaacaacctttgtgtagtgattatgcacatccttaagatatttttttttctcaaacaacacatgagaactgtgtgcatttcattaagtagagaaaaaaaaccaaaggagaagcagtgtgtggcgctgttagccttgtactaggtggcctagggaagttggcctcctggaaaaaagccgaaacagtcagagcaccctgaatgtcctggatccagagattctgatctaaatcctcctgtaccgttcatctcctcgtcgacatttgtaactaatcgattgcctgttagttccattattccttgcagatgtgtagtaggttcttgaagtatggatctattgagcacttctt

SEQ ID NO: 23017 - protein, 159 aa, Zea mays subsp. mays
  peptide (1)..(159): Ceres Seq. ID no. 13586920
  misc_feature (74)..(158): Pfam Name: Pfam Description:  SacI homology domain
  misc_feature (25)..(158): NCBI GI NO: 30693541 NR Description: transmembrane protein G5p (AtG5) -related
  misc_feature (26)..(158): NCBI GI NO: 15239234 NR Description: hypothetical protein [Arabidopsis thaliana]
  misc_feature (26)..(158): NCBI GI NO: 30840665 NR Description: SAC1-like protein AtSAC1b [Arabidopsis thaliana]
  misc_feature (26)..(158): NCBI GI NO: 10177117 NR Description: emb|CAB63010
  misc_feature (26)..(158): NCBI GI NO: 30693470 NR Description: expressed protein [Arabidopsis thaliana]
  misc_feature (26)..(158): NCBI GI NO: 11281506 NR Description: hypothetical protein F26O13
MANADADEAPLLSVEHLRPGSCSRELELREFRDRYVIRSLDGAAAFAVLRSGGSIRPLSPEEAVAESDCKVSRIYGVVGTIRLLAGSYVLVITSQKDAGSYLGSPVYQVNSMKFLCCNEAIKHLTPQERRDEAYFMSLLRIAETTCGLYYSYDRDLTLK

SEQ ID NO: 23018 - protein, 97 aa, Zea mays subsp. mays
  peptide (1)..(97): Ceres Seq. ID no. 13586921
GFTRFALESLPVRIQIQQSDLRPRPRTTRLAADGERRRRRSAAALCGTPPSRILQPRARAAGVPRPLRDPFARRRRRFRRPSLRRLHPPSLPRGSRS

SEQ ID NO: 23019 - DNA, 897 bp, Zea mays subsp. mays
  misc_feature (1)..(897): Ceres Seq. ID no. 14306264
acgcagtttctcgcgccatctgaagtcagctggggcgacgaagaaatgtcctctagcgatcaaaacccagctgccacacccgcgtcgtcgggccccgccgagccctcgccgccgggcaggccaacggcggtgtcctcgcgtgtcctcgacatgggcgcgcagctggcgcaggcgctgaagccggtgcggcagatgaagcagcacgcgtgcagcttcgcgctgtacgcccacgacttgcaccgccaggtggaggtccaccacttcgtcgcccggctcaaccaggacgtcctccagtgcgccgtctacgactccgacaagccctcggcccgcctcatcggcgtggagtacatcgtctccgacaccatcttcgagggcctggccccggacgagcagaggctgtggcactcgcacgcgtacgaggtgaaggccgggctgtggaccgacgtcggcgtgccggaggcgctgcagagctcggagatggcgagcctcgcaaggacgtacggcaagttctggtgcacctggcaggcggaccgcggcgacgcgctgcccctcggcgcgccggcgctcatggtgtcgccgcaggccgccgagcccggccgcgtgcgcggcgagctggtgcgcggccgtgacgagaggtacgggatcgacagctcggcaggggggctcaaggcggcgagggtggagatggacgagccggagtggatcaacccgaacgccgactactggcggctgcacggcaaggggttcgcggtagacgtcgtcccggccgagatgaagcgacacgcgcccttcccgtgagctgccggtcttcttgttgtgacacgtccgtaaggagcataaagatcgttcttgtatccagaggcgtattttgaagaagaagaaaaagagcttgtgttg

SEQ ID NO: 23020 - protein, 265 aa, Zea mays subsp. mays
  peptide (1)..(265): Ceres Seq. ID no. 14306265
  misc_feature (16)..(265): NCBI GI NO: 34910820 NR Description: P0456A01.15
  misc_feature (16)..(265): NCBI GI NO: 34909516 NR Description: P0481E12.28
  misc_feature (16)..(265): NCBI GI NO: 15242474 NR Description: expressed protein [Arabidopsis thaliana]
  misc_feature (28)..(265): NCBI GI NO: 15220516 NR Description: expressed protein [Arabidopsis thaliana]
  misc_feature (16)..(265): NCBI GI NO: 9758672 NR Description: gene_id:MRA19
  misc_feature (16)..(265): NCBI GI NO: 18415199 NR Description: expressed protein [Arabidopsis thaliana]
  misc_feature (16)..(265): NCBI GI NO: 21617913 NR Description: unknown [Arabidopsis thaliana]
  misc_feature (16)..(265): NCBI GI NO: 7452426 NR Description: hypothetical protein F13C5
  misc_feature (35)..(259): NCBI GI NO: 15220526 NR Description: expressed protein [Arabidopsis thaliana]
  misc_feature (29)..(259): NCBI GI NO: 30685146 NR Description: expressed protein [Arabidopsis thaliana]
TQFLAPSEVSWGDEEMSSSDQNPAATPASSGPAEPSPPGRPTAVSSRVLDMGAQLAQALKPVRQMKQHACSFALYAHDLHRQVEVHHFVARLNQDVLQCAVYDSDKPSARLIGVEYIVSDTIFEGLAPDEQRLWHSHAYEVKAGLWTDVGVPEALQSSEMASLARTYGKFWCTWQADRGDALPLGAPALMVSPQAAEPGRVRGELVRGRDERYGIDSSAGGLKAARVEMDEPEWINPNADYWRLHGKGFAVDVVPAEMKRHAPFP

SEQ ID NO: 23021 - protein, 250 aa, Zea mays subsp. mays
  peptide (1)..(250): Ceres Seq. ID no. 14306266
  misc_feature (1)..(250): NCBI GI NO: 34910820 NR Description: P0456A01.15
  misc_feature (1)..(250): NCBI GI NO: 34909516 NR Description: P0481E12.28
  misc_feature (1)..(250): NCBI GI NO: 15242474 NR Description: expressed protein [Arabidopsis thaliana]
  misc_feature (13)..(250): NCBI GI NO: 15220516 NR Description: expressed protein [Arabidopsis thaliana]
  misc_feature (1)..(250): NCBI GI NO: 9758672 NR Description: gene_id:MRA19
  misc_feature (1)..(250): NCBI GI NO: 18415199 NR Description: expressed protein [Arabidopsis thaliana]
  misc_feature (1)..(250): NCBI GI NO: 21617913 NR Description: unknown [Arabidopsis thaliana]
  misc_feature (1)..(250): NCBI GI NO: 7452426 NR Description: hypothetical protein F13C5
  misc_feature (20)..(244): NCBI GI NO: 15220526 NR Description: expressed protein [Arabidopsis thaliana]
  misc_feature (14)..(244): NCBI GI NO: 30685146 NR Description: expressed protein [Arabidopsis thaliana]
MSSSDQNPAATPASSGPAEPSPPGRPTAVSSRVLDMGAQLAQALKPVRQMKQHACSFALYAHDLHRQVEVHHFVARLNQDVLQCAVYDSDKPSARLIGVEYIVSDTIFEGLAPDEQRLWHSHAYEVKAGLWTDVGVPEALQSSEMASLARTYGKFWCTWQADRGDALPLGAPALMVSPQAAEPGRVRGELVRGRDERYGIDSSAGGLKAARVEMDEPEWINPNADYWRLHGKGFAVDVVPAEMKRHAPFP

SEQ ID NO: 23022 - protein, 215 aa, Zea mays subsp. mays
  peptide (1)..(215): Ceres Seq. ID no. 14306267
  misc_feature (1)..(215): NCBI GI NO: 34910820 NR Description: P0456A01.15
  misc_feature (1)..(215): NCBI GI NO: 34909516 NR Description: P0481E12.28
  misc_feature (1)..(215): NCBI GI NO: 15242474 NR Description: expressed protein [Arabidopsis thaliana]
  misc_feature (1)..(215): NCBI GI NO: 15220516 NR Description: expressed protein [Arabidopsis thaliana]
  misc_feature (1)..(215): NCBI GI NO: 9758672 NR Description: gene_id:MRA19
  misc_feature (1)..(215): NCBI GI NO: 18415199 NR Description: expressed protein [Arabidopsis thaliana]
  misc_feature (1)..(215): NCBI GI NO: 21617913 NR Description: unknown [Arabidopsis thaliana]
  misc_feature (1)..(215): NCBI GI NO: 7452426 NR Description: hypothetical protein F13C5
  misc_feature (1)..(209): NCBI GI NO: 15220526 NR Description: expressed protein [Arabidopsis thaliana]
  misc_feature (1)..(209): NCBI GI NO: 30685146 NR Description: expressed protein [Arabidopsis thaliana]
MGAQLAQALKPVRQMKQHACSFALYAHDLHRQVEVHHFVARLNQDVLQCAVYDSDKPSARLIGVEYIVSDTIFEGLAPDEQRLWHSHAYEVKAGLWTDVGVPEALQSSEMASLARTYGKFWCTWQADRGDALPLGAPALMVSPQAAEPGRVRGELVRGRDERYGIDSSAGGLKAARVEMDEPEWINPNADYWRLHGKGFAVDVVPAEMKRHAPFP

SEQ ID NO: 23023 - DNA, 889 bp, Zea mays subsp. mays
  misc_feature (1)..(889): Ceres Seq. ID no. 12589728
gtggtatttgactttcagtcgttttcttttgttttaaagtgttgtattatgttacaatgttctgtactgacttgccgttgccttacgctacatgttagttcatccatttttgagagatagctttttataatcccattttttgttttgcagcatgtcctgcagcatgggaaaccagaagagcgttctacaataattacacaactcgctggacagatagtgaaaatgagccagcagaaatttgcttctaatgttgttgaaaagtgtcttacttttggtaatcctgagcaacgtcagattctgatcactgaaatgcttggcacaactgatgagaatgagccgttacaggttcgttttcaacaattggactgagcatgctccttttaaaaaaaaacagtaccaggatttgctgctgcagggttgaatttcatacattctaagtttctaacaacacttgtaatgtgaacttatgttccccaggcaatgatgaaagaccagttcgcaaactatgtggtgcagaaggttctggagatatgtgatgaccagaaccgtgaattgattctttcccgtatcaaggtccacttgaatgcactgaaaagatacacctatgggaagcatatcgtggcacgtgttgagaagcttattgctgcaggagaacggcgcattggtgccccatcctcttgctgagatggcaataaagctatatacaggtcgcagaataacacctgtacagacagacagggatagcgaggcctagctttttaccattaccagtagtcggtaatattgagcgacggagaggttaaaaaaggctcccaaatcctttgatgtaaataaaggatagccgctggaaataaataaaaagaatgagaaaagatgaagagattttgct

SEQ ID NO: 23024 - protein, 67 aa, Zea mays subsp. mays
  peptide (1)..(67): Ceres Seq. ID no. 12589729
  misc_feature (1)..(66): NCBI GI NO: 26450884 NR Description: putative RNA binding protein
  misc_feature (1)..(65): NCBI GI NO: 15227038 NR Description: pumilio-family RNA-binding protein, putative
  misc_feature (1)..(66): NCBI GI NO: 22330960 NR Description: pumilio-family RNA-binding protein, putative
  misc_feature (1)..(65): NCBI GI NO: 15227052 NR Description: pumilio-family RNA-binding protein, putative
  misc_feature (1)..(57): NCBI GI NO: 6056191 NR Description: putative RNA binding protein
  misc_feature (1)..(66): NCBI GI NO: 34906006 NR Description: P0518C01.14
  misc_feature (1)..(65): NCBI GI NO: 15227051 NR Description: pumilio-family RNA-binding protein, putative
  misc_feature (1)..(65): NCBI GI NO: 20465637 NR Description: putative pumilio/Mpt5 family RNA-binding protein
  misc_feature (1)..(62): NCBI GI NO: 34908236 NR Description: putative pumilio/Mpt5 family RNA-binding protein
  misc_feature (1)..(52): NCBI GI NO: 15489333 NR Description: Unknown (protein for IMAGE:3595161) [Mus musculus]
MMKDQFANYVVQKVLEICDDQNRELILSRIKVHLNALKRYTYGKHIVARVEKLIAAGERRIGAPSSC

SEQ ID NO: 23025 - protein, 66 aa, Zea mays subsp. mays
  peptide (1)..(66): Ceres Seq. ID no. 12589730
  misc_feature (1)..(65): NCBI GI NO: 26450884 NR Description: putative RNA binding protein
  misc_feature (1)..(64): NCBI GI NO: 15227038 NR Description: pumilio-family RNA-binding protein, putative
  misc_feature (1)..(65): NCBI GI NO: 22330960 NR Description: pumilio-family RNA-binding protein, putative
  misc_feature (1)..(64): NCBI GI NO: 15227052 NR Description: pumilio-family RNA-binding protein, putative
  misc_feature (1)..(56): NCBI GI NO: 6056191 NR Description: putative RNA binding protein
  misc_feature (1)..(65): NCBI GI NO: 34906006 NR Description: P0518C01.14
  misc_feature (1)..(64): NCBI GI NO: 15227051 NR Description: pumilio-family RNA-binding protein, putative
  misc_feature (1)..(64): NCBI GI NO: 20465637 NR Description: putative pumilio/Mpt5 family RNA-binding protein
  misc_feature (1)..(61): NCBI GI NO: 34908236 NR Description: putative pumilio/Mpt5 family RNA-binding protein
  misc_feature (1)..(51): NCBI GI NO: 15489333 NR Description: Unknown (protein for IMAGE:3595161) [Mus musculus]
MKDQFANYVVQKVLEICDDQNRELILSRIKVHLNALKRYTYGKHIVARVEKLIAAGERRIGAPSSC

SEQ ID NO: 23026 - protein, 49 aa, Zea mays subsp. mays
  peptide (1)..(49): Ceres Seq. ID no. 12589731
MGSISWHVLRSLLLQENGALVPHPLAEMAIKLYTGRRITPVQTDRDSEA

SEQ ID NO: 23027 - DNA, 878 bp, Zea mays subsp. mays
  misc_feature (1)..(878): Ceres Seq. ID no. 14312702
aaattaaaccgccggcgcctccacttcgcgttctcgcctcatctcctcccgctcaggatccgccggcgaaggtaaggcaagatgtacaccgcgaggaagaagatccagaaggataagggccttgagccctctgagttcgaggactctgtcgcccaggctttcttcgacctggagaacggtaaccaggagctcaagagcgacctcaaggacctttacatcaacggtgctatccagctggatgttgccgggagcaggaaggctgttgtgatccacgtcccataccgcttgcgcaaggccttcaggaagatccatgtcaggatcgtcagggagctggagaagaaattcagcggcaaggatgtggtaattgttgccacaaggaggatcgtgcggccgcccaagaagggttcagctgttcagcgccctcgctccaggactctgactgctgtccacgatggcatcttggaggatgttgtcttcccagctgagattgtggggaagcgagtcaggtaccgtctggatggtgccaagatcatcaaggtaacctacatgtcttattgaggaactgaaagatgccacatgatcttcttggacccaaaggagaggaacaacaccgaatacaagctggacacctacactacggtctaccgcaggctgtgtgggaaagatgtggtctttgagtaccctatgaccgaaaatgcataaatatgacgccccggatatccccatttcatttcgttgaatctgggtgtttctttggggtctcaactagactgctccgtatgtacttcaaaaaccatagttttgatgccaaagttgcctaggaatttggtactcgggaattggcagcggacgtgaacaatgttaagttttgagcattt

SEQ ID NO: 23028 - protein, 158 aa, Zea mays subsp. mays
  peptide (1)..(158): Ceres Seq. ID no. 14312703
  misc_feature (4)..(158): Pfam Name: Pfam Description:  Ribosomal protein S7e
  misc_feature (1)..(158): NCBI GI NO: 4588906 NR Description: ribosomal protein S7 [Secale cereale]
  misc_feature (1)..(158): NCBI GI NO: 22671664 NR Description: ribosomal protein S7
  misc_feature (1)..(158): NCBI GI NO: 14787424 NR Description: Ribosomal protein S7
  misc_feature (1)..(158): NCBI GI NO: 20139964 NR Description: 40S ribosomal protein S7
  misc_feature (1)..(158): NCBI GI NO: 20139962 NR Description: 40S ribosomal protein S7
  misc_feature (1)..(158): NCBI GI NO: 15221972 NR Description: 40S ribosomal protein S7 (RPS7A)
  misc_feature (1)..(158): NCBI GI NO: 15232926 NR Description: 40S ribosomal protein S7 (RPS7B)
  misc_feature (1)..(158): NCBI GI NO: 15237278 NR Description: 40S ribosomal protein S7 (RPS7C)
  misc_feature (1)..(158): NCBI GI NO: 21592413 NR Description: 40S ribosomal protein S7-like
  misc_feature (1)..(158): NCBI GI NO: 22758886 NR Description: ribosomal protein S7 [Argopecten irradians]
MYTARKKIQKDKGLEPSEFEDSVAQAFFDLENGNQELKSDLKDLYINGAIQLDVAGSRKAVVIHVPYRLRKAFRKIHVRIVRELEKKFSGKDVVIVATRRIVRPPKKGSAVQRPRSRTLTAVHDGILEDVVFPAEIVGKRVRYRLDGAKIIKVTYMSY

SEQ ID NO: 23029 - DNA, 1040 bp, Zea mays subsp. mays
  misc_feature (1)..(1040): Ceres Seq. ID no. 15224625
aagttccatcccatcccgccacgaaattctccacgctccgatccaatcgcaacaatgaagttcggcaagagcctcaacaaccagatcgtggagacgctcccggactggcgcgacaagttcctgtcctacaaggacctcaagaagcggctgaagcagatcggcgccggctctggcgagcggcggagcaagcgccagcgggtgagggacgggcgcggcggatcctcgccgcctgcgatgaccccggaggaggccggattcgtcgcgctcctcgacgccgagctcgacaagttcaacgccttcttcctcgagaaggaggaggactacgtcatccggctgaaggagttgcaggacagggtggtgagcgccgcggaggtggggtcggcggaggagctgctgcgggtgcgcaaggagatcgtcgacttccacggcgagatggtcttgctggagaactacagcgcgctcaactacaccgggctggtcaagatcctcaagaagtacgacaagaggaccggcgcgctgatccgcctgcccttcatccggaacgtgatgcaggagccgttctgcgccaccgacgtgctgtacaagctcgtcaaggggtgcgaggagatgctggaccagctcctcctgccccggaaccagcagcggcccgtgccgagcgacaacggcggggaaggagacagcgacggcgacgacgacaagcaacgaccggcggagccaggcgcctcatcgctgcccagcggcggcggcggtggcgctggcgacatggagctggaggagatcgaggacatggagagcatgtacatgaagagtacggtggccgcgctcagggcgctcagggagatcaggagcgggagctccacggtgagcgcgttctccctgccgccactacggtgattgacacgttgtgttcggttcagtagcgaagcgagacagaacggggccgactgcgctgttgctgtaggtagtgtttggttcaaagaagacacgaacaaaatgaaagaaaatctgtaaaatgatagtaatattcatctagtattccc

SEQ ID NO: 23030 - protein, 305 aa, Zea mays subsp. mays
  peptide (1)..(305): Ceres Seq. ID no. 15224626
  misc_feature (20)..(279): NCBI GI NO: 23018055 NR Description: COG1205: Distinct helicase family with a unique C-terminal domain including a metal-binding cysteine cluster
VPSHPATKFSTLRSNRNNEVRQEPQQPDRGDAPGLARQVPVLQGPQEAAEADRRRLWRAAEQAPAGEGRARRILAACDDPGGGRIRRAPRRRARQVQRLLPREGGGLRHPAEGVAGQGGERRGGGVGGGAAAGAQGDRRLPRRDGLAGELQRAQLHRAGQDPQEVRQEDRRADPPALHPERDAGAVLRHRRAVQARQGVRGDAGPAPPAPEPAAARAERQRRGRRQRRRRRQATTGGARRLIAAQRRRRWRWRHGAGGDRGHGEHVHEEYGGRAQGAQGDQERELHGERVLPAATTVIDTLCSVQ

SEQ ID NO: 23031 - protein, 297 aa, Zea mays subsp. mays
  peptide (1)..(297): Ceres Seq. ID no. 15224627
  misc_feature (19)..(183): Pfam Name: Pfam Description:  SPX domain
  misc_feature (19)..(213): NCBI GI NO: 15241275 NR Description: ids4-related protein [Arabidopsis thaliana]
  misc_feature (256)..(297): NCBI GI NO: 15241275 NR Description: ids4-related protein [Arabidopsis thaliana]
  misc_feature (19)..(213): NCBI GI NO: 21592813 NR Description: ids4-like protein [Arabidopsis thaliana]
  misc_feature (256)..(297): NCBI GI NO: 21592813 NR Description: ids4-like protein [Arabidopsis thaliana]
  misc_feature (19)..(296): NCBI GI NO: 15225770 NR Description: expressed protein [Arabidopsis thaliana]
  misc_feature (74)..(205): NCBI GI NO: 31415907 NR Description: putative SPX domain containing protein
  misc_feature (19)..(55): NCBI GI NO: 31415907 NR Description: putative SPX domain containing protein
  misc_feature (264)..(296): NCBI GI NO: 31415907 NR Description: putative SPX domain containing protein
  misc_feature (19)..(207): NCBI GI NO: 37533962 NR Description: hypothetical protein
  misc_feature (250)..(296): NCBI GI NO: 37533962 NR Description: hypothetical protein
KFHPIPPRNSPRSDPIATMKFGKSLNNQIVETLPDWRDKFLSYKDLKKRLKQIGAGSGERRSKRQRVRDGRGGSSPPAMTPEEAGFVALLDAELDKFNAFFLEKEEDYVIRLKELQDRVVSAAEVGSAEELLRVRKEIVDFHGEMVLLENYSALNYTGLVKILKKYDKRTGALIRLPFIRNVMQEPFCATDVLYKLVKGCEEMLDQLLLPRNQQRPVPSDNGGEGDSDGDDDKQRPAEPGASSLPSGGGGGAGDMELEEIEDMESMYMKSTVAALRALREIRSGSSTVSAFSLPPLR

SEQ ID NO: 23032 - protein, 279 aa, Zea mays subsp. mays
  peptide (1)..(279): Ceres Seq. ID no. 15224628
  misc_feature (1)..(165): Pfam Name: Pfam Description:  SPX domain
  misc_feature (1)..(195): NCBI GI NO: 15241275 NR Description: ids4-related protein [Arabidopsis thaliana]
  misc_feature (238)..(279): NCBI GI NO: 15241275 NR Description: ids4-related protein [Arabidopsis thaliana]
  misc_feature (1)..(195): NCBI GI NO: 21592813 NR Description: ids4-like protein [Arabidopsis thaliana]
  misc_feature (238)..(279): NCBI GI NO: 21592813 NR Description: ids4-like protein [Arabidopsis thaliana]
  misc_feature (1)..(278): NCBI GI NO: 15225770 NR Description: expressed protein [Arabidopsis thaliana]
  misc_feature (56)..(187): NCBI GI NO: 31415907 NR Description: putative SPX domain containing protein
  misc_feature (1)..(37): NCBI GI NO: 31415907 NR Description: putative SPX domain containing protein
  misc_feature (246)..(278): NCBI GI NO: 31415907 NR Description: putative SPX domain containing protein
  misc_feature (1)..(189): NCBI GI NO: 37533962 NR Description: hypothetical protein
  misc_feature (232)..(278): NCBI GI NO: 37533962 NR Description: hypothetical protein
MKFGKSLNNQIVETLPDWRDKFLSYKDLKKRLKQIGAGSGERRSKRQRVRDGRGGSSPPAMTPEEAGFVALLDAELDKFNAFFLEKEEDYVIRLKELQDRVVSAAEVGSAEELLRVRKEIVDFHGEMVLLENYSALNYTGLVKILKKYDKRTGALIRLPFIRNVMQEPFCATDVLYKLVKGCEEMLDQLLLPRNQQRPVPSDNGGEGDSDGDDDKQRPAEPGASSLPSGGGGGAGDMELEEIEDMESMYMKSTVAALRALREIRSGSSTVSAFSLPPLR

SEQ ID NO: 23033 - DNA, 1035 bp, Zea mays subsp. mays
  misc_feature (1)..(1035): Ceres Seq. ID no. 13586862
acatcctaatcgaaaaagaggaacccaaaccacctcggccggtcggcccacgggccacgacccaaaaaaggatcaaggtgggagaaacaaaacacaaggcggcgtccacagcttccccactccacgttccgtgtttccgactccggtgactccaccaccagcaacccgtgcagcgagcgcactccgaccatcgccatgtcgaggcgcggcgactgggtctacgagaacaacggcgggacctgcgtggccatcgccggcgctgattactgtgtcgtcgctgcggacacccgcctctctgtaggatacagtatcctcacgcgtgatcactccaagatctgcgacctggctgacaaatgtgtactggcatcttctggctttcaaggtgatattaaggctctgcagaagaacctagctgccagagaattgctgtaccaacaccagcataataaaaggatgagctgccccgccatggcacagctcctctccaataccctgtactacaagcgattcttcccatattacgccttcaatgtgctcggtgggcttgacagcgaggggaaaggatgcgttttcacctatgatgcagtaggttcctatgagagaaccggttacagtgctcagggaacgggatctactttgatcatgccagtcctggacaatcaactaaaatcaccaagtcctctattactccctgtcagggatgctgtcacaccattgtcggagtcagaggccatcgatctagttaaggacgtgttcgcatctgcaactgagagagacatctacactggagacaagttggaaattgtagtcattaacaaggccggtactatgcgcgagtatatcgacctgagaaaggattaagccaacacttcagttgtgctgcagctgtcatttgctttgaactttttttcctagtctggtgatttatgtctaaagctgttgcttcataggaacacttgtgtttacttgcatatgtaatgtacggtatgtaccaggattcagtgagttttttttctgttgaaacaaattgcttgg

SEQ ID NO: 23034 - protein, 221 aa, Zea mays subsp. mays
  peptide (1)..(221): Ceres Seq. ID no. 13586863
  misc_feature (10)..(206): Pfam Name: Pfam Description:  Proteasome A-type and B-type
  misc_feature (1)..(221): NCBI GI NO: 17380182 NR Description: Proteasome subunit beta type 1
  misc_feature (3)..(221): NCBI GI NO: 17380185 NR Description: Proteasome subunit beta type 1
  misc_feature (1)..(221): NCBI GI NO: 600387 NR Description: proteosome subunit [Arabidopsis thaliana]
  misc_feature (3)..(221): NCBI GI NO: 15232965 NR Description: 20S proteasome beta subunit F1 (PBF1)
  misc_feature (9)..(198): NCBI GI NO: 14594933 NR Description: putative beta6 proteasome subunit
  misc_feature (9)..(221): NCBI GI NO: 28829610 NR Description: similar to Petunia hybrida (Petunia)
  misc_feature (9)..(221): NCBI GI NO: 17380206 NR Description: Proteasome subunit beta type 1-B
  misc_feature (9)..(221): NCBI GI NO: 17380207 NR Description: Proteasome subunit beta type 1-A
  misc_feature (9)..(221): NCBI GI NO: 4506193 NR Description: proteasome beta 1 subunit
  misc_feature (9)..(221): NCBI GI NO: 12653473 NR Description: proteasome
MSRRGDWVYENNGGTCVAIAGADYCVVAADTRLSVGYSILTRDHSKICDLADKCVLASSGFQGDIKALQKNLAARELLYQHQHNKRMSCPAMAQLLSNTLYYKRFFPYYAFNVLGGLDSEGKGCVFTYDAVGSYERTGYSAQGTGSTLIMPVLDNQLKSPSPLLLPVRDAVTPLSESEAIDLVKDVFASATERDIYTGDKLEIVVINKAGTMREYIDLRKD

SEQ ID NO: 23035 - protein, 135 aa, Zea mays subsp. mays
  peptide (1)..(135): Ceres Seq. ID no. 13586864
  misc_feature (1)..(120): Pfam Name: Pfam Description:  Proteasome A-type and B-type
  misc_feature (1)..(135): NCBI GI NO: 17380182 NR Description: Proteasome subunit beta type 1
  misc_feature (1)..(135): NCBI GI NO: 17380185 NR Description: Proteasome subunit beta type 1
  misc_feature (1)..(135): NCBI GI NO: 600387 NR Description: proteosome subunit [Arabidopsis thaliana]
  misc_feature (1)..(135): NCBI GI NO: 15232965 NR Description: 20S proteasome beta subunit F1 (PBF1)
  misc_feature (1)..(112): NCBI GI NO: 14594933 NR Description: putative beta6 proteasome subunit
  misc_feature (1)..(135): NCBI GI NO: 28829610 NR Description: similar to Petunia hybrida (Petunia)
  misc_feature (1)..(135): NCBI GI NO: 17380206 NR Description: Proteasome subunit beta type 1-B
  misc_feature (1)..(135): NCBI GI NO: 17380207 NR Description: Proteasome subunit beta type 1-A
  misc_feature (1)..(135): NCBI GI NO: 4506193 NR Description: proteasome beta 1 subunit
  misc_feature (1)..(135): NCBI GI NO: 12653473 NR Description: proteasome
MSCPAMAQLLSNTLYYKRFFPYYAFNVLGGLDSEGKGCVFTYDAVGSYERTGYSAQGTGSTLIMPVLDNQLKSPSPLLLPVRDAVTPLSESEAIDLVKDVFASATERDIYTGDKLEIVVINKAGTMREYIDLRKD

SEQ ID NO: 23036 - protein, 130 aa, Zea mays subsp. mays
  peptide (1)..(130): Ceres Seq. ID no. 13586865
  misc_feature (1)..(115): Pfam Name: Pfam Description:  Proteasome A-type and B-type
  misc_feature (1)..(130): NCBI GI NO: 17380182 NR Description: Proteasome subunit beta type 1
  misc_feature (1)..(130): NCBI GI NO: 17380185 NR Description: Proteasome subunit beta type 1
  misc_feature (1)..(130): NCBI GI NO: 600387 NR Description: proteosome subunit [Arabidopsis thaliana]
  misc_feature (1)..(130): NCBI GI NO: 15232965 NR Description: 20S proteasome beta subunit F1 (PBF1)
  misc_feature (1)..(107): NCBI GI NO: 14594933 NR Description: putative beta6 proteasome subunit
  misc_feature (1)..(130): NCBI GI NO: 28829610 NR Description: similar to Petunia hybrida (Petunia)
  misc_feature (1)..(130): NCBI GI NO: 17380206 NR Description: Proteasome subunit beta type 1-B
  misc_feature (1)..(130): NCBI GI NO: 17380207 NR Description: Proteasome subunit beta type 1-A
  misc_feature (1)..(130): NCBI GI NO: 4506193 NR Description: proteasome beta 1 subunit
  misc_feature (1)..(130): NCBI GI NO: 12653473 NR Description: proteasome
MAQLLSNTLYYKRFFPYYAFNVLGGLDSEGKGCVFTYDAVGSYERTGYSAQGTGSTLIMPVLDNQLKSPSPLLLPVRDAVTPLSESEAIDLVKDVFASATERDIYTGDKLEIVVINKAGTMREYIDLRKD

SEQ ID NO: 23037 - DNA, 1394 bp, Zea mays subsp. mays
  misc_feature (1)..(1394): Ceres Seq. ID no. 13494608
aatcgaaaagatttgttttgatttctgagccttctcttgtgtcgttctgtgttgggttgcggacgcgtcctcaactaggtttttcttccatcatttgtgtgttcgttcaactgagccgccatgcgccagccacggtccgggccggggaagaggcggggccgcggtccgcgcatccctgcggcgacgcttcagaagcagaaaacggcgttggcgaacgtcgaccagatcaccggcgccaagattccgaagagcttcgtattctcccgcggtaaactcccctccacgcttcgccatcttcagcaggacctccgcaaggtcatgctcccctacactgctctcaatctcaaggagaagaaacgaaataacctcaaggattttgtcaatgttgccggcccgatgggtgtgacacatttcttaatcctctcaaaccctcaaagcctgccacatttgcgctttgccaaatcaccgcagggcccaacattcacatttcagatagaggagtactcacttgcggcggacattgcaaactctcagaagcgcccaaggtgcccaccagggatattcaaaaactcaccactggttgtacttggtgggttgacaggtctcggcaaccctttcaggagtttggtcgaatacttccaacatatgttcccttccgttgacccaaccactgtcaagctggcaacatgccaaaggattctgttgttaaaacatgataaagagaaggatgttattgaattccggcattactccatcaagctccagcctgttggggtcagtcgcaggattagaaagctcatgcaaaacaatcaagtgcctgatctaggagaatttgaagatgttagtgagtttgtgaaaaaagctgggtatggatcagaaagtgaagcagacgatgaagcagcaatggtaagcttgccaagtgacattgacaaattaaaccgggcatccagaaaaagcgctgtcagactccaggagattggaccaaggatgactatgcgcctagttaaagttgaagctgggctatgttcaggagatgtcttatacccatggcctgtggaaaaggaagtggtgggaaagaaaggaacagaaactggggaagtagaagggcaagaagacgattctgaggccacagatgagtccgaggatgagatggtgtaggatttcagatgttttggacaggcagacgcaggtgttttgacagtcctggatgtttcatgctgaaaccaacgggccctgtgcccaataacgtggtgcattcatgccaattttgtcactgaaggtgcattgcattcgttgtaacgaagtgtaacattgttttgccgatggttacctcttttgtgttatgacaagtttggaggatagtttttggttcgcagtctaagatttctcattct

SEQ ID NO: 23038 - protein, 345 aa, Zea mays subsp. mays
  peptide (1)..(345): Ceres Seq. ID no. 13494609
  misc_feature (32)..(345): NCBI GI NO: 30697571 NR Description: Peter Pan - like protein [Arabidopsis thaliana]
  misc_feature (32)..(345): NCBI GI NO: 30697573 NR Description: Peter Pan - like protein [Arabidopsis thaliana]
  misc_feature (24)..(308): NCBI GI NO: 28422433 NR Description: Similar to peter pan homolog (Drosophila)
  misc_feature (24)..(314): NCBI GI NO: 39794499 NR Description: Unknown (protein for MGC:76273)
  misc_feature (24)..(308): NCBI GI NO: 28277332 NR Description: Similar to peter pan homolog (Drosophila)
  misc_feature (24)..(308): NCBI GI NO: 21704228 NR Description: peter pan
  misc_feature (24)..(308): NCBI GI NO: 26332985 NR Description: unnamed protein product [Mus musculus]
  misc_feature (24)..(314): NCBI GI NO: 28278954 NR Description: Unknown (protein for MGC:55956) [Danio rerio]
  misc_feature (24)..(308): NCBI GI NO: 9910566 NR Description: peter pan homolog; second-step splicing factor 1
  misc_feature (24)..(308): NCBI GI NO: 11877243 NR Description: SSF1/P2Y11 chimeric protein [Homo sapiens]
MRQPRSGPGKRRGRGPRIPAATLQKQKTALANVDQITGAKIPKSFVFSRGKLPSTLRHLQQDLRKVMLPYTALNLKEKKRNNLKDFVNVAGPMGVTHFLILSNPQSLPHLRFAKSPQGPTFTFQIEEYSLAADIANSQKRPRCPPGIFKNSPLVVLGGLTGLGNPFRSLVEYFQHMFPSVDPTTVKLATCQRILLLKHDKEKDVIEFRHYSIKLQPVGVSRRIRKLMQNNQVPDLGEFEDVSEFVKKAGYGSESEADDEAAMVSLPSDIDKLNRASRKSAVRLQEIGPRMTMRLVKVEAGLCSGDVLYPWPVEKEVVGKKGTETGEVEGQEDDSEATDESEDEMV

SEQ ID NO: 23039 - protein, 279 aa, Zea mays subsp. mays
  peptide (1)..(279): Ceres Seq. ID no. 13494610
  misc_feature (1)..(279): NCBI GI NO: 30697571 NR Description: Peter Pan - like protein [Arabidopsis thaliana]
  misc_feature (1)..(279): NCBI GI NO: 30697573 NR Description: Peter Pan - like protein [Arabidopsis thaliana]
  misc_feature (1)..(242): NCBI GI NO: 28422433 NR Description: Similar to peter pan homolog (Drosophila)
  misc_feature (1)..(248): NCBI GI NO: 39794499 NR Description: Unknown (protein for MGC:76273)
  misc_feature (1)..(242): NCBI GI NO: 28277332 NR Description: Similar to peter pan homolog (Drosophila)
  misc_feature (1)..(242): NCBI GI NO: 21704228 NR Description: peter pan
  misc_feature (1)..(242): NCBI GI NO: 26332985 NR Description: unnamed protein product [Mus musculus]
  misc_feature (1)..(248): NCBI GI NO: 28278954 NR Description: Unknown (protein for MGC:55956) [Danio rerio]
  misc_feature (1)..(242): NCBI GI NO: 9910566 NR Description: peter pan homolog; second-step splicing factor 1
  misc_feature (1)..(242): NCBI GI NO: 11877243 NR Description: SSF1/P2Y11 chimeric protein [Homo sapiens]
MLPYTALNLKEKKRNNLKDFVNVAGPMGVTHFLILSNPQSLPHLRFAKSPQGPTFTFQIEEYSLAADIANSQKRPRCPPGIFKNSPLVVLGGLTGLGNPFRSLVEYFQHMFPSVDPTTVKLATCQRILLLKHDKEKDVIEFRHYSIKLQPVGVSRRIRKLMQNNQVPDLGEFEDVSEFVKKAGYGSESEADDEAAMVSLPSDIDKLNRASRKSAVRLQEIGPRMTMRLVKVEAGLCSGDVLYPWPVEKEVVGKKGTETGEVEGQEDDSEATDESEDEMV

SEQ ID NO: 23040 - protein, 253 aa, Zea mays subsp. mays
  peptide (1)..(253): Ceres Seq. ID no. 13494611
  misc_feature (1)..(253): NCBI GI NO: 30697571 NR Description: Peter Pan - like protein [Arabidopsis thaliana]
  misc_feature (1)..(253): NCBI GI NO: 30697573 NR Description: Peter Pan - like protein [Arabidopsis thaliana]
  misc_feature (1)..(216): NCBI GI NO: 28422433 NR Description: Similar to peter pan homolog (Drosophila)
  misc_feature (1)..(222): NCBI GI NO: 39794499 NR Description: Unknown (protein for MGC:76273)
  misc_feature (1)..(216): NCBI GI NO: 28277332 NR Description: Similar to peter pan homolog (Drosophila)
  misc_feature (1)..(216): NCBI GI NO: 21704228 NR Description: peter pan
  misc_feature (1)..(216): NCBI GI NO: 26332985 NR Description: unnamed protein product [Mus musculus]
  misc_feature (1)..(222): NCBI GI NO: 28278954 NR Description: Unknown (protein for MGC:55956) [Danio rerio]
  misc_feature (1)..(216): NCBI GI NO: 9910566 NR Description: peter pan homolog; second-step splicing factor 1
  misc_feature (1)..(216): NCBI GI NO: 11877243 NR Description: SSF1/P2Y11 chimeric protein [Homo sapiens]
MGVTHFLILSNPQSLPHLRFAKSPQGPTFTFQIEEYSLAADIANSQKRPRCPPGIFKNSPLVVLGGLTGLGNPFRSLVEYFQHMFPSVDPTTVKLATCQRILLLKHDKEKDVIEFRHYSIKLQPVGVSRRIRKLMQNNQVPDLGEFEDVSEFVKKAGYGSESEADDEAAMVSLPSDIDKLNRASRKSAVRLQEIGPRMTMRLVKVEAGLCSGDVLYPWPVEKEVVGKKGTETGEVEGQEDDSEATDESEDEMV

SEQ ID NO: 23041 - DNA, 893 bp, Zea mays subsp. mays
  misc_feature (1)..(893): Ceres Seq. ID no. 14306309
aaccatcaggacgcggacgcggacgcggacgcggctcacatcaaacacccccttcagctgtgctcagtgctcactgccgcaaaaccacagccacacagggaagcgcccagcgccctttcacatcaccacatccacgctcctccgttccatggccatgtcgagcagcgccagcaagaagcaagcccaggcccaggcccaggcccagaaggccgggcggaggcccccggcggtgtcgtcggccgcggccgcggacgcggagatgcagagggtgttctcgcgcatcgacgcggacggcgacgggcggatctcgccgtcggagctggcggcggtgtcgcgcgccatctccccgccggcgagctcctcgcacgggcggcgcgaggtggcggccatgatggaggagctggacacggaccgcgacggcttcgtggacctgggcgagttcagggcgttccacgcgcgcggcggcggcgttggcggcgacgacgacgacgacgcggagctccgcgccgccttcgccgtgtacgacgccgacggcgacgggcgcatcacggcggccgagctgggcagcgtgctcgcccgcattggcgaggggtgcagcgccgaggagtgccgccggatgatcgccggcgtcgacgccgacggcgacggctgcgtcgggttcgaggagttcaagatgatgatgcgcagcccccagccccagccccaggccggcgccggagtgactgccgtgccggacaaggccaaggaggagtgacgggtgtaggtgtaggtgtactcaccagggcatcagtctgggggaagggatcgagttcctctgcctcttctgttgctttcacctcctctggagaggcatgaaaatactcaacttgctgcataagactacttattactgt

SEQ ID NO: 23042 - protein, 284 aa, Zea mays subsp. mays
  peptide (1)..(284): Ceres Seq. ID no. 14306310
  misc_feature (152)..(226): Pfam Name: Pfam Description:  TT viral orf 1
  misc_feature (76)..(252): NCBI GI NO: 37533274 NR Description: hypothetical protein
  misc_feature (123)..(275): NCBI GI NO: 37531392 NR Description: hypothetical protein
NHQDADADADAAHIKHPLQLCSVLTAAKPQPHREAPSALSHHHIHAPPFHGHVEQRQQEASPGPGPGPEGRAEAPGGVVGRGRGRGDAEGVLAHRRGRRRADLAVGAGGGVARHLPAGELLARAARGGGHDGGAGHGPRRLRGPGRVQGVPRARRRRWRRRRRRRGAPRRLRRVRRRRRRAHHGGRAGQRARPHWRGVQRRGVPPDDRRRRRRRRRLRRVRGVQDDDAQPPAPAPGRRRSDCRAGQGQGGVTGVGVGVLTRASVWGKGSSSSASSVAFTSSGEA

SEQ ID NO: 23043 - protein, 250 aa, Zea mays subsp. mays
  peptide (1)..(250): Ceres Seq. ID no. 14306311
  misc_feature (126)..(154): Pfam Name: Pfam Description:  EF hand
  misc_feature (26)..(250): NCBI GI NO: 34895640 NR Description: OSJNBa0083M16.33
  misc_feature (77)..(227): NCBI GI NO: 15240340 NR Description: calmodulin-related protein 2, touch-induced (TCH2)
  misc_feature (55)..(227): NCBI GI NO: 19386815 NR Description: B1147A04.10
  misc_feature (86)..(227): NCBI GI NO: 14589311 NR Description: calcium binding protein [Sesbania rostrata]
  misc_feature (86)..(227): NCBI GI NO: 21618074 NR Description: calmodulin-related protein [Arabidopsis thaliana]
  misc_feature (86)..(227): NCBI GI NO: 6901654 NR Description: calcium-binding protein [Olea europaea]
  misc_feature (86)..(227): NCBI GI NO: 18408502 NR Description: calmodulin-related protein, putative
  misc_feature (86)..(227): NCBI GI NO: 14423648 NR Description: Calcium-binding allergen Ole e 8 (PCA18/PCA23)
  misc_feature (65)..(229): NCBI GI NO: 15221030 NR Description: calcium-binding protein, putative
  misc_feature (89)..(227): NCBI GI NO: 13397927 NR Description: putative calmodulin-related protein
TIRTRTRTRTRLTSNTPFSCAQCSLPQNHSHTGKRPAPFHITTSTLLRSMAMSSSASKKQAQAQAQAQKAGRRPPAVSSAAAADAEMQRVFSRIDADGDGRISPSELAAVSRAISPPASSSHGRREVAAMMEELDTDRDGFVDLGEFRAFHARGGGVGGDDDDDAELRAAFAVYDADGDGRITAAELGSVLARIGEGCSAEECRRMIAGVDADGDGCVGFEEFKMMMRSPQPQPQAGAGVTAVPDKAKEE

SEQ ID NO: 23044 - protein, 201 aa, Zea mays subsp. mays
  peptide (1)..(201): Ceres Seq. ID no. 14306312
  misc_feature (77)..(105): Pfam Name: Pfam Description:  EF hand
  misc_feature (1)..(201): NCBI GI NO: 34895640 NR Description: OSJNBa0083M16.33
  misc_feature (28)..(178): NCBI GI NO: 15240340 NR Description: calmodulin-related protein 2, touch-induced (TCH2)
  misc_feature (6)..(178): NCBI GI NO: 19386815 NR Description: B1147A04.10
  misc_feature (37)..(178): NCBI GI NO: 14589311 NR Description: calcium binding protein [Sesbania rostrata]
  misc_feature (37)..(178): NCBI GI NO: 21618074 NR Description: calmodulin-related protein [Arabidopsis thaliana]
  misc_feature (37)..(178): NCBI GI NO: 6901654 NR Description: calcium-binding protein [Olea europaea]
  misc_feature (37)..(178): NCBI GI NO: 18408502 NR Description: calmodulin-related protein, putative
  misc_feature (37)..(178): NCBI GI NO: 14423648 NR Description: Calcium-binding allergen Ole e 8 (PCA18/PCA23)
  misc_feature (16)..(180): NCBI GI NO: 15221030 NR Description: calcium-binding protein, putative
  misc_feature (40)..(178): NCBI GI NO: 13397927 NR Description: putative calmodulin-related protein
MAMSSSASKKQAQAQAQAQKAGRRPPAVSSAAAADAEMQRVFSRIDADGDGRISPSELAAVSRAISPPASSSHGRREVAAMMEELDTDRDGFVDLGEFRAFHARGGGVGGDDDDDAELRAAFAVYDADGDGRITAAELGSVLARIGEGCSAEECRRMIAGVDADGDGCVGFEEFKMMMRSPQPQPQAGAGVTAVPDKAKEE

SEQ ID NO: 23045 - DNA, 1411 bp, Zea mays subsp. mays
  misc_feature (1)..(1411): Ceres Seq. ID no. 14301978
ataaaaatgcctctgccttgcgtctctctcttcttcctccccaccccacgaggcgctagctgcggcacggaaccagcgccattagaggccacaagcccgcaccacgcctccctcgttctcgcgcgcgcgcacgcatgcacgaggagctgctgcagagaagaggaggcctgtcgatttgattgaactttccaaattcagattcagaagctggccaagatgactgccggtttccagctcggcgtgatcgggtctctcacgctctccgtcgcgtcgtcggttgccattgtcatctgcaacaaagccctcatcagcaccctaggctttccattcgctacgactctgacaagctggcacctgatggtgaccttctgcaccctccacgtggcgcagcgcctgcgctttttcgagcccaaggcgatcgacgggcagacggtagttctgtttggcttgctcaacgggacctcgattggccttctgaaccttagtttagggttcaactccatcggattctaccagatgacgaagttggccataatacccttcacggtgctgttggagactatattcctgaagaaaagattcagtgagacgatcaagttttctctgctggtcttgctgctcggagttggcatcgcctcagttacggacctcaagttaaactgcctcgggtccgttctttccggcctcgccatcgccaccacttgtgtcggccaaattctcacgaatacgatacagaggaagctgaaggtctcgtcaacgcagctcctgtaccagtcagcgccttaccaagcagccattctgttcgccactggccccttcgtggaccatctcctcaccggccgcagcgtcttcgcccatagatacactttcccggttgtgggcttcatcgtcctgtcgtgcttgatcgcggtgtcggtgaacttcagcacgttcctggtgatcgggacgacgtcgccggtgacgtaccaggtgctgggccacctcaagacgtgcctggtgctgtcgttcgggtacacgctgctgcacgatcctttcaccgtgcggaacatcctgggcatcctcgtcgccatcttcgggatggcgctctactccatcttctcggtgcgtgagggcaagaagaagtccgcaggcgacgccctcccggtgtcacagatgcctgacaaggagacggagccgctgttggcgaccaaggacaacagcgacaccaaaaaggcgaacggggttgctcacgactgctaagatgttcccgtttgccgttgcttatagcctaattagtccagctctagtgttactacgacgcactgttctgaatctcagaaagtcagggaagaagtcattcctttttgtttcttataatattgtatatgtaatattcctctattgcgaattataagccgtttcaatttttttg

SEQ ID NO: 23046 - protein, 340 aa, Zea mays subsp. mays
  peptide (1)..(340): Ceres Seq. ID no. 14301979
  misc_feature (162)..(291): Pfam Name: Pfam Description:  Integral membrane protein DUF6
  misc_feature (3)..(322): NCBI GI NO: 13384378 NR Description: putative phosphate translocator
  misc_feature (6)..(332): NCBI GI NO: 30683853 NR Description: transporter-related [Arabidopsis thaliana]
  misc_feature (5)..(336): NCBI GI NO: 27311731 NR Description: putative integral membrane protein
  misc_feature (5)..(335): NCBI GI NO: 22329373 NR Description: transporter-related [Arabidopsis thaliana]
  misc_feature (5)..(339): NCBI GI NO: 34896140 NR Description: P0701D05.25
  misc_feature (5)..(339): NCBI GI NO: 13699188 NR Description: putative glucose-6-phosphate/phosphate-tranlocat or
  misc_feature (101)..(322): NCBI GI NO: 37535412 NR Description: putative glucose-6-phosphate/phosphate-translocator
  misc_feature (101)..(335): NCBI GI NO: 25406945 NR Description: hypothetical protein
  misc_feature (10)..(336): NCBI GI NO: 15238957 NR Description: transporter-related [Arabidopsis thaliana]
  misc_feature (16)..(329): NCBI GI NO: 15234794 NR Description: transporter-related [Arabidopsis thaliana]
MTAGFQLGVIGSLTLSVASSVAIVICNKALISTLGFPFATTLTSWHLMVTFCTLHVAQRLRFFEPKAIDGQTVVLFGLLNGTSIGLLNLSLGFNSIGFYQMTKLAIIPFTVLLETIFLKKRFSETIKFSLLVLLLGVGIASVTDLKLNCLGSVLSGLAIATTCVGQILTNTIQRKLKVSSTQLLYQSAPYQAAILFATGPFVDHLLTGRSVFAHRYTFPVVGFIVLSCLIAVSVNFSTFLVIGTTSPVTYQVLGHLKTCLVLSFGYTLLHDPFTVRNILGILVAIFGMALYSIFSVREGKKKSAGDALPVSQMPDKETEPLLATKDNSDTKKANGVAHDC

SEQ ID NO: 23047 - protein, 293 aa, Zea mays subsp. mays
  peptide (1)..(293): Ceres Seq. ID no. 14301980
  misc_feature (115)..(244): Pfam Name: Pfam Description:  Integral membrane protein DUF6
  misc_feature (1)..(275): NCBI GI NO: 13384378 NR Description: putative phosphate translocator
  misc_feature (1)..(285): NCBI GI NO: 30683853 NR Description: transporter-related [Arabidopsis thaliana]
  misc_feature (1)..(289): NCBI GI NO: 27311731 NR Description: putative integral membrane protein
  misc_feature (1)..(288): NCBI GI NO: 22329373 NR Description: transporter-related [Arabidopsis thaliana]
  misc_feature (1)..(292): NCBI GI NO: 34896140 NR Description: P0701D05.25
  misc_feature (1)..(292): NCBI GI NO: 13699188 NR Description: putative glucose-6-phosphate/phosphate-tranlocat or
  misc_feature (54)..(275): NCBI GI NO: 37535412 NR Description: putative glucose-6-phosphate/phosphate-translocator
  misc_feature (54)..(288): NCBI GI NO: 25406945 NR Description: hypothetical protein
  misc_feature (1)..(289): NCBI GI NO: 15238957 NR Description: transporter-related [Arabidopsis thaliana]
  misc_feature (1)..(282): NCBI GI NO: 15234794 NR Description: transporter-related [Arabidopsis thaliana]
MVTFCTLHVAQRLRFFEPKAIDGQTVVLFGLLNGTSIGLLNLSLGFNSIGFYQMTKLAIIPFTVLLETIFLKKRFSETIKFSLLVLLLGVGIASVTDLKLNCLGSVLSGLAIATTCVGQILTNTIQRKLKVSSTQLLYQSAPYQAAILFATGPFVDHLLTGRSVFAHRYTFPVVGFIVLSCLIAVSVNFSTFLVIGTTSPVTYQVLGHLKTCLVLSFGYTLLHDPFTVRNILGILVAIFGMALYSIFSVREGKKKSAGDALPVSQMPDKETEPLLATKDNSDTKKANGVAHDC

SEQ ID NO: 23048 - protein, 240 aa, Zea mays subsp. mays
  peptide (1)..(240): Ceres Seq. ID no. 14301981
  misc_feature (62)..(191): Pfam Name: Pfam Description:  Integral membrane protein DUF6
  misc_feature (1)..(222): NCBI GI NO: 13384378 NR Description: putative phosphate translocator
  misc_feature (1)..(232): NCBI GI NO: 30683853 NR Description: transporter-related [Arabidopsis thaliana]
  misc_feature (1)..(236): NCBI GI NO: 27311731 NR Description: putative integral membrane protein
  misc_feature (1)..(235): NCBI GI NO: 22329373 NR Description: transporter-related [Arabidopsis thaliana]
  misc_feature (1)..(239): NCBI GI NO: 34896140 NR Description: P0701D05.25
  misc_feature (1)..(239): NCBI GI NO: 13699188 NR Description: putative glucose-6-phosphate/phosphate-tranlocat or
  misc_feature (1)..(222): NCBI GI NO: 37535412 NR Description: putative glucose-6-phosphate/phosphate-translocator
  misc_feature (1)..(235): NCBI GI NO: 25406945 NR Description: hypothetical protein
  misc_feature (1)..(236): NCBI GI NO: 15238957 NR Description: transporter-related [Arabidopsis thaliana]
  misc_feature (1)..(229): NCBI GI NO: 15234794 NR Description: transporter-related [Arabidopsis thaliana]
MTKLAIIPFTVLLETIFLKKRFSETIKFSLLVLLLGVGIASVTDLKLNCLGSVLSGLAIATTCVGQILTNTIQRKLKVSSTQLLYQSAPYQAAILFATGPFVDHLLTGRSVFAHRYTFPVVGFIVLSCLIAVSVNFSTFLVIGTTSPVTYQVLGHLKTCLVLSFGYTLLHDPFTVRNILGILVAIFGMALYSIFSVREGKKKSAGDALPVSQMPDKETEPLLATKDNSDTKKANGVAHDC

SEQ ID NO: 23049 - DNA, 886 bp, Zea mays subsp. mays
  misc_feature (1)..(886): Ceres Seq. ID no. 12634921
gaactcggagcttccagcaacctcagctcatagccgcattcgcctctgcagcgggagcgcacaagaacgcaggctcccacggcccacgtgtcctgctttcgacagatggcgcgtcggaacgaccacgtgttatccctcctcggggcaatggcggcgctggtgctgtttgcggccaccgccgccgcagcccagggctgtgcgccgggaaacctccagccaggaaggtcgttcgagcggtgcgccgacctgcccgagctcggcgccagcctgtactggacgtaccacccggcgaacggcacggcggacctggcgttccgggcgccgcagagcagcagcggctgggtggcctggggcatcaacaccgagcgccccagcagcatggcgggcagcagcgtgttcgtcgcctcgctgggcggcgacggcggctcggtgtccgtcctggcgacctacctggagtccacgtcgcccgccctggccaacggcaccctcaagctcgacgtgcccgtcgcgcccctcgccgagtacgcggccggcgcctacaccgtctacgtcacggtggcgctccccgggaactccacgcagcagaacacggtgtggcaggcgggcccgctcagcgccggccagatcgcgccacacccgatcgccgggccaaacgtgcagagcaccatggtgttggacttcctgtctggcggcaaaagcacagcgctacccaacttcgacgtgcaccgtcgtagcttgaggagtttccggggatgaaaggctatcccatgcgatcgtgaacatcgtctagttcaatgtctcaagcatagagatacattagatgtgtttaaattatgtgtcttactttatttattgtatcaatcaaaatattcaataaattaaattg

SEQ ID NO: 23050 - protein, 245 aa, Zea mays subsp. mays
  peptide (1)..(245): Ceres Seq. ID no. 12634922
  misc_feature (54)..(227): NCBI GI NO: 29828765 NR Description: putative protoporphyrinogen oxidase
  misc_feature (102)..(237): NCBI GI NO: 1657601 NR Description: unknown [Nannocystis exedens]
  misc_feature (68)..(218): NCBI GI NO: 23012768 NR Description: hypothetical protein
NSELPATSAHSRIRLCSGSAQERRLPRPTCPAFDRWRVGTTTCYPSSGQWRRWCCLRPPPPQPRAVRRETSSQEGRSSGAPTCPSSAPACTGRTTRRTARRTWRSGRRRAAAAGWPGASTPSAPAAWRAAACSSPRWAATAARCPSWRPTWSPRRPPWPTAPSSSTCPSRPSPSTRPAPTPSTSRWRSPGTPRSRTRCGRRARSAPARSRHTRSPGQTCRAPWCWTSCLAAKAQRYPTSTCTVVA

SEQ ID NO: 23051 - protein, 243 aa, Zea mays subsp. mays
  peptide (1)..(243): Ceres Seq. ID no. 12634923
TRSFQQPQLIAAFASAAGAHKNAGSHGPRVLLSTDGASERPRVIPPRGNGGAGAVCGHRRRSPGLCAGKPPARKVVRAVRRPARARRQPVLDVPPGERHGGPGVPGAAEQQRLGGLGHQHRAPQQHGGQQRVRRLAGRRRRLGVRPGDLPGVHVARPGQRHPQARRARRAPRRVRGRRLHRLRHGGAPRELHAAEHGVAGGPAQRRPDRATPDRRAKRAEHHGVGLPVWRQKHSATQLRRAPS

SEQ ID NO: 23052 - protein, 216 aa, Zea mays subsp. mays
  peptide (1)..(216): Ceres Seq. ID no. 12634924
  misc_feature (92)..(211): Pfam Name: DUF568 Pfam Description: Protein of unknown function
  misc_feature (16)..(194): NCBI GI NO: 24414271 NR Description: Unknown protein
  misc_feature (11)..(211): NCBI GI NO: 24414270 NR Description: Putative membrane protein
  misc_feature (8)..(192): NCBI GI NO: 38424013 NR Description: auxin-induced protein-like
  misc_feature (1)..(203): NCBI GI NO: 30680258 NR Description: auxin-induced protein (AIR12)
  misc_feature (11)..(195): NCBI GI NO: 13785211 NR Description: putative membrane protein [Solanum tuberosum]
  misc_feature (11)..(195): NCBI GI NO: 13785207 NR Description: putative membrane protein [Solanum tuberosum]
  misc_feature (11)..(195): NCBI GI NO: 13785213 NR Description: putative membrane protein [Solanum tuberosum]
  misc_feature (1)..(203): NCBI GI NO: 11357190 NR Description: auxin-induced protein AIR12
  misc_feature (10)..(198): NCBI GI NO: 13785209 NR Description: putative membrane protein [Solanum tuberosum]
  misc_feature (12)..(198): NCBI GI NO: 29647484 NR Description: OJ1191_A10.2
MARRNDHVLSLLGAMAALVLFAATAAAAQGCAPGNLQPGRSFERCADLPELGASLYWTYHPANGTADLAFRAPQSSSGWVAWGINTERPSSMAGSSVFVASLGGDGGSVSVLATYLESTSPALANGTLKLDVPVAPLAEYAAGAYTVYVTVALPGNSTQQNTVWQAGPLSAGQIAPHPIAGPNVQSTMVLDFLSGGKSTALPNFDVHRRSLRSFRG

SEQ ID NO: 23053 - DNA, 1059 bp, Zea mays subsp. mays
  misc_feature (1)..(1059): Ceres Seq. ID no. 14306190
aaaggcctaaaccgaactcgcagtcgcaacaggtcagccctcaccgcccccccggtcgtcccaggcatggccccagcgagagcgctgcccgcccctctggttgtccatggccgccgccgccagctacgtcgtcggagaaagtactgcaagttgtgctatctgaagggcagttccatggtccccactatccaagcccagggcgacgtcgggctgctggaccgccgctgcctcgccggctacgacttctcccgcggcgacgtcgttgttttcaggttgtcgacggatcatgggatgaagatggtccagaggatgatcgcgctgccaggggattggatccagatcccggagaagcgggacatccggcaggtccccagcggccactgttgggtggaaggggacaatgccggcaacagctgggactcgagacactatggccccgttcctctggacctgatggaagggaagatcacacacataatctggccaccccatagagtgcgtcgggtggacaggatggtgccggaaggcaggattatgcctctgtcagcgactccaaggaggaagcaacaatagtctcaatcgacggcgtcgaaggcgtcaacaattggaagaacttgatgggaagacaactcgagcgcgagaacaacatctaatggcgtgtttagtttgcaggttggactgcttccagagtcatccgaacctacgtccgagcctatattatcatttggtttgaatcgcggaacgatgtcgtccgtcactacgttgttctaataatatactaacacgtgggatcagctcactccgcaagaaagtgcaagaccacttcgtccggagccaggccacgatggatgagccaaaccatcaaaccaaacacgctgtaaatgtcaagtacagcgggccacaatgagctgggtaaccacgagtgggctgtgcgttgagaaagacgtgttgtgcaggcgctgaccggtcgtctatagtacttaagcaacaatcagaactttgtatcggcatcgaagaattaatgaatagaacaaaaacgctagttctcagcctttcttc

SEQ ID NO: 23054 - protein, 190 aa, Zea mays subsp. mays
  peptide (1)..(190): Ceres Seq. ID no. 14306191
  misc_feature (51)..(165): Pfam Name: Pfam Description:  Signal peptidase I
  misc_feature (47)..(179): NCBI GI NO: 38346460 NR Description: OSJNBa0019G23.8
  misc_feature (67)..(179): NCBI GI NO: 10241631 NR Description: putative singal peptidase
  misc_feature (67)..(146): NCBI GI NO: 15451599 NR Description: Putative signal peptidase [Oryza sativa]
  misc_feature (145)..(181): NCBI GI NO: 15451599 NR Description: Putative signal peptidase [Oryza sativa]
  misc_feature (49)..(171): NCBI GI NO: 15231994 NR Description: signal peptidase -related [Arabidopsis thaliana]
  misc_feature (54)..(181): NCBI GI NO: 14030458 NR Description: inner mitochondrial membrane peptidase 2
  misc_feature (54)..(181): NCBI GI NO: 31981468 NR Description: inner mitochondrial membrane peptidase 2-like
  misc_feature (54)..(181): NCBI GI NO: 38174601 NR Description: Inner mitochondrial membrane peptidase 2-like
  misc_feature (54)..(178): NCBI GI NO: 14211845 NR Description: IMP2 inner mitochondrial membrane protease-like
  misc_feature (54)..(177): NCBI GI NO: 31198973 NR Description: ENSANGP00000018428 [Anopheles gambiae]
KGLNRTRSRNRSALTAPPVVPGMAPARALPAPLVVHGRRRQLRRRRKYCKLCYLKGSSMVPTIQAQGDVGLLDRRCLAGYDFSRGDVVVFRLSTDHGMKMVQRMIALPGDWIQIPEKRDIRQVPSGHCWVEGDNAGNSWDSRHYGPVPLDLMEGKITHIIWPPHRVRRVDRMVPEGRIMPLSATPRRKQQ

SEQ ID NO: 23055 - protein, 168 aa, Zea mays subsp. mays
  peptide (1)..(168): Ceres Seq. ID no. 14306192
  misc_feature (29)..(143): Pfam Name: Pfam Description:  Signal peptidase I
  misc_feature (25)..(157): NCBI GI NO: 38346460 NR Description: OSJNBa0019G23.8
  misc_feature (45)..(157): NCBI GI NO: 10241631 NR Description: putative singal peptidase
  misc_feature (45)..(124): NCBI GI NO: 15451599 NR Description: Putative signal peptidase [Oryza sativa]
  misc_feature (123)..(159): NCBI GI NO: 15451599 NR Description: Putative signal peptidase [Oryza sativa]
  misc_feature (27)..(149): NCBI GI NO: 15231994 NR Description: signal peptidase -related [Arabidopsis thaliana]
  misc_feature (32)..(159): NCBI GI NO: 14030458 NR Description: inner mitochondrial membrane peptidase 2
  misc_feature (32)..(159): NCBI GI NO: 31981468 NR Description: inner mitochondrial membrane peptidase 2-like
  misc_feature (32)..(159): NCBI GI NO: 38174601 NR Description: Inner mitochondrial membrane peptidase 2-like
  misc_feature (32)..(156): NCBI GI NO: 14211845 NR Description: IMP2 inner mitochondrial membrane protease-like
  misc_feature (32)..(155): NCBI GI NO: 31198973 NR Description: ENSANGP00000018428 [Anopheles gambiae]
MAPARALPAPLVVHGRRRQLRRRRKYCKLCYLKGSSMVPTIQAQGDVGLLDRRCLAGYDFSRGDVVVFRLSTDHGMKMVQRMIALPGDWIQIPEKRDIRQVPSGHCWVEGDNAGNSWDSRHYGPVPLDLMEGKITHIIWPPHRVRRVDRMVPEGRIMPLSATPRRKQQ

SEQ ID NO: 23056 - protein, 163 aa, Zea mays subsp. mays
  peptide (1)..(163): Ceres Seq. ID no. 14306193
RPKPNSQSQQVSPHRPPGRPRHGPSESAARPSGCPWPPPPATSSEKVLQVVLSEGQFHGPHYPSPGRRRAAGPPLPRRLRLLPRRRRCFQVVDGSWDEDGPEDDRAARGLDPDPGEAGHPAGPQRPLLGGRGQCRQQLGLETLWPRSSGPDGREDHTHNLATP

SEQ ID NO: 23057 - DNA, 1483 bp, Zea mays subsp. mays
  misc_feature (1)..(1483): Ceres Seq. ID no. 13587581
acccgattcggatccgattccgcggcaggcggcattcccagcctcccaaacccatttccctctccgatcaaatcaaatcaaactcaaaccgacacgggacccacgccgcatctccgcctccgcagatcgccgccgcctactcgcgcccctccgcgcgccgatggccgccgcggacccgccgccgcgcggggaggccgcgcccgcgctgaagcggagcgccagcatcgaccggataccggcggacgcgcgccgcatcctgcaccgcctcgccggggacctctggggcggcgacgtggaccccggcgcgctggccgtgtcccagctcaggggcgccatgaccaacgaggtcttccggatcacctggcccggcggcgaggccgagggcaacggcccgcgcaaggtgctcgtgcgcatctacggccggggcgtcgaggtcttcttcgaccgcgccgacgaggtccgcaccttcgagtgcatgtcgcgccacggccagaggccccgcctcctgggccgcttcgccaacggccgcgtcgaggagttcatcaacgccaggaccctctccgccgcggatctgcgcgacccggagatgtccgcgctgattgccaggaagctgcgcgagtttcacgatctcgacatgcctggacctagggacgtgtcattgtggcagaggctcaagcggtggcttggggaggctcgtgacaggtgttctgaggaagagtctaaccaatttcagctgaataaactaggtgatgagatttcagtgctggagaagacgctctcggggctccaacagtcagtaggattctgccataacgatctgcagtatggaaatattatgatatatgaagagaccagacaagtcaccttgatagactatgaatatgcgagttttaacccagtcgcattcgacattgctaatcacttctgtgagatggctgctgattaccatacatcaacaccacatgtgttggattttacgaaatatcctgacactggggagcagagaagattcgttgaggcataccttagctctgcaggtaaaaagccaacggatggggaagttgaagaactgctagggttgatagcaaagtacactcttgcgagccatctcttctggggcctgtggggaataatctcggcgcacgtgaacgaaaatatcgacttcgcgtacaaggagtatgcaaggcagcgcttggatcagtactggcaaacaaaacctcgaattcttggacccaagtgatgagtcgttgctttttgtagggggtccttggccagctagtcatgtgaattctgtttgtcagtagcggctagtagctgccagtttttgactgcagattgttcagctcgctgtgacctgtgtcgtgaccatattcttgacttacggggtgtaattattttgcctggtcttaggctaaggtaaccagtctttctatcctaatgtaaatagtacagtctataatgaccttatcctcacatggttctg

SEQ ID NO: 23058 - protein, 412 aa, Zea mays subsp. mays
  peptide (1)..(412): Ceres Seq. ID no. 13587582
  misc_feature (132)..(403): Pfam Name: Pfam Description:  Choline/ethanolamine kinase
  misc_feature (54)..(412): NCBI GI NO: 34906246 NR Description: P0489A01.8
  misc_feature (54)..(409): NCBI GI NO: 33149685 NR Description: choline kinase
  misc_feature (72)..(409): NCBI GI NO: 7488654 NR Description: choline kinase (EC 2
  misc_feature (54)..(406): NCBI GI NO: 34910612 NR Description: putative choline kinase
  misc_feature (85)..(409): NCBI GI NO: 7488653 NR Description: choline kinase (EC 2.7.1.32) CK2 - soybean
  misc_feature (84)..(409): NCBI GI NO: 12311795 NR Description: choline kinase [Pisum sativum]
  misc_feature (85)..(409): NCBI GI NO: 7488652 NR Description: choline kinase (EC 2.7.1.32) CK1 - soybean
  misc_feature (77)..(409): NCBI GI NO: 22330627 NR Description: choline kinase -related [Arabidopsis thaliana]
  misc_feature (77)..(409): NCBI GI NO: 25348157 NR Description: protein choline kinase F1O17.1
  misc_feature (79)..(409): NCBI GI NO: 15217543 NR Description: choline kinase -related [Arabidopsis thaliana]
PDSDPIPRQAAFPASQTHFPLRSNQIKLKPTRDPRRISASADRRRLLAPLRAPMAAADPPPRGEAAPALKRSASIDRIPADARRILHRLAGDLWGGDVDPGALAVSQLRGAMTNEVFRITWPGGEAEGNGPRKVLVRIYGRGVEVFFDRADEVRTFECMSRHGQRPRLLGRFANGRVEEFINARTLSAADLRDPEMSALIARKLREFHDLDMPGPRDVSLWQRLKRWLGEARDRCSEEESNQFQLNKLGDEISVLEKTLSGLQQSVGFCHNDLQYGNIMIYEETRQVTLIDYEYASFNPVAFDIANHFCEMAADYHTSTPHVLDFTKYPDTGEQRRFVEAYLSSAGKKPTDGEVEELLGLIAKYTLASHLFWGLWGIISAHVNENIDFAYKEYARQRLDQYWQTKPRILGPK

SEQ ID NO: 23059 - protein, 359 aa, Zea mays subsp. mays
  peptide (1)..(359): Ceres Seq. ID no. 13587583
  misc_feature (79)..(350): Pfam Name: Pfam Description:  Choline/ethanolamine kinase
  misc_feature (1)..(359): NCBI GI NO: 34906246 NR Description: P0489A01.8
  misc_feature (1)..(356): NCBI GI NO: 33149685 NR Description: choline kinase
  misc_feature (19)..(356): NCBI GI NO: 7488654 NR Description: choline kinase (EC 2
  misc_feature (1)..(353): NCBI GI NO: 34910612 NR Description: putative choline kinase
  misc_feature (32)..(356): NCBI GI NO: 7488653 NR Description: choline kinase (EC 2.7.1.32) CK2 - soybean
  misc_feature (31)..(356): NCBI GI NO: 12311795 NR Description: choline kinase [Pisum sativum]
  misc_feature (32)..(356): NCBI GI NO: 7488652 NR Description: choline kinase (EC 2.7.1.32) CK1 - soybean
  misc_feature (24)..(356): NCBI GI NO: 22330627 NR Description: choline kinase -related [Arabidopsis thaliana]
  misc_feature (24)..(356): NCBI GI NO: 25348157 NR Description: protein choline kinase F1O17.1
  misc_feature (26)..(356): NCBI GI NO: 15217543 NR Description: choline kinase -related [Arabidopsis thaliana]
MAAADPPPRGEAAPALKRSASIDRIPADARRILHRLAGDLWGGDVDPGALAVSQLRGAMTNEVFRITWPGGEAEGNGPRKVLVRIYGRGVEVFFDRADEVRTFECMSRHGQRPRLLGRFANGRVEEFINARTLSAADLRDPEMSALIARKLREFHDLDMPGPRDVSLWQRLKRWLGEARDRCSEEESNQFQLNKLGDEISVLEKTLSGLQQSVGFCHNDLQYGNIMIYEETRQVTLIDYEYASFNPVAFDIANHFCEMAADYHTSTPHVLDFTKYPDTGEQRRFVEAYLSSAGKKPTDGEVEELLGLIAKYTLASHLFWGLWGIISAHVNENIDFAYKEYARQRLDQYWQTKPRILGPK

SEQ ID NO: 23060 - protein, 301 aa, Zea mays subsp. mays
  peptide (1)..(301): Ceres Seq. ID no. 13587584
  misc_feature (21)..(292): Pfam Name: Pfam Description:  Choline/ethanolamine kinase
  misc_feature (1)..(301): NCBI GI NO: 34906246 NR Description: P0489A01.8
  misc_feature (1)..(298): NCBI GI NO: 33149685 NR Description: choline kinase
  misc_feature (1)..(298): NCBI GI NO: 7488654 NR Description: choline kinase (EC 2
  misc_feature (1)..(295): NCBI GI NO: 34910612 NR Description: putative choline kinase
  misc_feature (1)..(298): NCBI GI NO: 7488653 NR Description: choline kinase (EC 2.7.1.32) CK2 - soybean
  misc_feature (1)..(298): NCBI GI NO: 12311795 NR Description: choline kinase [Pisum sativum]
  misc_feature (1)..(298): NCBI GI NO: 7488652 NR Description: choline kinase (EC 2.7.1.32) CK1 - soybean
  misc_feature (1)..(298): NCBI GI NO: 22330627 NR Description: choline kinase -related [Arabidopsis thaliana]
  misc_feature (1)..(298): NCBI GI NO: 25348157 NR Description: protein choline kinase F1O17.1
  misc_feature (1)..(298): NCBI GI NO: 15217543 NR Description: choline kinase -related [Arabidopsis thaliana]
MTNEVFRITWPGGEAEGNGPRKVLVRIYGRGVEVFFDRADEVRTFECMSRHGQRPRLLGRFANGRVEEFINARTLSAADLRDPEMSALIARKLREFHDLDMPGPRDVSLWQRLKRWLGEARDRCSEEESNQFQLNKLGDEISVLEKTLSGLQQSVGFCHNDLQYGNIMIYEETRQVTLIDYEYASFNPVAFDIANHFCEMAADYHTSTPHVLDFTKYPDTGEQRRFVEAYLSSAGKKPTDGEVEELLGLIAKYTLASHLFWGLWGIISAHVNENIDFAYKEYARQRLDQYWQTKPRILGPK

SEQ ID NO: 23061 - DNA, 452 bp, Zea mays subsp. mays
  misc_feature (1)..(452): Ceres Seq. ID no. 13600592
ctagctcgtgcatgccgccctgagcgccactgcacagacgcgcagagacagacattgcgactttgcgagagacaaaacctcccagataacgcccgcgcgctccccgatggcgtcgtcgtgccagaacgtggagattcccggcaagccgacggagacggggacggcgctgctggagacggcgacgggcaccatccaggggttcgcgccgctgagccagatccaccagcacctgtgcgcgttccacttctacgcggacgacatggggcggcaggtggaggcgcaccacttctgcgcgcacctgaacgaggacgtgcggcagtgcctcatcttcgacgggcccggcgccggcgcgcgcctcatcggcgtggagtacatcgtctccgagacggtgttcctgacgctgcccgacgccgagaagccgctgtggcacacgcacgagttcgaggtgaagg

SEQ ID NO: 23062 - protein, 150 aa, Zea mays subsp. mays
  peptide (1)..(150): Ceres Seq. ID no. 13600593
LARACRPERHCTDAQRQTLRLCERQNLPDNARALPDGVVVPERGDSRQADGDGDGAAGDGDGHHPGVRAAEPDPPAPVRVPLLRGRHGAAGGGAPLLRAPERGRAAVPHLRRARRRRAPHRRGVHRLRDGVPDAARRREAAVAHARVRGE

SEQ ID NO: 23063 - protein, 115 aa, Zea mays subsp. mays
  peptide (1)..(115): Ceres Seq. ID no. 13600594
  misc_feature (1)..(114): NCBI GI NO: 4105683 NR Description: unknown [Oryza sativa]
  misc_feature (2)..(114): NCBI GI NO: 30685146 NR Description: expressed protein [Arabidopsis thaliana]
  misc_feature (9)..(114): NCBI GI NO: 15220526 NR Description: expressed protein [Arabidopsis thaliana]
  misc_feature (2)..(114): NCBI GI NO: 26451037 NR Description: unknown protein [Arabidopsis thaliana]
  misc_feature (11)..(114): NCBI GI NO: 40740423 NR Description: hypothetical protein AN7959.2
  misc_feature (1)..(114): NCBI GI NO: 32413853 NR Description: hypothetical protein [Neurospora crassa]
  misc_feature (1)..(114): NCBI GI NO: 34910820 NR Description: P0456A01.15
  misc_feature (1)..(114): NCBI GI NO: 34909516 NR Description: P0481E12.28
  misc_feature (10)..(114): NCBI GI NO: 16760314 NR Description: putative secreted protein
  misc_feature (10)..(114): NCBI GI NO: 16764905 NR Description: putative outer membrane or secreted lipoprotein
MASSCQNVEIPGKPTETGTALLETATGTIQGFAPLSQIHQHLCAFHFYADDMGRQVEAHHFCAHLNEDVRQCLIFDGPGAGARLIGVEYIVSETVFLTLPDAEKPLWHTHEFEVK

SEQ ID NO: 23064 - DNA, 1177 bp, Zea mays subsp. mays
  misc_feature (1)..(1177): Ceres Seq. ID no. 13586936
ggcagcgaaggcaactacactttgtatatacactggtagtaatgatcgaacgaacgagaaccatgtacagcagcacgccacgcttacagattgcagtattaatagttgcaccaggtttggtttatatccacaagaagaatgatgcaaattcatgaaagaaaatggtacgatcaatattgcttaacgaagctgttccgttgacgacgccggcagcagcgagcgaaggagatcgcagatcggcatccaccacatcttggacgcctacatcaccagctccgacacccatcccaagtccggcccgtcgtcctccgtgaccgcagccgcaggcaggaccggcgccgacgacgacgccttggccttcctgaatccgagctcccgcatcgcgagcaacagctcctccacctcggcgtccgccggctcgtcgacccacctccggccctccaccggcgacaccggcggcgactcccagggcggcgccagcgtcgacttgggcgagagcgacagcgcgagcggcgagcagccgtccttggcggcgccggcgccggcgccggcgccggcgcggagctcggccgcggcgtgcgcgaagaagcagacgcggcggcggcaggcagcgcccgcgcggcaggggcgcgtgcggtagcgggacgggtggagccacagctcgaaggtgccgtgcgcgagcgggcaggcggccccgcgcgggcacgcggcgcccgcgcccgggcggcgccggaagtccgggcacggctcccccgcgtaggccacgcggcgcgggtcccgccgccgcgcggcctcccccgggtgcgcgtaggggcacgccgtccagtcgtggctccgcgcgcgcgcgcaccgccgcaccttgaactcgtgcatcatgaactcgtcgtccgcctccgtcgcgacgtcgccgccctcggcgcgggtggaggagaggtactctcccagcgcggcgaggagctgcggcgggatctctgcggcggacgggtcggcccacggcgcgcccagagacgccgggtccagcaccaggtgcaaattttcacggctcaccatgcctgccgtcgctctatctgcctcgccctcagtgttgttcaacactcggtccagtccggttagcctgggtggtggtggtgccggggaaagagaggactgtggtgaacgtgccttgaggagatataac

SEQ ID NO: 23065 - protein, 101 aa, Zea mays subsp. mays
  peptide (1)..(101): Ceres Seq. ID no. 13586937
  misc_feature (1)..(69): NCBI GI NO: 13592175 NR Description: ppg3 [Leishmania major]
  misc_feature (1)..(69): NCBI GI NO: 13592175 NR Description: ppg3 [Leishmania major]
  misc_feature (1)..(69): NCBI GI NO: 13592175 NR Description: ppg3 [Leishmania major]
  misc_feature (1)..(80): NCBI GI NO: 13592175 NR Description: ppg3 [Leishmania major]
  misc_feature (1)..(83): NCBI GI NO: 13592175 NR Description: ppg3 [Leishmania major]
  misc_feature (1)..(69): NCBI GI NO: 13592175 NR Description: ppg3 [Leishmania major]
  misc_feature (1)..(69): NCBI GI NO: 5420387 NR Description: proteophosphoglycan [Leishmania major]
  misc_feature (1)..(69): NCBI GI NO: 13592175 NR Description: ppg3 [Leishmania major]
  misc_feature (1)..(69): NCBI GI NO: 13592175 NR Description: ppg3 [Leishmania major]
  misc_feature (1)..(80): NCBI GI NO: 5420387 NR Description: proteophosphoglycan [Leishmania major]
MNSSSASVATSPPSARVEERYSPSAARSCGGISAADGSAHGAPRDAGSSTRCKFSRLTMPAVALSASPSVLFNTRSSPVSLGGGGAGEREDCGERALRRYN

SEQ ID NO: 23066 - protein, 50 aa, Zea mays subsp. mays
  peptide (1)..(50): Ceres Seq. ID no. 13586938
  misc_feature (28)..(50): NCBI GI NO: 15145797 NR Description: basic proline-rich protein [Sus scrofa]
  misc_feature (28)..(50): NCBI GI NO: 15145795 NR Description: basic proline-rich protein [Sus scrofa]
QRRQLHFVYTLVVMIERTRTMYSSTPRLQIAVLIVAPGLVYIHKKNDANS

SEQ ID NO: 23067 - protein, 50 aa, Zea mays subsp. mays
  peptide (1)..(50): Ceres Seq. ID no. 13586939
  misc_feature (10)..(50): NCBI GI NO: 27375632 NR Description: blr0521 [Bradyrhizobium japonicum]
  misc_feature (12)..(50): NCBI GI NO: 23104656 NR Description: hypothetical protein [Azotobacter vinelandii]
  misc_feature (12)..(50): NCBI GI NO: 29829093 NR Description: putative translation initiation factor IF-2
  misc_feature (18)..(50): NCBI GI NO: 22962211 NR Description: hypothetical protein [Rhodopseudomonas palustris]
  misc_feature (10)..(50): NCBI GI NO: 33865132 NR Description: possible N-terminal part of IF-2
  misc_feature (8)..(50): NCBI GI NO: 29833662 NR Description: putative serine/threonine protein kinase
  misc_feature (8)..(50): NCBI GI NO: 5821145 NR Description: RNA binding protein [Homo sapiens]
  misc_feature (8)..(50): NCBI GI NO: 5821143 NR Description: RNA binding protein [Homo sapiens]
  misc_feature (34)..(50): NCBI GI NO: 9629838 NR Description: very large virion protein (tegument)
  misc_feature (8)..(50): NCBI GI NO: 6649242 NR Description: splicing coactivator subunit SRm300 [Homo sapiens]
MVRSILLNEAVPLTTPAAASEGDRRSASTTSWTPTSPAPTPIPSPARRPP

SEQ ID NO: 23068 - DNA, 1085 bp, Zea mays subsp. mays
  misc_feature (1)..(1085): Ceres Seq. ID no. 14312711
aaacaggcgacccgcgtgtcagagatgcagcatagcatggacgcgggcgaggtgcggcactggaacgcggacgtgaacggcgtctccatccacgtcgccgagcggggccccgaggatgggccggcggtgctcctcctccacggcttcccggagctctggctctcgtggcgccaccagatggccgcgctcgccgcccgcgggttccgtgcgctagcccccgacctccgcggctacggcgactcctccgcgccgtccgaccccgccgcctactccatcttccacatcgtcggcgacgtcgtcgcgctcctcgaccacctccaactcacaaaggtgttcgtggcggggcacgactggggcgcgcatgcggcgtggctcctctgcctgttccggccggaccgggtgcgcgccgccgtcgttctgggggtaccgtactccgctcgacacgcacacgctcgccccatcacggaggccttcgcggcgtttggcgagggcttttacataaatcagttgcaggaggctggaagagctgagagcgcattcgcccgttacgatgtcgcaactgtcctaaaaaagttctactccatcgaaatagatgatgtcaccgctcctcctggggtggagatcatagacttcctggaggcgtctccctcgccacttccttggatcagcgaggaagaactgggccagtatgctgagaagtttcacaagtccgggttcactggacccctcaactactaccgcatgtcggagacgaactcgagactccttgcaccctggaacggagcgaagattacagtgcctgtgaagttcatagctggcgataaggacatcggtgcccagtcctttggaactggggagtacatcaagagcgcggagttcgagtccaccgttccagatcttgaagtcaccgtcatcgagggccaccattttctccagcaggaacaggccgagagggtgaactcggagatggtttcctacctcgtcaggtttactagctagccagtaaagaaatctttctgaactgaagtcttgaagagctgaataaagtgtgagctaggcatttgctcttgcttctttctcacctc

SEQ ID NO: 23069 - protein, 332 aa, Zea mays subsp. mays
  peptide (1)..(332): Ceres Seq. ID no. 14312712
  misc_feature (68)..(323): Pfam Name: Pfam Description:  alpha/beta hydrolase fold
  misc_feature (18)..(327): NCBI GI NO: 15230367 NR Description: epoxide hydrolase, putative [Arabidopsis thaliana]
  misc_feature (13)..(330): NCBI GI NO: 34902880 NR Description: unnamed protein product
  misc_feature (20)..(330): NCBI GI NO: 25044843 NR Description: epoxide hydrolase [Ananas comosus]
  misc_feature (15)..(332): NCBI GI NO: 34897302 NR Description: putative hydrolase
  misc_feature (17)..(330): NCBI GI NO: 7489256 NR Description: probable epoxide hydrolase (EC 3
  misc_feature (17)..(330): NCBI GI NO: 7488671 NR Description: epoxide hydrolase homolog - soybean
  misc_feature (15)..(332): NCBI GI NO: 34897298 NR Description: putative hydrolase
  misc_feature (18)..(330): NCBI GI NO: 15225781 NR Description: epoxide hydrolase (ATsEH) [Arabidopsis thaliana]
  misc_feature (17)..(330): NCBI GI NO: 2764806 NR Description: epoxide hydrolase [Glycine max]
  misc_feature (13)..(172): NCBI GI NO: 34902882 NR Description: unnamed protein product
KQATRVSEMQHSMDAGEVRHWNADVNGVSIHVAERGPEDGPAVLLLHGFPELWLSWRHQMAALAARGFRALAPDLRGYGDSSAPSDPAAYSIFHIVGDVVALLDHLQLTKVFVAGHDWGAHAAWLLCLFRPDRVRAAVVLGVPYSARHAHARPITEAFAAFGEGFYINQLQEAGRAESAFARYDVATVLKKFYSIEIDDVTAPPGVEIIDFLEASPSPLPWISEEELGQYAEKFHKSGFTGPLNYYRMSETNSRLLAPWNGAKITVPVKFIAGDKDIGAQSFGTGEYIKSAEFESTVPDLEVTVIEGHHFLQQEQAERVNSEMVSYLVRFTS

SEQ ID NO: 23070 - protein, 324 aa, Zea mays subsp. mays
  peptide (1)..(324): Ceres Seq. ID no. 14312713
  misc_feature (60)..(315): Pfam Name: Pfam Description:  alpha/beta hydrolase fold
  misc_feature (10)..(319): NCBI GI NO: 15230367 NR Description: epoxide hydrolase, putative [Arabidopsis thaliana]
  misc_feature (5)..(322): NCBI GI NO: 34902880 NR Description: unnamed protein product
  misc_feature (12)..(322): NCBI GI NO: 25044843 NR Description: epoxide hydrolase [Ananas comosus]
  misc_feature (7)..(324): NCBI GI NO: 34897302 NR Description: putative hydrolase
  misc_feature (9)..(322): NCBI GI NO: 7489256 NR Description: probable epoxide hydrolase (EC 3
  misc_feature (9)..(322): NCBI GI NO: 7488671 NR Description: epoxide hydrolase homolog - soybean
  misc_feature (7)..(324): NCBI GI NO: 34897298 NR Description: putative hydrolase
  misc_feature (10)..(322): NCBI GI NO: 15225781 NR Description: epoxide hydrolase (ATsEH) [Arabidopsis thaliana]
  misc_feature (9)..(322): NCBI GI NO: 2764806 NR Description: epoxide hydrolase [Glycine max]
  misc_feature (5)..(164): NCBI GI NO: 34902882 NR Description: unnamed protein product
MQHSMDAGEVRHWNADVNGVSIHVAERGPEDGPAVLLLHGFPELWLSWRHQMAALAARGFRALAPDLRGYGDSSAPSDPAAYSIFHIVGDVVALLDHLQLTKVFVAGHDWGAHAAWLLCLFRPDRVRAAVVLGVPYSARHAHARPITEAFAAFGEGFYINQLQEAGRAESAFARYDVATVLKKFYSIEIDDVTAPPGVEIIDFLEASPSPLPWISEEELGQYAEKFHKSGFTGPLNYYRMSETNSRLLAPWNGAKITVPVKFIAGDKDIGAQSFGTGEYIKSAEFESTVPDLEVTVIEGHHFLQQEQAERVNSEMVSYLVRFTS

SEQ ID NO: 23071 - protein, 320 aa, Zea mays subsp. mays
  peptide (1)..(320): Ceres Seq. ID no. 14312714
  misc_feature (56)..(311): Pfam Name: Pfam Description:  alpha/beta hydrolase fold
  misc_feature (6)..(315): NCBI GI NO: 15230367 NR Description: epoxide hydrolase, putative [Arabidopsis thaliana]
  misc_feature (1)..(318): NCBI GI NO: 34902880 NR Description: unnamed protein product
  misc_feature (8)..(318): NCBI GI NO: 25044843 NR Description: epoxide hydrolase [Ananas comosus]
  misc_feature (3)..(320): NCBI GI NO: 34897302 NR Description: putative hydrolase
  misc_feature (5)..(318): NCBI GI NO: 7489256 NR Description: probable epoxide hydrolase (EC 3
  misc_feature (5)..(318): NCBI GI NO: 7488671 NR Description: epoxide hydrolase homolog - soybean
  misc_feature (3)..(320): NCBI GI NO: 34897298 NR Description: putative hydrolase
  misc_feature (6)..(318): NCBI GI NO: 15225781 NR Description: epoxide hydrolase (ATsEH) [Arabidopsis thaliana]
  misc_feature (5)..(318): NCBI GI NO: 2764806 NR Description: epoxide hydrolase [Glycine max]
  misc_feature (1)..(160): NCBI GI NO: 34902882 NR Description: unnamed protein product
MDAGEVRHWNADVNGVSIHVAERGPEDGPAVLLLHGFPELWLSWRHQMAALAARGFRALAPDLRGYGDSSAPSDPAAYSIFHIVGDVVALLDHLQLTKVFVAGHDWGAHAAWLLCLFRPDRVRAAVVLGVPYSARHAHARPITEAFAAFGEGFYINQLQEAGRAESAFARYDVATVLKKFYSIEIDDVTAPPGVEIIDFLEASPSPLPWISEEELGQYAEKFHKSGFTGPLNYYRMSETNSRLLAPWNGAKITVPVKFIAGDKDIGAQSFGTGEYIKSAEFESTVPDLEVTVIEGHHFLQQEQAERVNSEMVSYLVRFTS

SEQ ID NO: 23072 - DNA, 886 bp, Zea mays subsp. mays
  misc_feature (1)..(886): Ceres Seq. ID no. 14306339
acgtcggcgtcttccatcgaagtggccttttcggcggcgagtgagagggcgaggaataaaactcgcgtcgcgcacgcaccgcaacaataatatccttccacgcgaatattcgccgcttcccacctcccccgccccgcatatccttccgtccgtccgttcgtctcccccctttcccttcccctctatttcaccaccccatcagccgcccgccaccgcgacgatcaccggcgcaatccgttcaccccaccactcatccactccccctccgcgaatctcatttctttactgcggctaggaggaggcggcggcggcgatgaagttcggcaagagcctgagcggacagatcgtggagacgctcccggagtggcgcgacaagttcctgtcctacaaggatctcaagaagcgcctcaagctcatcggcgccgggaacggggctgagcggcagccgaagcgggcccgccgcgacgactccggggaggctgacgcggccgcggccgcggcggcaatgacgccagaggaggcggagttcatgcagctcctggaggctgagctcgacaaattcaactcttttttcgtcgagaaagaggaggagtacatcatccgtcagaaggagctgcaggaccgggtggccagggcggccgggcgggagtccaaggaggagctcatgcgggtgcgcaaggagattgtcgacttccacggcgagatggtgctgctggagaactacagcgccctcaactacacagctagtagcaacttagcctggactgtggctgtgaattagggatgaagcctctagattcctggggctaacaatcagtgtttgccatagctaacatgggtcaaataaagagacgaattgctgtgttgcttgtcagcaagggacaat

SEQ ID NO: 23073 - protein, 155 aa, Zea mays subsp. mays
  peptide (1)..(155): Ceres Seq. ID no. 14306340
  misc_feature (1)..(148): Pfam Name: Pfam Description:  SPX domain
  misc_feature (1)..(148): NCBI GI NO: 15225770 NR Description: expressed protein [Arabidopsis thaliana]
  misc_feature (1)..(143): NCBI GI NO: 21592813 NR Description: ids4-like protein [Arabidopsis thaliana]
  misc_feature (1)..(143): NCBI GI NO: 15241275 NR Description: ids4-related protein [Arabidopsis thaliana]
  misc_feature (69)..(148): NCBI GI NO: 31415907 NR Description: putative SPX domain containing protein
  misc_feature (1)..(41): NCBI GI NO: 31415907 NR Description: putative SPX domain containing protein
  misc_feature (67)..(148): NCBI GI NO: 15225414 NR Description: hypothetical protein [Arabidopsis thaliana]
  misc_feature (1)..(29): NCBI GI NO: 15225414 NR Description: hypothetical protein [Arabidopsis thaliana]
  misc_feature (68)..(143): NCBI GI NO: 16506648 NR Description: IDS-4-like protein [Castanea sativa]
  misc_feature (1)..(142): NCBI GI NO: 34897330 NR Description: putative signal transduction protein
  misc_feature (42)..(148): NCBI GI NO: 37533962 NR Description: hypothetical protein
MKFGKSLSGQIVETLPEWRDKFLSYKDLKKRLKLIGAGNGAERQPKRARRDDSGEADAAAAAAAMTPEEAEFMQLLEAELDKFNSFFVEKEEEYIIRQKELQDRVARAAGRESKEELMRVRKEIVDFHGEMVLLENYSALNYTASSNLAWTVAVN

SEQ ID NO: 23074 - protein, 97 aa, Zea mays subsp. mays
  peptide (1)..(97): Ceres Seq. ID no. 14306341
RRRLPSKWPFRRRVRGRGIKLASRTHRNNNILPREYSPLPTSPAPHILPSVRSSPPFPFPSISPPHQPPATATITGAIRSPHHSSTPPPRISFLYCG

SEQ ID NO: 23075 - protein, 91 aa, Zea mays subsp. mays
  peptide (1)..(91): Ceres Seq. ID no. 14306342
  misc_feature (1)..(84): Pfam Name: Pfam Description:  SPX domain
  misc_feature (1)..(84): NCBI GI NO: 15225770 NR Description: expressed protein [Arabidopsis thaliana]
  misc_feature (1)..(79): NCBI GI NO: 21592813 NR Description: ids4-like protein [Arabidopsis thaliana]
  misc_feature (1)..(79): NCBI GI NO: 15241275 NR Description: ids4-related protein [Arabidopsis thaliana]
  misc_feature (5)..(84): NCBI GI NO: 31415907 NR Description: putative SPX domain containing protein
  misc_feature (3)..(84): NCBI GI NO: 15225414 NR Description: hypothetical protein [Arabidopsis thaliana]
  misc_feature (4)..(79): NCBI GI NO: 16506648 NR Description: IDS-4-like protein [Castanea sativa]
  misc_feature (1)..(78): NCBI GI NO: 34897330 NR Description: putative signal transduction protein
  misc_feature (1)..(84): NCBI GI NO: 37533962 NR Description: hypothetical protein
  misc_feature (1)..(90): NCBI GI NO: 18417630 NR Description: ids-4 protein - like [Arabidopsis thaliana]
  misc_feature (1)..(90): NCBI GI NO: 11358467 NR Description: ids-4 protein-like - Arabidopsis thaliana
MTPEEAEFMQLLEAELDKFNSFFVEKEEEYIIRQKELQDRVARAAGRESKEELMRVRKEIVDFHGEMVLLENYSALNYTASSNLAWTVAVN

SEQ ID NO: 23076 - DNA, 726 bp, Zea mays subsp. mays
  misc_feature (1)..(726): Ceres Seq. ID no. 12634854
atcctatatataggtgcaagcacacacacaagttttcggtcgaagaacatcaaatacatactggctcactcgtgattccttcacccagcagttcgtaaccacctgctaaatcatcaaaaaaatgcccccctgcaaagtagcagcagccttactcctgttgatcatcacaacaatttctgtcaacaccgtaactgggtcgcgatgtaacgctcaggagaagaaccagattgtgagcttgtgccaaatgtacatccagagaggaaccctcgttcagctcccatcccaaactgggccatgctgtgcggcagtgagagagctggagagggtacacaggggtatgcagatgaagtgcatcgccgatctactgaacgctggagatctacagaaatacgatccaactaagatcaagcatcttgacatttcctgctacacttagcatcgttagtttcattcctctcctccccatgcatcgttgtcatgctgtgaagggcgcgatggcgtggaatggatgctggtagcaaagatgctcagaagatgacatttcgttagttatttaattaagtcttccaaggcgtcaatcttcctgacatgtatctttattcgaaaaaaataaactggattatttttggtaaaaaaaaaaaaaaaaaaaaaaaaaaaaaaaaaaaaaaaaccaaaaaaaaaaaaaaaaaagcttatcgataccgtcgacctcaagggggggcccgg

SEQ ID NO: 23077 - protein, 104 aa, Zea mays subsp. mays
  peptide (1)..(104): Ceres Seq. ID no. 12634855
  misc_feature (10)..(102): NCBI GI NO: 5042333 NR Description: BETL4 protein [Zea mays]
MPPCKVAAALLLLIITTISVNTVTGSRCNAQEKNQIVSLCQMYIQRGTLVQLPSQTGPCCAAVRELERVHRGMQMKCIADLLNAGDLQKYDPTKIKHLDISCYT

SEQ ID NO: 23078 - protein, 63 aa, Zea mays subsp. mays
  peptide (1)..(63): Ceres Seq. ID no. 12634856
  misc_feature (1)..(61): NCBI GI NO: 5042333 NR Description: BETL4 protein [Zea mays]
MYIQRGTLVQLPSQTGPCCAAVRELERVHRGMQMKCIADLLNAGDLQKYDPTKIKHLDISCYT

SEQ ID NO: 23079 - DNA, 750 bp, Zea mays subsp. mays
  misc_feature (1)..(750): Ceres Seq. ID no. 12634896
aattgggccagtttgtagtacccttgtttatatcggatacccaagagagccgtggagactggagagggaggaacgagggagctcgctctgctcttccttgttggcaatagcccaaggccccaagacggcagcacgcacaatgaagccatcctgtgcagcacttgttccaggccttcttcttctagccactcttgcagttgcagctggcgcaggtgccgcctcttcatcatctcctccgtcgtcttccctcggcaagcatccagcagagctggtccttcttggtcgcaaaggccgagaacttggccagctgtcatcatcatcatcaggataccgttattaccagcaccagagcaagcagatgcagcaacctgaggaagctgcggctacggaggtgaagcagcccgaggagaaggaggaggaggaggaggaggaggcaaaggtgcggtggacagcgggccagggcgcggacgccgagcctgggctgatctacagcgcggactacagcggcgtggccatgcatgctggctctccgccgacgacgaagccgaagcacaggcaccccagaccgtaggacgtttttttcctcctttcctggttgtgttcgtcagtctatgccttgtccttacgttgtcgacttgctgtgtagtttttaccgttggattgtacaagcaccgctgccggccgtctctgtaaataaactaggccttgcttctgttgctctaaaaaaaaaaaaaaagaaacaaaccgggg

SEQ ID NO: 23080 - protein, 189 aa, Zea mays subsp. mays
  peptide (1)..(189): Ceres Seq. ID no. 12634897
  misc_feature (58)..(188): NCBI GI NO: 19387271 NR Description: hypothetical protein
IGPVCSTLVYIGYPREPWRLEREERGSSLCSSLLAIAQGPKTAARTMKPSCAALVPGLLLLATLAVAAGAGAASSSSPPSSSLGKHPAELVLLGRKGRELGQLSSSSSGYRYYQHQSKQMQQPEEAAATEVKQPEEKEEEEEEEAKVRWTAGQGADAEPGLIYSADYSGVAMHAGSPPTTKPKHRHPRP

SEQ ID NO: 23081 - protein, 143 aa, Zea mays subsp. mays
  peptide (1)..(143): Ceres Seq. ID no. 12634898
  misc_feature (12)..(142): NCBI GI NO: 19387271 NR Description: hypothetical protein
MKPSCAALVPGLLLLATLAVAAGAGAASSSSPPSSSLGKHPAELVLLGRKGRELGQLSSSSSGYRYYQHQSKQMQQPEEAAATEVKQPEEKEEEEEEEAKVRWTAGQGADAEPGLIYSADYSGVAMHAGSPPTTKPKHRHPRP

SEQ ID NO: 23082 - DNA, 835 bp, Zea mays subsp. mays
  misc_feature (1)..(835): Ceres Seq. ID no. 13587576
ggttaactttcacgtccggatgcaaattcgcctcggtcgttcaaccaaacaagctcactcccggccatcaggcgcacaccgctctcccgccgccgtcctgcgtcggagcgatatccctacatccccacctcatttgcacccggattggcttcttcttctactactactggaactctctttgcgatcccaaaatcgcaaaataaaggtaaatcaaaaggaaccgacttaggagctggaatgacatctaggagctttacgaaggaagagatctctaaacataacacaaggaaggactgttggatcgtcatcaaggacaaggtctatgatgtcactccttatgtagaggagcatccaggcggagatgccattctaaataatgctggtggtgattccacagagggcttttttgggccacagcacggcactagggtcttcgatatcatcgaggatttctgcatcggtcagttgaaggcatagggtagcttgtattgaattcgtggaattttccggaaatcaagttttgagaagctacatgttatccaacattttaagcattgcaaccttcaagcatttgagatgccagtataattgttccacaattgtcatcggggctgctaggagctgtgatgtagcacttcgtttttattctgctgttgtgtgactgtgtctttacatttctgttgttggacaagactccaaaacgcttgtaattgttctggctaagggcccgttcggttattcaggaatctactccagaaaggatttcagctggaataattgtataatttgtataacaattagtaacctggaatagttcctagtcttgttccagcct

SEQ ID NO: 23083 - protein, 79 aa, Zea mays subsp. mays
  peptide (1)..(79): Ceres Seq. ID no. 13587577
  misc_feature (5)..(77): Pfam Name: Pfam Description:  Cytochrome b5-like Heme/Steroid binding domain
  misc_feature (1)..(78): NCBI GI NO: 40253472 NR Description: cytochrome b5-like
  misc_feature (1)..(77): NCBI GI NO: 15219780 NR Description: cytochrome b5, putative [Arabidopsis thaliana]
  misc_feature (9)..(79): NCBI GI NO: 25044825 NR Description: cytochrome b5 [Ananas comosus]
  misc_feature (1)..(77): NCBI GI NO: 20137975 NR Description: Cytochrome b5
  misc_feature (9)..(77): NCBI GI NO: 15238776 NR Description: cytochrome b5 [Arabidopsis thaliana]
  misc_feature (9)..(77): NCBI GI NO: 729252 NR Description: Cytochrome B5
  misc_feature (9)..(77): NCBI GI NO: 19921470 NR Description: CG6870-PA [Drosophila melanogaster]
  misc_feature (6)..(77): NCBI GI NO: 24158926 NR Description: Chain A
  misc_feature (6)..(77): NCBI GI NO: 6166051 NR Description: Cytochrome b5
  misc_feature (6)..(77): NCBI GI NO: 7430586 NR Description: cytochrome b5, erythrocyte splice form
MTSRSFTKEEISKHNTRKDCWIVIKDKVYDVTPYVEEHPGGDAILNNAGGDSTEGFFGPQHGTRVFDIIEDFCIGQLKA

SEQ ID NO: 23084 - protein, 75 aa, Zea mays subsp. mays
  peptide (1)..(75): Ceres Seq. ID no. 13587578
VNFHVRMQIRLGRSTKQAHSRPSGAHRSPAAVLRRSDIPTSPPHLHPDWLLLLLLLELSLRSQNRKIKVNQKEPT

SEQ ID NO: 23085 - protein, 69 aa, Zea mays subsp. mays
  peptide (1)..(69): Ceres Seq. ID no. 13587579
MQIRLGRSTKQAHSRPSGAHRSPAAVLRRSDIPTSPPHLHPDWLLLLLLLELSLRSQNRKIKVNQKEPT

SEQ ID NO: 23086 - DNA, 1068 bp, Zea mays subsp. mays
  misc_feature (1)..(1068): Ceres Seq. ID no. 13600568
cctaatccaaaaaccgcagctctcaagcgagatcgaggcagtgcgcacgccgtgcaggcctctcctccactcaaccgcgcgtcatggccatgttgcgcgagcatctcgacctcatccgcgctcacctcctcgacgacaaccacgacgccgtcagctccgatgactcggcgccgtcccactcgccatcgccatccccatcgccgccggggcgtaggccgctgccagcgctttccgtctcgctgcccccgaggccggcagtcgtcctgcagcagcagcacatgagggcggcggcgccgccgttgcagattcctcagcaggagcagcactgctgcccggaacccgaggaggacgatttccggcggtaccgcggcgtgcggcagcggccgtggggcaagtacgcggccgagattcgggacccgtcgcggaagggcgcgcgcgtgtggctgggcacctatgacaccgccgtggaggccgctcgtgcctacgaccgcgccgcgttccgcctgcgcgggtccaaggccatcctcaacttccccaacgaggtcgcgttaagcaccgctgcatggtgggcgacgcctgctcctcctcctcagcccagcgcgaccgtggccggtaacaagagggcgaggtcgccgcaggagcaggacgctaggtgcatggttagggaggtgaagaaggagcggattcaggagcccgcaagcggaggggcggactacttctgggaggatgagtcgctgaagggggcgatctgcagcctgccgccgctctcaccgttgtcgccgcacccgcacctggccgtgccgcagctctacgtcagctgactgcctgacttgatgtcgtagcaagacagggacggtggtcttactcttacctgatgatagtcttctgagttctttgatatgctagaggagtatagctccaaatattctttcgttctttatttattcgttcagtcgcaagcaagcaaacgtgtcctggcgtagcatgactgcatgagaatactataatggacaatttttaaatataatatataataaataaaagataatttatatagtaacatgattg

SEQ ID NO: 23087 - protein, 245 aa, Zea mays subsp. mays
  peptide (1)..(245): Ceres Seq. ID no. 15218967
  misc_feature (91)..(155): Pfam Name: Pfam Description:  AP2 domain
  misc_feature (4)..(244): NCBI GI NO: 37536882 NR Description: putative ethylene-responsive element  bindingprotein
  misc_feature (27)..(209): NCBI GI NO: 33440026 NR Description: Ap26 [Oryza sativa (japonica cultivar-group)]
  misc_feature (204)..(245): NCBI GI NO: 33440026 NR Description: Ap26 [Oryza sativa (japonica cultivar-group)]
  misc_feature (21)..(189): NCBI GI NO: 38346168 NR Description: OSJNBa0079A21.15
  misc_feature (204)..(245): NCBI GI NO: 38346168 NR Description: OSJNBa0079A21.15
  misc_feature (37)..(206): NCBI GI NO: 14140143 NR Description: putative ethylene responsive element binding factor
  misc_feature (27)..(244): NCBI GI NO: 40060533 NR Description: putative ethylene response factor 5
  misc_feature (42)..(245): NCBI GI NO: 12231294 NR Description: ripening regulated protein DDTFR10/A
  misc_feature (62)..(242): NCBI GI NO: 7489115 NR Description: DNA binding protein EREBP-4 - common tobacco
  misc_feature (52)..(244): NCBI GI NO: 17473792 NR Description: unknown protein [Arabidopsis thaliana]
MAMLREHLDLIRAHLLDDNHDAVSSDDSAPSHSPSPSPSPPGRRPLPALSVSLPPRPAVVLQQQHMRAAAPPLQIPQQEQHCCPEPEEDDFRRYRGVRQRPWGKYAAEIRDPSRKGARVWLGTYDTAVEAARAYDRAAFRLRGSKAILNFPNEVALSTAAWWATPAPPPQPSATVAGNKRARSPQEQDARCMVREVKKERIQEPASGGADYFWEDESLKGAICSLPPLSPLSPHPHLAVPQLYVS

SEQ ID NO: 23088 - protein, 243 aa, Zea mays subsp. mays
  peptide (1)..(243): Ceres Seq. ID no. 15218968
  misc_feature (89)..(153): Pfam Name: Pfam Description:  AP2 domain
  misc_feature (2)..(242): NCBI GI NO: 37536882 NR Description: putative ethylene-responsive element  bindingprotein
  misc_feature (25)..(207): NCBI GI NO: 33440026 NR Description: Ap26 [Oryza sativa (japonica cultivar-group)]
  misc_feature (202)..(243): NCBI GI NO: 33440026 NR Description: Ap26 [Oryza sativa (japonica cultivar-group)]
  misc_feature (19)..(187): NCBI GI NO: 38346168 NR Description: OSJNBa0079A21.15
  misc_feature (202)..(243): NCBI GI NO: 38346168 NR Description: OSJNBa0079A21.15
  misc_feature (35)..(204): NCBI GI NO: 14140143 NR Description: putative ethylene responsive element binding factor
  misc_feature (25)..(242): NCBI GI NO: 40060533 NR Description: putative ethylene response factor 5
  misc_feature (40)..(243): NCBI GI NO: 12231294 NR Description: ripening regulated protein DDTFR10/A
  misc_feature (60)..(240): NCBI GI NO: 7489115 NR Description: DNA binding protein EREBP-4 - common tobacco
  misc_feature (50)..(242): NCBI GI NO: 17473792 NR Description: unknown protein [Arabidopsis thaliana]
MLREHLDLIRAHLLDDNHDAVSSDDSAPSHSPSPSPSPPGRRPLPALSVSLPPRPAVVLQQQHMRAAAPPLQIPQQEQHCCPEPEEDDFRRYRGVRQRPWGKYAAEIRDPSRKGARVWLGTYDTAVEAARAYDRAAFRLRGSKAILNFPNEVALSTAAWWATPAPPPQPSATVAGNKRARSPQEQDARCMVREVKKERIQEPASGGADYFWEDESLKGAICSLPPLSPLSPHPHLAVPQLYVS

SEQ ID NO: 23089 - protein, 180 aa, Zea mays subsp. mays
  peptide (1)..(180): Ceres Seq. ID no. 15218969
  misc_feature (26)..(90): Pfam Name: Pfam Description:  AP2 domain
  misc_feature (1)..(179): NCBI GI NO: 37536882 NR Description: putative ethylene-responsive element  bindingprotein
  misc_feature (1)..(144): NCBI GI NO: 33440026 NR Description: Ap26 [Oryza sativa (japonica cultivar-group)]
  misc_feature (139)..(180): NCBI GI NO: 33440026 NR Description: Ap26 [Oryza sativa (japonica cultivar-group)]
  misc_feature (1)..(124): NCBI GI NO: 38346168 NR Description: OSJNBa0079A21.15
  misc_feature (139)..(180): NCBI GI NO: 38346168 NR Description: OSJNBa0079A21.15
  misc_feature (1)..(141): NCBI GI NO: 14140143 NR Description: putative ethylene responsive element binding factor
  misc_feature (1)..(179): NCBI GI NO: 40060533 NR Description: putative ethylene response factor 5
  misc_feature (1)..(180): NCBI GI NO: 12231294 NR Description: ripening regulated protein DDTFR10/A
  misc_feature (1)..(177): NCBI GI NO: 7489115 NR Description: DNA binding protein EREBP-4 - common tobacco
  misc_feature (1)..(179): NCBI GI NO: 17473792 NR Description: unknown protein [Arabidopsis thaliana]
MRAAAPPLQIPQQEQHCCPEPEEDDFRRYRGVRQRPWGKYAAEIRDPSRKGARVWLGTYDTAVEAARAYDRAAFRLRGSKAILNFPNEVALSTAAWWATPAPPPQPSATVAGNKRARSPQEQDARCMVREVKKERIQEPASGGADYFWEDESLKGAICSLPPLSPLSPHPHLAVPQLYVS

SEQ ID NO: 23090 - DNA, 915 bp, Zea mays subsp. mays
  misc_feature (1)..(915): Ceres Seq. ID no. 12634899
gatttatcaacatgcaaattctattgtgaaagtaattctcacggttaatctagaagcttgtaaatctcattatgatgtcacattagtatataaattctctgtgtgcatgtctttctgtgacacacaggagctattacaagtgcacgagctcccggtgcggcgcgaagaagcacgtggagaaatctatggacgactcagagatgctgatcgtcacgtacgagggttcgcacctgcacggcccacagccgctcttcccgcgtcgacagtggctgtcggttgacctgtccggcgcgggggtagcggcctcgaagacgaagcagcagcagaccaggtcctcctccccggccgcgtcagccacgctcgcaagcgacgacgggggcggcggctggccaccgagcctgcaaataatgacgcgcaacgccgagacgcgaggaggagggctcacggctgatgcaggcgagagcgagacgacgccggggcttcagagcggacgcacgggtgtgaccgcggactcgtgcgacgatggctccaccgcctccgtgccgccgccgccgcagactgctccctcgtttcactgtgactcgccgcctacgacctggtcctggtcgtgccttgactacaccctcgcctggtcccctgaagctcctctgcttcagtagaagccggtaaactagcttgtttaggaacaggatatgcatacatagatctcaaagagatcgaaagataagagaccccagctgtttattatattccatgcaaaaaaaaaactcaagtgactaaagccagaacgctgacgtgaagctacctaagttggtgcagcgacagtgataaaaaggctaagcacttttctagttaaccagctatactattattgtacagtgatatatatagatgccaatgtgtgcccttagcact

SEQ ID NO: 23091 - protein, 157 aa, Zea mays subsp. mays
  peptide (1)..(157): Ceres Seq. ID no. 12634900
  misc_feature (1)..(156): NCBI GI NO: 34908200 NR Description: P0406G08.14
  misc_feature (1)..(19): NCBI GI NO: 25140460 NR Description: WRKY transcription factor IId-2
  misc_feature (1)..(17): NCBI GI NO: 25140466 NR Description: WRKY transcription factor IId-4
  misc_feature (1)..(21): NCBI GI NO: 25140468 NR Description: WRKY transcription factor IId-5
  misc_feature (1)..(55): NCBI GI NO: 15239836 NR Description: WRKY family transcription factor
  misc_feature (1)..(21): NCBI GI NO: 25140464 NR Description: WRKY transcription factor IId-3
MDDSEMLIVTYEGSHLHGPQPLFPRRQWLSVDLSGAGVAASKTKQQQTRSSSPAASATLASDDGGGGWPPSLQIMTRNAETRGGGLTADAGESETTPGLQSGRTGVTADSCDDGSTASVPPPPQTAPSFHCDSPPTTWSWSCLDYTLAWSPEAPLLQ

SEQ ID NO: 23092 - protein, 152 aa, Zea mays subsp. mays
  peptide (1)..(152): Ceres Seq. ID no. 12634901
  misc_feature (1)..(151): NCBI GI NO: 34908200 NR Description: P0406G08.14
  misc_feature (1)..(14): NCBI GI NO: 25140460 NR Description: WRKY transcription factor IId-2
  misc_feature (1)..(12): NCBI GI NO: 25140466 NR Description: WRKY transcription factor IId-4
  misc_feature (1)..(16): NCBI GI NO: 25140468 NR Description: WRKY transcription factor IId-5
  misc_feature (1)..(50): NCBI GI NO: 15239836 NR Description: WRKY family transcription factor
  misc_feature (1)..(16): NCBI GI NO: 25140464 NR Description: WRKY transcription factor IId-3
MLIVTYEGSHLHGPQPLFPRRQWLSVDLSGAGVAASKTKQQQTRSSSPAASATLASDDGGGGWPPSLQIMTRNAETRGGGLTADAGESETTPGLQSGRTGVTADSCDDGSTASVPPPPQTAPSFHCDSPPTTWSWSCLDYTLAWSPEAPLLQ

SEQ ID NO: 23093 - protein, 92 aa, Zea mays subsp. mays
  peptide (1)..(92): Ceres Seq. ID no. 12634902
IYQHANSIVKVILTVNLEACKSHYDVTLVYKFSVCMSFCDTQELLQVHELPVRREEARGEIYGRLRDADRHVRGFAPARPTAALPASTVAVG

SEQ ID NO: 23094 - DNA, 685 bp, Zea mays subsp. mays
  misc_feature (1)..(685): Ceres Seq. ID no. 13599166
tattacttatccgtctcaaagcagcctagtgccgcaaagtcagtccagtccacaggccttcttcaagcagatatatagcagtaccgtccatgggcaactgcacggcgtcgcagcgcgcagcggagtcgtgggccgacgacggcgagtgggaggaggcggcgtcatcgtcgccgttgtcgtcggagggcgaccaccaccaccatcatcatcaccgcgacgagaggagagaggatcaccacgactccgaggtgaccatcaggatcaccaagaggcagctgcacgagctgattgagaagaacggcggcggccacgggttaccgctaccggggtccgggaggcgccggcggtcgtccgcggagcagctgctggccgacatcatggactccggcgaggtgcaccaccgcgaccaccacagggaggaccactggcactggaagcccgcgctgcagagcatccccgagaccgtcgagtcatcatgactgtcatgcatgatctttcttggtgtttggtggttcagtagctcgatcaggggtcgttattttcgcctcttgttcggtgtgcaagtgtagtcgctagctaatcggtgacacggtgtacatatcaaagttttcagacatgtacatataggtctagggaggtgggagttcattgttaggttaggtccattatatttcagatgtgtggg

SEQ ID NO: 23095 - protein, 129 aa, Zea mays subsp. mays
  peptide (1)..(129): Ceres Seq. ID no. 13599167
  misc_feature (1)..(128): NCBI GI NO: 34908832 NR Description: P0684C02.7
  misc_feature (1)..(129): NCBI GI NO: 34908840 NR Description: P0684C02.11
  misc_feature (1)..(78): NCBI GI NO: 34908836 NR Description: P0684C02.9
MGNCTASQRAAESWADDGEWEEAASSSPLSSEGDHHHHHHHRDERREDHHDSEVTIRITKRQLHELIEKNGGGHGLPLPGSGRRRRSSAEQLLADIMDSGEVHHRDHHREDHWHWKPALQSIPETVESS

SEQ ID NO: 23096 - protein, 96 aa, Zea mays subsp. mays
  peptide (1)..(96): Ceres Seq. ID no. 13599168
ITYPSQSSLVPQSQSSPQAFFKQIYSSTVHGQLHGVAARSGVVGRRRRVGGGGVIVAVVVGGRPPPPSSSPRREERGSPRLRGDHQDHQEAAARAD

SEQ ID NO: 23097 - DNA, 960 bp, Zea mays subsp. mays
  misc_feature (1)..(960): Ceres Seq. ID no. 14306406
actacgcgcgaggcacggcacggcacggcacgaccgagctccagtctgcccccgcccccgcccccatccgcacgtccgccttgatccggcaaatggcgtcgccggcgcggcggctcctgcagaccaactccgtgcagtacccgacgctccccgcggccgacccgccgagcgcgctggccgtcgactccgacgtggtggtcatcctcgccgcgctcctctgcgcgctcatctgcgtcgtggggctggcctccgtggcccggtgcgcgcgctcccgcgccgcgcccgccgccgccgccaggagggggctcaggaagaaggcgctcagggcgctgccgagcctcgcgtacgaggacgccgtggcggcccgggccggggccggggacggggccggggacggggcggcggaggtcctggcggagtgcgccatctgcctgtcggagttcgcgccacgggaggaggtccgcgtgctgccgcagtgcggccacgccttccacgtcgcctgcatcgacacctggctcgccgcccactcctcctgtccctcgtgccgccgcgtcctcgtcgtcggcgacgacgccagtaagcgcccgccccaccagcctaagcgctgccgcaagtgcgacgcggccatggacgagccctcctcgtcgtccggttccgccggcgccacgcctgccggttcctgacccttctcaccagtgccacagccacgccaccaccgccgccagtttctagcaactgggccggcaatcttagctccactggaattccctcatcatcaggcgccgccggtttctagcaactgggttggcaatctttagctccactccacttcattccaaggattcgaacgttgatgctgtaaattgcaggttggtcgattatgtacatatttattttcagattagaaacatgctaaagtatcgtgtgaatgtgaatctcagaaacagaatctttcttcgc

SEQ ID NO: 23098 - protein, 226 aa, Zea mays subsp. mays
  peptide (1)..(226): Ceres Seq. ID no. 14306407
  misc_feature (140)..(181): Pfam Name: RING finger Pfam Description: Zinc finger, C3HC4 type
  misc_feature (17)..(221): NCBI GI NO: 7489432 NR Description: probable ring finger protein - barley
  misc_feature (95)..(226): NCBI GI NO: 37536508 NR Description: putative ring finger protein
  misc_feature (35)..(216): NCBI GI NO: 32487554 NR Description: OSJNBa0013K16.6
  misc_feature (41)..(186): NCBI GI NO: 15237013 NR Description: RING-H2 finger protein RHA3b
  misc_feature (31)..(217): NCBI GI NO: 15223041 NR Description: RING zinc finger protein -related
  misc_feature (31)..(217): NCBI GI NO: 21555237 NR Description: putative RING zinc finger protein
  misc_feature (36)..(223): NCBI GI NO: 15218042 NR Description: RING zinc finger protein -related
  misc_feature (31)..(185): NCBI GI NO: 15227839 NR Description: RING zinc finger protein -related
  misc_feature (61)..(186): NCBI GI NO: 15241087 NR Description: expressed protein [Arabidopsis thaliana]
  misc_feature (22)..(216): NCBI GI NO: 34907826 NR Description: P0485B12.26
YARGTARHGTTELQSAPAPAPIRTSALIRQMASPARRLLQTNSVQYPTLPAADPPSALAVDSDVVVILAALLCALICVVGLASVARCARSRAAPAAAARRGLRKKALRALPSLAYEDAVAARAGAGDGAGDGAAEVLAECAICLSEFAPREEVRVLPQCGHAFHVACIDTWLAAHSSCPSCRRVLVVGDDASKRPPHQPKRCRKCDAAMDEPSSSSGSAGATPAGS

SEQ ID NO: 23099 - protein, 196 aa, Zea mays subsp. mays
  peptide (1)..(196): Ceres Seq. ID no. 14306408
  misc_feature (110)..(151): Pfam Name: RING finger Pfam Description: Zinc finger, C3HC4 type
  misc_feature (1)..(191): NCBI GI NO: 7489432 NR Description: probable ring finger protein - barley
  misc_feature (65)..(196): NCBI GI NO: 37536508 NR Description: putative ring finger protein
  misc_feature (5)..(186): NCBI GI NO: 32487554 NR Description: OSJNBa0013K16.6
  misc_feature (11)..(156): NCBI GI NO: 15237013 NR Description: RING-H2 finger protein RHA3b
  misc_feature (1)..(187): NCBI GI NO: 15223041 NR Description: RING zinc finger protein -related
  misc_feature (1)..(187): NCBI GI NO: 21555237 NR Description: putative RING zinc finger protein
  misc_feature (6)..(193): NCBI GI NO: 15218042 NR Description: RING zinc finger protein -related
  misc_feature (1)..(155): NCBI GI NO: 15227839 NR Description: RING zinc finger protein -related
  misc_feature (31)..(156): NCBI GI NO: 15241087 NR Description: expressed protein [Arabidopsis thaliana]
  misc_feature (1)..(186): NCBI GI NO: 34907826 NR Description: P0485B12.26
MASPARRLLQTNSVQYPTLPAADPPSALAVDSDVVVILAALLCALICVVGLASVARCARSRAAPAAAARRGLRKKALRALPSLAYEDAVAARAGAGDGAGDGAAEVLAECAICLSEFAPREEVRVLPQCGHAFHVACIDTWLAAHSSCPSCRRVLVVGDDASKRPPHQPKRCRKCDAAMDEPSSSSGSAGATPAGS

SEQ ID NO: 23100 - protein, 192 aa, Zea mays subsp. mays
  peptide (1)..(192): Ceres Seq. ID no. 14306409
  misc_feature (8)..(114): Pfam Name: Pfam Description:  Atrophin-1 family
LRARHGTARHDRAPVCPRPRPHPHVRLDPANGVAGAAAPADQLRAVPDAPRGRPAERAGRRLRRGGHPRRAPLRAHLRRGAGLRGPVRALPRRARRRRQEGAQEEGAQGAAEPRVRGRRGGPGRGRGRGRGRGGGGPGGVRHLPVGVRATGGGPRAAAVRPRLPRRLHRHLARRPLLLSLVPPRPRRRRRRQ

SEQ ID NO: 23101 - DNA, 1786 bp, Zea mays subsp. mays
  misc_feature (1)..(1786): Ceres Seq. ID no. 13574418
gcgttcggtggtgactccgggctccgggcgccctgcgcccctggatttcgaaccgagaaagaaagctgctgcccaccgtttcccaagtcccatcgccgcccaagaaccggagccacgccgcagatccgccaaaatcacacctcctagcccgtcctccgtcccaatctcttctcgggccagggaggcggcgggacttggtgcctgcatccgagccctagacatggatcaacctgaggaaaaccctgaattcccaagctgtgatgcctactttgaagctatccagtccaagaagaagttgccactgactttgcaagaatcactaactgctgcctttgctcagattccagtctcatccttccctgaggttccagctggtcgagtaattgaaattcctggtgatacttctgttattgatgctgtaaggactctctctgaacagaacataagggcagcaccagtactgaatccagaacctggggctcctactgattggcaggggaggtaccttggtgtcatcgattactcggcaatcatcctttgggtactagaaaatgctgagcttgctgctgttgcactctcggctgcatcggcaactgctgctggagttggcatgggtgctgttggtgctgttggggtggcagctttgggaacaactggcccagctgctgtagctggcttaactgcagctgcaattggggcttctgttgctggtggattaactgctgaaaagggtgtggcgaaggatgggctaactgctgcagatcatttaggggaggatttctacaaagttttacttcagcaggaacctttcagatcaacaacagttcgatcgattgttgagtcgtaccgctggtctccttttgtccccattacactggacacttccatgctgactgtacttctgttgctctctaagtacagattgcgaaatgtccctgtgattgagcctgaaaagcctatcatcaggaatttcattactcagactggtgttgtcaaagggctgcagcaatgtaaaggaagggactggtttgactacatttctgcacttcctctttcagacttaggacttccatttatgtccattgatgaggttatcaccgtcaacagtgatgatcttatcttagaagctttcaagtgcatgaaggataacaagattggtggtgtcccagtagtagaaggccccaaaagaaaacttgttggcagtgttagcataagggacatccgctttctgttgcttagacccaacttattttcaaatttcaggcagttgacagtcattgaattcatgaagactctaggctccactcttcctgattcagagagcaattgcctggtgaagccaccacccacttgcactcctgacgcttcccttggtagtgttattgacagcattgcatcaagaataacacacaggatatatgtagtggatgatgaccttgaggttgttggtgttgtgactctgcgtgatgtgatctcatgctttattcatgagccacccggttattgcgacaactatttggcttcagcgatggagaagcttgaggggaaaggagtcagatcagtggagaaaatttgagcttttctgtagcgtgaatgttgataataacaggtcagtatgtgaggaaggtttatttggttggaacggtgcattcgtgtcgtgttaatccagcaaatcctgtgtaggttaagtaacaaggcttctgtgctgttaaaaatattttactatgtcatttctttggacggttttctgaacaaatgtgtggtaaccattaggccttgttcggtt

SEQ ID NO: 23102 - protein, 524 aa, Zea mays subsp. mays
  peptide (1)..(524): Ceres Seq. ID no. 15222589
  misc_feature (121)..(182): Pfam Name: Pfam Description:  CBS domain
  misc_feature (74)..(522): NCBI GI NO: 34912162 NR Description: P0712E02.24
  misc_feature (85)..(513): NCBI GI NO: 25404839 NR Description: hypothetical protein T17F3.17
  misc_feature (275)..(513): NCBI GI NO: 18409372 NR Description: CBS domain containing protein
  misc_feature (259)..(510): NCBI GI NO: 15228397 NR Description: CBS domain containing protein
  misc_feature (91)..(198): NCBI GI NO: 15228397 NR Description: CBS domain containing protein
  misc_feature (259)..(510): NCBI GI NO: 21592917 NR Description: unknown [Arabidopsis thaliana]
  misc_feature (91)..(198): NCBI GI NO: 21592917 NR Description: unknown [Arabidopsis thaliana]
  misc_feature (200)..(505): NCBI GI NO: 38346640 NR Description: OSJNBa0072D21.10
  misc_feature (228)..(505): NCBI GI NO: 19386799 NR Description: OJ1485_B09.7
  misc_feature (278)..(499): NCBI GI NO: 7489654 NR Description: probable transcription regulator protein - sorghum
RSVVTPGSGRPAPLDFEPRKKAAAHRFPSPIAAQEPEPRRRSAKITPPSPSSVPISSRAREAAGLGACIRALDMDQPEENPEFPSCDAYFEAIQSKKKLPLTLQESLTAAFAQIPVSSFPEVPAGRVIEIPGDTSVIDAVRTLSEQNIRAAPVLNPEPGAPTDWQGRYLGVIDYSAIILWVLENAELAAVALSAASATAAGVGMGAVGAVGVAALGTTGPAAVAGLTAAAIGASVAGGLTAEKGVAKDGLTAADHLGEDFYKVLLQQEPFRSTTVRSIVESYRWSPFVPITLDTSMLTVLLLLSKYRLRNVPVIEPEKPIIRNFITQTGVVKGLQQCKGRDWFDYISALPLSDLGLPFMSIDEVITVNSDDLILEAFKCMKDNKIGGVPVVEGPKRKLVGSVSIRDIRFLLLRPNLFSNFRQLTVIEFMKTLGSTLPDSESNCLVKPPPTCTPDASLGSVIDSIASRITHRIYVVDDDLEVVGVVTLRDVISCFIHEPPGYCDNYLASAMEKLEGKGVRSVEKI

SEQ ID NO: 23103 - protein, 451 aa, Zea mays subsp. mays
  peptide (1)..(451): Ceres Seq. ID no. 15222590
  misc_feature (48)..(109): Pfam Name: Pfam Description:  CBS domain
  misc_feature (1)..(449): NCBI GI NO: 34912162 NR Description: P0712E02.24
  misc_feature (12)..(440): NCBI GI NO: 25404839 NR Description: hypothetical protein T17F3.17
  misc_feature (202)..(440): NCBI GI NO: 18409372 NR Description: CBS domain containing protein
  misc_feature (186)..(437): NCBI GI NO: 15228397 NR Description: CBS domain containing protein
  misc_feature (18)..(125): NCBI GI NO: 15228397 NR Description: CBS domain containing protein
  misc_feature (186)..(437): NCBI GI NO: 21592917 NR Description: unknown [Arabidopsis thaliana]
  misc_feature (18)..(125): NCBI GI NO: 21592917 NR Description: unknown [Arabidopsis thaliana]
  misc_feature (127)..(432): NCBI GI NO: 38346640 NR Description: OSJNBa0072D21.10
  misc_feature (155)..(432): NCBI GI NO: 19386799 NR Description: OJ1485_B09.7
  misc_feature (205)..(426): NCBI GI NO: 7489654 NR Description: probable transcription regulator protein - sorghum
MDQPEENPEFPSCDAYFEAIQSKKKLPLTLQESLTAAFAQIPVSSFPEVPAGRVIEIPGDTSVIDAVRTLSEQNIRAAPVLNPEPGAPTDWQGRYLGVIDYSAIILWVLENAELAAVALSAASATAAGVGMGAVGAVGVAALGTTGPAAVAGLTAAAIGASVAGGLTAEKGVAKDGLTAADHLGEDFYKVLLQQEPFRSTTVRSIVESYRWSPFVPITLDTSMLTVLLLLSKYRLRNVPVIEPEKPIIRNFITQTGVVKGLQQCKGRDWFDYISALPLSDLGLPFMSIDEVITVNSDDLILEAFKCMKDNKIGGVPVVEGPKRKLVGSVSIRDIRFLLLRPNLFSNFRQLTVIEFMKTLGSTLPDSESNCLVKPPPTCTPDASLGSVIDSIASRITHRIYVVDDDLEVVGVVTLRDVISCFIHEPPGYCDNYLASAMEKLEGKGVRSVEKI

SEQ ID NO: 23104 - protein, 321 aa, Zea mays subsp. mays
  peptide (1)..(321): Ceres Seq. ID no. 15222591
  misc_feature (1)..(319): NCBI GI NO: 34912162 NR Description: P0712E02.24
  misc_feature (1)..(310): NCBI GI NO: 25404839 NR Description: hypothetical protein T17F3.17
  misc_feature (72)..(310): NCBI GI NO: 18409372 NR Description: CBS domain containing protein
  misc_feature (56)..(307): NCBI GI NO: 15228397 NR Description: CBS domain containing protein
  misc_feature (56)..(307): NCBI GI NO: 21592917 NR Description: unknown [Arabidopsis thaliana]
  misc_feature (1)..(302): NCBI GI NO: 38346640 NR Description: OSJNBa0072D21.10
  misc_feature (25)..(302): NCBI GI NO: 19386799 NR Description: OJ1485_B09.7
  misc_feature (75)..(296): NCBI GI NO: 7489654 NR Description: probable transcription regulator protein - sorghum
  misc_feature (44)..(296): NCBI GI NO: 6650528 NR Description: putative transcription factor X2
  misc_feature (44)..(296): NCBI GI NO: 34912990 NR Description: P0663E10.8
MGAVGAVGVAALGTTGPAAVAGLTAAAIGASVAGGLTAEKGVAKDGLTAADHLGEDFYKVLLQQEPFRSTTVRSIVESYRWSPFVPITLDTSMLTVLLLLSKYRLRNVPVIEPEKPIIRNFITQTGVVKGLQQCKGRDWFDYISALPLSDLGLPFMSIDEVITVNSDDLILEAFKCMKDNKIGGVPVVEGPKRKLVGSVSIRDIRFLLLRPNLFSNFRQLTVIEFMKTLGSTLPDSESNCLVKPPPTCTPDASLGSVIDSIASRITHRIYVVDDDLEVVGVVTLRDVISCFIHEPPGYCDNYLASAMEKLEGKGVRSVEKI

SEQ ID NO: 23105 - DNA, 1361 bp, Zea mays subsp. mays
  misc_feature (1)..(1361): Ceres Seq. ID no. 13599169
gtgtgtcatttctctctgacgggtgagatttggtttggatctggtcggaccaggtgctccacgcgatggcgcagaaggagactaatggcagcaacggcgatcacatctccacccgcccgccgccgaccccctcgcccctccgcttctccaagttctttcaggctaacctgcggatcctggtcactggtggggcgggcttcatcggctcgcacctcgtagacaagctcatggagaacgagaagcacgaggtcattgttgctgataactttttcactggttcaaaagacaacctgaagaagtggattggccacccaagatttgagctcatccgtcatgatgtcaccgagccgcttcttgtggaagttgaccaaatctatcaccttgcttgccctgcttcaccaatcttctacaagcacaaccctgttaagaccatcaagacaaatgttattggtaccctgaacatgctaggacttgcaaagagagttggagctaggattttgttgacatcaacctctgaagtttatggtgatccacttgagcatcctcaaactgaggcctactggggcaatgttaacccgattggtgttaggagttgttatgatgagggtaagcgtgtagcagagacgctgatgttcgactatcacaggcagcatggcattgaaatccggattgccaggattttcaacacctatgggcctaggatgaacattgatgatggccgtgttgttagcaacttcattgctcaggctgtgcgcggtgagcccctgactgtccagaggccaggaacacagactaggagtttctgctatgttgccgatatggttgatggtcttattaagctgatgaatggaaacaagactggaccgattaacttggggaacccaggtgaattcaccatgctggaacttgctgagaatgtgaaggagttgatcaacccagatgtgacagtgacgatgaccgagaacactcctgatgatccccgccagaggaagccggacatcacaaaggcgaaggaagttctgggatgggagcccaagatcgtcctgcgggacggcttggtgctcatggaggatgatttccgggagcgcctgaccgtgcccaagaaaaccaaggcctaaattgccctgcagttggggaagaatatccacacggggaagcatactcatagtcgggctcgtcattatttgtggccacatttcattacggaatttgagttccaataaacttaatattcctttgtcgttcaccttgaaggattgtattattagaattttcatacagggctggccattcgagtctctgcctacgcagatcttgtggtacttgtgtttgtagccaatgtgtgagtaaaagtcgattat

SEQ ID NO: 23106 - protein, 350 aa, Zea mays subsp. mays
  peptide (1)..(350): Ceres Seq. ID no. 13599170
  misc_feature (37)..(342): Pfam Name: Pfam Description:  NAD dependent epimerase/dehydratase family
  misc_feature (1)..(350): NCBI GI NO: 11121508 NR Description: d-TDP-glucose dehydratase [Phragmites australis]
  misc_feature (1)..(350): NCBI GI NO: 18447934 NR Description: UDP-glucuronic acid decarboxylase
  misc_feature (7)..(347): NCBI GI NO: 11270075 NR Description: dTDPglucose 4,6-dehydratase (EC 4.2.1.46)
  misc_feature (6)..(347): NCBI GI NO: 15226950 NR Description: NAD-dependent epimerase/dehydratase family
  misc_feature (7)..(346): NCBI GI NO: 13591616 NR Description: UDP-D-glucuronate carboxy-lyase [Pisum sativum]
  misc_feature (15)..(346): NCBI GI NO: 15237853 NR Description: NAD-dependent epimerase/dehydratase family
  misc_feature (9)..(346): NCBI GI NO: 15231432 NR Description: NAD-dependent epimerase/dehydratase family
  misc_feature (15)..(346): NCBI GI NO: 14030703 NR Description: AT5g59290/mnc17_180 [Arabidopsis thaliana]
  misc_feature (84)..(346): NCBI GI NO: 2351580 NR Description: thymidine diphospho-glucose 4-6-dehydratase homolog
  misc_feature (35)..(342): NCBI GI NO: 15227109 NR Description: NAD-dependent epimerase/dehydratase family
MAQKETNGSNGDHISTRPPPTPSPLRFSKFFQANLRILVTGGAGFIGSHLVDKLMENEKHEVIVADNFFTGSKDNLKKWIGHPRFELIRHDVTEPLLVEVDQIYHLACPASPIFYKHNPVKTIKTNVIGTLNMLGLAKRVGARILLTSTSEVYGDPLEHPQTEAYWGNVNPIGVRSCYDEGKRVAETLMFDYHRQHGIEIRIARIFNTYGPRMNIDDGRVVSNFIAQAVRGEPLTVQRPGTQTRSFCYVADMVDGLIKLMNGNKTGPINLGNPGEFTMLELAENVKELINPDVTVTMTENTPDDPRQRKPDITKAKEVLGWEPKIVLRDGLVLMEDDFRERLTVPKKTKA

SEQ ID NO: 23107 - protein, 296 aa, Zea mays subsp. mays
  peptide (1)..(296): Ceres Seq. ID no. 13599171
  misc_feature (1)..(288): Pfam Name: Pfam Description:  NAD dependent epimerase/dehydratase family
  misc_feature (1)..(296): NCBI GI NO: 11121508 NR Description: d-TDP-glucose dehydratase [Phragmites australis]
  misc_feature (1)..(296): NCBI GI NO: 18447934 NR Description: UDP-glucuronic acid decarboxylase
  misc_feature (1)..(293): NCBI GI NO: 11270075 NR Description: dTDPglucose 4,6-dehydratase (EC 4.2.1.46)
  misc_feature (1)..(293): NCBI GI NO: 15226950 NR Description: NAD-dependent epimerase/dehydratase family
  misc_feature (1)..(292): NCBI GI NO: 13591616 NR Description: UDP-D-glucuronate carboxy-lyase [Pisum sativum]
  misc_feature (1)..(292): NCBI GI NO: 15237853 NR Description: NAD-dependent epimerase/dehydratase family
  misc_feature (1)..(292): NCBI GI NO: 15231432 NR Description: NAD-dependent epimerase/dehydratase family
  misc_feature (1)..(292): NCBI GI NO: 14030703 NR Description: AT5g59290/mnc17_180 [Arabidopsis thaliana]
  misc_feature (30)..(292): NCBI GI NO: 2351580 NR Description: thymidine diphospho-glucose 4-6-dehydratase homolog
  misc_feature (1)..(288): NCBI GI NO: 15227109 NR Description: NAD-dependent epimerase/dehydratase family
MENEKHEVIVADNFFTGSKDNLKKWIGHPRFELIRHDVTEPLLVEVDQIYHLACPASPIFYKHNPVKTIKTNVIGTLNMLGLAKRVGARILLTSTSEVYGDPLEHPQTEAYWGNVNPIGVRSCYDEGKRVAETLMFDYHRQHGIEIRIARIFNTYGPRMNIDDGRVVSNFIAQAVRGEPLTVQRPGTQTRSFCYVADMVDGLIKLMNGNKTGPINLGNPGEFTMLELAENVKELINPDVTVTMTENTPDDPRQRKPDITKAKEVLGWEPKIVLRDGLVLMEDDFRERLTVPKKTKA

SEQ ID NO: 23108 - protein, 218 aa, Zea mays subsp. mays
  peptide (1)..(218): Ceres Seq. ID no. 13599172
  misc_feature (1)..(210): Pfam Name: Pfam Description:  NAD dependent epimerase/dehydratase family
  misc_feature (1)..(218): NCBI GI NO: 11121508 NR Description: d-TDP-glucose dehydratase [Phragmites australis]
  misc_feature (1)..(218): NCBI GI NO: 18447934 NR Description: UDP-glucuronic acid decarboxylase
  misc_feature (1)..(215): NCBI GI NO: 11270075 NR Description: dTDPglucose 4,6-dehydratase (EC 4.2.1.46)
  misc_feature (1)..(215): NCBI GI NO: 15226950 NR Description: NAD-dependent epimerase/dehydratase family
  misc_feature (1)..(214): NCBI GI NO: 13591616 NR Description: UDP-D-glucuronate carboxy-lyase [Pisum sativum]
  misc_feature (1)..(214): NCBI GI NO: 15237853 NR Description: NAD-dependent epimerase/dehydratase family
  misc_feature (1)..(214): NCBI GI NO: 15231432 NR Description: NAD-dependent epimerase/dehydratase family
  misc_feature (1)..(214): NCBI GI NO: 14030703 NR Description: AT5g59290/mnc17_180 [Arabidopsis thaliana]
  misc_feature (1)..(214): NCBI GI NO: 2351580 NR Description: thymidine diphospho-glucose 4-6-dehydratase homolog
  misc_feature (1)..(210): NCBI GI NO: 15227109 NR Description: NAD-dependent epimerase/dehydratase family
MLGLAKRVGARILLTSTSEVYGDPLEHPQTEAYWGNVNPIGVRSCYDEGKRVAETLMFDYHRQHGIEIRIARIFNTYGPRMNIDDGRVVSNFIAQAVRGEPLTVQRPGTQTRSFCYVADMVDGLIKLMNGNKTGPINLGNPGEFTMLELAENVKELINPDVTVTMTENTPDDPRQRKPDITKAKEVLGWEPKIVLRDGLVLMEDDFRERLTVPKKTKA

SEQ ID NO: 23109 - DNA, 1205 bp, Zea mays subsp. mays
  misc_feature (1)..(1205): Ceres Seq. ID no. 15180619
agccacgcacgcgcacaggcacagtcagagcgagatcagggaagaggggggaggaggaggaggaggaagaagaagaagcaggcatggagcctcatcacgcaaacaagccaaagccaaggccaaagctcagcgcgaagcactccaagttcatctcctgcaagctctacatctccgaatcccgcaacgctacggccgtggacgcagtggagcgtgcgagcaagagcgacccccaggtggtcgtcgtcagccagttcggggaccatcactacaaccgtttccgctacacgcttgtctcctacatcgtcgtcgacgacgacggcgtcgacggcggcggcggatcgtcggcggctggagaggcgatagtagtacatagcccgatcaggaaggtgttgctggcaatgatggaggccgcgttctcaagcatagacctggaatcgcagtcgggagcgcatccgaggatgggcgtcgtggacgacctgtccttccaccccgtgggccaagcgacagtcgaggacgccgcttctctggctaggcaggtagcgtctgacattgcctgcatcgcagcagtcccagtgttcctgtacgcagcagcccacccggcggggaagtcggtgggcgcggtccggcgtgagctcggctactaccgcccaaactacaggggcaaccagtggtcaggcagcgtgctccccgacgtcctgccggtgaagcctgacgtcggtccggcccacgtcgtctcgcacaagagaggcgctacgacggtgggcgtcacgccttggatcgagggctacaatgtccccgtgctgtgcaaggacgtcgccaccgtcaggaggatcacccgtggtgtcactggacgcagcggagggcttcccacggtgcaggctctcgcgctcttccatggagatgactgcaccgagattgcgtgcttgctggatccagaccatgccagcgcctatcaagttcagaccgtcgtggaacagattgcaggagaccagggacttgaggttgagcagggatactacactgacataaccaaggacgaagcgctcgataagtatctcaagattgcttgcgctgacgactgatgagcttgtagaaataaatacatggggtaaatgtaaactcatgtttgtagcactgatgctgctgctggagcattattttttgcccgtgtaaattcgattttgcatctgaaaacttgagtttgg

SEQ ID NO: 23110 - protein, 359 aa, Zea mays subsp. mays
  peptide (1)..(359): Ceres Seq. ID no. 15180620
  misc_feature (262)..(310): Pfam Name: Pfam Description:  Formiminotransferase domain
  misc_feature (124)..(354): NCBI GI NO: 18399493 NR Description: expressed protein [Arabidopsis thaliana]
  misc_feature (52)..(98): NCBI GI NO: 18399493 NR Description: expressed protein [Arabidopsis thaliana]
  misc_feature (52)..(355): NCBI GI NO: 5734618 NR Description: Similar to Arabidopsis thaliana chromosome II BACF5H14 genomic sequence
  misc_feature (52)..(355): NCBI GI NO: 34898040 NR Description: OSJNBa0038F22.18
  misc_feature (124)..(354): NCBI GI NO: 25411995 NR Description: hypothetical protein At2g20830
  misc_feature (52)..(98): NCBI GI NO: 25411995 NR Description: hypothetical protein At2g20830
  misc_feature (197)..(355): NCBI GI NO: 34897974 NR Description: hypothetical protein~similar to Oryza sativachromosome 6
  misc_feature (44)..(98): NCBI GI NO: 34897974 NR Description: hypothetical protein~similar to Oryza sativachromosome 6
  misc_feature (132)..(300): NCBI GI NO: 13540922 NR Description: Glutamate formiminotransferase
  misc_feature (126)..(334): NCBI GI NO: 28211902 NR Description: glutamate formiminotransferase
PRTRTGTVRARSGKRGEEEEEEEEEAGMEPHHANKPKPRPKLSAKHSKFISCKLYISESRNATAVDAVERASKSDPQVVVVSQFGDHHYNRFRYTLVSYIVVDDDGVDGGGGSSAAGEAIVVHSPIRKVLLAMMEAAFSSIDLESQSGAHPRMGVVDDLSFHPVGQATVEDAASLARQVASDIACIAAVPVFLYAAAHPAGKSVGAVRRELGYYRPNYRGNQWSGSVLPDVLPVKPDVGPAHVVSHKRGATTVGVTPWIEGYNVPVLCKDVATVRRITRGVTGRSGGLPTVQALALFHGDDCTEIACLLDPDHASAYQVQTVVEQIAGDQGLEVEQGYYTDITKDEALDKYLKIACADD

SEQ ID NO: 23111 - protein, 332 aa, Zea mays subsp. mays
  peptide (1)..(332): Ceres Seq. ID no. 15180621
  misc_feature (235)..(283): Pfam Name: Pfam Description:  Formiminotransferase domain
  misc_feature (97)..(327): NCBI GI NO: 18399493 NR Description: expressed protein [Arabidopsis thaliana]
  misc_feature (25)..(71): NCBI GI NO: 18399493 NR Description: expressed protein [Arabidopsis thaliana]
  misc_feature (25)..(328): NCBI GI NO: 5734618 NR Description: Similar to Arabidopsis thaliana chromosome II BACF5H14 genomic sequence
  misc_feature (25)..(328): NCBI GI NO: 34898040 NR Description: OSJNBa0038F22.18
  misc_feature (97)..(327): NCBI GI NO: 25411995 NR Description: hypothetical protein At2g20830
  misc_feature (25)..(71): NCBI GI NO: 25411995 NR Description: hypothetical protein At2g20830
  misc_feature (170)..(328): NCBI GI NO: 34897974 NR Description: hypothetical protein~similar to Oryza sativachromosome 6
  misc_feature (17)..(71): NCBI GI NO: 34897974 NR Description: hypothetical protein~similar to Oryza sativachromosome 6
  misc_feature (105)..(273): NCBI GI NO: 13540922 NR Description: Glutamate formiminotransferase
  misc_feature (99)..(307): NCBI GI NO: 28211902 NR Description: glutamate formiminotransferase
MEPHHANKPKPRPKLSAKHSKFISCKLYISESRNATAVDAVERASKSDPQVVVVSQFGDHHYNRFRYTLVSYIVVDDDGVDGGGGSSAAGEAIVVHSPIRKVLLAMMEAAFSSIDLESQSGAHPRMGVVDDLSFHPVGQATVEDAASLARQVASDIACIAAVPVFLYAAAHPAGKSVGAVRRELGYYRPNYRGNQWSGSVLPDVLPVKPDVGPAHVVSHKRGATTVGVTPWIEGYNVPVLCKDVATVRRITRGVTGRSGGLPTVQALALFHGDDCTEIACLLDPDHASAYQVQTVVEQIAGDQGLEVEQGYYTDITKDEALDKYLKIACADD

SEQ ID NO: 23112 - protein, 227 aa, Zea mays subsp. mays
  peptide (1)..(227): Ceres Seq. ID no. 15180622
  misc_feature (130)..(178): Pfam Name: Pfam Description:  Formiminotransferase domain
  misc_feature (1)..(222): NCBI GI NO: 18399493 NR Description: expressed protein [Arabidopsis thaliana]
  misc_feature (1)..(223): NCBI GI NO: 5734618 NR Description: Similar to Arabidopsis thaliana chromosome II BACF5H14 genomic sequence
  misc_feature (1)..(223): NCBI GI NO: 34898040 NR Description: OSJNBa0038F22.18
  misc_feature (1)..(222): NCBI GI NO: 25411995 NR Description: hypothetical protein At2g20830
  misc_feature (65)..(223): NCBI GI NO: 34897974 NR Description: hypothetical protein~similar to Oryza sativachromosome 6
  misc_feature (1)..(168): NCBI GI NO: 13540922 NR Description: Glutamate formiminotransferase
  misc_feature (1)..(202): NCBI GI NO: 28211902 NR Description: glutamate formiminotransferase
  misc_feature (1)..(222): NCBI GI NO: 20806959 NR Description: Glutamate formiminotransferase
  misc_feature (1)..(216): NCBI GI NO: 16082441 NR Description: probable glutamate formiminotransferase
  misc_feature (1)..(202): NCBI GI NO: 15643606 NR Description: formiminotransferase- cyclodeaminase/formiminotetrahydrofolate cyclodeaminase
MMEAAFSSIDLESQSGAHPRMGVVDDLSFHPVGQATVEDAASLARQVASDIACIAAVPVFLYAAAHPAGKSVGAVRRELGYYRPNYRGNQWSGSVLPDVLPVKPDVGPAHVVSHKRGATTVGVTPWIEGYNVPVLCKDVATVRRITRGVTGRSGGLPTVQALALFHGDDCTEIACLLDPDHASAYQVQTVVEQIAGDQGLEVEQGYYTDITKDEALDKYLKIACADD

SEQ ID NO: 23113 - DNA, 1248 bp, Zea mays subsp. mays
  misc_feature (1)..(1248): Ceres Seq. ID no. 12365169
atcggtgatcggtctcctatgttcacacctgtttgctctcttttcttcccccgttcacctcgcgtgcgccacccacctagggtgaccgccgccgcccttcgcccagccgcccgggttgcgctttgccggcgacgagcgcccaccgcacccccaccatattggtcactggaggattgctgcggttggtaaggatgagcaaaggcccagttccgtttgccaacatcgggaagagagcaaaagatctcctgtacaaggactacaactttgaccaaaagttttctttgtcgacgtctagcggctctggtttgaatctcacagccactggtgtaaagatcaacgaagacttcattggtgatatacggacacagcataaaagcagtagaactactattgatgtcaccgttgatagtgattctaaagtgtcgaccacagtcactgttgatgaagcactaactggtttgaagacttcattcgccttcaaggtccccgatcacaagtctgggaagcttgatctgcaatatgcgcacaatcgtttttcattgaactcgaccattggtttgacatcagcacctttggttgaactggctgcaactgtcggcacaagtgaacttagcattggtgctgaggttgggtttgacagtacttcagctgctgttactaagtacaactcaggaattggatacaacaagtccgatttctcagcttccttactactggctgataaaggggagactttgaaggcatcttacgttcatttgttcaatccgaccaatggagctacagttgcagctgaggtaacacacaagctgaagaccagagagaactatttcacagttgggagctcccatgcccttgatccttcaacattgctaaagacgagattcagcaactccgggaaggtcggtcttctctgtcagcatgagtggaggccgaaatctcttgtgactctttcagctgagtatgatccaaaggtggtaagtgcgccttcaagaatcggcatggccatatcgctcaagccttgagctgggttaagtcaccttctataaaacagtacaagcataccgtctccaagaacacaagctttggagcgatacctagaacaaccctccattttagcctttttttattttgtaagagtctcttgcaaaggagtattgtcgcttgtcagggagttagacttgttttgtggaacgtttccattagagccaactccacacgaaggattgaaaatacagaggtttgcgttag

SEQ ID NO: 23114 - protein, 276 aa, Zea mays subsp. mays
  peptide (1)..(276): Ceres Seq. ID no. 12365170
  misc_feature (5)..(269): Pfam Name: Pfam Description:  Eukaryotic porin
  misc_feature (1)..(276): NCBI GI NO: 36957233 NR Description: VDAC3.1 [Lotus corniculatus var. japonicus]
  misc_feature (1)..(276): NCBI GI NO: 15242146 NR Description: porin-like protein; protein id: At5g57490
  misc_feature (1)..(276): NCBI GI NO: 36957183 NR Description: VDAC1.2 [Lotus corniculatus var. japonicus]
  misc_feature (1)..(276): NCBI GI NO: 36957170 NR Description: VDAC1.1 [Lotus corniculatus var. japonicus]
  misc_feature (1)..(276): NCBI GI NO: 7442953 NR Description: porin - common ice plant
  misc_feature (1)..(276): NCBI GI NO: 629728 NR Description: porin I, 36K - potato
  misc_feature (1)..(276): NCBI GI NO: 1172556 NR Description: 36 kDa outer mitochondrial membrane protein porin
  misc_feature (1)..(276): NCBI GI NO: 1172558 NR Description: Outer plastidial membrane protein porin
  misc_feature (4)..(276): NCBI GI NO: 7339529 NR Description: voltage-dependent anion channel [Oryza sativa]
  misc_feature (1)..(276): NCBI GI NO: 1172555 NR Description: 34 kDa outer mitochondrial membrane protein porin
MSKGPVPFANIGKRAKDLLYKDYNFDQKFSLSTSSGSGLNLTATGVKINEDFIGDIRTQHKSSRTTIDVTVDSDSKVSTTVTVDEALTGLKTSFAFKVPDHKSGKLDLQYAHNRFSLNSTIGLTSAPLVELAATVGTSELSIGAEVGFDSTSAAVTKYNSGIGYNKSDFSASLLLADKGETLKASYVHLFNPTNGATVAAEVTHKLKTRENYFTVGSSHALDPSTLLKTRFSNSGKVGLLCQHEWRPKSLVTLSAEYDPKVVSAPSRIGMAISLKP

SEQ ID NO: 23115 - DNA, 1431 bp, Zea mays subsp. mays
  misc_feature (1)..(1431): Ceres Seq. ID no. 13494461
aaccttctttccgctcacgacctgagtcccctctcccaggcccaggcagccgccgcccgtctctctctctcctccgagtcccttctcccaccgccgcaagcgctcgcccgagccacctccctctctccctgtggcctgaccgtgatttgggcgtggcatcctaaggcggtcaagattcgagaggctggaggaaccaagcgtagggcctccgccaccacgtcgtcgtccgcgcgcgccgcccgccggcgcaaggaggcgccacagcctccgacgcctagggagatgggggccgattactacaaggtcctcggcgtcgaccgcggcgccggcgacgacgacctcaagaaggcctaccggaagctcgccatgcgatggcaccccgacaagaacaccaccaacaagaaggaggcagaaaccaagttcaaggatatctctgttgcatatgaggtccttagtgatcccaagaaacgtgcaatctatgatcagctaggagaagaaggcttcaaggggcagccgcccccaggagcaggaggttctggcgcatttcccttcttccctggcggggctcattccaccgctccccattttaatcacaggagtgcggatgatatatttaaggagttctttggatcccctggcatgggtggcatgagagcggaaccaggattccagaggtcaatgtttggcaacgatatcttctcttcacgctttggcgctgagggttccaccagtatgcagcagccaccacgcaaggcagctgcaattgagaacccacttccagtcagccttgcagatctgtacaagggcgtcacgaaaaagatgaaaatctcaagagaggctatagatgccagcgggagaatctcaaacgcagaggatattctgacaatagaagtaaggcctggttggaagaagggaacaaagattacatttcccgacaaggggaatgaagctccaaacatgaaagctgctgatattgttttcatcctcgatgagaagccccatgatgttttcactcgggatgggaatgatcttgtggtgactgagaaaatctcgctggtggaagcgctgactggatatactgcacgtgtcactacgctcgatgggcggagcctatcattgcccatcaactcgataatccatccgagctatgaagaggtagttcctagagagggcatgccaatacccaaggacccctctaagaagggaaatctgcggattaagttcaacataatgttcccttctaggctgacgtctgatcagaaggctggtctcaaaaggatattgggttcttaggccgcctcaaatgacattttatagtgaaaggtattgtgaatatcgccagtaattggctaggtagattatttatttatttatgtaacatatctgtaacggatggttataatgtgtcagatttttatctcattattattt

SEQ ID NO: 23116 - protein, 430 aa, Zea mays subsp. mays
  peptide (1)..(430): Ceres Seq. ID no. 13494462
  misc_feature (306)..(428): Pfam Name: Pfam Description:  DnaJ C terminal region
  misc_feature (95)..(430): NCBI GI NO: 34904486 NR Description: putative heat shock protein 40
  misc_feature (95)..(429): NCBI GI NO: 15225377 NR Description: heat shock protein, putative
  misc_feature (95)..(430): NCBI GI NO: 6179940 NR Description: DnaJ-like protein [Nicotiana tabacum]
  misc_feature (95)..(429): NCBI GI NO: 15235310 NR Description: heat shock protein, putative
  misc_feature (95)..(430): NCBI GI NO: 15231987 NR Description: DnaJ protein family [Arabidopsis thaliana]
  misc_feature (95)..(430): NCBI GI NO: 21618097 NR Description: putative heat shock protein [Arabidopsis thaliana]
  misc_feature (95)..(428): NCBI GI NO: 15240968 NR Description: DnaJ protein family [Arabidopsis thaliana]
  misc_feature (95)..(430): NCBI GI NO: 11863723 NR Description: DnaJ like protein [Lycopersicon esculentum]
  misc_feature (95)..(429): NCBI GI NO: 15228294 NR Description: heat shock protein, putative
  misc_feature (95)..(428): NCBI GI NO: 15239455 NR Description: heat shock protein, putative
NLLSAHDLSPLSQAQAAAARLSLSSESLLPPPQALARATSLSPCGLTVIWAWHPKAVKIREAGGTKRRASATTSSSARAARRRKEAPQPPTPREMGADYYKVLGVDRGAGDDDLKKAYRKLAMRWHPDKNTTNKKEAETKFKDISVAYEVLSDPKKRAIYDQLGEEGFKGQPPPGAGGSGAFPFFPGGAHSTAPHFNHRSADDIFKEFFGSPGMGGMRAEPGFQRSMFGNDIFSSRFGAEGSTSMQQPPRKAAAIENPLPVSLADLYKGVTKKMKISREAIDASGRISNAEDILTIEVRPGWKKGTKITFPDKGNEAPNMKAADIVFILDEKPHDVFTRDGNDLVVTEKISLVEALTGYTARVTTLDGRSLSLPINSIIHPSYEEVVPREGMPIPKDPSKKGNLRIKFNIMFPSRLTSDQKAGLKRILGS

SEQ ID NO: 23117 - protein, 336 aa, Zea mays subsp. mays
  peptide (1)..(336): Ceres Seq. ID no. 13494463
  misc_feature (212)..(334): Pfam Name: Pfam Description:  DnaJ C terminal region
  misc_feature (1)..(336): NCBI GI NO: 34904486 NR Description: putative heat shock protein 40
  misc_feature (1)..(335): NCBI GI NO: 15225377 NR Description: heat shock protein, putative
  misc_feature (1)..(336): NCBI GI NO: 6179940 NR Description: DnaJ-like protein [Nicotiana tabacum]
  misc_feature (1)..(335): NCBI GI NO: 15235310 NR Description: heat shock protein, putative
  misc_feature (1)..(336): NCBI GI NO: 15231987 NR Description: DnaJ protein family [Arabidopsis thaliana]
  misc_feature (1)..(336): NCBI GI NO: 21618097 NR Description: putative heat shock protein [Arabidopsis thaliana]
  misc_feature (1)..(334): NCBI GI NO: 15240968 NR Description: DnaJ protein family [Arabidopsis thaliana]
  misc_feature (1)..(336): NCBI GI NO: 11863723 NR Description: DnaJ like protein [Lycopersicon esculentum]
  misc_feature (1)..(335): NCBI GI NO: 15228294 NR Description: heat shock protein, putative
  misc_feature (1)..(334): NCBI GI NO: 15239455 NR Description: heat shock protein, putative
MGADYYKVLGVDRGAGDDDLKKAYRKLAMRWHPDKNTTNKKEAETKFKDISVAYEVLSDPKKRAIYDQLGEEGFKGQPPPGAGGSGAFPFFPGGAHSTAPHFNHRSADDIFKEFFGSPGMGGMRAEPGFQRSMFGNDIFSSRFGAEGSTSMQQPPRKAAAIENPLPVSLADLYKGVTKKMKISREAIDASGRISNAEDILTIEVRPGWKKGTKITFPDKGNEAPNMKAADIVFILDEKPHDVFTRDGNDLVVTEKISLVEALTGYTARVTTLDGRSLSLPINSIIHPSYEEVVPREGMPIPKDPSKKGNLRIKFNIMFPSRLTSDQKAGLKRILGS

SEQ ID NO: 23118 - protein, 308 aa, Zea mays subsp. mays
  peptide (1)..(308): Ceres Seq. ID no. 13494464
  misc_feature (184)..(306): Pfam Name: Pfam Description:  DnaJ C terminal region
  misc_feature (1)..(308): NCBI GI NO: 34904486 NR Description: putative heat shock protein 40
  misc_feature (1)..(307): NCBI GI NO: 15225377 NR Description: heat shock protein, putative
  misc_feature (1)..(308): NCBI GI NO: 6179940 NR Description: DnaJ-like protein [Nicotiana tabacum]
  misc_feature (1)..(307): NCBI GI NO: 15235310 NR Description: heat shock protein, putative
  misc_feature (1)..(308): NCBI GI NO: 15231987 NR Description: DnaJ protein family [Arabidopsis thaliana]
  misc_feature (1)..(308): NCBI GI NO: 21618097 NR Description: putative heat shock protein [Arabidopsis thaliana]
  misc_feature (1)..(306): NCBI GI NO: 15240968 NR Description: DnaJ protein family [Arabidopsis thaliana]
  misc_feature (1)..(308): NCBI GI NO: 11863723 NR Description: DnaJ like protein [Lycopersicon esculentum]
  misc_feature (1)..(307): NCBI GI NO: 15228294 NR Description: heat shock protein, putative
  misc_feature (1)..(306): NCBI GI NO: 15239455 NR Description: heat shock protein, putative
MRWHPDKNTTNKKEAETKFKDISVAYEVLSDPKKRAIYDQLGEEGFKGQPPPGAGGSGAFPFFPGGAHSTAPHFNHRSADDIFKEFFGSPGMGGMRAEPGFQRSMFGNDIFSSRFGAEGSTSMQQPPRKAAAIENPLPVSLADLYKGVTKKMKISREAIDASGRISNAEDILTIEVRPGWKKGTKITFPDKGNEAPNMKAADIVFILDEKPHDVFTRDGNDLVVTEKISLVEALTGYTARVTTLDGRSLSLPINSIIHPSYEEVVPREGMPIPKDPSKKGNLRIKFNIMFPSRLTSDQKAGLKRILGS

SEQ ID NO: 23119 - DNA, 1394 bp, Zea mays subsp. mays
  misc_feature (1)..(1394): Ceres Seq. ID no. 12353583
agatcccctcacagtcatcctccacccaccccacccaccgcctccgcctctctctctctctcgtttgttcgtctcggcttccggtcgccgattcttctctgcgcaaaagattcctggtggtggtgcccgtaccttgctccacgcctcgctcgcgtcgcgtgcatggggctggacgtcggcggcatcgggatgggcctggatctgggtctggacctcgggctgttcgccgcgcggagcgccggagggatggcggccgcggccaagggtgcgccggcggagatcgagtcctgcatcaggagcctcgaggaggagcgccggaagatcgaggtgttcaggcgcgagctcccgctctgcgtgcgtctcctcgccgatgtaatcgacgaattgaaggatgaggccgccaagagaggcggagacgcggaggccaaggccgacgacggcgataagcggaaatggatgagcaccgctcagctgtggctcgacagcgacgccaaatccgacgagtctgacaaagagcaactgagtgaaatcacttcgccggagcccaagttgctcggtggcgcacccatgcccataagggccgttgcggcggtgccacccctgccgcctccattcttcaggagagaagacagctctgccggcagtggtctgtcgctggtaccacccgcagctaagccgccgattcctcccatgtctgccagcgacaacgcgagcggcagattctgtgccactatgccaccgtctggctctggggccaacttgcactctcaggctcagcagcaagccaggaaggcgaggcggtgctggtcgccggagcttcaccggctgtttgttgccgccttgcatcaactcggcggccctcaagttgctactccgaagcagatcagggaggtgatgaaggtggacgggcttacaaacgatgaagtgaaaagccatctccagaagtaccggctgcacaacagaagatcccccggcgtcgtggctccggtgagccagtcggtcatgctggcgggcggcctctgggctcctcctcatcaggagcaaagcagctcgcagtccgggtctccccagggcccgcttcagttctctggatccggtgtagcggccaccgtcggcggcgatagcagcagcagcgacgaggacgacaagtccgaaggctacagccggaaatacgtgtaaaggccgcgttcgacggatgagagtgtagagatagcgtcgcggcttctgcttgcccgtctgtggcaataacagattcatcagtcttgagagaggttgtagtgcgtgcgcccaagagctcaactgatcatgggttggattgtttgtttgtcatgtacgtacatggaaagctgatggcttcctgacttttaatttctgggcaggtcccaaaattttcg

SEQ ID NO: 23120 - protein, 392 aa, Zea mays subsp. mays
  peptide (1)..(392): Ceres Seq. ID no. 12353584
  misc_feature (55)..(390): NCBI GI NO: 31415946 NR Description: putative Myb-like DNA-binding protein
  misc_feature (55)..(390): NCBI GI NO: 34915398 NR Description: contains ESTsAU055771
  misc_feature (57)..(390): NCBI GI NO: 33146555 NR Description: putative cytoskeletal protein-like protein
  misc_feature (92)..(385): NCBI GI NO: 18419989 NR Description: putative cytoskeletal protein
  misc_feature (152)..(356): NCBI GI NO: 18395562 NR Description: expressed protein; protein id: At2g03500
  misc_feature (93)..(132): NCBI GI NO: 18395562 NR Description: expressed protein; protein id: At2g03500
  misc_feature (92)..(385): NCBI GI NO: 14532434 NR Description: AT4g37180/C7A10_180 [Arabidopsis thaliana]
  misc_feature (92)..(385): NCBI GI NO: 30690890 NR Description: cytoskeletal protein -related
  misc_feature (246)..(387): NCBI GI NO: 18402692 NR Description: expressed protein; protein id: At1g49560
  misc_feature (59)..(132): NCBI GI NO: 18402692 NR Description: expressed protein; protein id: At1g49560
RSPHSHPPPTPPTASASLSLSFVRLGFRSPILLCAKDSWWWCPYLAPRLARVACMGLDVGGIGMGLDLGLDLGLFAARSAGGMAAAAKGAPAEIESCIRSLEEERRKIEVFRRELPLCVRLLADVIDELKDEAAKRGGDAEAKADDGDKRKWMSTAQLWLDSDAKSDESDKEQLSEITSPEPKLLGGAPMPIRAVAAVPPLPPPFFRREDSSAGSGLSLVPPAAKPPIPPMSASDNASGRFCATMPPSGSGANLHSQAQQQARKARRCWSPELHRLFVAALHQLGGPQVATPKQIREVMKVDGLTNDEVKSHLQKYRLHNRRSPGVVAPVSQSVMLAGGLWAPPHQEQSSSQSGSPQGPLQFSGSGVAATVGGDSSSSDEDDKSEGYSRKYV

SEQ ID NO: 23121 - protein, 338 aa, Zea mays subsp. mays
  peptide (1)..(338): Ceres Seq. ID no. 12353585
  misc_feature (1)..(336): NCBI GI NO: 31415946 NR Description: putative Myb-like DNA-binding protein
  misc_feature (1)..(336): NCBI GI NO: 34915398 NR Description: contains ESTsAU055771
  misc_feature (3)..(336): NCBI GI NO: 33146555 NR Description: putative cytoskeletal protein-like protein
  misc_feature (38)..(331): NCBI GI NO: 18419989 NR Description: putative cytoskeletal protein
  misc_feature (98)..(302): NCBI GI NO: 18395562 NR Description: expressed protein; protein id: At2g03500
  misc_feature (39)..(78): NCBI GI NO: 18395562 NR Description: expressed protein; protein id: At2g03500
  misc_feature (38)..(331): NCBI GI NO: 14532434 NR Description: AT4g37180/C7A10_180 [Arabidopsis thaliana]
  misc_feature (38)..(331): NCBI GI NO: 30690890 NR Description: cytoskeletal protein -related
  misc_feature (192)..(333): NCBI GI NO: 18402692 NR Description: expressed protein; protein id: At1g49560
  misc_feature (5)..(78): NCBI GI NO: 18402692 NR Description: expressed protein; protein id: At1g49560
MGLDVGGIGMGLDLGLDLGLFAARSAGGMAAAAKGAPAEIESCIRSLEEERRKIEVFRRELPLCVRLLADVIDELKDEAAKRGGDAEAKADDGDKRKWMSTAQLWLDSDAKSDESDKEQLSEITSPEPKLLGGAPMPIRAVAAVPPLPPPFFRREDSSAGSGLSLVPPAAKPPIPPMSASDNASGRFCATMPPSGSGANLHSQAQQQARKARRCWSPELHRLFVAALHQLGGPQVATPKQIREVMKVDGLTNDEVKSHLQKYRLHNRRSPGVVAPVSQSVMLAGGLWAPPHQEQSSSQSGSPQGPLQFSGSGVAATVGGDSSSSDEDDKSEGYSRKYV

SEQ ID NO: 23122 - protein, 329 aa, Zea mays subsp. mays
  peptide (1)..(329): Ceres Seq. ID no. 12353586
  misc_feature (1)..(327): NCBI GI NO: 31415946 NR Description: putative Myb-like DNA-binding protein
  misc_feature (1)..(327): NCBI GI NO: 34915398 NR Description: contains ESTsAU055771
  misc_feature (1)..(327): NCBI GI NO: 33146555 NR Description: putative cytoskeletal protein-like protein
  misc_feature (29)..(322): NCBI GI NO: 18419989 NR Description: putative cytoskeletal protein
  misc_feature (89)..(293): NCBI GI NO: 18395562 NR Description: expressed protein; protein id: At2g03500
  misc_feature (30)..(69): NCBI GI NO: 18395562 NR Description: expressed protein; protein id: At2g03500
  misc_feature (29)..(322): NCBI GI NO: 14532434 NR Description: AT4g37180/C7A10_180 [Arabidopsis thaliana]
  misc_feature (29)..(322): NCBI GI NO: 30690890 NR Description: cytoskeletal protein -related
  misc_feature (183)..(324): NCBI GI NO: 18402692 NR Description: expressed protein; protein id: At1g49560
  misc_feature (1)..(69): NCBI GI NO: 18402692 NR Description: expressed protein; protein id: At1g49560
MGLDLGLDLGLFAARSAGGMAAAAKGAPAEIESCIRSLEEERRKIEVFRRELPLCVRLLADVIDELKDEAAKRGGDAEAKADDGDKRKWMSTAQLWLDSDAKSDESDKEQLSEITSPEPKLLGGAPMPIRAVAAVPPLPPPFFRREDSSAGSGLSLVPPAAKPPIPPMSASDNASGRFCATMPPSGSGANLHSQAQQQARKARRCWSPELHRLFVAALHQLGGPQVATPKQIREVMKVDGLTNDEVKSHLQKYRLHNRRSPGVVAPVSQSVMLAGGLWAPPHQEQSSSQSGSPQGPLQFSGSGVAATVGGDSSSSDEDDKSEGYSRKYV

SEQ ID NO: 23123 - DNA, 1325 bp, Zea mays subsp. mays
  misc_feature (1)..(1325): Ceres Seq. ID no. 12411183
gcaaaaagtcgccctcttcctccactcgccgacacacacggcgcaaatccccacaaccccaagcgggcgggcggacttccacccaccttctcgcgcggcgacgtgctcggctcgcttccagccacctcgctcgccgcccgcctcggaatccccgccgcgagatcttgttccccggaggatggaggtgaaaacagtaaaagttagcaatctttcattaaatgctttgaaaagagagatcacagagttcttcagtttctcaggagatatagaatatgttgaaatgcaaagtgaatctgaatggtcacagcttgcttatgtcacatttaaagactcacagggagcagacactgctgttcttctctcgggggcaacaatcgtggatcgtgctgtcattataactcctgctgagaactatcagctgcctctggaagcacacaaacaattatcgggagcaaacgtctctactgaatcagcagtaaggaaggcagaagatgttgtgagcagcatgctggccaagggcttcgtcctcagcaaagacgcactcaacttggcaagatcatttgacgagcgtcacaacatcctatccaacgccactgccactgttgcatccctagaccgccagtatggcctgagcgaaaagatcagtctcggaagggccattgtcggcagcaaggtcaaggaggtggacgagcggtaccaggtctcagaactcaccaagtccgccttggctgccgccgagcagaaagccagcgtcgcgggctccgctatactgagcaaccagtatgtctcggctggtgcctcgtggctaacaagcgcgttcgatatggtaacgaaggcagcgggcgacatgacctcgatggccaaagataaggtggagagggccgaggaggagaggaaagccatcatgtgggaggagaggagtgggctggtcagcgagtacgcgaagatccatcttgacgagccctcttcgtgggagcccgcggttctgcctctggaatcagtggacgagcagaagctccaagctgtctgacacgcagagaccgagtctctcgcacgaaattcttttttgcagctcgtcctatatatagattgttctttttcgtcggtgcactggatcaaaacaattgcgcttgtcggccagtgccgtgtaaatttctgagagttggtcttgtgttattaccaggttttgttcgtttctttcgttttggagagagtggtgctaccagcactactacactagactactctgtgtgaatggaatactactgtactttgtctcttcttctactactactacagaaacataatataacttccttcgttag

SEQ ID NO: 23124 - protein, 342 aa, Zea mays subsp. mays
  peptide (1)..(342): Ceres Seq. ID no. 12411184
  misc_feature (65)..(132): Pfam Name: a.k.a. RRM, RBD, or RNP domain Pfam Description: RNA recognition motif.
  misc_feature (60)..(342): NCBI GI NO: 18071362 NR Description: putative splicing regulatory protein
  misc_feature (60)..(342): NCBI GI NO: 18414951 NR Description: RRM-containing protein; protein id: At4g17720
  misc_feature (64)..(312): NCBI GI NO: 38347069 NR Description: OSJNBa0006A01.10
  misc_feature (60)..(320): NCBI GI NO: 30695063 NR Description: RNA recognition motif (RRM)-containing protein
  misc_feature (64)..(342): NCBI GI NO: 7485085 NR Description: hypothetical protein - Arabidopsis thaliana
  misc_feature (60)..(299): NCBI GI NO: 34897896 NR Description: ESTs D15336
  misc_feature (64)..(320): NCBI GI NO: 8809670 NR Description: gene_id:MSD23
  misc_feature (62)..(302): NCBI GI NO: 18408904 NR Description: RRM-containing protein; protein id: At1g67950
  misc_feature (62)..(302): NCBI GI NO: 30697595 NR Description: RNA recognition motif (RRM)-containing protein
  misc_feature (62)..(302): NCBI GI NO: 30697598 NR Description: RNA recognition motif (RRM)-containing protein
QKVALFLHSPTHTAQIPTTPSGRADFHPPSRAATCSARFQPPRSPPASESPPRDLVPRRMEVKTVKVSNLSLNALKREITEFFSFSGDIEYVEMQSESEWSQLAYVTFKDSQGADTAVLLSGATIVDRAVIITPAENYQLPLEAHKQLSGANVSTESAVRKAEDVVSSMLAKGFVLSKDALNLARSFDERHNILSNATATVASLDRQYGLSEKISLGRAIVGSKVKEVDERYQVSELTKSALAAAEQKASVAGSAILSNQYVSAGASWLTSAFDMVTKAAGDMTSMAKDKVERAEEERKAIMWEERSGLVSEYAKIHLDEPSSWEPAVLPLESVDEQKLQAV

SEQ ID NO: 23125 - protein, 283 aa, Zea mays subsp. mays
  peptide (1)..(283): Ceres Seq. ID no. 12411185
  misc_feature (6)..(73): Pfam Name: a.k.a. RRM, RBD, or RNP domain Pfam Description: RNA recognition motif.
  misc_feature (1)..(283): NCBI GI NO: 18071362 NR Description: putative splicing regulatory protein
  misc_feature (1)..(283): NCBI GI NO: 18414951 NR Description: RRM-containing protein; protein id: At4g17720
  misc_feature (5)..(253): NCBI GI NO: 38347069 NR Description: OSJNBa0006A01.10
  misc_feature (1)..(261): NCBI GI NO: 30695063 NR Description: RNA recognition motif (RRM)-containing protein
  misc_feature (5)..(283): NCBI GI NO: 7485085 NR Description: hypothetical protein - Arabidopsis thaliana
  misc_feature (1)..(240): NCBI GI NO: 34897896 NR Description: ESTs D15336
  misc_feature (5)..(261): NCBI GI NO: 8809670 NR Description: gene_id:MSD23
  misc_feature (3)..(243): NCBI GI NO: 18408904 NR Description: RRM-containing protein; protein id: At1g67950
  misc_feature (3)..(243): NCBI GI NO: 30697595 NR Description: RNA recognition motif (RRM)-containing protein
  misc_feature (3)..(243): NCBI GI NO: 30697598 NR Description: RNA recognition motif (RRM)-containing protein
MEVKTVKVSNLSLNALKREITEFFSFSGDIEYVEMQSESEWSQLAYVTFKDSQGADTAVLLSGATIVDRAVIITPAENYQLPLEAHKQLSGANVSTESAVRKAEDVVSSMLAKGFVLSKDALNLARSFDERHNILSNATATVASLDRQYGLSEKISLGRAIVGSKVKEVDERYQVSELTKSALAAAEQKASVAGSAILSNQYVSAGASWLTSAFDMVTKAAGDMTSMAKDKVERAEEERKAIMWEERSGLVSEYAKIHLDEPSSWEPAVLPLESVDEQKLQAV

SEQ ID NO: 23126 - protein, 249 aa, Zea mays subsp. mays
  peptide (1)..(249): Ceres Seq. ID no. 12411186
  misc_feature (1)..(249): NCBI GI NO: 18071362 NR Description: putative splicing regulatory protein
  misc_feature (1)..(249): NCBI GI NO: 18414951 NR Description: RRM-containing protein; protein id: At4g17720
  misc_feature (1)..(219): NCBI GI NO: 38347069 NR Description: OSJNBa0006A01.10
  misc_feature (1)..(227): NCBI GI NO: 30695063 NR Description: RNA recognition motif (RRM)-containing protein
  misc_feature (1)..(249): NCBI GI NO: 7485085 NR Description: hypothetical protein - Arabidopsis thaliana
  misc_feature (1)..(206): NCBI GI NO: 34897896 NR Description: ESTs D15336
  misc_feature (1)..(227): NCBI GI NO: 8809670 NR Description: gene_id:MSD23
  misc_feature (1)..(209): NCBI GI NO: 18408904 NR Description: RRM-containing protein; protein id: At1g67950
  misc_feature (1)..(209): NCBI GI NO: 30697595 NR Description: RNA recognition motif (RRM)-containing protein
  misc_feature (1)..(209): NCBI GI NO: 30697598 NR Description: RNA recognition motif (RRM)-containing protein
MQSESEWSQLAYVTFKDSQGADTAVLLSGATIVDRAVIITPAENYQLPLEAHKQLSGANVSTESAVRKAEDVVSSMLAKGFVLSKDALNLARSFDERHNILSNATATVASLDRQYGLSEKISLGRAIVGSKVKEVDERYQVSELTKSALAAAEQKASVAGSAILSNQYVSAGASWLTSAFDMVTKAAGDMTSMAKDKVERAEEERKAIMWEERSGLVSEYAKIHLDEPSSWEPAVLPLESVDEQKLQAV

SEQ ID NO: 23127 - DNA, 1997 bp, Zea mays subsp. mays
  misc_feature (1)..(1997): Ceres Seq. ID no. 12372765
attcagatttcatcctcggcgtcgtctcctgtcctctccacgccaagcaacctccccaccccgccccaccctccatgctcgcctcgagatcttagcgggcagctccggagagcgccgacgagccccctgatccctcctcgccgccgccgccaaccgaccgggggaggagaggaggggaggggagcgatggagaccgccgactactccgggaagctcttcgtcggcggcatctcatgggagacggacgaggaccgcctccgcgagtacttcggccgcttcggtgaggtcactgaggccgtcatcatgcgggaccgcagcacgggccgcgctcgagggttcggtttcgtggtctttgctgacgccacggtcgccgagcgcgtcaccatcgaaaaacacatgatcgacggccgaatggtggaggccaagaaggctgttcccagggatgaccacagtattgtgagcaagagcaacacaagcagcatagggtcacctgggccgggccgtaccagaaagatctttgttggaggtctgccctcaaatgttacagaggctgacttcagggggtattttgagcagttcggtgtcataactgatgtggttgtgatgtatgatcacaacacacagagaccgaggggctttggattcatcacctatgattcagaagatgctgtggacaaagccctgcacaagagctttcatgagctaaatggtaaaatggttgaggtcaagaaggctgttccaaaggagcagtctcctggacctgttgcacgctcacctgcaggagtggggcagaactatgctatgaacagggttcatagcttcttgaatgacttcaaccaaggttacaatccgaaccctataggaggttatggcatgagggtggatggaaggtttggccagctttcaggtgcacgaaatgggctctcttcttttggcccaggttatgggatgggtatgaacgttgaaggtaggatgagtggaacttttggtgcaaactctggtttcatcagtaactccaatgggaggcaaatgggttcatacttcaatggaagttcgaatagattgagtagttctattgggtatcttggttatgactcaggatcgatgttgagttccatgtctaggaattttaatgcaggtgtaaactacccgatcaatcctacaaacatgagtgcttttgctgcccttggaaatgggggtggcgtcaattatatgggtctcccttctattgcccctgagttggcccagttgggcaacatttcaagccttgggtcagggaactttagccgtggagctggagttaataacttaagcttaccttctggctcctatgggaggagcaattcaactggtacaattggtgaacctttttctgcatcaggcaatgcatatgaagtgaacaacccagatacatatgggaacaactctatttatggtggaacatcctggaggttcccttcatctgaagttgacgtgccttctttcagtcatgatcttggaaatgttgatccgaatatgaaatcagacatatcagcaaattacatgggaaattattctgttagcaacaatcagccaagcagaggtatcacttcatagtgggagtattactacacattcatatatgacttgggatagatgaagcacccattcagtcaggcagccaggtgcgtgcatggcactgtgaatgggtgatatgtcaggttagttttgtctagctgaccagcggtgtggtttacaacaccaacatgctagagggggaggaagcggatacagaaacattttctgaggggcttctttttctttgagtcatgtttttagttttgattcctgcgcgtggctagctccttttggtttttgaatgagatgtgtagtggtgattattgcggcgcatattttagagatcgtggttcttccaacataagctggaaaaagaagtctgtatacggatgaacatgtataccaaccaaagggatgctgtattatcttgcccatttgtt

SEQ ID NO: 23128 - protein, 531 aa, Zea mays subsp. mays
  peptide (1)..(531): Ceres Seq. ID no. 12372766
  misc_feature (172)..(242): Pfam Name: a.k.a. RRM, RBD, or RNP domain Pfam Description: RNA recognition motif.
  misc_feature (63)..(531): NCBI GI NO: 38175737 NR Description: putative heterogeneous nuclear ribonucleoprotein A1
  misc_feature (69)..(493): NCBI GI NO: 6648193 NR Description: putative RNA-binding protein
  misc_feature (69)..(493): NCBI GI NO: 15292697 NR Description: putative RNA-binding protein
  misc_feature (69)..(493): NCBI GI NO: 30680456 NR Description: heterogeneous nuclear ribonucleoprotein
  misc_feature (69)..(493): NCBI GI NO: 18398061 NR Description: heterogeneous nuclear ribonucleoprotein
  misc_feature (69)..(449): NCBI GI NO: 18422817 NR Description: heterogeneous nuclear ribonucleoprotein
  misc_feature (69)..(400): NCBI GI NO: 9758790 NR Description: RNA-binding protein-like [Arabidopsis thaliana]
  misc_feature (69)..(400): NCBI GI NO: 21553963 NR Description: RNA-binding protein-like [Arabidopsis thaliana]
  misc_feature (63)..(434): NCBI GI NO: 7487039 NR Description: hypothetical protein T15N24
  misc_feature (63)..(434): NCBI GI NO: 18416794 NR Description: heterogeneous nuclear ribonucleoprotein
IQISSSASSPVLSTPSNLPTPPHPPCSPRDLSGQLRRAPTSPLIPPRRRRQPTGGGEEGRGAMETADYSGKLFVGGISWETDEDRLREYFGRFGEVTEAVIMRDRSTGRARGFGFVVFADATVAERVTIEKHMIDGRMVEAKKAVPRDDHSIVSKSNTSSIGSPGPGRTRKIFVGGLPSNVTEADFRGYFEQFGVITDVVVMYDHNTQRPRGFGFITYDSEDAVDKALHKSFHELNGKMVEVKKAVPKEQSPGPVARSPAGVGQNYAMNRVHSFLNDFNQGYNPNPIGGYGMRVDGRFGQLSGARNGLSSFGPGYGMGMNVEGRMSGTFGANSGFISNSNGRQMGSYFNGSSNRLSSSIGYLGYDSGSMLSSMSRNFNAGVNYPINPTNMSAFAALGNGGGVNYMGLPSIAPELAQLGNISSLGSGNFSRGAGVNNLSLPSGSYGRSNSTGTIGEPFSASGNAYEVNNPDTYGNNSIYGGTSWRFPSSEVDVPSFSHDLGNVDPNMKSDISANYMGNYSVSNNQPSRGITS

SEQ ID NO: 23129 - protein, 469 aa, Zea mays subsp. mays
  peptide (1)..(469): Ceres Seq. ID no. 12372767
  misc_feature (110)..(180): Pfam Name: a.k.a. RRM, RBD, or RNP domain Pfam Description: RNA recognition motif.
  misc_feature (1)..(469): NCBI GI NO: 38175737 NR Description: putative heterogeneous nuclear ribonucleoprotein A1
  misc_feature (7)..(431): NCBI GI NO: 6648193 NR Description: putative RNA-binding protein
  misc_feature (7)..(431): NCBI GI NO: 15292697 NR Description: putative RNA-binding protein
  misc_feature (7)..(431): NCBI GI NO: 18398061 NR Description: heterogeneous nuclear ribonucleoprotein
  misc_feature (7)..(431): NCBI GI NO: 30680456 NR Description: heterogeneous nuclear ribonucleoprotein
  misc_feature (7)..(387): NCBI GI NO: 18422817 NR Description: heterogeneous nuclear ribonucleoprotein
  misc_feature (7)..(338): NCBI GI NO: 9758790 NR Description: RNA-binding protein-like [Arabidopsis thaliana]
  misc_feature (7)..(338): NCBI GI NO: 21553963 NR Description: RNA-binding protein-like [Arabidopsis thaliana]
  misc_feature (1)..(372): NCBI GI NO: 7487039 NR Description: hypothetical protein T15N24
  misc_feature (1)..(372): NCBI GI NO: 18416794 NR Description: heterogeneous nuclear ribonucleoprotein
METADYSGKLFVGGISWETDEDRLREYFGRFGEVTEAVIMRDRSTGRARGFGFVVFADATVAERVTIEKHMIDGRMVEAKKAVPRDDHSIVSKSNTSSIGSPGPGRTRKIFVGGLPSNVTEADFRGYFEQFGVITDVVVMYDHNTQRPRGFGFITYDSEDAVDKALHKSFHELNGKMVEVKKAVPKEQSPGPVARSPAGVGQNYAMNRVHSFLNDFNQGYNPNPIGGYGMRVDGRFGQLSGARNGLSSFGPGYGMGMNVEGRMSGTFGANSGFISNSNGRQMGSYFNGSSNRLSSSIGYLGYDSGSMLSSMSRNFNAGVNYPINPTNMSAFAALGNGGGVNYMGLPSIAPELAQLGNISSLGSGNFSRGAGVNNLSLPSGSYGRSNSTGTIGEPFSASGNAYEVNNPDTYGNNSIYGGTSWRFPSSEVDVPSFSHDLGNVDPNMKSDISANYMGNYSVSNNQPSRGITS

SEQ ID NO: 23130 - protein, 430 aa, Zea mays subsp. mays
  peptide (1)..(430): Ceres Seq. ID no. 12372768
  misc_feature (71)..(141): Pfam Name: a.k.a. RRM, RBD, or RNP domain Pfam Description: RNA recognition motif.
  misc_feature (1)..(430): NCBI GI NO: 38175737 NR Description: putative heterogeneous nuclear ribonucleoprotein A1
  misc_feature (1)..(392): NCBI GI NO: 6648193 NR Description: putative RNA-binding protein
  misc_feature (1)..(392): NCBI GI NO: 30680456 NR Description: heterogeneous nuclear ribonucleoprotein
  misc_feature (1)..(392): NCBI GI NO: 15292697 NR Description: putative RNA-binding protein
  misc_feature (1)..(392): NCBI GI NO: 18398061 NR Description: heterogeneous nuclear ribonucleoprotein
  misc_feature (1)..(348): NCBI GI NO: 18422817 NR Description: heterogeneous nuclear ribonucleoprotein
  misc_feature (1)..(299): NCBI GI NO: 9758790 NR Description: RNA-binding protein-like [Arabidopsis thaliana]
  misc_feature (1)..(299): NCBI GI NO: 21553963 NR Description: RNA-binding protein-like [Arabidopsis thaliana]
  misc_feature (1)..(333): NCBI GI NO: 7487039 NR Description: hypothetical protein T15N24
  misc_feature (1)..(333): NCBI GI NO: 18416794 NR Description: heterogeneous nuclear ribonucleoprotein
MRDRSTGRARGFGFVVFADATVAERVTIEKHMIDGRMVEAKKAVPRDDHSIVSKSNTSSIGSPGPGRTRKIFVGGLPSNVTEADFRGYFEQFGVITDVVVMYDHNTQRPRGFGFITYDSEDAVDKALHKSFHELNGKMVEVKKAVPKEQSPGPVARSPAGVGQNYAMNRVHSFLNDFNQGYNPNPIGGYGMRVDGRFGQLSGARNGLSSFGPGYGMGMNVEGRMSGTFGANSGFISNSNGRQMGSYFNGSSNRLSSSIGYLGYDSGSMLSSMSRNFNAGVNYPINPTNMSAFAALGNGGGVNYMGLPSIAPELAQLGNISSLGSGNFSRGAGVNNLSLPSGSYGRSNSTGTIGEPFSASGNAYEVNNPDTYGNNSIYGGTSWRFPSSEVDVPSFSHDLGNVDPNMKSDISANYMGNYSVSNNQPSRGITS

SEQ ID NO: 23131 - DNA, 1746 bp, Zea mays subsp. mays
  misc_feature (1)..(1746): Ceres Seq. ID no. 12373429
gaggaaaaacttttttgaaaacaaaaaaccccccactcccacgtcccaccacctcgcctcggccgctgcgacagtgcatacgccccctcccctcctgactcctgttgcgtatacaccgtatgtgtctactgtgactccgggtcccgggggggtaagcgaccgagcaaggcttcgtctccggcggcggaggcggatctgggagggatggggaaccggataggcgggcggcgcaagtcgggggtggaggagcggttcacgcggccgcagggtctctacgaccacaaggacatcgaccagaagaagctgcgcaagctcatcctcgaggccaagctcgcgccctgctacccgggcgccgacgacgccgcgcccggcggaggggacctcgaggagtgccccatctgcttcctgtactacccaagcctcaaccgttcaaagtgttgctcaaaggggatatgtacagagtgttttcttcaaatgaaaccaactcatactgctcgacctacacagtgcccattctgcaaaacgcctaattatgctgtggagtatcgtggtgtgaaaacaaaggaggaaaggagcatagagcagtttgaagaacagaaagtcatagaagcacagttgaggatgcgccaaaaagaactccaagatgaagaagctaaaatgagaagaaaacagggcaggtgttcttctagcagaacggtaacaccaacaacagaagttgagtatcgagatatttgcagcacatccttttcagtgccatcatatcaatgtactgagcaaggaaatgaatgctgttcatctgaaccttcatgctctagccaggctaacaggcggcctttccattctagacacaaccgtgatgataatgttgacatgaatctggagaacatgatggttatggaagcaatttggcgttccattcagcaggaacaaggacatctagtaaatcctgtttgtggcagctactttcctgtaattgagccaccatcacgtgaaaggcaggcatttcttccggctgctcctctagaaatgcctcatccaggtggatactcttgtgttgcggctttggctgagcaccagccaccaagcatggatttctcttacatggctggcagtagcacatacccagtctttgacatgatccgccgaccgtgcaacatgtctagtggaagcttgtgcagcgtcgagaacagttcactagacacctggagcgggatggcaccaaattacagcagaggagtggtaagagaggagggagagtgctcaaccgaccactggtcggagggtgcggaggcgggaacaagctatgccggatcggacatcatggtggatgcaggggccatgcaaccgctgcctttcgctgagaatttcaccatggctccaagccacttccgcccggagagcatcgaggagcagatgatgttttccatggccgtgtcactagcagaaggtcatcatggtaggacgcaagcgcaaggtctggcatggttgtaagttgtataacactaattttgacgccttgatccctgcccctttctgttggttcgacctgcttcccctgcacctctgcttttttgccactttgtttagctttttgctccttttttttcttttctttcttttttgcatgtgtttcttcatggcttgatatagatcttgctatagtcctccattgtcattgcttatatgtatgtaaaatggaatatgtggaaataggaaagaaaatgggtcgaaagttcttttgccggt

SEQ ID NO: 23132 - protein, 428 aa, Zea mays subsp. mays
  peptide (1)..(428): Ceres Seq. ID no. 12373430
  misc_feature (1)..(291): NCBI GI NO: 18411948 NR Description: expressed protein; protein id: At1g78420
  misc_feature (397)..(422): NCBI GI NO: 18411948 NR Description: expressed protein; protein id: At1g78420
  misc_feature (63)..(422): NCBI GI NO: 8052547 NR Description: F3F9.7 [Arabidopsis thaliana]
  misc_feature (1)..(101): NCBI GI NO: 8052547 NR Description: F3F9.7 [Arabidopsis thaliana]
  misc_feature (1)..(240): NCBI GI NO: 18394446 NR Description: Expressed protein; protein id: At1g17145
  misc_feature (1)..(355): NCBI GI NO: 25373045 NR Description: F20D23.17 protein - Arabidopsis thaliana
MGNRIGGRRKSGVEERFTRPQGLYDHKDIDQKKLRKLILEAKLAPCYPGADDAAPGGGDLEECPICFLYYPSLNRSKCCSKGICTECFLQMKPTHTARPTQCPFCKTPNYAVEYRGVKTKEERSIEQFEEQKVIEAQLRMRQKELQDEEAKMRRKQGRCSSSRTVTPTTEVEYRDICSTSFSVPSYQCTEQGNECCSSEPSCSSQANRRPFHSRHNRDDNVDMNLENMMVMEAIWRSIQQEQGHLVNPVCGSYFPVIEPPSRERQAFLPAAPLEMPHPGGYSCVAALAEHQPPSMDFSYMAGSSTYPVFDMIRRPCNMSSGSLCSVENSSLDTWSGMAPNYSRGVVREEGECSTDHWSEGAEAGTSYAGSDIMVDAGAMQPLPFAENFTMAPSHFRPESIEEQMMFSMAVSLAEGHHGRTQAQGLAWL

SEQ ID NO: 23133 - protein, 338 aa, Zea mays subsp. mays
  peptide (1)..(338): Ceres Seq. ID no. 12373431
  misc_feature (1)..(201): NCBI GI NO: 18411948 NR Description: expressed protein; protein id: At1g78420
  misc_feature (307)..(332): NCBI GI NO: 18411948 NR Description: expressed protein; protein id: At1g78420
  misc_feature (1)..(332): NCBI GI NO: 8052547 NR Description: F3F9.7 [Arabidopsis thaliana]
  misc_feature (1)..(11): NCBI GI NO: 8052547 NR Description: F3F9.7 [Arabidopsis thaliana]
  misc_feature (1)..(150): NCBI GI NO: 18394446 NR Description: Expressed protein; protein id: At1g17145
  misc_feature (1)..(265): NCBI GI NO: 25373045 NR Description: F20D23.17 protein - Arabidopsis thaliana
MKPTHTARPTQCPFCKTPNYAVEYRGVKTKEERSIEQFEEQKVIEAQLRMRQKELQDEEAKMRRKQGRCSSSRTVTPTTEVEYRDICSTSFSVPSYQCTEQGNECCSSEPSCSSQANRRPFHSRHNRDDNVDMNLENMMVMEAIWRSIQQEQGHLVNPVCGSYFPVIEPPSRERQAFLPAAPLEMPHPGGYSCVAALAEHQPPSMDFSYMAGSSTYPVFDMIRRPCNMSSGSLCSVENSSLDTWSGMAPNYSRGVVREEGECSTDHWSEGAEAGTSYAGSDIMVDAGAMQPLPFAENFTMAPSHFRPESIEEQMMFSMAVSLAEGHHGRTQAQGLAWL

SEQ ID NO: 23134 - protein, 289 aa, Zea mays subsp. mays
  peptide (1)..(289): Ceres Seq. ID no. 12373432
  misc_feature (1)..(152): NCBI GI NO: 18411948 NR Description: expressed protein; protein id: At1g78420
  misc_feature (258)..(283): NCBI GI NO: 18411948 NR Description: expressed protein; protein id: At1g78420
  misc_feature (1)..(283): NCBI GI NO: 8052547 NR Description: F3F9.7 [Arabidopsis thaliana]
  misc_feature (1)..(101): NCBI GI NO: 18394446 NR Description: Expressed protein; protein id: At1g17145
  misc_feature (1)..(216): NCBI GI NO: 25373045 NR Description: F20D23.17 protein - Arabidopsis thaliana
MRQKELQDEEAKMRRKQGRCSSSRTVTPTTEVEYRDICSTSFSVPSYQCTEQGNECCSSEPSCSSQANRRPFHSRHNRDDNVDMNLENMMVMEAIWRSIQQEQGHLVNPVCGSYFPVIEPPSRERQAFLPAAPLEMPHPGGYSCVAALAEHQPPSMDFSYMAGSSTYPVFDMIRRPCNMSSGSLCSVENSSLDTWSGMAPNYSRGVVREEGECSTDHWSEGAEAGTSYAGSDIMVDAGAMQPLPFAENFTMAPSHFRPESIEEQMMFSMAVSLAEGHHGRTQAQGLAWL

SEQ ID NO: 23135 - DNA, 1818 bp, Zea mays subsp. mays
  misc_feature (1)..(1818): Ceres Seq. ID no. 13492735
atcccgggatcctcgttttgtttcccttcccccacccttcctcttcctccctatctatcagcactgctcgccggcgccgcctctgcaaaaggctcacttttgcctccggaacccagcggaatccgccggcggaccggaaacactccctcgcccccctcaccccctgtctgcccggccgtcggagcgcgtcgcctccgggcgtgcagcagcagtccgtggaggtggagccgggaggaggaggaggaggacgaggacgaggcataatctgccgagagcgggacagcaggagtgggctgctccgctcgcgctggagccaaagctactgattgccttgtcctgaccagcgaaagagggatctttgggaggcaatcagaggtgttcggtttggtcaaacaaagctcagctctcttgggatgcttgctgcgagctgcttgtgttcatacttgagagaataaaacagtgcatcatcttgctgtcttgtccttcgtgattggaagagaaaacgtgctgctgttcttgctatgtctgtctcggagaaggtggcgccatcgaagtcatcagtttcttcgtcgtcagatttggatccgctgctgaaggatctcacggagaagaagttgacctttaggaggaacgtggtgtcattggcagctgagctcaaggatgcgaggaacaagcttgcctcccaggagcagctgtttgtaaaggaatctcaaactagaaaggttgttgagacaaaggcaaggagcatggaagaggaagtaagcaagctgcagaaatgcttgcaggacaaggatgagcaactgcgttcatccgcaagtagcacggaacagtacctccatgagttggatgatcttagaacacaactgtcaattactcaagctacagcagaagcgagtgctgcatcagccaagtcagctcaggtgcagtgcttgtcattgctgaaagagctgaatgagaaggacatctcgctcaaagagcatgagcttcgagtgaacaagctaggtgagcagctcgatcttctccagaaggatctacaagcaagggagctctcacaaatgcaacttaaggatgaagttctaagaattgagaccgacatcatggatgcaattgccaaagctgggtctaggtctgacaaagacaatgagcttttaaagatcttatctgacgtttcaccaaggaatgtccagaacctcaacagccttttgaatgctaagaatacagaaattgcgaggttgagagaggaaatcagaatattatctgctcactggacgaacaaaaccaaggaacttgaatcacagttagaaaagcagcgaagaactgatcaggagctgaagaagagggtcctgaagcttgaattttgccttcaagaatctcagtcccagatgcgaaaattaaagaggatgggggagaaaagagacaaggctctcaaggagctcatggaccaggtggccatgaagcagcccaacagcatgtgccatggaaacaaggataatttctgggagagccagggcttcaggttcattgcctctatgtcgatgctggcgctagtgatcctcgcaaagcgttgaagcggcatagtttaagcagatgtgaatgtagcgtttacattagcttgtaggcttgggcagttgtgcatactgcatgccaaaatttgccgacatccaatcctagtctgtaaactgtaaaaatagttgtggcctgtaatccgtagcgcagtttctgctagttcatgtaaacccatataagctgtcttgtagtcacagctagtgaatgtcagctcatgtagtcaagaatctacaaccttataatttcagttcc

SEQ ID NO: 23136 - protein, 348 aa, Zea mays subsp. mays
  peptide (1)..(348): Ceres Seq. ID no. 13492736
  misc_feature (3)..(347): Pfam Name: Pfam Description:  Myosin tail
  misc_feature (13)..(348): NCBI GI NO: 18421042 NR Description: expressed protein [Arabidopsis thaliana]
  misc_feature (13)..(339): NCBI GI NO: 7485248 NR Description: hypothetical protein A_IG002P16
  misc_feature (13)..(348): NCBI GI NO: 18397379 NR Description: expressed protein [Arabidopsis thaliana]
  misc_feature (15)..(348): NCBI GI NO: 4097950 NR Description: plant IF-like protein [Arabidopsis thaliana]
  misc_feature (12)..(348): NCBI GI NO: 22329439 NR Description: hypothetical protein [Arabidopsis thaliana]
  misc_feature (12)..(348): NCBI GI NO: 25402551 NR Description: hypothetical protein
  misc_feature (1)..(189): NCBI GI NO: 34894370 NR Description: unnamed protein product
  misc_feature (96)..(348): NCBI GI NO: 34894370 NR Description: unnamed protein product
  misc_feature (245)..(327): NCBI GI NO: 22329441 NR Description: myosin heavy chain -related [Arabidopsis thaliana]
  misc_feature (1)..(287): NCBI GI NO: 28374274 NR Description: Similar to synaptonemal complex protein 1
MSVSEKVAPSKSSVSSSSDLDPLLKDLTEKKLTFRRNVVSLAAELKDARNKLASQEQLFVKESQTRKVVETKARSMEEEVSKLQKCLQDKDEQLRSSASSTEQYLHELDDLRTQLSITQATAEASAASAKSAQVQCLSLLKELNEKDISLKEHELRVNKLGEQLDLLQKDLQARELSQMQLKDEVLRIETDIMDAIAKAGSRSDKDNELLKILSDVSPRNVQNLNSLLNAKNTEIARLREEIRILSAHWTNKTKELESQLEKQRRTDQELKKRVLKLEFCLQESQSQMRKLKRMGEKRDKALKELMDQVAMKQPNSMCHGNKDNFWESQGFRFIASMSMLALVILAKR

SEQ ID NO: 23137 - protein, 273 aa, Zea mays subsp. mays
  peptide (1)..(273): Ceres Seq. ID no. 13492737
  misc_feature (1)..(272): Pfam Name: Pfam Description:  Myosin tail
  misc_feature (1)..(273): NCBI GI NO: 18421042 NR Description: expressed protein [Arabidopsis thaliana]
  misc_feature (1)..(264): NCBI GI NO: 7485248 NR Description: hypothetical protein A_IG002P16
  misc_feature (1)..(273): NCBI GI NO: 18397379 NR Description: expressed protein [Arabidopsis thaliana]
  misc_feature (1)..(273): NCBI GI NO: 4097950 NR Description: plant IF-like protein [Arabidopsis thaliana]
  misc_feature (1)..(273): NCBI GI NO: 22329439 NR Description: hypothetical protein [Arabidopsis thaliana]
  misc_feature (1)..(273): NCBI GI NO: 25402551 NR Description: hypothetical protein
  misc_feature (1)..(114): NCBI GI NO: 34894370 NR Description: unnamed protein product
  misc_feature (21)..(273): NCBI GI NO: 34894370 NR Description: unnamed protein product
  misc_feature (170)..(252): NCBI GI NO: 22329441 NR Description: myosin heavy chain -related [Arabidopsis thaliana]
  misc_feature (1)..(212): NCBI GI NO: 28374274 NR Description: Similar to synaptonemal complex protein 1
MEEEVSKLQKCLQDKDEQLRSSASSTEQYLHELDDLRTQLSITQATAEASAASAKSAQVQCLSLLKELNEKDISLKEHELRVNKLGEQLDLLQKDLQARELSQMQLKDEVLRIETDIMDAIAKAGSRSDKDNELLKILSDVSPRNVQNLNSLLNAKNTEIARLREEIRILSAHWTNKTKELESQLEKQRRTDQELKKRVLKLEFCLQESQSQMRKLKRMGEKRDKALKELMDQVAMKQPNSMCHGNKDNFWESQGFRFIASMSMLALVILAKR

SEQ ID NO: 23138 - DNA, 1524 bp, Zea mays subsp. mays
  misc_feature (1)..(1524): Ceres Seq. ID no. 12374227
taaaatcattgcagccctggtcctcacaacactctgtatatttgttctgaagcaatctcctggttttggtggcaatagtgtgttttctcgccatgaacatggggttacccacgtcttagtaacaggaggagctggttatattggttcacatgctgctttaaggctcttaaaggataactatcgagttactatcgtggataatctatctagaggaaacatgggagcagtaaaggttctgcagggcttatttccgcagcctgggagactacaattcatctttgctgatctggggaaccagaaatctgtatcctcatttatgcttctaaagctgctttgcttgtgccttttctgcttatggagagttacatccaaagtcttcttttcacttaactggctgccaggtcaacaagatatttgctgaaaatgcatttgatgctgtgatgcactttgcagctgttgcttatgtgggagagagcacattggaaccccttaggtactatcacaatattacatcgaacacactactgattttggaggctatggcatctcatggagtccaaacccttatttactccagtacatgtgctacctacggagaaccagataagatgcctattacagaagccacacctcagttccctatcaatccatatggaaaagctaagaaaatggcagaggatatcataatagatttctcaaactcaaagggagctgacatggctgtcatgattttaagatatttcaatgttattggatctgaccctgagggaagattaggtgaggctcctaggccagaacttcgagagcatggtcggatatctggggcttgctttgatgcagcattaggagtcattccaggattaaaggttaaaggaacagattatcccacagctgatggaacctgcataagagattatattgatgtcacagatttagttgatgctcatgtgaaagcactcaacaaggcagagcctagaaaagtcggcatttacaatgttggaacaggaagaggtcgctcagttaatgagtttgttgatgcctgcaagaaggcaactggggtcaacatcaaaattgagtacctcaacagaaggccaggagattatgcagaagtatacagcgacccaacaaagataaacaaggagctcaactggacagctcattataccgatctcaaagagagcctatcagtcgcatggaggtggcaaaagtcgcatccgcgtggctacgggccaaactaaatatagcctgctgatctataattcacttaatcgtcaatacatattagttctttagttagagatacaagatcttgctgcgatactcctcaaaatcagtccttcgtattcttctttctctcgtcctttttatttcaaaagtttgcatttttggctagcagaaacatgaatggtgatttggatgaaaaaaaggacctgtgatgacaatttcattgtttctgacacattgttggtaaaaaaaatgtaaattgcttcagccaatgagctgcaagattgattgaattgagtt

SEQ ID NO: 23139 - protein, 265 aa, Zea mays subsp. mays
  peptide (1)..(265): Ceres Seq. ID no. 12374228
  misc_feature (1)..(259): Pfam Name: Pfam Description:  NAD dependent epimerase/dehydratase family
  misc_feature (1)..(265): NCBI GI NO: 27529690 NR Description: UDP-galactose 4-epimerase-like protein
  misc_feature (1)..(263): NCBI GI NO: 26106016 NR Description: UDP-galactose 4-epimerase-like protein
  misc_feature (1)..(264): NCBI GI NO: 27260937 NR Description: OJ1417_E01.21
  misc_feature (1)..(264): NCBI GI NO: 25553524 NR Description: UDP-galactose 4-epimerase-like protein
  misc_feature (1)..(263): NCBI GI NO: 22329866 NR Description: UDP-galactose 4-epimerase-like protein
  misc_feature (1)..(262): NCBI GI NO: 15237098 NR Description: UDP-glucose 4-epimerase - like protein
  misc_feature (1)..(263): NCBI GI NO: 24417398 NR Description: unknown [Arabidopsis thaliana]
  misc_feature (1)..(262): NCBI GI NO: 15241503 NR Description: putative protein; protein id: At5g44480.1
  misc_feature (1)..(263): NCBI GI NO: 7437275 NR Description: probable UDPglucose 4-epimerase (EC 5.1.3.2)
  misc_feature (98)..(261): NCBI GI NO: 5852089 NR Description: zwh12.1 [Oryza sativa (indica cultivar-group)]
MHFAAVAYVGESTLEPLRYYHNITSNTLLILEAMASHGVQTLIYSSTCATYGEPDKMPITEATPQFPINPYGKAKKMAEDIIIDFSNSKGADMAVMILRYFNVIGSDPEGRLGEAPRPELREHGRISGACFDAALGVIPGLKVKGTDYPTADGTCIRDYIDVTDLVDAHVKALNKAEPRKVGIYNVGTGRGRSVNEFVDACKKATGVNIKIEYLNRRPGDYAEVYSDPTKINKELNWTAHYTDLKESLSVAWRWQKSHPRGYGPN

SEQ ID NO: 23140 - protein, 232 aa, Zea mays subsp. mays
  peptide (1)..(232): Ceres Seq. ID no. 12374229
  misc_feature (1)..(226): Pfam Name: Pfam Description:  NAD dependent epimerase/dehydratase family
  misc_feature (1)..(232): NCBI GI NO: 27529690 NR Description: UDP-galactose 4-epimerase-like protein
  misc_feature (1)..(230): NCBI GI NO: 26106016 NR Description: UDP-galactose 4-epimerase-like protein
  misc_feature (1)..(231): NCBI GI NO: 27260937 NR Description: OJ1417_E01.21
  misc_feature (1)..(231): NCBI GI NO: 25553524 NR Description: UDP-galactose 4-epimerase-like protein
  misc_feature (1)..(230): NCBI GI NO: 22329866 NR Description: UDP-galactose 4-epimerase-like protein
  misc_feature (1)..(229): NCBI GI NO: 15237098 NR Description: UDP-glucose 4-epimerase - like protein
  misc_feature (1)..(230): NCBI GI NO: 24417398 NR Description: unknown [Arabidopsis thaliana]
  misc_feature (1)..(229): NCBI GI NO: 15241503 NR Description: putative protein; protein id: At5g44480.1
  misc_feature (1)..(230): NCBI GI NO: 7437275 NR Description: probable UDPglucose 4-epimerase (EC 5.1.3.2)
  misc_feature (65)..(228): NCBI GI NO: 5852089 NR Description: zwh12.1 [Oryza sativa (indica cultivar-group)]
MASHGVQTLIYSSTCATYGEPDKMPITEATPQFPINPYGKAKKMAEDIIIDFSNSKGADMAVMILRYFNVIGSDPEGRLGEAPRPELREHGRISGACFDAALGVIPGLKVKGTDYPTADGTCIRDYIDVTDLVDAHVKALNKAEPRKVGIYNVGTGRGRSVNEFVDACKKATGVNIKIEYLNRRPGDYAEVYSDPTKINKELNWTAHYTDLKESLSVAWRWQKSHPRGYGPN

SEQ ID NO: 23141 - protein, 209 aa, Zea mays subsp. mays
  peptide (1)..(209): Ceres Seq. ID no. 12374230
  misc_feature (1)..(203): Pfam Name: Pfam Description:  NAD dependent epimerase/dehydratase family
  misc_feature (1)..(209): NCBI GI NO: 27529690 NR Description: UDP-galactose 4-epimerase-like protein
  misc_feature (1)..(207): NCBI GI NO: 26106016 NR Description: UDP-galactose 4-epimerase-like protein
  misc_feature (1)..(208): NCBI GI NO: 27260937 NR Description: OJ1417_E01.21
  misc_feature (1)..(208): NCBI GI NO: 25553524 NR Description: UDP-galactose 4-epimerase-like protein
  misc_feature (1)..(207): NCBI GI NO: 22329866 NR Description: UDP-galactose 4-epimerase-like protein
  misc_feature (1)..(206): NCBI GI NO: 15237098 NR Description: UDP-glucose 4-epimerase - like protein
  misc_feature (1)..(207): NCBI GI NO: 24417398 NR Description: unknown [Arabidopsis thaliana]
  misc_feature (1)..(206): NCBI GI NO: 15241503 NR Description: putative protein; protein id: At5g44480.1
  misc_feature (1)..(207): NCBI GI NO: 7437275 NR Description: probable UDPglucose 4-epimerase (EC 5.1.3.2)
  misc_feature (42)..(205): NCBI GI NO: 5852089 NR Description: zwh12.1 [Oryza sativa (indica cultivar-group)]
MPITEATPQFPINPYGKAKKMAEDIIIDFSNSKGADMAVMILRYFNVIGSDPEGRLGEAPRPELREHGRISGACFDAALGVIPGLKVKGTDYPTADGTCIRDYIDVTDLVDAHVKALNKAEPRKVGIYNVGTGRGRSVNEFVDACKKATGVNIKIEYLNRRPGDYAEVYSDPTKINKELNWTAHYTDLKESLSVAWRWQKSHPRGYGPN

SEQ ID NO: 23142 - DNA, 1385 bp, Zea mays subsp. mays
  misc_feature (1)..(1385): Ceres Seq. ID no. 12349947
attaaaaactcgggccagcaagaaagaaaaaaaaccacaacaagagagagagagagagagagagagagagacagagacagagagagactgccaacgaggcgaagcagccggccaatctagcatccgcgcgcggggtctgagagcagagcggcagggcgccatggcggcatcggtggcgctgagcagcgggcaccggatgccggcggtggggctgggcgtgtggcggatggagaaggcggacatccgcggcctcatccacacagcgctccgcgtcggctaccgccacctggactgcgccgctgactaccagaacgaagctgaagttggtgacgcgctcgcagaggcattccagaccggactcgtcaagcgggaggacctgttcatcacaaccaagctgtggaactcagaccatgggcatgtgcttgaagcctgcaaggacagcctgaagaagctgcagctagactatctcgacctctacctcatccatttcccagtagccactcggcacaccggagtcggcacgacttctagcgctctgggtgacgatggcgtgctggacatcgacaccactatctccctggaaacgacatggcacgcgatggaagagcttgtttccatggggctggtgcgcagcattggaatcagcaactacgacatcttcctcaccagagactgcctggcctacgccaagataaagccggcggtgaaccagatcgagacgcacccttacttccagcgcgactctcttgtcaagttctgccagaagcacgggatctgcgtgaccgcgcacaccccgctgggtggctccaccgccaacgccgagtggttcgggacggtgtcgtgcctggacgaccctgtcatcaagagcttggctgacaagtacggcaagacgccggcgcagctcgtcctccgctggggtctgcagcgggacacggtggtgatccccaagacctccaaggtggagaggctgcaggagaactttgacgtcttcggtttcgacatctccggcgaggacatggagaggatgaaggccgtggaccggaagtaccggactaaccagcctgccaagttctggggcatcgacctctatgcttagcttttagttcggttgcgttgcgtcgcccccccccccagacaagacagcatcaataatgaggattccctcagacggcatcagtcaaagtcacgaggatctcagacagcatcttccatcacatgtgacggtgtgaggctgatggtagggtttggtgtctccacgtgtccctctctctttcagctcagcttcatcaccatgtagactacgcagtgtttgcctccgattatttactgtttttcttccttacaaatccgtacatatctttactggtaggttgaacaatttgctg

SEQ ID NO: 23143 - protein, 364 aa, Zea mays subsp. mays
  peptide (1)..(364): Ceres Seq. ID no. 12349948
  misc_feature (58)..(364): NCBI GI NO: 15226489 NR Description: mannose 6-phosphate reductase
  misc_feature (58)..(364): NCBI GI NO: 21592829 NR Description: putative NADPH dependent mannose 6-phosphatereductase
  misc_feature (58)..(364): NCBI GI NO: 15226502 NR Description: mannose 6-phosphate reductase
  misc_feature (58)..(364): NCBI GI NO: 10334991 NR Description: NADPH-dependent mannose 6-phosphate reductase
  misc_feature (58)..(364): NCBI GI NO: 21554266 NR Description: putative NADPH dependent mannose 6-phosphatereductase
  misc_feature (57)..(364): NCBI GI NO: 1835701 NR Description: NADPH-dependent mannose 6-phosphate reductase
  misc_feature (56)..(364): NCBI GI NO: 134153 NR Description: NADP-dependent D-sorbitol-6-phosphate dehydrogenase
  misc_feature (50)..(275): NCBI GI NO: 32400786 NR Description: NADPH-dependent mannose 6-phosphate reductase
  misc_feature (100)..(364): NCBI GI NO: 19310926 NR Description: NADP dependent sorbitol 6-phosphate dehydrogenase
  misc_feature (100)..(364): NCBI GI NO: 19310928 NR Description: NADP dependent sorbitol 6-phosphate dehydrogenase
LKTRASKKEKKPQQERERERERETETERDCQRGEAAGQSSIRARGLRAERQGAMAASVALSSGHRMPAVGLGVWRMEKADIRGLIHTALRVGYRHLDCAADYQNEAEVGDALAEAFQTGLVKREDLFITTKLWNSDHGHVLEACKDSLKKLQLDYLDLYLIHFPVATRHTGVGTTSSALGDDGVLDIDTTISLETTWHAMEELVSMGLVRSIGISNYDIFLTRDCLAYAKIKPAVNQIETHPYFQRDSLVKFCQKHGICVTAHTPLGGSTANAEWFGTVSCLDDPVIKSLADKYGKTPAQLVLRWGLQRDTVVIPKTSKVERLQENFDVFGFDISGEDMERMKAVDRKYRTNQPAKFWGIDLYA

SEQ ID NO: 23144 - protein, 311 aa, Zea mays subsp. mays
  peptide (1)..(311): Ceres Seq. ID no. 12349949
  misc_feature (5)..(311): NCBI GI NO: 15226489 NR Description: mannose 6-phosphate reductase
  misc_feature (5)..(311): NCBI GI NO: 21592829 NR Description: putative NADPH dependent mannose 6-phosphatereductase
  misc_feature (5)..(311): NCBI GI NO: 15226502 NR Description: mannose 6-phosphate reductase
  misc_feature (5)..(311): NCBI GI NO: 10334991 NR Description: NADPH-dependent mannose 6-phosphate reductase
  misc_feature (5)..(311): NCBI GI NO: 21554266 NR Description: putative NADPH dependent mannose 6-phosphatereductase
  misc_feature (4)..(311): NCBI GI NO: 1835701 NR Description: NADPH-dependent mannose 6-phosphate reductase
  misc_feature (3)..(311): NCBI GI NO: 134153 NR Description: NADP-dependent D-sorbitol-6-phosphate dehydrogenase
  misc_feature (1)..(222): NCBI GI NO: 32400786 NR Description: NADPH-dependent mannose 6-phosphate reductase
  misc_feature (47)..(311): NCBI GI NO: 19310926 NR Description: NADP dependent sorbitol 6-phosphate dehydrogenase
  misc_feature (47)..(311): NCBI GI NO: 19310928 NR Description: NADP dependent sorbitol 6-phosphate dehydrogenase
MAASVALSSGHRMPAVGLGVWRMEKADIRGLIHTALRVGYRHLDCAADYQNEAEVGDALAEAFQTGLVKREDLFITTKLWNSDHGHVLEACKDSLKKLQLDYLDLYLIHFPVATRHTGVGTTSSALGDDGVLDIDTTISLETTWHAMEELVSMGLVRSIGISNYDIFLTRDCLAYAKIKPAVNQIETHPYFQRDSLVKFCQKHGICVTAHTPLGGSTANAEWFGTVSCLDDPVIKSLADKYGKTPAQLVLRWGLQRDTVVIPKTSKVERLQENFDVFGFDISGEDMERMKAVDRKYRTNQPAKFWGIDLYA

SEQ ID NO: 23145 - protein, 299 aa, Zea mays subsp. mays
  peptide (1)..(299): Ceres Seq. ID no. 12349950
  misc_feature (1)..(299): NCBI GI NO: 15226489 NR Description: mannose 6-phosphate reductase
  misc_feature (1)..(299): NCBI GI NO: 21592829 NR Description: putative NADPH dependent mannose 6-phosphatereductase
  misc_feature (1)..(299): NCBI GI NO: 15226502 NR Description: mannose 6-phosphate reductase
  misc_feature (1)..(299): NCBI GI NO: 10334991 NR Description: NADPH-dependent mannose 6-phosphate reductase
  misc_feature (1)..(299): NCBI GI NO: 21554266 NR Description: putative NADPH dependent mannose 6-phosphatereductase
  misc_feature (1)..(299): NCBI GI NO: 1835701 NR Description: NADPH-dependent mannose 6-phosphate reductase
  misc_feature (1)..(299): NCBI GI NO: 134153 NR Description: NADP-dependent D-sorbitol-6-phosphate dehydrogenase
  misc_feature (1)..(210): NCBI GI NO: 32400786 NR Description: NADPH-dependent mannose 6-phosphate reductase
  misc_feature (35)..(299): NCBI GI NO: 19310926 NR Description: NADP dependent sorbitol 6-phosphate dehydrogenase
  misc_feature (35)..(299): NCBI GI NO: 19310928 NR Description: NADP dependent sorbitol 6-phosphate dehydrogenase
MPAVGLGVWRMEKADIRGLIHTALRVGYRHLDCAADYQNEAEVGDALAEAFQTGLVKREDLFITTKLWNSDHGHVLEACKDSLKKLQLDYLDLYLIHFPVATRHTGVGTTSSALGDDGVLDIDTTISLETTWHAMEELVSMGLVRSIGISNYDIFLTRDCLAYAKIKPAVNQIETHPYFQRDSLVKFCQKHGICVTAHTPLGGSTANAEWFGTVSCLDDPVIKSLADKYGKTPAQLVLRWGLQRDTVVIPKTSKVERLQENFDVFGFDISGEDMERMKAVDRKYRTNQPAKFWGIDLYA

SEQ ID NO: 23146 - DNA, 1522 bp, Zea mays subsp. mays
  misc_feature (1)..(1522): Ceres Seq. ID no. 13498918
acataggtgccggactcgtcccagcgaagaaccggacgagcgagcaagaggcctcctcctcaagcttcgaatcctccccttccgcgctttccctccccctcctcctcctcccctttccagtccccaccccagcgaagcttccaaagccgccccaaccccaacggccgcccggcctgatcgagcatacagctgccgcggccctccccgccccgcacgcgacctcggagccatggagaagtacgagctgctgaaggacatcggcgccggcaacttcggcgtggcgcggctcatgcggaacaaggagaccaaggaggctggtcgccatgaagtacatcccccggggccaaaagatcgacgagaatgtggcgagggagatcatcaaccaccgctcgctgcgccaccccaacatcatccggttcaaggaggtggtgctgacgccgacgcacctggcgatcgtgatggagtacgccgccggcggcgagctgttcgaccggatctgcaacgccgggaggttcagcgaggacgaggcgaggtacttcttccagcagctgatttgtggcgtcagctactgccactccatgcaaatctgccaccgagacttgaagctggagaacacgctgctggacggcagcccggcgcctcgcctcaagatctgcgacttcggttactccaagtcgtcgctgctgcactcgaagcccaagtcgacggtcggcacgccggcgtacatcgcccccgaggtgctctcccgccgggaatacgacggcaagacagccgatgtgtggtcctgtggagtcactctttatgtgatgctggtcggtggttacccttttgaggacccagacgacccaaagaatttcagaaagacgatcgggaggatcatgtcaatccaatacaaaataccagagtatgtgcacgtgtcgcaagactgcaaggagctgctttcaaggatctttgttgcaaactctgcaaagagaataacgatcagggagatcaggaaccacccctggttcctgaagaacctgcccagagagctcacggaggctgcgcaggccatgtactacaagaaagacaacagcgccccgacctactccgtccagtccgtggaggagatcatgaagatcgtggagaaggcgcggacgccgcctccttcctccacccctgtggctggcttcggttgggcggaggaggacgagcaggaggacagcaaggaaccagacgaggaacacgaggacggcgaggacgagtacgagaagcaggtgaagcaagtccacgccagcggggagtttcatctcagctgctgatggttttcgccggcctgctagtctgtggtaccagccgatgatggacctgctagtctgtggtcttgtttccaagttttctttcattttttctttcttttgctgtggtgccgcaagactgcaacagttgtaaattattgaagggggttccagcgttgcccttgtattgactgattcaaactagcatggggaacatgattatggaataaaacaggtcgttgagc

SEQ ID NO: 23147 - protein, 325 aa, Zea mays subsp. mays
  peptide (1)..(325): Ceres Seq. ID no. 13498919
  misc_feature (1)..(229): Pfam Name: Pfam Description:  Protein kinase domain
  misc_feature (1)..(324): NCBI GI NO: 19568098 NR Description: osmotic stress-activated protein kinase
  misc_feature (1)..(324): NCBI GI NO: 1362051 NR Description: protein kinase SPK-3 (EC 2.7.1.-) - soybean
  misc_feature (1)..(320): NCBI GI NO: 2129803 NR Description: probable serine/threonine-specific protein kinase
  misc_feature (1)..(324): NCBI GI NO: 1362026 NR Description: probable serine/threonine-specific protein kinase
  misc_feature (1)..(324): NCBI GI NO: 15220251 NR Description: serine/threonine protein kinase, putative
  misc_feature (1)..(324): NCBI GI NO: 1161254 NR Description: protein kinase [Glycine max]
  misc_feature (1)..(320): NCBI GI NO: 21593536 NR Description: serine/threonine-protein kinase
  misc_feature (1)..(320): NCBI GI NO: 7434329 NR Description: protein kinase PK1 (EC 2
  misc_feature (1)..(320): NCBI GI NO: 15242858 NR Description: serine/threonine protein kinase, putative
  misc_feature (1)..(324): NCBI GI NO: 21618062 NR Description: putative serine/threonine-protein kinase
MKYIPRGQKIDENVAREIINHRSLRHPNIIRFKEVVLTPTHLAIVMEYAAGGELFDRICNAGRFSEDEARYFFQQLICGVSYCHSMQICHRDLKLENTLLDGSPAPRLKICDFGYSKSSLLHSKPKSTVGTPAYIAPEVLSRREYDGKTADVWSCGVTLYVMLVGGYPFEDPDDPKNFRKTIGRIMSIQYKIPEYVHVSQDCKELLSRIFVANSAKRITIREIRNHPWFLKNLPRELTEAAQAMYYKKDNSAPTYSVQSVEEIMKIVEKARTPPPSSTPVAGFGWAEEDEQEDSKEPDEEHEDGEDEYEKQVKQVHASGEFHLSC

SEQ ID NO: 23148 - protein, 280 aa, Zea mays subsp. mays
  peptide (1)..(280): Ceres Seq. ID no. 13498920
  misc_feature (1)..(184): Pfam Name: Pfam Description:  Protein kinase domain
  misc_feature (1)..(279): NCBI GI NO: 19568098 NR Description: osmotic stress-activated protein kinase
  misc_feature (1)..(279): NCBI GI NO: 1362051 NR Description: protein kinase SPK-3 (EC 2.7.1.-) - soybean
  misc_feature (1)..(275): NCBI GI NO: 2129803 NR Description: probable serine/threonine-specific protein kinase
  misc_feature (1)..(279): NCBI GI NO: 1362026 NR Description: probable serine/threonine-specific protein kinase
  misc_feature (1)..(279): NCBI GI NO: 15220251 NR Description: serine/threonine protein kinase, putative
  misc_feature (1)..(279): NCBI GI NO: 1161254 NR Description: protein kinase [Glycine max]
  misc_feature (1)..(275): NCBI GI NO: 21593536 NR Description: serine/threonine-protein kinase
  misc_feature (1)..(275): NCBI GI NO: 7434329 NR Description: protein kinase PK1 (EC 2
  misc_feature (1)..(275): NCBI GI NO: 15242858 NR Description: serine/threonine protein kinase, putative
  misc_feature (1)..(279): NCBI GI NO: 21618062 NR Description: putative serine/threonine-protein kinase
MEYAAGGELFDRICNAGRFSEDEARYFFQQLICGVSYCHSMQICHRDLKLENTLLDGSPAPRLKICDFGYSKSSLLHSKPKSTVGTPAYIAPEVLSRREYDGKTADVWSCGVTLYVMLVGGYPFEDPDDPKNFRKTIGRIMSIQYKIPEYVHVSQDCKELLSRIFVANSAKRITIREIRNHPWFLKNLPRELTEAAQAMYYKKDNSAPTYSVQSVEEIMKIVEKARTPPPSSTPVAGFGWAEEDEQEDSKEPDEEHEDGEDEYEKQVKQVHASGEFHLSC

SEQ ID NO: 23149 - protein, 276 aa, Zea mays subsp. mays
  peptide (1)..(276): Ceres Seq. ID no. 13498921
  misc_feature (77)..(104): NCBI GI NO: 19568098 NR Description: osmotic stress-activated protein kinase
  misc_feature (77)..(104): NCBI GI NO: 1362051 NR Description: protein kinase SPK-3 (EC 2.7.1.-) - soybean
  misc_feature (77)..(116): NCBI GI NO: 2129803 NR Description: probable serine/threonine-specific protein kinase
  misc_feature (77)..(116): NCBI GI NO: 1362026 NR Description: probable serine/threonine-specific protein kinase
  misc_feature (77)..(116): NCBI GI NO: 15220251 NR Description: serine/threonine protein kinase, putative
  misc_feature (77)..(116): NCBI GI NO: 1161254 NR Description: protein kinase [Glycine max]
  misc_feature (77)..(104): NCBI GI NO: 21593536 NR Description: serine/threonine-protein kinase
  misc_feature (77)..(104): NCBI GI NO: 7434329 NR Description: protein kinase PK1 (EC 2
  misc_feature (77)..(104): NCBI GI NO: 15242858 NR Description: serine/threonine protein kinase, putative
  misc_feature (77)..(116): NCBI GI NO: 21618062 NR Description: putative serine/threonine-protein kinase
HRCRTRPSEEPDERARGLLLKLRILPFRAFPPPPPPPLSSPHPSEASKAAPTPTAARPDRAYSCRGPPRPARDLGAMEKYELLKDIGAGNFGVARLMRNKETKEAGRHEVHPPGPKDRRECGEGDHQPPLAAPPQHHPVQGGGADADAPGDRDGVRRRRRAVRPDLQRREVQRGRGEVLLPAADLWRQLLPLHANLPPRLEAGEHAAGRQPGASPQDLRLRLLQVVAAALEAQVDGRHAGVHRPRGALPPGIRRQDSRCVVLWSHSLCDAGRWLPF

SEQ ID NO: 23150 - DNA, 1756 bp, Zea mays subsp. mays
  misc_feature (1)..(1756): Ceres Seq. ID no. 12374223
gcacgagaccattacctagaacatcctaatcgaaaaaactgcaggtttatttgcgtggcgtccagtgcagaggccagccggagccggcgctgtacaacggaggcattctcaagttcggcagcagcagcagcggcggcggcgatccggacgggtaccgcacgacggagaccggcgtcttctccccggcgttcgtggtgtacaacctcaacaagaccaccatgtacaccttctcatgctgggtgaagctggaaggcgcgtactcggctctgatcaccgcgaggctggcgccggacaacaccggcgccaggtgcatcgccacggtggttgccaggagcgactgctgggccttcgtcaagggcggattcgtcctggactggccgacgcagacctcggtcatcttctttcagaatgctgacaagacgcccatgaagatcaccgtggcgagcgggtcgctgcagccgttcaccacggaccagtgggcgatgcaccagcaggataccatccggaagaggaggaagcgcgtggcgaccatccacgtggccgacccgcagggcgcccgcgtggtgggcgcgtccgtgtcggtgcagcagacggccaaggacttcccgatcggttcggcgatcgcgtccaccatccttgggaaccaggcgtaccagcagtggttcgtggaccggttcaacgcggcggtgttcgaggacgagctcaagtggtactcgacggagcccatgtcgggtcagctgcgcttcgacgtgccggaccagatgctggcgttcgtgcggtcgcaccgggtgatggtgcgcggccacaacatcttctgggagaaccaggacgcgacgccccggtgggtgaagaacctgacggcggacgacctccgcgccgccgtcaacacgcgcatccagagcctcatgacccgctaccgcggcgagttcgcgcactgggacgtgaacaacgagatgctgcactacaacttctacgagcagcggctggggcccaacgcgtccgcggagttcttcagcgtcgcgcaggacgccgacccgctggccacgctcttcatgaacgagtacaacgtcatcgagacctgcgacgaccccttctccaccgtcgacacgtacgtggccaagctcaaggacctccgcaccgccggcgccatcctggaagggatcggcctggagggacacttctccaagcccaacatcccgctcatgagggccatactcgacaagctcgccaccctggggctgcccatctggttcaccgagatcgacatcagcaacaagttcgacgcgcagacgcaggccgcctacctggaacaggtgctgcgggaggcatactcgcacccggccgtcagcggcgtcatgctgtggacggcgctgcaccccagcggctgctaccagatgtgcctcaccgactggaacctcagcaacctgcccacgggggacgtggtcgaccgcctgctcaacgagtggcggacgctgcaggcggccggccagaccgacgcgcacggcgcctacagcttcaccggctacctgggggagtacgtcctcactgtcagctacaacaacaggaccacgcagtccaccttctcgctgtcgccgggagacgagaccaggcacatcaacgttcagatgtgacgcgccaacattatatttagggctcctctcctcacggtccgatccatacctggatcggactacttattactagctaatgtagtgactgttgtggaagaagattgcacagtcaatctatgtttctc

SEQ ID NO: 23151 - protein, 470 aa, Zea mays subsp. mays
  peptide (1)..(470): Ceres Seq. ID no. 12374224
  misc_feature (120)..(413): Pfam Name: Pfam Description:  Glycosyl hydrolase family 10
  misc_feature (1)..(470): NCBI GI NO: 28416709 NR Description: At4g38650 [Arabidopsis thaliana]
  misc_feature (59)..(470): NCBI GI NO: 15233983 NR Description: glycosyl hydrolase family 10; protein id:At4g38650
  misc_feature (1)..(463): NCBI GI NO: 30689830 NR Description: glycosyl hydrolase family 10
  misc_feature (1)..(463): NCBI GI NO: 7485619 NR Description: hypothetical protein F17I5
  misc_feature (1)..(465): NCBI GI NO: 15235131 NR Description: glycosyl hydrolase family 10; protein id:At4g33830
  misc_feature (1)..(458): NCBI GI NO: 15235134 NR Description: glycosyl hydrolase family 10; protein id:At4g33860
  misc_feature (1)..(464): NCBI GI NO: 23429644 NR Description: endoxylanase [Carica papaya]
  misc_feature (1)..(454): NCBI GI NO: 37533262 NR Description: putative 1,4-beta-xylanase
  misc_feature (1)..(458): NCBI GI NO: 37533260 NR Description: putative 1,4-beta-xylanase
  misc_feature (1)..(446): NCBI GI NO: 40363757 NR Description: putative 1,4-beta-xylanase [Triticum aestivum]
MYTFSCWVKLEGAYSALITARLAPDNTGARCIATVVARSDCWAFVKGGFVLDWPTQTSVIFFQNADKTPMKITVASGSLQPFTTDQWAMHQQDTIRKRRKRVATIHVADPQGARVVGASVSVQQTAKDFPIGSAIASTILGNQAYQQWFVDRFNAAVFEDELKWYSTEPMSGQLRFDVPDQMLAFVRSHRVMVRGHNIFWENQDATPRWVKNLTADDLRAAVNTRIQSLMTRYRGEFAHWDVNNEMLHYNFYEQRLGPNASAEFFSVAQDADPLATLFMNEYNVIETCDDPFSTVDTYVAKLKDLRTAGAILEGIGLEGHFSKPNIPLMRAILDKLATLGLPIWFTEIDISNKFDAQTQAAYLEQVLREAYSHPAVSGVMLWTALHPSGCYQMCLTDWNLSNLPTGDVVDRLLNEWRTLQAAGQTDAHGAYSFTGYLGEYVLTVSYNNRTTQSTFSLSPGDETRHINVQM

SEQ ID NO: 23152 - protein, 401 aa, Zea mays subsp. mays
  peptide (1)..(401): Ceres Seq. ID no. 12374225
  misc_feature (51)..(344): Pfam Name: Pfam Description:  Glycosyl hydrolase family 10
  misc_feature (1)..(401): NCBI GI NO: 28416709 NR Description: At4g38650 [Arabidopsis thaliana]
  misc_feature (1)..(401): NCBI GI NO: 15233983 NR Description: glycosyl hydrolase family 10; protein id:At4g38650
  misc_feature (1)..(394): NCBI GI NO: 30689830 NR Description: glycosyl hydrolase family 10
  misc_feature (1)..(394): NCBI GI NO: 7485619 NR Description: hypothetical protein F17I5
  misc_feature (1)..(396): NCBI GI NO: 15235131 NR Description: glycosyl hydrolase family 10; protein id:At4g33830
  misc_feature (1)..(389): NCBI GI NO: 15235134 NR Description: glycosyl hydrolase family 10; protein id:At4g33860
  misc_feature (1)..(395): NCBI GI NO: 23429644 NR Description: endoxylanase [Carica papaya]
  misc_feature (1)..(385): NCBI GI NO: 37533262 NR Description: putative 1,4-beta-xylanase
  misc_feature (1)..(389): NCBI GI NO: 37533260 NR Description: putative 1,4-beta-xylanase
  misc_feature (1)..(377): NCBI GI NO: 40363757 NR Description: putative 1,4-beta-xylanase [Triticum aestivum]
MKITVASGSLQPFTTDQWAMHQQDTIRKRRKRVATIHVADPQGARVVGASVSVQQTAKDFPIGSAIASTILGNQAYQQWFVDRFNAAVFEDELKWYSTEPMSGQLRFDVPDQMLAFVRSHRVMVRGHNIFWENQDATPRWVKNLTADDLRAAVNTRIQSLMTRYRGEFAHWDVNNEMLHYNFYEQRLGPNASAEFFSVAQDADPLATLFMNEYNVIETCDDPFSTVDTYVAKLKDLRTAGAILEGIGLEGHFSKPNIPLMRAILDKLATLGLPIWFTEIDISNKFDAQTQAAYLEQVLREAYSHPAVSGVMLWTALHPSGCYQMCLTDWNLSNLPTGDVVDRLLNEWRTLQAAGQTDAHGAYSFTGYLGEYVLTVSYNNRTTQSTFSLSPGDETRHINVQM

SEQ ID NO: 23153 - protein, 382 aa, Zea mays subsp. mays
  peptide (1)..(382): Ceres Seq. ID no. 12374226
  misc_feature (32)..(325): Pfam Name: Pfam Description:  Glycosyl hydrolase family 10
  misc_feature (1)..(382): NCBI GI NO: 28416709 NR Description: At4g38650 [Arabidopsis thaliana]
  misc_feature (1)..(382): NCBI GI NO: 15233983 NR Description: glycosyl hydrolase family 10; protein id:At4g38650
  misc_feature (1)..(375): NCBI GI NO: 30689830 NR Description: glycosyl hydrolase family 10
  misc_feature (1)..(375): NCBI GI NO: 7485619 NR Description: hypothetical protein F17I5
  misc_feature (1)..(377): NCBI GI NO: 15235131 NR Description: glycosyl hydrolase family 10; protein id:At4g33830
  misc_feature (1)..(370): NCBI GI NO: 15235134 NR Description: glycosyl hydrolase family 10; protein id:At4g33860
  misc_feature (1)..(376): NCBI GI NO: 23429644 NR Description: endoxylanase [Carica papaya]
  misc_feature (1)..(366): NCBI GI NO: 37533262 NR Description: putative 1,4-beta-xylanase
  misc_feature (1)..(370): NCBI GI NO: 37533260 NR Description: putative 1,4-beta-xylanase
  misc_feature (1)..(358): NCBI GI NO: 40363757 NR Description: putative 1,4-beta-xylanase [Triticum aestivum]
MHQQDTIRKRRKRVATIHVADPQGARVVGASVSVQQTAKDFPIGSAIASTILGNQAYQQWFVDRFNAAVFEDELKWYSTEPMSGQLRFDVPDQMLAFVRSHRVMVRGHNIFWENQDATPRWVKNLTADDLRAAVNTRIQSLMTRYRGEFAHWDVNNEMLHYNFYEQRLGPNASAEFFSVAQDADPLATLFMNEYNVIETCDDPFSTVDTYVAKLKDLRTAGAILEGIGLEGHFSKPNIPLMRAILDKLATLGLPIWFTEIDISNKFDAQTQAAYLEQVLREAYSHPAVSGVMLWTALHPSGCYQMCLTDWNLSNLPTGDVVDRLLNEWRTLQAAGQTDAHGAYSFTGYLGEYVLTVSYNNRTTQSTFSLSPGDETRHINVQM

SEQ ID NO: 23154 - DNA, 1091 bp, Zea mays subsp. mays
  misc_feature (1)..(1091): Ceres Seq. ID no. 12351358
accaataaaaaggtagagaatacaagaaaccgtcacgaccgcctccgcagtgctctaccatccgttccatggcgccgccgctcgccctgtttcttctcgccgccatcgtgctctcgcgggccgtctcccacggccacggcggcggcggcggcttctacgacccggcgagcgtcactcagctctcctcgcgccccagggcgttcctgtacagcggcttcctctcggacaccgagtgcgaccacatcgtcagcctggcgaaaggcagcatggagaagtcgatggtggcggataacgactccgggaagagtgtggcgagccaggcgcgcaccagctccggcaccttcttggccaagcgcgaggatgagatcgtgtctgcgattgagaaacgcgtagctgcttggacatttctcccggaagaaaacgccgaatcactccaggtcctgcgctacgaaaccggccagaagtatgacgcccacttcgactatttccacgacagaaacaacctgaagctcggcggccagcgagttgcgaccgtccttatgtacctcacagatgtcaagaaaggtggagagactgtatttccaaacgctgagggaagccatttacagtacaaggacgaaacttggtcggagtgttcaagatctggcctggcagtgaagccaaagaaaggagacgcgctactgttcttcaacctccacgtcaacgccacagccgatacaggcagtctccacgggagctgcccggtgatcgagggcgagaaatggtcggcgacgaaatggatccacgtcaggtcgttcgacaaccccccagacgtgaggacggacgcgccgtgctccgacgacaaggagctctgccctagatgggctgctatcggggagtgccacaggaacccgacgtacatggttgggaccaaagacactctcgggttttgccgcaagagctgcgggatctgtgatgcttgaacgtgttttgggggtagattttgatcccatcatgttttcaataacagatgaatcagtaacctagtgtaatgcgaatttcggtacagtcgcctccattggactgtttcgtccaccagatgttctaatact

SEQ ID NO: 23155 - protein, 297 aa, Zea mays subsp. mays
  peptide (1)..(297): Ceres Seq. ID no. 12351359
  misc_feature (118)..(240): Pfam Name: II Pfam Description: 2OG-Fe
  misc_feature (1)..(297): NCBI GI NO: 29150365 NR Description: putative oxidoreductase
  misc_feature (98)..(295): NCBI GI NO: 37534316 NR Description: unknown protein
  misc_feature (1)..(97): NCBI GI NO: 37534316 NR Description: unknown protein
  misc_feature (30)..(297): NCBI GI NO: 9294583 NR Description: prolyl 4-hydroxylase alpha subunit-like protein
  misc_feature (30)..(297): NCBI GI NO: 18405808 NR Description: prolyl 4-hydroxylase, putative
  misc_feature (30)..(297): NCBI GI NO: 18086437 NR Description: AT3g28480/MFJ20_16 [Arabidopsis thaliana]
  misc_feature (31)..(295): NCBI GI NO: 30689216 NR Description: oxidoreductase, 2OG-Fe(II) oxygenase family
  misc_feature (5)..(297): NCBI GI NO: 34393269 NR Description: prolyl 4-hydroxylase alpha-1 subunit precursor-likeprotein
  misc_feature (42)..(295): NCBI GI NO: 28393447 NR Description: putative prolyl 4-hydroxylase
  misc_feature (5)..(295): NCBI GI NO: 20260280 NR Description: unknown protein [Arabidopsis thaliana]
MAPPLALFLLAAIVLSRAVSHGHGGGGGFYDPASVTQLSSRPRAFLYSGFLSDTECDHIVSLAKGSMEKSMVADNDSGKSVASQARTSSGTFLAKREDEIVSAIEKRVAAWTFLPEENAESLQVLRYETGQKYDAHFDYFHDRNNLKLGGQRVATVLMYLTDVKKGGETVFPNAEGSHLQYKDETWSECSRSGLAVKPKKGDALLFFNLHVNATADTGSLHGSCPVIEGEKWSATKWIHVRSFDNPPDVRTDAPCSDDKELCPRWAAIGECHRNPTYMVGTKDTLGFCRKSCGICDA

SEQ ID NO: 23156 - protein, 231 aa, Zea mays subsp. mays
  peptide (1)..(231): Ceres Seq. ID no. 12351360
  misc_feature (52)..(174): Pfam Name: II Pfam Description: 2OG-Fe
  misc_feature (1)..(231): NCBI GI NO: 29150365 NR Description: putative oxidoreductase
  misc_feature (32)..(229): NCBI GI NO: 37534316 NR Description: unknown protein
  misc_feature (1)..(31): NCBI GI NO: 37534316 NR Description: unknown protein
  misc_feature (1)..(231): NCBI GI NO: 9294583 NR Description: prolyl 4-hydroxylase alpha subunit-like protein
  misc_feature (1)..(231): NCBI GI NO: 18405808 NR Description: prolyl 4-hydroxylase, putative
  misc_feature (1)..(231): NCBI GI NO: 18086437 NR Description: AT3g28480/MFJ20_16 [Arabidopsis thaliana]
  misc_feature (1)..(229): NCBI GI NO: 30689216 NR Description: oxidoreductase, 2OG-Fe(II) oxygenase family
  misc_feature (1)..(231): NCBI GI NO: 34393269 NR Description: prolyl 4-hydroxylase alpha-1 subunit precursor-likeprotein
  misc_feature (1)..(229): NCBI GI NO: 28393447 NR Description: putative prolyl 4-hydroxylase
  misc_feature (1)..(229): NCBI GI NO: 20260280 NR Description: unknown protein [Arabidopsis thaliana]
MEKSMVADNDSGKSVASQARTSSGTFLAKREDEIVSAIEKRVAAWTFLPEENAESLQVLRYETGQKYDAHFDYFHDRNNLKLGGQRVATVLMYLTDVKKGGETVFPNAEGSHLQYKDETWSECSRSGLAVKPKKGDALLFFNLHVNATADTGSLHGSCPVIEGEKWSATKWIHVRSFDNPPDVRTDAPCSDDKELCPRWAAIGECHRNPTYMVGTKDTLGFCRKSCGICDA

SEQ ID NO: 23157 - protein, 227 aa, Zea mays subsp. mays
  peptide (1)..(227): Ceres Seq. ID no. 12351361
  misc_feature (48)..(170): Pfam Name: II Pfam Description: 2OG-Fe
  misc_feature (1)..(227): NCBI GI NO: 29150365 NR Description: putative oxidoreductase
  misc_feature (28)..(225): NCBI GI NO: 37534316 NR Description: unknown protein
  misc_feature (1)..(27): NCBI GI NO: 37534316 NR Description: unknown protein
  misc_feature (1)..(227): NCBI GI NO: 9294583 NR Description: prolyl 4-hydroxylase alpha subunit-like protein
  misc_feature (1)..(227): NCBI GI NO: 18405808 NR Description: prolyl 4-hydroxylase, putative
  misc_feature (1)..(227): NCBI GI NO: 18086437 NR Description: AT3g28480/MFJ20_16 [Arabidopsis thaliana]
  misc_feature (1)..(225): NCBI GI NO: 30689216 NR Description: oxidoreductase, 2OG-Fe(II) oxygenase family
  misc_feature (1)..(227): NCBI GI NO: 34393269 NR Description: prolyl 4-hydroxylase alpha-1 subunit precursor-likeprotein
  misc_feature (1)..(225): NCBI GI NO: 28393447 NR Description: putative prolyl 4-hydroxylase
  misc_feature (1)..(225): NCBI GI NO: 20260280 NR Description: unknown protein [Arabidopsis thaliana]
MVADNDSGKSVASQARTSSGTFLAKREDEIVSAIEKRVAAWTFLPEENAESLQVLRYETGQKYDAHFDYFHDRNNLKLGGQRVATVLMYLTDVKKGGETVFPNAEGSHLQYKDETWSECSRSGLAVKPKKGDALLFFNLHVNATADTGSLHGSCPVIEGEKWSATKWIHVRSFDNPPDVRTDAPCSDDKELCPRWAAIGECHRNPTYMVGTKDTLGFCRKSCGICDA

SEQ ID NO: 23158 - DNA, 1935 bp, Zea mays subsp. mays
  misc_feature (1)..(1935): Ceres Seq. ID no. 12341425
attttttctccaaccctttcccctctctttctctctctcatctaccctctctctaaaagactggatacagaacgaggaaaacaaacacccgaaaagaaaggaagaagaggagaagaacaccaaacaagcagaacttttttttttgagaactccataggctgtggaattgtctccaggaatcccctctgggtttgacgagattcatacagagaaatacttcttgattttccccctttcttttgctcaagaatttacctgtacaggcgaaaccgcttctttgttcccttttttttctgtgtttgttttattgggattttcctctggtccgttcttcttcacctgtgaggtggtgagaagcagagagaatcatggggaagcaaggaccctgccgtcattgtggagtcacaagtactcccctgtggcgaaatgggccaccagataagccggtgctctgcaatgcatgtggctcgagatggagaacaaagggttcattggcaaactacactccaatgcatcgcaaggacgatattgatgacgatgaacccagagttagcaagctgaagccaccgacatcaaagctgaagtcacagaagaaaaaaccaaatcacattataatggagaatgggccattttctggtcagaatttccgaaagatgggggatgtcgaccaaagttatcggtctagttcgggatctgcagtatcatactctgagagttgtgccccatatggtgctgctgatgcaagtgaaatgactggttcagcacagtcgcatgcttgggagtccctagtgccatcaagaaagaggagctgtgtcacccgtccgaagccttcccctgtagaaaagcttgcaaaagatctaaacttcatcatgcatgaagagcagttatattacccttcaggatcatcggaggaagacctactataccatagtgaaactcctgtcggttcctttgagatgggctctggaagtgtgcttctaagacatccaaactcgaaatcactggagaaagaatcagaagcaagctctattcctgcagataataaatcatatattacaagtgaatcctactcgggctctgcctcgtttgccattcacaatggaaacaaggcagcaattaacttaaacgcttcaaatgcaaggctgaagaagtcgccgctgcatatggaagacaatgctagaaggggagtagggagcatcagtggtccggaaggctttaccaagtctactatgaaaccactcaaaagaccccgtgacacccaatttcagattgatgcagaactagaaggtaccatgaggagtcctctaagaggtctaaaatctggtgctttggctcagtttgaaagttcatctttgccaaaatctggctacaccaccaaagattcaacctgcactggaggagcacttaatttattcatgttacccccagaaaagttattagtggtccctcctcagtatgtcgaccctgatcaagacttgctgctggagatacctctcaatgcacgacacccagaggcagaacttctgtgtcaaccatctcagctgatgagctctataagccgcagctccacctctatgggtggggttgctgaaggagaagggtgcctgaagcaaccatagtctcaggtcacatcagcaaggagcttaggaacagccagtagttgcagtttactttagcctcctggatcttgacgcctccatttactgatcaccaatgggcgttatgcatccgtcattccctaatttacataacaatgtgcgtcatcttccaacttggcgaattgtccgttcagctaacatttgtagcatgcttttggattgggtttctgctggttgtctgtagcatatggtccgtggagaaagtattatctccgtgtgaaaaaaatatcaccttattgcagggaaatgaaaaaaagaggatactggagagttatgc

SEQ ID NO: 23159 - protein, 416 aa, Zea mays subsp. mays
  peptide (1)..(416): Ceres Seq. ID no. 12341426
  misc_feature (1)..(272): NCBI GI NO: 38345953 NR Description: OSJNBb0038F03.10
  misc_feature (1)..(237): NCBI GI NO: 30684095 NR Description: GATA zinc finger protein [Arabidopsis thaliana]
  misc_feature (1)..(238): NCBI GI NO: 22327632 NR Description: GATA zinc finger protein; protein id: At5g47140.1
  misc_feature (13)..(238): NCBI GI NO: 8978081 NR Description: gene_id:K14A3
  misc_feature (196)..(416): NCBI GI NO: 38345953 NR Description: OSJNBb0038F03.10
  misc_feature (40)..(237): NCBI GI NO: 7485111 NR Description: hypothetical protein - Arabidopsis thaliana
MGKQGPCRHCGVTSTPLWRNGPPDKPVLCNACGSRWRTKGSLANYTPMHRKDDIDDDEPRVSKLKPPTSKLKSQKKKPNHIIMENGPFSGQNFRKMGDVDQSYRSSSGSAVSYSESCAPYGAADASEMTGSAQSHAWESLVPSRKRSCVTRPKPSPVEKLAKDLNFIMHEEQLYYPSGSSEEDLLYHSETPVGSFEMGSGSVLLRHPNSKSLEKESEASSIPADNKSYITSESYSGSASFAIHNGNKAAINLNASNARLKKSPLHMEDNARRGVGSISGPEGFTKSTMKPLKRPRDTQFQIDAELEGTMRSPLRGLKSGALAQFESSSLPKSGYTTKDSTCTGGALNLFMLPPEKLLVVPPQYVDPDQDLLLEIPLNARHPEAELLCQPSQLMSSISRSSTSMGGVAEGEGCLKQP

SEQ ID NO: 23160 - protein, 369 aa, Zea mays subsp. mays
  peptide (1)..(369): Ceres Seq. ID no. 12341427
  misc_feature (1)..(225): NCBI GI NO: 38345953 NR Description: OSJNBb0038F03.10
  misc_feature (1)..(190): NCBI GI NO: 30684095 NR Description: GATA zinc finger protein [Arabidopsis thaliana]
  misc_feature (1)..(191): NCBI GI NO: 22327632 NR Description: GATA zinc finger protein; protein id: At5g47140.1
  misc_feature (1)..(191): NCBI GI NO: 8978081 NR Description: gene_id:K14A3
  misc_feature (149)..(369): NCBI GI NO: 38345953 NR Description: OSJNBb0038F03.10
  misc_feature (1)..(190): NCBI GI NO: 7485111 NR Description: hypothetical protein - Arabidopsis thaliana
MHRKDDIDDDEPRVSKLKPPTSKLKSQKKKPNHIIMENGPFSGQNFRKMGDVDQSYRSSSGSAVSYSESCAPYGAADASEMTGSAQSHAWESLVPSRKRSCVTRPKPSPVEKLAKDLNFIMHEEQLYYPSGSSEEDLLYHSETPVGSFEMGSGSVLLRHPNSKSLEKESEASSIPADNKSYITSESYSGSASFAIHNGNKAAINLNASNARLKKSPLHMEDNARRGVGSISGPEGFTKSTMKPLKRPRDTQFQIDAELEGTMRSPLRGLKSGALAQFESSSLPKSGYTTKDSTCTGGALNLFMLPPEKLLVVPPQYVDPDQDLLLEIPLNARHPEAELLCQPSQLMSSISRSSTSMGGVAEGEGCLKQP

SEQ ID NO: 23161 - protein, 334 aa, Zea mays subsp. mays
  peptide (1)..(334): Ceres Seq. ID no. 12341428
  misc_feature (1)..(190): NCBI GI NO: 38345953 NR Description: OSJNBb0038F03.10
  misc_feature (1)..(155): NCBI GI NO: 30684095 NR Description: GATA zinc finger protein [Arabidopsis thaliana]
  misc_feature (1)..(156): NCBI GI NO: 22327632 NR Description: GATA zinc finger protein; protein id: At5g47140.1
  misc_feature (1)..(156): NCBI GI NO: 8978081 NR Description: gene_id:K14A3
  misc_feature (114)..(334): NCBI GI NO: 38345953 NR Description: OSJNBb0038F03.10
  misc_feature (1)..(155): NCBI GI NO: 7485111 NR Description: hypothetical protein - Arabidopsis thaliana
MENGPFSGQNFRKMGDVDQSYRSSSGSAVSYSESCAPYGAADASEMTGSAQSHAWESLVPSRKRSCVTRPKPSPVEKLAKDLNFIMHEEQLYYPSGSSEEDLLYHSETPVGSFEMGSGSVLLRHPNSKSLEKESEASSIPADNKSYITSESYSGSASFAIHNGNKAAINLNASNARLKKSPLHMEDNARRGVGSISGPEGFTKSTMKPLKRPRDTQFQIDAELEGTMRSPLRGLKSGALAQFESSSLPKSGYTTKDSTCTGGALNLFMLPPEKLLVVPPQYVDPDQDLLLEIPLNARHPEAELLCQPSQLMSSISRSSTSMGGVAEGEGCLKQP

SEQ ID NO: 23162 - DNA, 1677 bp, Zea mays subsp. mays
  misc_feature (1)..(1677): Ceres Seq. ID no. 12357902
actgtctccacaaacaaaattgtagagtcggagaccaacgccacgccgacatcgacagcactgatccgacaagtcgccgtttctgccctaagcacggacgctgtcggtcacactcgcctcttgttttctcccgagccccatccttccctcccggtctctccttgcgagctagtaccctacttgctccacagtgccacaccgctcgcgctggagtatgggttcgagcccgatgtggtggtcaggaccaccaccgtcgccgtggagccgcggtttagggaaatggtgggcgctggtagggccattcgtggtgaaggccgtcgggttcctgctgctcgcgggcctcttgttccgggtgctctggtcctttccgtcctctccggcgccggcgttgcagatcacaaaaggaaaatgcagtcttttcaatggggaatggataccaaacccctctggtccagcctatacaaatgcaagctgtcgatttattgacgatcaccagaactgcatgatgaatggtagacctgataaggaatatctacattggaagtggaaaccttatggatgtgatcttccaccatttgatgcagtaagatttctagattctatgagaaacaaaggttggggactaattggtgactccatcctccgtaaccaagttcagtcattgctttgccttctgtctaaggctgaagaacctgttgaggtttaccatgataacgaattcaaaaacaggagatggcacttccaatcctacaacttcacagtgtccatcgtctgggctcctttcctcatcaaatctggtatttttgagaatgaggatggcgtgtctacctctgaaatacagctccaccttgatatactcgatgctaactggacaagtcagtatgagagctttgactatattattatttctggcggacaatggtttctgaggacagcggtctactgggagaacggtgcagtggttggtggtcataattctcagaacaagaacctcgctgaacttggttttgagcacctgtatcggaaaactctacaaaacgttttcaacttcatcgtctcagcgaaacacaagccagtaattttcttcaggacctggtcacctgatcacttcgaggatggagagtggttcagcggtgggtcttgtcgcaggaaattgccctacaacaagggagagtacagagagggtaacatcgagcgtgtcatgagacagatcgagcttgagtccttcaacaaggctgtagccgcgcttaggggttcagcggacgtggatagactgagactgatggatacctacagcctctcgtccttgagaccggacggccacgttgggccttacagaacaccctatccctttgcaaggggcagcagtaaatccacgcccgtccaaaatgattgcttgcactggtgtgtaccaggccccattgatgcatggaatgatcttgttatgaagatggccctggatccatgaaaaccttatggatttgtatggtgtgctcttatggagtaagtagcagctaagtgggcacaaaaaagtgtgtccgttttggtttagctgtaaaataggagtgctagcaaatagagaaacctcagggttggctttgttgcaaagatatgtgtatgttgttttaaagctttataagtttcaactgggcagatactgccagttgttcctggttt

SEQ ID NO: 23163 - protein, 417 aa, Zea mays subsp. mays
  peptide (1)..(417): Ceres Seq. ID no. 12357903
  misc_feature (237)..(412): Pfam Name: Pfam Description:  Arabidopsis proteins of unknown function
  misc_feature (30)..(416): NCBI GI NO: 28393189 NR Description: unknown protein [Arabidopsis thaliana]
  misc_feature (30)..(416): NCBI GI NO: 15234058 NR Description: hypothetical protein; protein id: At4g01080.1
  misc_feature (58)..(416): NCBI GI NO: 30678135 NR Description: expressed protein [Arabidopsis thaliana]
  misc_feature (65)..(416): NCBI GI NO: 15237044 NR Description: putative protein; protein id: At4g11090.1
  misc_feature (50)..(416): NCBI GI NO: 25518737 NR Description: hypothetical protein F6F3.23
  misc_feature (65)..(412): NCBI GI NO: 7486743 NR Description: hypothetical protein F9D16
  misc_feature (65)..(412): NCBI GI NO: 30686312 NR Description: expressed protein [Arabidopsis thaliana]
  misc_feature (66)..(413): NCBI GI NO: 15223079 NR Description: unknown protein; protein id: At1g70230
  misc_feature (66)..(413): NCBI GI NO: 15237213 NR Description: putative protein; protein id: At5g15900.1
  misc_feature (66)..(413): NCBI GI NO: 15237211 NR Description: putative protein; protein id: At5g15890.1
MGSSPMWWSGPPPSPWSRGLGKWWALVGPFVVKAVGFLLLAGLLFRVLWSFPSSPAPALQITKGKCSLFNGEWIPNPSGPAYTNASCRFIDDHQNCMMNGRPDKEYLHWKWKPYGCDLPPFDAVRFLDSMRNKGWGLIGDSILRNQVQSLLCLLSKAEEPVEVYHDNEFKNRRWHFQSYNFTVSIVWAPFLIKSGIFENEDGVSTSEIQLHLDILDANWTSQYESFDYIIISGGQWFLRTAVYWENGAVVGGHNSQNKNLAELGFEHLYRKTLQNVFNFIVSAKHKPVIFFRTWSPDHFEDGEWFSGGSCRRKLPYNKGEYREGNIERVMRQIELESFNKAVAALRGSADVDRLRLMDTYSLSSLRPDGHVGPYRTPYPFARGSSKSTPVQNDCLHWCVPGPIDAWNDLVMKMALDP

SEQ ID NO: 23164 - protein, 412 aa, Zea mays subsp. mays
  peptide (1)..(412): Ceres Seq. ID no. 12357904
  misc_feature (232)..(407): Pfam Name: Pfam Description:  Arabidopsis proteins of unknown function
  misc_feature (25)..(411): NCBI GI NO: 28393189 NR Description: unknown protein [Arabidopsis thaliana]
  misc_feature (25)..(411): NCBI GI NO: 15234058 NR Description: hypothetical protein; protein id: At4g01080.1
  misc_feature (53)..(411): NCBI GI NO: 30678135 NR Description: expressed protein [Arabidopsis thaliana]
  misc_feature (60)..(411): NCBI GI NO: 15237044 NR Description: putative protein; protein id: At4g11090.1
  misc_feature (45)..(411): NCBI GI NO: 25518737 NR Description: hypothetical protein F6F3.23
  misc_feature (60)..(407): NCBI GI NO: 7486743 NR Description: hypothetical protein F9D16
  misc_feature (60)..(407): NCBI GI NO: 30686312 NR Description: expressed protein [Arabidopsis thaliana]
  misc_feature (61)..(408): NCBI GI NO: 15223079 NR Description: unknown protein; protein id: At1g70230
  misc_feature (61)..(408): NCBI GI NO: 15237213 NR Description: putative protein; protein id: At5g15900.1
  misc_feature (61)..(408): NCBI GI NO: 15237211 NR Description: putative protein; protein id: At5g15890.1
MWWSGPPPSPWSRGLGKWWALVGPFVVKAVGFLLLAGLLFRVLWSFPSSPAPALQITKGKCSLFNGEWIPNPSGPAYTNASCRFIDDHQNCMMNGRPDKEYLHWKWKPYGCDLPPFDAVRFLDSMRNKGWGLIGDSILRNQVQSLLCLLSKAEEPVEVYHDNEFKNRRWHFQSYNFTVSIVWAPFLIKSGIFENEDGVSTSEIQLHLDILDANWTSQYESFDYIIISGGQWFLRTAVYWENGAVVGGHNSQNKNLAELGFEHLYRKTLQNVFNFIVSAKHKPVIFFRTWSPDHFEDGEWFSGGSCRRKLPYNKGEYREGNIERVMRQIELESFNKAVAALRGSADVDRLRLMDTYSLSSLRPDGHVGPYRTPYPFARGSSKSTPVQNDCLHWCVPGPIDAWNDLVMKMALDP

SEQ ID NO: 23165 - protein, 321 aa, Zea mays subsp. mays
  peptide (1)..(321): Ceres Seq. ID no. 12357905
  misc_feature (141)..(316): Pfam Name: Pfam Description:  Arabidopsis proteins of unknown function
  misc_feature (1)..(320): NCBI GI NO: 28393189 NR Description: unknown protein [Arabidopsis thaliana]
  misc_feature (1)..(320): NCBI GI NO: 15234058 NR Description: hypothetical protein; protein id: At4g01080.1
  misc_feature (1)..(320): NCBI GI NO: 30678135 NR Description: expressed protein [Arabidopsis thaliana]
  misc_feature (1)..(320): NCBI GI NO: 15237044 NR Description: putative protein; protein id: At4g11090.1
  misc_feature (1)..(320): NCBI GI NO: 25518737 NR Description: hypothetical protein F6F3.23
  misc_feature (1)..(316): NCBI GI NO: 7486743 NR Description: hypothetical protein F9D16
  misc_feature (1)..(316): NCBI GI NO: 30686312 NR Description: expressed protein [Arabidopsis thaliana]
  misc_feature (1)..(317): NCBI GI NO: 15223079 NR Description: unknown protein; protein id: At1g70230
  misc_feature (1)..(317): NCBI GI NO: 15237213 NR Description: putative protein; protein id: At5g15900.1
  misc_feature (1)..(317): NCBI GI NO: 15237211 NR Description: putative protein; protein id: At5g15890.1
MMNGRPDKEYLHWKWKPYGCDLPPFDAVRFLDSMRNKGWGLIGDSILRNQVQSLLCLLSKAEEPVEVYHDNEFKNRRWHFQSYNFTVSIVWAPFLIKSGIFENEDGVSTSEIQLHLDILDANWTSQYESFDYIIISGGQWFLRTAVYWENGAVVGGHNSQNKNLAELGFEHLYRKTLQNVFNFIVSAKHKPVIFFRTWSPDHFEDGEWFSGGSCRRKLPYNKGEYREGNIERVMRQIELESFNKAVAALRGSADVDRLRLMDTYSLSSLRPDGHVGPYRTPYPFARGSSKSTPVQNDCLHWCVPGPIDAWNDLVMKMALDP

SEQ ID NO: 23166 - DNA, 1462 bp, Zea mays subsp. mays
  misc_feature (1)..(1462): Ceres Seq. ID no. 12345814
  misc_feature (1400)..(1400): n is a, c, t, g, unknown, or other
cctgtttgtttacccagattatctggcgtgtttctgttgggcggcgggcttctctgatccgataggggcaaaaacgattcggtagattataatggcaatgatgggtaatttctaggaaacttgaaagggtagtggggaagtgggaaaaaaataatctgaaataagcacctcctcacttgcttatggattatcataatccaaggggttagattatataatctgggcaaataagctagactgtttgtttgcctcttaggattatttaatccagattatataatctgggggtaaacaaacaggcccttaaagtctcttctttcccttttgtgatgggaacctttggccaattatgcagccgagcatttcgggctgccactgccgccaccgtcgcaggccaagggcaaggacttcaagaagggcgccaacttcgccatcaccggcgcgacggccctggagtactccttcttcaaggcgcacggcatcgaccagcgcatctggaacaccggctccatcaacacccagatcggctggctccaggacatgaagccgtccctctgtaaatcggagcaagactgcaaggattacttcagcaaatccctgttcgtcgtcggggagttcgggggcaacgactacaacgcgccgctcttctccggcgtcccattttctgatgtcaagacttacgtgccccttgttgcaaaggctatcgccaatggcgttgagaaactgatcgagcttggggcaacagacctcctggtgcctggcgttctcccaattggctgcttcccgttgtacctgacgctgtacaacaccagcagcaaagcagattacaacgcccggaccgggtgccttcggaggtacaaccgcctggccttccaccacaacagggagctgaagcagcagcttgacgagcttcagaagaagtaccccaagacgaagatcatgtatggagattacttcaaggctgcactgcagtttgtcgtcaaccctgggaaatttggtttcagcacggctttgcaagcgtgctgcggcgccggagggcagggcaactacaacttcaacctgaagaagaagtgtggcgagcagggcgcgagcgtgtgctccaacccgtcgtcgtacgtgagctgggatggcatccacatgaccgaagctgcgtacagaaaggtcgccgatggctggttgaatggcccgtatgctcagcccccaattctcaagtcatgatcgagattactaggctgtgcgtaacagccgccgcagctgcatgctgcggctagagatatatatgaggagtgtttcaggcaatagatatgctaagttatggtaaagctatttggtctgttcattggaagatctgtataaactgcgccggtatagatatgttcccagctgaaatggctctagcncagatgtgcatggcatgttctctgattcttttcatttgttctaaaaaaatattgcggcagtg

SEQ ID NO: 23167 - protein, 225 aa, Zea mays subsp. mays
  peptide (1)..(225): Ceres Seq. ID no. 12345815
  misc_feature (1)..(212): Pfam Name: Pfam Description:  GDSL-like Lipase/Acylhydrolase
  misc_feature (1)..(223): NCBI GI NO: 34903956 NR Description: OSJNBa0038J17.23
  misc_feature (1)..(225): NCBI GI NO: 34903958 NR Description: OSJNBa0038J17.24
  misc_feature (1)..(223): NCBI GI NO: 34903978 NR Description: unnamed protein product
  misc_feature (1)..(223): NCBI GI NO: 34903996 NR Description: unnamed protein product
  misc_feature (1)..(223): NCBI GI NO: 34903994 NR Description: unnamed protein product
  misc_feature (1)..(225): NCBI GI NO: 34903986 NR Description: unnamed protein product
  misc_feature (1)..(225): NCBI GI NO: 21593234 NR Description: lipase, putative [Arabidopsis thaliana]
  misc_feature (1)..(225): NCBI GI NO: 10764858 NR Description: F1K23.17 [Arabidopsis thaliana]
  misc_feature (1)..(225): NCBI GI NO: 15218731 NR Description: lipase, putative; protein id: At1g28600
  misc_feature (1)..(225): NCBI GI NO: 34904004 NR Description: unnamed protein product
MKPSLCKSEQDCKDYFSKSLFVVGEFGGNDYNAPLFSGVPFSDVKTYVPLVAKAIANGVEKLIELGATDLLVPGVLPIGCFPLYLTLYNTSSKADYNARTGCLRRYNRLAFHHNRELKQQLDELQKKYPKTKIMYGDYFKAALQFVVNPGKFGFSTALQACCGAGGQGNYNFNLKKKCGEQGASVCSNPSSYVSWDGIHMTEAAYRKVADGWLNGPYAQPPILKS

SEQ ID NO: 23168 - DNA, 1299 bp, Zea mays subsp. mays
  misc_feature (1)..(1299): Ceres Seq. ID no. 12373989
agactggaaaagcatcggcacgggcggtaggataaagtagcatagcataccacaaaaggtgctgcttgacagatggcaagcttcccacacctcacgcagatggagcatggcctagccagtggtgcctcccatggcacgccgagcttcttcttctgccatggcacagccacggcggattcagcctcgctggagacctcgtctggtgttctcgacacctccccacgaggcacttcttctggcgacaacaaggcctgcaggaagcacaaggaagatagtggtgccagcttcagctctgctcgctccaaggactcaaactcaaaggaaagcagcaaaaggagcggaggaaaaagagacagaagcagcaagaaggtggacgaggaggagcccaaggggtacatacatgtcagggcgaggagaggacaagcaacggacaaccacagccttgcagagagggtgaggagggagagaatcagtgagaggatgagggtgttgcaggccctggtccctggctgtgataaggtcactggaaaagccctcattttggacgagatcatcaattatgtgcagtccttgcagaaccaagttgagttcctttccatgaggattgcttccctgagccctgtgctgtatggttttggcatggacagtagtgatgctttcagtgaccttataactcagaagatcgaagggatggcccaccatgaggcgttcgcgatgcctagcagctctgtcctgaacggcactccgtcggaagctctcgtggacacgcacacctccagctcctccccgtcctacgaggtccacggcgacggcggcaccgccagcgtctctttccctcaggacagtggcagctacatggtgcaaacagtaggtgagccaaggcaagagctgttcagccaagtggtgttcagtaaccacatgtgccctttccagtagggagagagcgagaggatggaaggacgacaggaagcaataatgttgagatcctatggaggtggaggccaccaccagacgagtttgtgatgttggacgcaatccatcccctcgtcggtggccgtaacgggaacccctgcggtagctagcattagcagtagtaataatagtaggctgttggttacatcatcctgttagatctcaaggtctctgtcggtaccgcatcatctagtaggcattgttgctgcttagcttttgggctctcttattaccaagggttgcatgcatgccattgtattgtactctccaattggaaaaaaaagaaaaaaaatatcatttgttcataaacacagtcaatttgtgctc

SEQ ID NO: 23169 - protein, 287 aa, Zea mays subsp. mays
  peptide (1)..(287): Ceres Seq. ID no. 12373990
  misc_feature (118)..(168): Pfam Name: Pfam Description:  Helix-loop-helix DNA-binding domain
  misc_feature (19)..(260): NCBI GI NO: 5923912 NR Description: bHLH transcription factor GBOF-1
  misc_feature (137)..(287): NCBI GI NO: 38175541 NR Description: bHLH transcription factor-like protein
  misc_feature (24)..(233): NCBI GI NO: 18423212 NR Description: Expressed protein; protein id: At5g50915
  misc_feature (50)..(219): NCBI GI NO: 15231450 NR Description: bHLH protein; protein id: At3g07340
  misc_feature (50)..(219): NCBI GI NO: 20127064 NR Description: putative bHLH transcription factor
  misc_feature (17)..(185): NCBI GI NO: 34906952 NR Description: DNA-binding protein-like protein
  misc_feature (39)..(219): NCBI GI NO: 20127085 NR Description: putative bHLH transcription factor
  misc_feature (40)..(183): NCBI GI NO: 30697769 NR Description: DNA-binding protein -related
  misc_feature (39)..(219): NCBI GI NO: 15239013 NR Description: putative protein; protein id: At5g48560
  misc_feature (29)..(224): NCBI GI NO: 15222679 NR Description: bHLH protein; protein id: At1g26260.1
MASFPHLTQMEHGLASGASHGTPSFFFCHGTATADSASLETSSGVLDTSPRGTSSGDNKACRKHKEDSGASFSSARSKDSNSKESSKRSGGKRDRSSKKVDEEEPKGYIHVRARRGQATDNHSLAERVRRERISERMRVLQALVPGCDKVTGKALILDEIINYVQSLQNQVEFLSMRIASLSPVLYGFGMDSSDAFSDLITQKIEGMAHHEAFAMPSSSVLNGTPSEALVDTHTSSSSPSYEVHGDGGTASVSFPQDSGSYMVQTVGEPRQELFSQVVFSNHMCPFQ

SEQ ID NO: 23170 - protein, 278 aa, Zea mays subsp. mays
  peptide (1)..(278): Ceres Seq. ID no. 12373991
  misc_feature (109)..(159): Pfam Name: Pfam Description:  Helix-loop-helix DNA-binding domain
  misc_feature (10)..(251): NCBI GI NO: 5923912 NR Description: bHLH transcription factor GBOF-1
  misc_feature (128)..(278): NCBI GI NO: 38175541 NR Description: bHLH transcription factor-like protein
  misc_feature (15)..(224): NCBI GI NO: 18423212 NR Description: Expressed protein; protein id: At5g50915
  misc_feature (41)..(210): NCBI GI NO: 15231450 NR Description: bHLH protein; protein id: At3g07340
  misc_feature (41)..(210): NCBI GI NO: 20127064 NR Description: putative bHLH transcription factor
  misc_feature (8)..(176): NCBI GI NO: 34906952 NR Description: DNA-binding protein-like protein
  misc_feature (30)..(210): NCBI GI NO: 20127085 NR Description: putative bHLH transcription factor
  misc_feature (31)..(174): NCBI GI NO: 30697769 NR Description: DNA-binding protein -related
  misc_feature (30)..(210): NCBI GI NO: 15239013 NR Description: putative protein; protein id: At5g48560
  misc_feature (20)..(215): NCBI GI NO: 15222679 NR Description: bHLH protein; protein id: At1g26260.1
MEHGLASGASHGTPSFFFCHGTATADSASLETSSGVLDTSPRGTSSGDNKACRKHKEDSGASFSSARSKDSNSKESSKRSGGKRDRSSKKVDEEEPKGYIHVRARRGQATDNHSLAERVRRERISERMRVLQALVPGCDKVTGKALILDEIINYVQSLQNQVEFLSMRIASLSPVLYGFGMDSSDAFSDLITQKIEGMAHHEAFAMPSSSVLNGTPSEALVDTHTSSSSPSYEVHGDGGTASVSFPQDSGSYMVQTVGEPRQELFSQVVFSNHMCPFQ

SEQ ID NO: 23171 - protein, 151 aa, Zea mays subsp. mays
  peptide (1)..(151): Ceres Seq. ID no. 12373992
  misc_feature (1)..(124): NCBI GI NO: 5923912 NR Description: bHLH transcription factor GBOF-1
  misc_feature (1)..(151): NCBI GI NO: 38175541 NR Description: bHLH transcription factor-like protein
  misc_feature (1)..(97): NCBI GI NO: 18423212 NR Description: Expressed protein; protein id: At5g50915
  misc_feature (1)..(83): NCBI GI NO: 15231450 NR Description: bHLH protein; protein id: At3g07340
  misc_feature (1)..(83): NCBI GI NO: 20127064 NR Description: putative bHLH transcription factor
  misc_feature (1)..(49): NCBI GI NO: 34906952 NR Description: DNA-binding protein-like protein
  misc_feature (1)..(83): NCBI GI NO: 20127085 NR Description: putative bHLH transcription factor
  misc_feature (1)..(47): NCBI GI NO: 30697769 NR Description: DNA-binding protein -related
  misc_feature (1)..(83): NCBI GI NO: 15239013 NR Description: putative protein; protein id: At5g48560
  misc_feature (1)..(88): NCBI GI NO: 15222679 NR Description: bHLH protein; protein id: At1g26260.1
MRVLQALVPGCDKVTGKALILDEIINYVQSLQNQVEFLSMRIASLSPVLYGFGMDSSDAFSDLITQKIEGMAHHEAFAMPSSSVLNGTPSEALVDTHTSSSSPSYEVHGDGGTASVSFPQDSGSYMVQTVGEPRQELFSQVVFSNHMCPFQ

SEQ ID NO: 23172 - DNA, 1461 bp, Zea mays subsp. mays
  misc_feature (1)..(1461): Ceres Seq. ID no. 12341538
cttttctttccagcctcaaatcccgtttttcccatcccgtgaagaaccatggcacggtactccccaccgtcgctgcgctgcttcttccgctgcgccgccagctccgcctcccgagccgtaggcagcggcactcggaagaagaaccttgtattcttgggctctccccaggtcgccgcctcggtcctggacaagctgctgggcgcgtccggctccccggaatccgcatttcaggtggctgccgtcgtgacgcagccgccggccgccaagaacagggggaggaagttgatgccgtcggccgtcgcgcagttagcgctcgatcgcgggttcccagaggaactcatcttcacgccagaacgagcccgagaagagtcgttcctgtcggccttgaaggaagtggaaccggatgtttgcataactgctgcttacgggaacattctgccccagaaatttcttgatatcccatcgtgcggcacagttaatatacacccaagtttgttgcctctatatcgtggtgcagctcctgtgcagagggcactgcaggatggtgttgcagaaacaggtgtttcccttgcatatactgtccgtgcattggatgcaggtccagtgattgcgtgtgaaaggttttctgttgatgaatgtattaaggcaccagagctactttctatgctgtttcatttaggatccaagctattgattaatgaacttccatccattcttgatggttcggctaaagataaggcacaaccacaggatgactccaaagctacactggcaccaaagttaaattctgaggagtcatggctatcgtttgacgaagaagctaaagtgctgcataacaaggtgcgggcatttgcaggatggcctgggacgcgcgcaaagctgcaactcataaaccaaaacagtgtacccgatgtactagagattaaggttatcagcacgaaggtttcaacatcatgtgtcaaagttggagatgaaaacgagatactattctctgggagctcgttgctgattccttgcagtggttcgacctggctcgaggtgttggagcttcaactccctggaaagaaagtaacaaaggcacaagatttttggaatggtttgcgtggtcagaagctgatgaaattgccatagggggatatctgcattcgcagcacaggagtgtgcctatatgcatagcaagggttattgaggtcagtcattgcgcgaacataagcagggtagtgctagaagcctatatgcggagatctcggttttatgactaccttttccttctggtaaacttggtgctataaactcgtaactcagttacattaggcatgccatttgtattgcttcctcaatttcagaaaacacactgctgtaactatttcagttattcaatttttcactgtcataactgagctacaaacatttgagaaataatacagttatgtggtgagtaataaggcaataatttgccgt

SEQ ID NO: 23173 - protein, 360 aa, Zea mays subsp. mays
  peptide (1)..(360): Ceres Seq. ID no. 12341539
  misc_feature (31)..(219): Pfam Name: Pfam Description:  Formyl transferase
  misc_feature (1)..(313): NCBI GI NO: 34911294 NR Description: similar to formyl transferase
  misc_feature (330)..(360): NCBI GI NO: 34911294 NR Description: similar to formyl transferase
  misc_feature (9)..(359): NCBI GI NO: 15219681 NR Description: formyl transferase, putative; protein id:At1g66520
  misc_feature (9)..(359): NCBI GI NO: 29824361 NR Description: putative formyl transferase [Arabidopsis thaliana]
  misc_feature (9)..(359): NCBI GI NO: 7657875 NR Description: Fmt protein [Brassica napus var. napus]
  misc_feature (165)..(359): NCBI GI NO: 6069504 NR Description: S-locus protein 8 [Brassica rapa]
  misc_feature (151)..(340): NCBI GI NO: 15864563 NR Description: fmt putative protein [Brassica napus]
  misc_feature (33)..(358): NCBI GI NO: 15643294 NR Description: methionyl-tRNA formyltransferase
  misc_feature (33)..(356): NCBI GI NO: 22990871 NR Description: hypothetical protein [Enterococcus faecium]
  misc_feature (32)..(352): NCBI GI NO: 23056000 NR Description: hypothetical protein [Geobacter metallireducens]
MARYSPPSLRCFFRCAASSASRAVGSGTRKKNLVFLGSPQVAASVLDKLLGASGSPESAFQVAAVVTQPPAAKNRGRKLMPSAVAQLALDRGFPEELIFTPERAREESFLSALKEVEPDVCITAAYGNILPQKFLDIPSCGTVNIHPSLLPLYRGAAPVQRALQDGVAETGVSLAYTVRALDAGPVIACERFSVDECIKAPELLSMLFHLGSKLLINELPSILDGSAKDKAQPQDDSKATLAPKLNSEESWLSFDEEAKVLHNKVRAFAGWPGTRAKLQLINQNSVPDVLEIKVISTKVSTSCVKVGDENEILFSGSSLLIPCSGSTWLEVLELQLPGKKVTKAQDFWNGLRGQKLMKLP

SEQ ID NO: 23174 - protein, 281 aa, Zea mays subsp. mays
  peptide (1)..(281): Ceres Seq. ID no. 12341540
  misc_feature (1)..(140): Pfam Name: Pfam Description:  Formyl transferase
  misc_feature (1)..(234): NCBI GI NO: 34911294 NR Description: similar to formyl transferase
  misc_feature (251)..(281): NCBI GI NO: 34911294 NR Description: similar to formyl transferase
  misc_feature (1)..(280): NCBI GI NO: 15219681 NR Description: formyl transferase, putative; protein id:At1g66520
  misc_feature (1)..(280): NCBI GI NO: 29824361 NR Description: putative formyl transferase [Arabidopsis thaliana]
  misc_feature (1)..(280): NCBI GI NO: 7657875 NR Description: Fmt protein [Brassica napus var. napus]
  misc_feature (86)..(280): NCBI GI NO: 6069504 NR Description: S-locus protein 8 [Brassica rapa]
  misc_feature (72)..(261): NCBI GI NO: 15864563 NR Description: fmt putative protein [Brassica napus]
  misc_feature (1)..(279): NCBI GI NO: 15643294 NR Description: methionyl-tRNA formyltransferase
  misc_feature (1)..(277): NCBI GI NO: 22990871 NR Description: hypothetical protein [Enterococcus faecium]
  misc_feature (1)..(273): NCBI GI NO: 23056000 NR Description: hypothetical protein [Geobacter metallireducens]
MPSAVAQLALDRGFPEELIFTPERAREESFLSALKEVEPDVCITAAYGNILPQKFLDIPSCGTVNIHPSLLPLYRGAAPVQRALQDGVAETGVSLAYTVRALDAGPVIACERFSVDECIKAPELLSMLFHLGSKLLINELPSILDGSAKDKAQPQDDSKATLAPKLNSEESWLSFDEEAKVLHNKVRAFAGWPGTRAKLQLINQNSVPDVLEIKVISTKVSTSCVKVGDENEILFSGSSLLIPCSGSTWLEVLELQLPGKKVTKAQDFWNGLRGQKLMKLP

SEQ ID NO: 23175 - DNA, 1429 bp, Zea mays subsp. mays
  misc_feature (1)..(1429): Ceres Seq. ID no. 12341429
aaagaggaacacttctgtgttttcgaagatgaagctgtagatggaacttctaaacaaaatgaaggttctaccagcagatctccccagggtagacctaagaattatctcaagttttcaggcaaggatcattcaggtgcagaaaatgaaggtaacaagagagcccagaggtctgcagaggatagtgaaaatgcatctgaggctgatgaagatatctctggcagtgaatctgctggtgatgaggagtcttctcatgaagatcaggaggaagaagaggatgatatggatcttgatacaaaggcaaaaaatgactgcagagcagaggtaaatagggaggcacagggtttggatggaggaacatcattgtcattttcagaatgtttgcaaagtacagttaaaccaatttccaagtatgtttccactgcattaccaaaccatgaaaagaaactttctcacatattttatggaaatgactcattttatgttctgttcaggctacatcagatcttttatgagagaatattgtcagctaagacaaactgttccacatcagacaataactggaaagcttcaaggcacataaattctccagatcaatattcaaggtttatcagtgcactatacaacttgcttgatggttcttctgaccacaccaaatttgaagatgactgccgctccatcattgggactcagtcatatgttctctttactatagataaactgatatacaaaattgtgaagcagcttcaagcattagcatctgatgaaatggacaaccagcttctccagctttatttatatgaaaagtcgaggtctcctgggagcttctttgatctggtttatcacgaaaatgcacgagcccttctacatgatgacaacatataccgttttgaatgtcattctgatcctacagaattaactattcagctcatggagtatgggaatgaaaaacctgagttgactgctgtctcatttgatccaaccttttcaccgtatctttataatggttatctgtcaagtattgatgataccaaattggttgatgacgtcttccttaggaggaataagcggaagcaagggaggaatgatgactcccctacttccttgaagatcatggacaatgtcatgtttgctaatggtcttgaatgcaagatatcttgcgaatcttcaaaagtctcttatgtcctcgatactgaggatgtcttatttcgtacgagaaagaggagaagctctatctagtggaaccatgcctgcgctgcaaagacaaattttgtgaaaattaacaccgtaaaatcgatagtttcatttatctcttcagaccgtatagggtcttgtggtagagttatgttaattacaatggcatgcactggtgggatcctcgtgttgttgatctgtcacttcactggaatatattggtgattctttgtgtttc

SEQ ID NO: 23176 - protein, 411 aa, Zea mays subsp. mays
  peptide (1)..(411): Ceres Seq. ID no. 12341430
  misc_feature (1)..(391): NCBI GI NO: 34894158 NR Description: putative co-repressor protein
  misc_feature (3)..(353): NCBI GI NO: 9945050 NR Description: Similar to Arabidopsis chromosome I BAC genomicsequence
  misc_feature (18)..(408): NCBI GI NO: 15223031 NR Description: hypothetical protein; protein id: At1g70060.1
  misc_feature (18)..(408): NCBI GI NO: 25406027 NR Description: hypothetical protein F20P5.21
  misc_feature (2)..(410): NCBI GI NO: 6094552 NR Description: unknown protein [Arabidopsis thaliana]
  misc_feature (14)..(410): NCBI GI NO: 30678317 NR Description: expressed protein [Arabidopsis thaliana]
  misc_feature (1)..(411): NCBI GI NO: 15218938 NR Description: hypothetical protein; protein id: At1g59890.1
  misc_feature (1)..(353): NCBI GI NO: 15221694 NR Description: hypothetical protein; protein id: At1g24190.1
  misc_feature (39)..(406): NCBI GI NO: 15218525 NR Description: unknown protein; protein id: At1g10450.1
  misc_feature (1)..(386): NCBI GI NO: 25404243 NR Description: hypothetical protein F23H11.20
KEEHFCVFEDEAVDGTSKQNEGSTSRSPQGRPKNYLKFSGKDHSGAENEGNKRAQRSAEDSENASEADEDISGSESAGDEESSHEDQEEEEDDMDLDTKAKNDCRAEVNREAQGLDGGTSLSFSECLQSTVKPISKYVSTALPNHEKKLSHIFYGNDSFYVLFRLHQIFYERILSAKTNCSTSDNNWKASRHINSPDQYSRFISALYNLLDGSSDHTKFEDDCRSIIGTQSYVLFTIDKLIYKIVKQLQALASDEMDNQLLQLYLYEKSRSPGSFFDLVYHENARALLHDDNIYRFECHSDPTELTIQLMEYGNEKPELTAVSFDPTFSPYLYNGYLSSIDDTKLVDDVFLRRNKRKQGRNDDSPTSLKIMDNVMFANGLECKISCESSKVSYVLDTEDVLFRTRKRRSSI

SEQ ID NO: 23177 - protein, 318 aa, Zea mays subsp. mays
  peptide (1)..(318): Ceres Seq. ID no. 12341431
  misc_feature (1)..(298): NCBI GI NO: 34894158 NR Description: putative co-repressor protein
  misc_feature (1)..(260): NCBI GI NO: 9945050 NR Description: Similar to Arabidopsis chromosome I BAC genomicsequence
  misc_feature (1)..(315): NCBI GI NO: 15223031 NR Description: hypothetical protein; protein id: At1g70060.1
  misc_feature (1)..(315): NCBI GI NO: 25406027 NR Description: hypothetical protein F20P5.21
  misc_feature (1)..(317): NCBI GI NO: 6094552 NR Description: unknown protein [Arabidopsis thaliana]
  misc_feature (1)..(317): NCBI GI NO: 30678317 NR Description: expressed protein [Arabidopsis thaliana]
  misc_feature (1)..(318): NCBI GI NO: 15218938 NR Description: hypothetical protein; protein id: At1g59890.1
  misc_feature (1)..(260): NCBI GI NO: 15221694 NR Description: hypothetical protein; protein id: At1g24190.1
  misc_feature (1)..(313): NCBI GI NO: 15218525 NR Description: unknown protein; protein id: At1g10450.1
  misc_feature (1)..(293): NCBI GI NO: 25404243 NR Description: hypothetical protein F23H11.20
MDLDTKAKNDCRAEVNREAQGLDGGTSLSFSECLQSTVKPISKYVSTALPNHEKKLSHIFYGNDSFYVLFRLHQIFYERILSAKTNCSTSDNNWKASRHINSPDQYSRFISALYNLLDGSSDHTKFEDDCRSIIGTQSYVLFTIDKLIYKIVKQLQALASDEMDNQLLQLYLYEKSRSPGSFFDLVYHENARALLHDDNIYRFECHSDPTELTIQLMEYGNEKPELTAVSFDPTFSPYLYNGYLSSIDDTKLVDDVFLRRNKRKQGRNDDSPTSLKIMDNVMFANGLECKISCESSKVSYVLDTEDVLFRTRKRRSSI

SEQ ID NO: 23178 - DNA, 1534 bp, Zea mays subsp. mays
  misc_feature (1)..(1534): Ceres Seq. ID no. 12373985
ggtgtaactctaattcctagccccgagactgacgccggctgcctcgctccatttctaatccggtaatcccccctcccgagtccaaaccctaaacctaaacccctcacccggcgccgccgccgccaccgccgccgccccgaggccccatcccagcgcaaccgacttccgcctcggattgaagcaatgtcgtcggacgacgaggtcagggaggagaaggagctcgacctctcctccaacgatgtcgtcaccaagtacaagactgccgccgaaatcctgaacaacgctctgaagctggttgtgtctgagtgcaagccaaaagcaaagattgttgacctttgtgagaagggtgactctttcataagagagcaaactgggaatgtctacaagaatgcaaagaggaagattgaaaggggcattgctttcccaacctgtgtttctgtgaacaacacagtctgccacttctccccgcttaccacagatgatgcagttctggaagaaaatgatatggttaaaattgacatggggtgtcatattgatggctttattgctgtggtggcacatacacatgtaattgcaaatgggcctgtcacaggaagagcagctgatgttcttgctgctgccaacacagcagcagaagttgcaatgaggcttgtcagacctgggaagaagaataaggatgttactgaagcaattcagaaagttgctcctgtttatgattgcaaaattgtggaaggtgttcttagccatcaactgaagcaatttgtgattgatggtaacaaagttgtgctaagtgtctccaatgctgatacaaaggttgatgatgctgaatttgaagaaaatgaagtctatgcaatcgatattgtcaccagcactggggaggggaagcccaagttattggatgagaagcagaccaccatctacaaaagggctgtagacaagaattataacctgaagatgaaagcgtcaagatttattttcagtgaaatcagccagaagttcccaatcatgcccttcactgctagggcattagaagagaagcgtgcacgcttaggcttggtggaatgcatgaaccatgagctattgcagccgtaccctgtacttcatgagaagccaggtgaccttgttgcacacataaagttcactgtgctgctaatgcccaatggatcggataggattacatcatatccgctacaggagttaaagccaacaaaatccattgaagacaatgctgagataaaggcatggcttgctttggggacgaaatcaaagaagaagggtggtggaaagaagaagaaaggcaagaaaggagatgcagcaggagatcccatggaggcgacaaacgatgctacaagccaagaataattctgatttttggaattactgcacccagcattttctctcttgtttcttcgctgcatctgatggtgttatattacattcagttgcgaaaaaatgaatacttttttctagtgtctaagaaacgaagcatcctgttgcacattatcgcatccaatggcacaaagataattatctg

SEQ ID NO: 23179 - protein, 392 aa, Zea mays subsp. mays
  peptide (1)..(392): Ceres Seq. ID no. 12373986
  misc_feature (1)..(391): NCBI GI NO: 7447216 NR Description: probable DNA-binding protein GBP16 - rice
  misc_feature (3)..(388): NCBI GI NO: 9652218 NR Description: putative DNA binding protein [Atriplex hortensis]
  misc_feature (1)..(388): NCBI GI NO: 15231039 NR Description: putative nuclear DNA-binding protein G2p
  misc_feature (1)..(388): NCBI GI NO: 13430628 NR Description: putative nuclear DNA-binding protein G2p
  misc_feature (1)..(388): NCBI GI NO: 30693537 NR Description: nuclear DNA-binding protein G2p -related
  misc_feature (1)..(390): NCBI GI NO: 34193902 NR Description: Proliferation-associated protein 1 [Danio rerio]
  misc_feature (3)..(383): NCBI GI NO: 26788026 NR Description: SI:dZ150I12
  misc_feature (1)..(388): NCBI GI NO: 5453842 NR Description: proliferation-associated 2G4, 38kDa
  misc_feature (1)..(388): NCBI GI NO: 13632817 NR Description: Proliferation-associated protein 2G4
  misc_feature (1)..(383): NCBI GI NO: 34862215 NR Description: similar to proliferation-associated protein 1
MSSDDEVREEKELDLSSNDVVTKYKTAAEILNNALKLVVSECKPKAKIVDLCEKGDSFIREQTGNVYKNAKRKIERGIAFPTCVSVNNTVCHFSPLTTDDAVLEENDMVKIDMGCHIDGFIAVVAHTHVIANGPVTGRAADVLAAANTAAEVAMRLVRPGKKNKDVTEAIQKVAPVYDCKIVEGVLSHQLKQFVIDGNKVVLSVSNADTKVDDAEFEENEVYAIDIVTSTGEGKPKLLDEKQTTIYKRAVDKNYNLKMKASRFIFSEISQKFPIMPFTARALEEKRARLGLVECMNHELLQPYPVLHEKPGDLVAHIKFTVLLMPNGSDRITSYPLQELKPTKSIEDNAEIKAWLALGTKSKKKGGGKKKKGKKGDAAGDPMEATNDATSQE

SEQ ID NO: 23180 - protein, 285 aa, Zea mays subsp. mays
  peptide (1)..(285): Ceres Seq. ID no. 12373987
  misc_feature (1)..(284): NCBI GI NO: 7447216 NR Description: probable DNA-binding protein GBP16 - rice
  misc_feature (1)..(281): NCBI GI NO: 9652218 NR Description: putative DNA binding protein [Atriplex hortensis]
  misc_feature (1)..(281): NCBI GI NO: 15231039 NR Description: putative nuclear DNA-binding protein G2p
  misc_feature (1)..(281): NCBI GI NO: 13430628 NR Description: putative nuclear DNA-binding protein G2p
  misc_feature (1)..(281): NCBI GI NO: 30693537 NR Description: nuclear DNA-binding protein G2p -related
  misc_feature (1)..(283): NCBI GI NO: 34193902 NR Description: Proliferation-associated protein 1 [Danio rerio]
  misc_feature (1)..(276): NCBI GI NO: 26788026 NR Description: SI:dZ150I12
  misc_feature (1)..(281): NCBI GI NO: 5453842 NR Description: proliferation-associated 2G4, 38kDa
  misc_feature (1)..(281): NCBI GI NO: 13632817 NR Description: Proliferation-associated protein 2G4
  misc_feature (1)..(276): NCBI GI NO: 34862215 NR Description: similar to proliferation-associated protein 1
MVKIDMGCHIDGFIAVVAHTHVIANGPVTGRAADVLAAANTAAEVAMRLVRPGKKNKDVTEAIQKVAPVYDCKIVEGVLSHQLKQFVIDGNKVVLSVSNADTKVDDAEFEENEVYAIDIVTSTGEGKPKLLDEKQTTIYKRAVDKNYNLKMKASRFIFSEISQKFPIMPFTARALEEKRARLGLVECMNHELLQPYPVLHEKPGDLVAHIKFTVLLMPNGSDRITSYPLQELKPTKSIEDNAEIKAWLALGTKSKKKGGGKKKKGKKGDAAGDPMEATNDATSQE

SEQ ID NO: 23181 - protein, 280 aa, Zea mays subsp. mays
  peptide (1)..(280): Ceres Seq. ID no. 12373988
  misc_feature (1)..(279): NCBI GI NO: 7447216 NR Description: probable DNA-binding protein GBP16 - rice
  misc_feature (1)..(276): NCBI GI NO: 9652218 NR Description: putative DNA binding protein [Atriplex hortensis]
  misc_feature (1)..(276): NCBI GI NO: 15231039 NR Description: putative nuclear DNA-binding protein G2p
  misc_feature (1)..(276): NCBI GI NO: 13430628 NR Description: putative nuclear DNA-binding protein G2p
  misc_feature (1)..(276): NCBI GI NO: 30693537 NR Description: nuclear DNA-binding protein G2p -related
  misc_feature (1)..(278): NCBI GI NO: 34193902 NR Description: Proliferation-associated protein 1 [Danio rerio]
  misc_feature (1)..(271): NCBI GI NO: 26788026 NR Description: SI:dZ150I12
  misc_feature (1)..(276): NCBI GI NO: 5453842 NR Description: proliferation-associated 2G4, 38kDa
  misc_feature (1)..(276): NCBI GI NO: 13632817 NR Description: Proliferation-associated protein 2G4
  misc_feature (1)..(271): NCBI GI NO: 34862215 NR Description: similar to proliferation-associated protein 1
MGCHIDGFIAVVAHTHVIANGPVTGRAADVLAAANTAAEVAMRLVRPGKKNKDVTEAIQKVAPVYDCKIVEGVLSHQLKQFVIDGNKVVLSVSNADTKVDDAEFEENEVYAIDIVTSTGEGKPKLLDEKQTTIYKRAVDKNYNLKMKASRFIFSEISQKFPIMPFTARALEEKRARLGLVECMNHELLQPYPVLHEKPGDLVAHIKFTVLLMPNGSDRITSYPLQELKPTKSIEDNAEIKAWLALGTKSKKKGGGKKKKGKKGDAAGDPMEATNDATSQE

SEQ ID NO: 23182 - DNA, 1781 bp, Zea mays subsp. mays
  misc_feature (1)..(1781): Ceres Seq. ID no. 12353639
ctccgtcccctcctcctgcgaaggctcctccagcaccactagctagagctaaccccgtgctgctgctgctgctactacctgctgccgcgcgccgttcgttgccgtgcgggcgtgttgtggtccgctgatctcgttcgcgggacgccggggggtggtggtggtggcagcggtggttggtggtgcgcggcgtgaaagaaagaaagaaaaaaaaaaggcccgccgctttgcgctgctctgcttccgtaggtgtcacgagatttggccctagcctttcgctttcctttttcatctcgctcacaagggaagggaccgagggacgagggagacgttggggaggggagcgagcgagccgtaacatccgagctgttccaatggcgacccctgccgttgctttcgtcgccagcgctttgttggggcggtggtagcgctaggagcggagcagtactaggttggtaggtggttgtagctttgcgcgtgacccgagcgcgcgctcgctcgctcctgtgcctctctacctcgcttgcgtgcgccgggaaggcagtgggtggctggtcggttctcgcaagaggttgctggtgctgttcctcctcccccggttgatgagcatggggcattgctccgagcagcggacggggttcgaggtgactaaggactggaacggcgccgaccagttcgcgatccggtccccgcggggggcgtccgttcgggtctgcctgcacggcgggcaggtcgtctcgtggaggaaccaccgcggcgaggagctcctcttcagcagcagcaaggcaatcttcaagccgccaagagcgacccgtggtggcattccgatatgcttcccacagtttggaaactgtggaacattggagcagcatggatttgcaaggaacaagatatggacaatagacgatgaggctccacctctaaattatggtgataataacagcaacaaagcttctgttgaccttctgctaaagccatctgaagatgacctgaagtgctggccacactgttttgagttacgtctcagagtctctctttcaatggatggagacctttcactgatatcacgggtcagaaatgttaatgggaagccattcagtttcgcatttgcttaccatacatacctttctgtttctgacatcagtgaagtgaggatagaaggtctggagacccttgattatcttgacaaccttagccagcgggaacgttttaccgaacagggagatgccataacatttgaatcagaggttgatcgagtctatgttggctgcccaggcgtaatagctgttcttgaccatggaaagaaacgcacattcatcgtgcggaaagaagggcttcctgatattgttgtgtggaacccctgggagaagaagtccaagacgatggcagacttcggcgacgacgagtacaagcagatgctgtgcgtggatgcagccgcggtcgagagggccatcacgctgaagcccggggaggagtggacggggaagctggagctctccgccgtggcgtcgaccaactgcagcgaccacctggatcgcccgggcaggctgtagagcgctgggtgggtgggttcgttcgcccctgacgaaaggcatgtactagttttttttcatgtacatgggggcgctaggtccggcccttgcaggctgcagtatcatctacctgtcaggtgtgtcatgtgtgagtttaaacttatgtcagatccaagtattgctgtgatcgacatgttcgatgttcctggactgcgaagtctcaagcgcaggctgttcgtttggctggctttt

SEQ ID NO: 23183 - protein, 316 aa, Zea mays subsp. mays
  peptide (1)..(316): Ceres Seq. ID no. 12353640
  misc_feature (23)..(299): Pfam Name: Pfam Description:  Aldose 1-epimerase
  misc_feature (8)..(311): NCBI GI NO: 15233165 NR Description: putative protein; protein id: At3g61610.1
  misc_feature (3)..(165): NCBI GI NO: 34911992 NR Description: P0694A04.29
  misc_feature (244)..(313): NCBI GI NO: 34911992 NR Description: P0694A04.29
  misc_feature (2)..(304): NCBI GI NO: 15236591 NR Description: putative protein; protein id: At4g23730
  misc_feature (9)..(316): NCBI GI NO: 19387263 NR Description: putative apospory-associated protein C
  misc_feature (9)..(311): NCBI GI NO: 15242099 NR Description: apospory-associated protein C
  misc_feature (13)..(311): NCBI GI NO: 40253263 NR Description: putative Aldose 1-epimerase
  misc_feature (14)..(311): NCBI GI NO: 2501555 NR Description: POSSIBLE APOSPORY-ASSOCIATED PROTEIN C
  misc_feature (9)..(316): NCBI GI NO: 38344152 NR Description: OSJNBa0041A02.19
  misc_feature (18)..(311): NCBI GI NO: 18395868 NR Description: expressed protein; protein id: At3g01590
MSMGHCSEQRTGFEVTKDWNGADQFAIRSPRGASVRVCLHGGQVVSWRNHRGEELLFSSSKAIFKPPRATRGGIPICFPQFGNCGTLEQHGFARNKIWTIDDEAPPLNYGDNNSNKASVDLLLKPSEDDLKCWPHCFELRLRVSLSMDGDLSLISRVRNVNGKPFSFAFAYHTYLSVSDISEVRIEGLETLDYLDNLSQRERFTEQGDAITFESEVDRVYVGCPGVIAVLDHGKKRTFIVRKEGLPDIVVWNPWEKKSKTMADFGDDEYKQMLCVDAAAVERAITLKPGEEWTGKLELSAVASTNCSDHLDRPGRL

SEQ ID NO: 23184 - protein, 314 aa, Zea mays subsp. mays
  peptide (1)..(314): Ceres Seq. ID no. 12353641
  misc_feature (21)..(297): Pfam Name: Pfam Description:  Aldose 1-epimerase
  misc_feature (6)..(309): NCBI GI NO: 15233165 NR Description: putative protein; protein id: At3g61610.1
  misc_feature (1)..(163): NCBI GI NO: 34911992 NR Description: P0694A04.29
  misc_feature (242)..(311): NCBI GI NO: 34911992 NR Description: P0694A04.29
  misc_feature (1)..(302): NCBI GI NO: 15236591 NR Description: putative protein; protein id: At4g23730
  misc_feature (7)..(314): NCBI GI NO: 19387263 NR Description: putative apospory-associated protein C
  misc_feature (7)..(309): NCBI GI NO: 15242099 NR Description: apospory-associated protein C
  misc_feature (11)..(309): NCBI GI NO: 40253263 NR Description: putative Aldose 1-epimerase
  misc_feature (12)..(309): NCBI GI NO: 2501555 NR Description: POSSIBLE APOSPORY-ASSOCIATED PROTEIN C
  misc_feature (7)..(314): NCBI GI NO: 38344152 NR Description: OSJNBa0041A02.19
  misc_feature (16)..(309): NCBI GI NO: 18395868 NR Description: expressed protein; protein id: At3g01590
MGHCSEQRTGFEVTKDWNGADQFAIRSPRGASVRVCLHGGQVVSWRNHRGEELLFSSSKAIFKPPRATRGGIPICFPQFGNCGTLEQHGFARNKIWTIDDEAPPLNYGDNNSNKASVDLLLKPSEDDLKCWPHCFELRLRVSLSMDGDLSLISRVRNVNGKPFSFAFAYHTYLSVSDISEVRIEGLETLDYLDNLSQRERFTEQGDAITFESEVDRVYVGCPGVIAVLDHGKKRTFIVRKEGLPDIVVWNPWEKKSKTMADFGDDEYKQMLCVDAAAVERAITLKPGEEWTGKLELSAVASTNCSDHLDRPGRL

SEQ ID NO: 23185 - protein, 170 aa, Zea mays subsp. mays
  peptide (1)..(170): Ceres Seq. ID no. 12353642
  misc_feature (1)..(153): Pfam Name: Pfam Description:  Aldose 1-epimerase
  misc_feature (1)..(165): NCBI GI NO: 15233165 NR Description: putative protein; protein id: At3g61610.1
  misc_feature (1)..(19): NCBI GI NO: 34911992 NR Description: P0694A04.29
  misc_feature (98)..(167): NCBI GI NO: 34911992 NR Description: P0694A04.29
  misc_feature (1)..(158): NCBI GI NO: 15236591 NR Description: putative protein; protein id: At4g23730
  misc_feature (1)..(170): NCBI GI NO: 19387263 NR Description: putative apospory-associated protein C
  misc_feature (1)..(165): NCBI GI NO: 15242099 NR Description: apospory-associated protein C
  misc_feature (1)..(165): NCBI GI NO: 40253263 NR Description: putative Aldose 1-epimerase
  misc_feature (1)..(165): NCBI GI NO: 2501555 NR Description: POSSIBLE APOSPORY-ASSOCIATED PROTEIN C
  misc_feature (1)..(170): NCBI GI NO: 38344152 NR Description: OSJNBa0041A02.19
  misc_feature (1)..(165): NCBI GI NO: 18395868 NR Description: expressed protein; protein id: At3g01590
MDGDLSLISRVRNVNGKPFSFAFAYHTYLSVSDISEVRIEGLETLDYLDNLSQRERFTEQGDAITFESEVDRVYVGCPGVIAVLDHGKKRTFIVRKEGLPDIVVWNPWEKKSKTMADFGDDEYKQMLCVDAAAVERAITLKPGEEWTGKLELSAVASTNCSDHLDRPGRL

SEQ ID NO: 23186 - DNA, 1335 bp, Zea mays subsp. mays
  misc_feature (1)..(1335): Ceres Seq. ID no. 12367315
gggaatcaatcacgcacacgcgcacgcaccgccacccttcccgaaaagtctcctcacctcccggtcccggcctcccttcctctctctccccccctctcaaacatccccgcgccgatggatctccgcctcgcccactaggcctccggcgcgaccgagggtgggcagggggatggggctcctcgggcggaggacgttgctgcggctcctcgccctcgcttccgcggccgtcgccgtcgccgtcaccgtggaagcctacgagggcgacgctgatccgctctacagagcttgtgtggaaggatgccaaaagacaggctccctgaaggagacttctattaaacattgtatggtgccaaccgatggccaacctgttgacaagtcatggtacacgcatgagccactgtacttgcaatggaaggactggaactgcaagagtgaatgcagataccactgtatgatggaaagggagaatgaaagggcaaagcttggcctccagcctgttaagtatcatggaaaatggcctttgaagcgtgcctctgtgtttcaggaacctttatctgcagctctctctgcgcttactcttgttgtgcaatttaatgggtggctatcatttttcctcttgctttattataaacttcctctgcggccagaaactcacaagacatactatgaatacactggcttgtggcacatctatgggctccttgccatgaattcatggttctggagtgccatatatcacagttgtgacacaatttggacagaaaaactatatttttcatcagatgctgcctttctggggtattccctcattttggcgatactgcggactttaaatttaagagacgaagcatctagagttatggttgccgctcctattctagcatttgtgacaacccacattctgtacctcaacttctacgaacttgacaaaggcctgaacatgaaggtttgtactgtgataatcattgctcagtgtctcctatgggcactgtgggctgtcatgactcggcatccttcacggctgaagatcatatttgttgccatcggaggtgcggctgcggtacttctggaagcttctgacattcctccgcgatggggatatgtggatggccgtgctatatgccttgctgtggctatcccccttttacctttggtggagctttgccaaggaagatgcggagatgcgaacgtcagcaatcctgaagaaggcacgttaacaagtcgcctgtgtgataatttcatgcctgcgcccagccattgtaaagataaaagtttcacttgtaatcttaggtaactactaacttagcatgtgaattaccgtcttatttttgttcc

SEQ ID NO: 23187 - protein, 430 aa, Zea mays subsp. mays
  peptide (1)..(430): Ceres Seq. ID no. 12367316
  misc_feature (130)..(381): Pfam Name: Pfam Description:  Per1-like
  misc_feature (57)..(381): NCBI GI NO: 37536224 NR Description: unknown protein
  misc_feature (84)..(381): NCBI GI NO: 15219283 NR Description: unknown protein; protein id: At1g16560.1
  misc_feature (68)..(381): NCBI GI NO: 18424554 NR Description: putative protein; protein id: At5g62130
  misc_feature (131)..(381): NCBI GI NO: 10176931 NR Description: gene_id:MTG10.16~unknown protein
  misc_feature (100)..(247): NCBI GI NO: 20260110 NR Description: unknown protein [Arabidopsis thaliana]
  misc_feature (107)..(381): NCBI GI NO: 32949296 NR Description: CAB2 protein [Homo sapiens]
  misc_feature (79)..(381): NCBI GI NO: 28372501 NR Description: CAB2 [Homo sapiens]
  misc_feature (75)..(381): NCBI GI NO: 19114746 NR Description: similar to yeast protein involved in Mn2+homeostasis
  misc_feature (140)..(388): NCBI GI NO: 24586036 NR Description: CG3271-PA [Drosophila melanogaster]
  misc_feature (231)..(381): NCBI GI NO: 22761646 NR Description: unnamed protein product [Homo sapiens]
GINHAHAHAPPPFPKSLLTSRSRPPFLSLPPSQTSPRRWISASPTRPPARPRVGRGMGLLGRRTLLRLLALASAAVAVAVTVEAYEGDADPLYRACVEGCQKTGSLKETSIKHCMVPTDGQPVDKSWYTHEPLYLQWKDWNCKSECRYHCMMERENERAKLGLQPVKYHGKWPLKRASVFQEPLSAALSALTLVVQFNGWLSFFLLLYYKLPLRPETHKTYYEYTGLWHIYGLLAMNSWFWSAIYHSCDTIWTEKLYFSSDAAFLGYSLILAILRTLNLRDEASRVMVAAPILAFVTTHILYLNFYELDKGLNMKVCTVIIIAQCLLWALWAVMTRHPSRLKIIFVAIGGAAAVLLEASDIPPRWGYVDGRAICLAVAIPLLPLVELCQGRCGDANVSNPEEGTLTSRLCDNFMPAPSHCKDKSFTCNLR

SEQ ID NO: 23188 - protein, 374 aa, Zea mays subsp. mays
  peptide (1)..(374): Ceres Seq. ID no. 12367317
  misc_feature (74)..(325): Pfam Name: Pfam Description:  Per1-like
  misc_feature (1)..(325): NCBI GI NO: 37536224 NR Description: unknown protein
  misc_feature (28)..(325): NCBI GI NO: 15219283 NR Description: unknown protein; protein id: At1g16560.1
  misc_feature (12)..(325): NCBI GI NO: 18424554 NR Description: putative protein; protein id: At5g62130
  misc_feature (75)..(325): NCBI GI NO: 10176931 NR Description: gene_id:MTG10.16~unknown protein
  misc_feature (44)..(191): NCBI GI NO: 20260110 NR Description: unknown protein [Arabidopsis thaliana]
  misc_feature (51)..(325): NCBI GI NO: 32949296 NR Description: CAB2 protein [Homo sapiens]
  misc_feature (23)..(325): NCBI GI NO: 28372501 NR Description: CAB2 [Homo sapiens]
  misc_feature (19)..(325): NCBI GI NO: 19114746 NR Description: similar to yeast protein involved in Mn2+homeostasis
  misc_feature (84)..(332): NCBI GI NO: 24586036 NR Description: CG3271-PA [Drosophila melanogaster]
  misc_feature (175)..(325): NCBI GI NO: 22761646 NR Description: unnamed protein product [Homo sapiens]
MGLLGRRTLLRLLALASAAVAVAVTVEAYEGDADPLYRACVEGCQKTGSLKETSIKHCMVPTDGQPVDKSWYTHEPLYLQWKDWNCKSECRYHCMMERENERAKLGLQPVKYHGKWPLKRASVFQEPLSAALSALTLVVQFNGWLSFFLLLYYKLPLRPETHKTYYEYTGLWHIYGLLAMNSWFWSAIYHSCDTIWTEKLYFSSDAAFLGYSLILAILRTLNLRDEASRVMVAAPILAFVTTHILYLNFYELDKGLNMKVCTVIIIAQCLLWALWAVMTRHPSRLKIIFVAIGGAAAVLLEASDIPPRWGYVDGRAICLAVAIPLLPLVELCQGRCGDANVSNPEEGTLTSRLCDNFMPAPSHCKDKSFTCNLR

SEQ ID NO: 23189 - protein, 316 aa, Zea mays subsp. mays
  peptide (1)..(316): Ceres Seq. ID no. 12367318
  misc_feature (16)..(267): Pfam Name: Pfam Description:  Per1-like
  misc_feature (1)..(267): NCBI GI NO: 37536224 NR Description: unknown protein
  misc_feature (1)..(267): NCBI GI NO: 15219283 NR Description: unknown protein; protein id: At1g16560.1
  misc_feature (1)..(267): NCBI GI NO: 18424554 NR Description: putative protein; protein id: At5g62130
  misc_feature (17)..(267): NCBI GI NO: 10176931 NR Description: gene_id:MTG10.16~unknown protein
  misc_feature (1)..(133): NCBI GI NO: 20260110 NR Description: unknown protein [Arabidopsis thaliana]
  misc_feature (1)..(267): NCBI GI NO: 32949296 NR Description: CAB2 protein [Homo sapiens]
  misc_feature (1)..(267): NCBI GI NO: 28372501 NR Description: CAB2 [Homo sapiens]
  misc_feature (1)..(267): NCBI GI NO: 19114746 NR Description: similar to yeast protein involved in Mn2+homeostasis
  misc_feature (26)..(274): NCBI GI NO: 24586036 NR Description: CG3271-PA [Drosophila melanogaster]
  misc_feature (117)..(267): NCBI GI NO: 22761646 NR Description: unnamed protein product [Homo sapiens]
MVPTDGQPVDKSWYTHEPLYLQWKDWNCKSECRYHCMMERENERAKLGLQPVKYHGKWPLKRASVFQEPLSAALSALTLVVQFNGWLSFFLLLYYKLPLRPETHKTYYEYTGLWHIYGLLAMNSWFWSAIYHSCDTIWTEKLYFSSDAAFLGYSLILAILRTLNLRDEASRVMVAAPILAFVTTHILYLNFYELDKGLNMKVCTVIIIAQCLLWALWAVMTRHPSRLKIIFVAIGGAAAVLLEASDIPPRWGYVDGRAICLAVAIPLLPLVELCQGRCGDANVSNPEEGTLTSRLCDNFMPAPSHCKDKSFTCNLR

SEQ ID NO: 23190 - DNA, 863 bp, Zea mays subsp. mays
  misc_feature (1)..(863): Ceres Seq. ID no. 12411158
  misc_feature (74)..(74): n is a, c, t, g, unknown, or other
atcccaattcttgcctaccggctaccgctgctcctgttaggagtacttgccaattactgttggaatcaccttcnccgcctcctcgagaaccaattctagcctaaaacccgcagtgatccgcccaactcccgacccactcatggtcgatcggcgcggccgctgaactgcctgcggcgggggcgagaggacgcgggtcgaggcgggcgatggccgggctggcggggaggcctggttcctggggcggccttgtgctgcgggtggggcaggctctcttcgccgccgcctgcatcggcgtcatgggcagctcgctcggattcgccagctacaccgccttctgctacttgattgcgtcaatggggcttcaaatgctgtggagtttcggacttgcatgtcttgatggatatgccattagagccaataaagatctcaccagtcccattctattgagcttgtttgtcgttggagactgggtaacagcaatcctgtcattcgccgcatcaagctcagctgccggtgtagtaatcctatttcaaaaggacgtgctcttctgcagaaggtatccccagctcccctgcggaaaatacgagctcgccacggcgttcgccttcctgtcttgggcgctcagtgcgacatcagcattgatcatgttttggctcctggctgcgttctgattttgtgtaaaaattttgtgacagcgatgttcatagtgcccacttcgctgttctctcatcgcattcttttacgaccatgtcacatatttagagccacatagccccccccccccccccaccccccaaaaaaaagaatgttgggatcatgtaaagtccttgaagggaacagttactaatggaagaaattcactg

SEQ ID NO: 23191 - protein, 154 aa, Zea mays subsp. mays
  peptide (1)..(154): Ceres Seq. ID no. 12411159
  misc_feature (6)..(139): Pfam Name: DUF588 Pfam Description: Domain of unknown function
  misc_feature (1)..(153): NCBI GI NO: 18409932 NR Description: putative protein; protein id: At3g53850
  misc_feature (1)..(151): NCBI GI NO: 15241672 NR Description: putative protein; protein id: At5g02060.1
  misc_feature (1)..(153): NCBI GI NO: 30686969 NR Description: expressed protein [Arabidopsis thaliana]
  misc_feature (43)..(153): NCBI GI NO: 11357817 NR Description: hypothetical protein F5K20
  misc_feature (1)..(153): NCBI GI NO: 18401722 NR Description: expressed protein; protein id: At2g28370
  misc_feature (1)..(152): NCBI GI NO: 25408537 NR Description: hypothetical protein At2g37200
  misc_feature (1)..(152): NCBI GI NO: 30687069 NR Description: expressed protein [Arabidopsis thaliana]
  misc_feature (8)..(137): NCBI GI NO: 26006486 NR Description: Unknown protein
  misc_feature (1)..(88): NCBI GI NO: 7939530 NR Description: gb|AAD20689
  misc_feature (1)..(151): NCBI GI NO: 22330130 NR Description: hypothetical protein; protein id: At1g49405.1
MAGLAGRPGSWGGLVLRVGQALFAAACIGVMGSSLGFASYTAFCYLIASMGLQMLWSFGLACLDGYAIRANKDLTSPILLSLFVVGDWVTAILSFAASSSAAGVVILFQKDVLFCRRYPQLPCGKYELATAFAFLSWALSATSALIMFWLLAAF

SEQ ID NO: 23192 - protein, 124 aa, Zea mays subsp. mays
  peptide (1)..(124): Ceres Seq. ID no. 12411160
  misc_feature (1)..(109): Pfam Name: DUF588 Pfam Description: Domain of unknown function
  misc_feature (1)..(123): NCBI GI NO: 18409932 NR Description: putative protein; protein id: At3g53850
  misc_feature (1)..(121): NCBI GI NO: 15241672 NR Description: putative protein; protein id: At5g02060.1
  misc_feature (1)..(123): NCBI GI NO: 30686969 NR Description: expressed protein [Arabidopsis thaliana]
  misc_feature (13)..(123): NCBI GI NO: 11357817 NR Description: hypothetical protein F5K20
  misc_feature (1)..(123): NCBI GI NO: 18401722 NR Description: expressed protein; protein id: At2g28370
  misc_feature (1)..(122): NCBI GI NO: 25408537 NR Description: hypothetical protein At2g37200
  misc_feature (1)..(122): NCBI GI NO: 30687069 NR Description: expressed protein [Arabidopsis thaliana]
  misc_feature (1)..(107): NCBI GI NO: 26006486 NR Description: Unknown protein
  misc_feature (1)..(58): NCBI GI NO: 7939530 NR Description: gb|AAD20689
  misc_feature (1)..(121): NCBI GI NO: 22330130 NR Description: hypothetical protein; protein id: At1g49405.1
MGSSLGFASYTAFCYLIASMGLQMLWSFGLACLDGYAIRANKDLTSPILLSLFVVGDWVTAILSFAASSSAAGVVILFQKDVLFCRRYPQLPCGKYELATAFAFLSWALSATSALIMFWLLAAF

SEQ ID NO: 23193 - protein, 105 aa, Zea mays subsp. mays
  peptide (1)..(105): Ceres Seq. ID no. 12411161
  misc_feature (1)..(90): Pfam Name: DUF588 Pfam Description: Domain of unknown function
  misc_feature (1)..(104): NCBI GI NO: 18409932 NR Description: putative protein; protein id: At3g53850
  misc_feature (1)..(102): NCBI GI NO: 15241672 NR Description: putative protein; protein id: At5g02060.1
  misc_feature (1)..(104): NCBI GI NO: 30686969 NR Description: expressed protein [Arabidopsis thaliana]
  misc_feature (1)..(104): NCBI GI NO: 11357817 NR Description: hypothetical protein F5K20
  misc_feature (1)..(104): NCBI GI NO: 18401722 NR Description: expressed protein; protein id: At2g28370
  misc_feature (1)..(103): NCBI GI NO: 25408537 NR Description: hypothetical protein At2g37200
  misc_feature (1)..(103): NCBI GI NO: 30687069 NR Description: expressed protein [Arabidopsis thaliana]
  misc_feature (1)..(88): NCBI GI NO: 26006486 NR Description: Unknown protein
  misc_feature (1)..(39): NCBI GI NO: 7939530 NR Description: gb|AAD20689
  misc_feature (1)..(102): NCBI GI NO: 22330130 NR Description: hypothetical protein; protein id: At1g49405.1
MGLQMLWSFGLACLDGYAIRANKDLTSPILLSLFVVGDWVTAILSFAASSSAAGVVILFQKDVLFCRRYPQLPCGKYELATAFAFLSWALSATSALIMFWLLAAF

SEQ ID NO: 23194 - DNA, 893 bp, Zea mays subsp. mays
  misc_feature (1)..(893): Ceres Seq. ID no. 12414333
gcacgagaccattacctagaacatcctaatcgaaaaaagagccgtcgaagccgaagcagagcacgacggacaaaaatatggcagggaaagccggcggactcaaaggggttgccctcatcggcggcagcgccaacagcacggtcgctggggtcattcacttcttcgaggacccctccaccaggtacaccgaggtgaggggcaaggtcacgggcttgactccgggaaggcatggattccacatccacgtcttcggcgacactaccaatggctgcaactcaaccggtccccattttaaccctcataataaaccccatggagctccatttgacgacgaacgacatttgggcgacctgggaaatatagtagccaatgaagatggagatgcagaagtgttcataagagacttacagatttcattgagtgggcctcattccattctgggaagggcagttgttgtacatgctgatcctgatgacctagggaggggtggccatgaactgagtaagtcaacaggaaacgcaggagctagaattggatgtggtatcattggaattcagtcatcagtttgacaaataacggcttagtagcaccagaaaaagagggggtcatgattccacagtctgtgcaatgtgctggttcagggacatggaaatggtgttcgttgttctggaccgtttgaagactaaatatctccagccatgtatacaataattttgtcagtgagaggaaattgcttgtaaaatcttgtattgacttatatcactggttaccagcagcaataagtctatatgtaaaacttctcgatttgtatatcagctatgtttcgtgtggagaagggaagcgaacgcaagtcagctttttgtgagtgcattccgttcagttcttacttggtc

SEQ ID NO: 23195 - protein, 163 aa, Zea mays subsp. mays
  peptide (1)..(163): Ceres Seq. ID no. 12414334
  misc_feature (8)..(161): Pfam Name: SODC Pfam Description: Copper/zinc superoxide dismutase
  misc_feature (6)..(163): NCBI GI NO: 13274154 NR Description: putative CuZn-superoxide dismutase
  misc_feature (6)..(163): NCBI GI NO: 15131679 NR Description: putative CuZn-superoxide dismutase
  misc_feature (6)..(163): NCBI GI NO: 3334333 NR Description: Superoxide dismutase [Cu-Zn] 2
  misc_feature (1)..(162): NCBI GI NO: 15238738 NR Description: copper/zinc superoxide dismutase
  misc_feature (7)..(163): NCBI GI NO: 13374180 NR Description: superoxide dismutase [Pinus sylvestris]
  misc_feature (6)..(162): NCBI GI NO: 11358866 NR Description: superoxide dismutase (EC 1.15.1.1) (Cu-Zn) 3
  misc_feature (6)..(160): NCBI GI NO: 134621 NR Description: Superoxide dismutase [Cu-Zn]
  misc_feature (12)..(163): NCBI GI NO: 3786214 NR Description: high pI CuZn-superoxide dismutase
  misc_feature (8)..(160): NCBI GI NO: 134613 NR Description: Superoxide dismutase [Cu-Zn] 2
  misc_feature (8)..(160): NCBI GI NO: 134595 NR Description: Superoxide dismutase [Cu-Zn] 1
MAGKAGGLKGVALIGGSANSTVAGVIHFFEDPSTRYTEVRGKVTGLTPGRHGFHIHVFGDTTNGCNSTGPHFNPHNKPHGAPFDDERHLGDLGNIVANEDGDAEVFIRDLQISLSGPHSILGRAVVVHADPDDLGRGGHELSKSTGNAGARIGCGIIGIQSSV

SEQ ID NO: 23196 - DNA, 1291 bp, Zea mays subsp. mays
  misc_feature (1)..(1291): Ceres Seq. ID no. 12414321
gccaagcaggtctcagcgaggttttctgctataaataaggcatcgtccaggcaaacaattaatagggcaaagcaaatcaaggacgctctgcacgtactattcatcttccattgttgctttgctttgctttgcttaccggcaaccatggccagcactcgtgcagcagcaactctccttttgctcctcgcgctcgccggcacctcgtcggcgcagctgttccacgggcttctactcctactcgtgccccggcgtgtacggcgccgtcaagtcggtgatgcagtccgccatcgccagggagaagcgcatgggggccctccatcctccgcctcttcttccacgactgcttcgtccagggctgcgacgcgtcgctgctgctggacgacacgcccagcttccagggcgagaagatggccaaccctaacaacggctccgtcaggggattcgaggtcatcgacgccgtcaagtccgccgtcgaaaagctgtgccccggcgtcgtctcctgcgccgacatcctcgccatcgccgccagggacagcgtcgtcatcctgggtggtccgacctgggacgtgaaggtcgggcggcgggactccacgacggcgagcttcagcggcgccaacaacaacatcccgccgccgacgtcgggcctcgccaacctcacgtcgctcttcgccgcgcagggactttctcagaaggacatggtcgcgctctctggtgctcacaccatcgggcaggcacgctgcaccaacttcagagcccacatctacaacgacaccgacatcgacgctgccttcgcgagaacgaggcagtcaggctgcccaagcacctcaggcgccggcggcgacaacaacctggcgccattggacctccagacccctaccgtcttcgagaacaactactacaggaacctcctcgccaagaaggggctcctgcactccgaccaggagctcttcaatggcggagccaccgacgcgctggtccagtcctacgtcgggagccagagcgcgttcttcgcggatttcgtggcgggcatgatcaagatgggcgacatcacaccgctgaccggctccaacaacggacagataaggaagaactgcagaagagtcaattagcagatagctagctagggtcactaattaagacccatgcatggctgttgaactgcaagctaagtaaacactatgtgagatcgtcgcgttgatgtgctcacatgtcgtctttttatttgggtgaaggatggatgcatgtatcagatcacttgttgtttaattaatgccatttcagtctttgtccg

SEQ ID NO: 23197 - protein, 233 aa, Zea mays subsp. mays
  peptide (1)..(233): Ceres Seq. ID no. 12414322
  misc_feature (1)..(193): Pfam Name: Pfam Description:  Peroxidase
  misc_feature (1)..(233): NCBI GI NO: 28400798 NR Description: peroxidase [Asparagus officinalis]
  misc_feature (1)..(233): NCBI GI NO: 28400794 NR Description: peroxidase [Asparagus officinalis]
  misc_feature (1)..(233): NCBI GI NO: 28400796 NR Description: peroxidase [Asparagus officinalis]
  misc_feature (1)..(233): NCBI GI NO: 5381253 NR Description: peroxidase [Nicotiana tabacum]
  misc_feature (1)..(233): NCBI GI NO: 39777536 NR Description: peroxidase precursor [Quercus suber]
  misc_feature (1)..(233): NCBI GI NO: 39777532 NR Description: peroxidase precursor [Quercus suber]
  misc_feature (1)..(233): NCBI GI NO: 19698446 NR Description: gaiacol peroxidase [Gossypium hirsutum]
  misc_feature (1)..(233): NCBI GI NO: 15239075 NR Description: peroxidase, putative; protein id: At5g05340
  misc_feature (1)..(233): NCBI GI NO: 464365 NR Description: Peroxidase P7 (TP7)
  misc_feature (1)..(233): NCBI GI NO: 15237190 NR Description: peroxidase, putative; protein id: At5g58400.1
MANPNNGSVRGFEVIDAVKSAVEKLCPGVVSCADILAIAARDSVVILGGPTWDVKVGRRDSTTASFSGANNNIPPPTSGLANLTSLFAAQGLSQKDMVALSGAHTIGQARCTNFRAHIYNDTDIDAAFARTRQSGCPSTSGAGGDNNLAPLDLQTPTVFENNYYRNLLAKKGLLHSDQELFNGGATDALVQSYVGSQSAFFADFVAGMIKMGDITPLTGSNNGQIRKNCRRVN

SEQ ID NO: 23198 - protein, 189 aa, Zea mays subsp. mays
  peptide (1)..(189): Ceres Seq. ID no. 12414323
  misc_feature (107)..(189): Pfam Name: Pfam Description:  Equine herpesvirus glycoprotein gp2
  misc_feature (107)..(189): NCBI GI NO: 17221114 NR Description: glycoprotein gp2 [Equine herpesvirus 1]
  misc_feature (141)..(189): NCBI GI NO: 17221114 NR Description: glycoprotein gp2 [Equine herpesvirus 1]
  misc_feature (106)..(189): NCBI GI NO: 17221114 NR Description: glycoprotein gp2 [Equine herpesvirus 1]
  misc_feature (107)..(189): NCBI GI NO: 17221114 NR Description: glycoprotein gp2 [Equine herpesvirus 1]
AKQVSARFSAINKASSRQTINRAKQIKDALHVLFIFHCCFALLCLPATMASTRAAATLLLLLALAGTSSAQLFHGLLLLLVPRRVRRRQVGDAVRHRQGEAHGGPPSSASSSTTASSRAATRRCCWTTRPASRARRWPTLTTAPSGDSRSSTPSSPPSKSCAPASSPAPTSSPSPPGTASSSWVVRPGT

SEQ ID NO: 23199 - protein, 141 aa, Zea mays subsp. mays
  peptide (1)..(141): Ceres Seq. ID no. 12414324
  misc_feature (59)..(141): Pfam Name: Pfam Description:  Equine herpesvirus glycoprotein gp2
  misc_feature (59)..(141): NCBI GI NO: 17221114 NR Description: glycoprotein gp2 [Equine herpesvirus 1]
  misc_feature (93)..(141): NCBI GI NO: 17221114 NR Description: glycoprotein gp2 [Equine herpesvirus 1]
  misc_feature (58)..(141): NCBI GI NO: 17221114 NR Description: glycoprotein gp2 [Equine herpesvirus 1]
  misc_feature (59)..(141): NCBI GI NO: 17221114 NR Description: glycoprotein gp2 [Equine herpesvirus 1]
MASTRAAATLLLLLALAGTSSAQLFHGLLLLLVPRRVRRRQVGDAVRHRQGEAHGGPPSSASSSTTASSRAATRRCCWTTRPASRARRWPTLTTAPSGDSRSSTPSSPPSKSCAPASSPAPTSSPSPPGTASSSWVVRPGT

SEQ ID NO: 23200 - DNA, 1676 bp, Zea mays subsp. mays
  misc_feature (1)..(1676): Ceres Seq. ID no. 12361385
acctcgtggactccttccccacaaaactaaaccctcgcttcggaggcgcgtgaacccaagaccgacaggcgaacgaagcgagggtcctcacaaccaccatcccctgctgcaacgacgccatcgccaaccccgacgagggtcgcatggtgggccactactggctccgcgacccggccctcgctcccaactccttcctccggaacaagatcgagaccgcactcgacagaatcctcgccttctctcaagatgtcgtctctggaaagattctttccccatctggtcgtttcacttcaattctctctataggaatcggagggtcagctttgggccctcaatttgttgctgaggcacttgcgcctgataaccctccactgaagataagatttattgacaacaccgatcctgctgggattgatcatcaaattgctcaactaggacctgaactggcaactactcttgtaattgtcatttctaagagtggaggcacacctgaaacccgcaatgggctactggaagtacagaaagccttcagagatgcaggtctgcaattctcgaaacagggtgttgcaatcactcaagaaaattctctgttggataacactgccagaatagagggatggttagctcggtttcctatgtttgactgggttggtggtaggacttcagaaatgtcagctgttggtttacttccagctgcattgcagggtattgatatcaaggaaatgctagttggtgcagctttaatggatgaggaaacccggaacactgtggttaaagcaaatccagcagcattgcttgcattatgttggtattgggcatcggaagggataggcaaaaaggatatggttgtgcttccttacaaggatagtttattacttttgagtagatatttgcaacaacttgtcatggaatctcttggaaaagaattcgacctggatggcaaccgtgttaatcaagggctaactgtatatggtaacaaaggaagcactgaccagcatgcttacattcagcagctgagagaaggtgtacaaaacttctttgttacgtttattgaggtcttgcgtgacaggcctgctggacatgattgggagcttgaacctggagtcacgtgtggtgactatttgtttgggatgttgcagggaacccgttctgctctttatgcaaatgaccgggagtctatctctgttactgtgcaagaggtaactcctagagctgttggagcactgattgcactttatgaacgtgctgtggggatttatgcttctttggtaaatatcaatgcctatcatcagcctggtgttgaggctgggaaaaaggcagcaggagaagtattggcccttcagaaaagggttctgactgtattaaaggaggccatctgcgagaaccctactgagccattgactctagatgaaattgcagatcgctgccattgccctgaagatattgagatgatctacaaaataatccagcacatggctgctaacgacagagcacttatagcagaaggcagctgcggctctcctcgcagtgttaaggtgtacctcggtgaatgcagtgtggacgaagatatgcaggccgcatagattctgtgtctggatccgtgtaacattgttggaataaatcagaagcaacacaatagcgatgctatgcatgggtgtcgctgatgctgatgtctc

SEQ ID NO: 23201 - protein, 479 aa, Zea mays subsp. mays
  peptide (1)..(479): Ceres Seq. ID no. 12361386
  misc_feature (1)..(404): Pfam Name: Pfam Description:  Phosphoglucose isomerase
  misc_feature (1)..(474): NCBI GI NO: 7484671 NR Description: glucose-6-phosphate isomerase (EC 5
  misc_feature (1)..(474): NCBI GI NO: 30686602 NR Description: glucose-6-phosphate isomerase
  misc_feature (1)..(474): NCBI GI NO: 7484979 NR Description: glucose-6-phosphate isomerase (EC 5
  misc_feature (1)..(474): NCBI GI NO: 6690395 NR Description: phosphoglucose isomerase precursor
  misc_feature (1)..(465): NCBI GI NO: 23125809 NR Description: hypothetical protein [Nostoc punctiforme]
  misc_feature (1)..(467): NCBI GI NO: 17228545 NR Description: glucose-6-phosphate isomerase
  misc_feature (1)..(464): NCBI GI NO: 22298259 NR Description: glucose-6-phosphate isomerase
  misc_feature (1)..(465): NCBI GI NO: 23040343 NR Description: hypothetical protein
  misc_feature (1)..(465): NCBI GI NO: 16330760 NR Description: glucose-6-phosphate isomerase
  misc_feature (1)..(447): NCBI GI NO: 23053592 NR Description: hypothetical protein [Geobacter metallireducens]
MVGHYWLRDPALAPNSFLRNKIETALDRILAFSQDVVSGKILSPSGRFTSILSIGIGGSALGPQFVAEALAPDNPPLKIRFIDNTDPAGIDHQIAQLGPELATTLVIVISKSGGTPETRNGLLEVQKAFRDAGLQFSKQGVAITQENSLLDNTARIEGWLARFPMFDWVGGRTSEMSAVGLLPAALQGIDIKEMLVGAALMDEETRNTVVKANPAALLALCWYWASEGIGKKDMVVLPYKDSLLLLSRYLQQLVMESLGKEFDLDGNRVNQGLTVYGNKGSTDQHAYIQQLREGVQNFFVTFIEVLRDRPAGHDWELEPGVTCGDYLFGMLQGTRSALYANDRESISVTVQEVTPRAVGALIALYERAVGIYASLVNINAYHQPGVEAGKKAAGEVLALQKRVLTVLKEAICENPTEPLTLDEIADRCHCPEDIEMIYKIIQHMAANDRALIAEGSCGSPRSVKVYLGECSVDEDMQAA

SEQ ID NO: 23202 - protein, 315 aa, Zea mays subsp. mays
  peptide (1)..(315): Ceres Seq. ID no. 12361387
  misc_feature (1)..(240): Pfam Name: Pfam Description:  Phosphoglucose isomerase
  misc_feature (1)..(310): NCBI GI NO: 7484671 NR Description: glucose-6-phosphate isomerase (EC 5
  misc_feature (1)..(310): NCBI GI NO: 30686602 NR Description: glucose-6-phosphate isomerase
  misc_feature (1)..(310): NCBI GI NO: 7484979 NR Description: glucose-6-phosphate isomerase (EC 5
  misc_feature (1)..(310): NCBI GI NO: 6690395 NR Description: phosphoglucose isomerase precursor
  misc_feature (1)..(301): NCBI GI NO: 23125809 NR Description: hypothetical protein [Nostoc punctiforme]
  misc_feature (1)..(303): NCBI GI NO: 17228545 NR Description: glucose-6-phosphate isomerase
  misc_feature (1)..(300): NCBI GI NO: 22298259 NR Description: glucose-6-phosphate isomerase
  misc_feature (1)..(301): NCBI GI NO: 23040343 NR Description: hypothetical protein
  misc_feature (1)..(301): NCBI GI NO: 16330760 NR Description: glucose-6-phosphate isomerase
  misc_feature (1)..(283): NCBI GI NO: 23053592 NR Description: hypothetical protein [Geobacter metallireducens]
MFDWVGGRTSEMSAVGLLPAALQGIDIKEMLVGAALMDEETRNTVVKANPAALLALCWYWASEGIGKKDMVVLPYKDSLLLLSRYLQQLVMESLGKEFDLDGNRVNQGLTVYGNKGSTDQHAYIQQLREGVQNFFVTFIEVLRDRPAGHDWELEPGVTCGDYLFGMLQGTRSALYANDRESISVTVQEVTPRAVGALIALYERAVGIYASLVNINAYHQPGVEAGKKAAGEVLALQKRVLTVLKEAICENPTEPLTLDEIADRCHCPEDIEMIYKIIQHMAANDRALIAEGSCGSPRSVKVYLGECSVDEDMQAA

SEQ ID NO: 23203 - protein, 304 aa, Zea mays subsp. mays
  peptide (1)..(304): Ceres Seq. ID no. 12361388
  misc_feature (1)..(229): Pfam Name: Pfam Description:  Phosphoglucose isomerase
  misc_feature (1)..(299): NCBI GI NO: 7484671 NR Description: glucose-6-phosphate isomerase (EC 5
  misc_feature (1)..(299): NCBI GI NO: 30686602 NR Description: glucose-6-phosphate isomerase
  misc_feature (1)..(299): NCBI GI NO: 7484979 NR Description: glucose-6-phosphate isomerase (EC 5
  misc_feature (1)..(299): NCBI GI NO: 6690395 NR Description: phosphoglucose isomerase precursor
  misc_feature (1)..(290): NCBI GI NO: 23125809 NR Description: hypothetical protein [Nostoc punctiforme]
  misc_feature (1)..(292): NCBI GI NO: 17228545 NR Description: glucose-6-phosphate isomerase
  misc_feature (1)..(289): NCBI GI NO: 22298259 NR Description: glucose-6-phosphate isomerase
  misc_feature (1)..(290): NCBI GI NO: 23040343 NR Description: hypothetical protein
  misc_feature (1)..(290): NCBI GI NO: 16330760 NR Description: glucose-6-phosphate isomerase
  misc_feature (1)..(272): NCBI GI NO: 23053592 NR Description: hypothetical protein [Geobacter metallireducens]
MSAVGLLPAALQGIDIKEMLVGAALMDEETRNTVVKANPAALLALCWYWASEGIGKKDMVVLPYKDSLLLLSRYLQQLVMESLGKEFDLDGNRVNQGLTVYGNKGSTDQHAYIQQLREGVQNFFVTFIEVLRDRPAGHDWELEPGVTCGDYLFGMLQGTRSALYANDRESISVTVQEVTPRAVGALIALYERAVGIYASLVNINAYHQPGVEAGKKAAGEVLALQKRVLTVLKEAICENPTEPLTLDEIADRCHCPEDIEMIYKIIQHMAANDRALIAEGSCGSPRSVKVYLGECSVDEDMQAA

SEQ ID NO: 23204 - DNA, 1377 bp, Zea mays subsp. mays
  misc_feature (1)..(1377): Ceres Seq. ID no. 12341432
acaatccatgcggcggcatatggcgcccatcaaggagcaaaaacacacgacaagcgcagaacagcaggtgatgctggatgccgagctccagctgtggaaccacaccttcggctacgtcaagtccatggcgctcaaggccgcgatcgacctcggcatacccgaggccatccaccagcacggcggcacggccaccctcccacaaatagtcaccagggtcacgctccacccgtccaagacaccatgcctgcggcgcctcatgcgcgtgctcaccctcaccggcgtcttcggcgcgcaggaggcgcacgacgacgacggcggctgtgacgacgagctcgtctacacgctcacgccggcatcccgtctcctcgtcggctcaccggggcagaacgtgggccctttcctgaccgtgatgctcggccccatcttcatgtcgtccttcctcgacctccgcgggtggttccagcacgagacgccggacccgtcccccttcaagatgacgcacgggcgggacatatgggagctggccgcccacgacgccgccttcggcaggctcttcgacgccggcatggtcgctgacagcagcttcatcatggacgtcgtggtcagggagtgtggtggcgtgttcgaggggatcagctccctcgtcgacgtcgccggcgggctcggtggcgccacacagaccatcgcgaaggcgttcccgaacctggagtgcagcgtgctggatctcccaaacgtcgtcgccagcgctcccactgataccgccgtgaagtatgtcgccggtgacatgttcgagagcgttccggcggcagacgctgtcttcctcaagggtgatgccgactgtgtcaagatactgaagaactgcaagaaggccataccggctcaaggaggcaaggtgataatactggatatcgtggttggagcagggtcgtcatgcgaccggaagaatgtggagacgcaatgcttgtttgatctcttcatcatgtttatcaacggtgccgaacgagatgagcgacagtggaagaagatcatctttgaagctggctttacatcttacaagatcatacctgtcctaggcattagatccataattgaagtctgcctatagaaactaatataattaaggatgaaaacgggtcaggttcgggttgagttgagcaaaattctacccgggatggcatccttaaagtctacataaacccactcacgatcgtacccacgagtgcaattctaaacccgcacgtaaaccggtcaggtttgaggtattgtatacttttaaataataattcaactctctctactactgtacgtcacaccttttccttcgttcacctctccttgctcccccatatttaaatagtaataaagttaaaattattc

SEQ ID NO: 23205 - protein, 367 aa, Zea mays subsp. mays
  peptide (1)..(367): Ceres Seq. ID no. 12341433
  misc_feature (108)..(342): Pfam Name: Pfam Description:  O-methyltransferase
  misc_feature (18)..(365): NCBI GI NO: 1353193 NR Description: O-METHYLTRANSFERASE ZRP4 (OMT)
  misc_feature (24)..(365): NCBI GI NO: 37530606 NR Description: putative o-methyltransferase ZRP4
  misc_feature (11)..(365): NCBI GI NO: 37530600 NR Description: putative o-methyltransferase ZRP4
  misc_feature (20)..(365): NCBI GI NO: 22093735 NR Description: putative o-methyltransferase
  misc_feature (24)..(365): NCBI GI NO: 4098238 NR Description: o-methyltransferase [Triticum aestivum]
  misc_feature (25)..(365): NCBI GI NO: 38175602 NR Description: putative catechol O-methyltransferase
  misc_feature (13)..(365): NCBI GI NO: 20514369 NR Description: orcinol O-methyltransferase [Rosa hybrid cultivar]
  misc_feature (13)..(365): NCBI GI NO: 20514367 NR Description: orcinol O-methyltransferase [Rosa hybrid cultivar]
  misc_feature (24)..(365): NCBI GI NO: 2130032 NR Description: catechol O-methyltransferase (EC 2.1.1.6) - barley
  misc_feature (24)..(365): NCBI GI NO: 453244 NR Description: flavonoid 7-O-methyltransferase
QSMRRHMAPIKEQKHTTSAEQQVMLDAELQLWNHTFGYVKSMALKAAIDLGIPEAIHQHGGTATLPQIVTRVTLHPSKTPCLRRLMRVLTLTGVFGAQEAHDDDGGCDDELVYTLTPASRLLVGSPGQNVGPFLTVMLGPIFMSSFLDLRGWFQHETPDPSPFKMTHGRDIWELAAHDAAFGRLFDAGMVADSSFIMDVVVRECGGVFEGISSLVDVAGGLGGATQTIAKAFPNLECSVLDLPNVVASAPTDTAVKYVAGDMFESVPAADAVFLKGDADCVKILKNCKKAIPAQGGKVIILDIVVGAGSSCDRKNVETQCLFDLFIMFINGAERDERQWKKIIFEAGFTSYKIIPVLGIRSIIEVCL

SEQ ID NO: 23206 - protein, 365 aa, Zea mays subsp. mays
  peptide (1)..(365): Ceres Seq. ID no. 12341434
  misc_feature (106)..(340): Pfam Name: Pfam Description:  O-methyltransferase
  misc_feature (16)..(363): NCBI GI NO: 1353193 NR Description: O-METHYLTRANSFERASE ZRP4 (OMT)
  misc_feature (22)..(363): NCBI GI NO: 37530606 NR Description: putative o-methyltransferase ZRP4
  misc_feature (9)..(363): NCBI GI NO: 37530600 NR Description: putative o-methyltransferase ZRP4
  misc_feature (18)..(363): NCBI GI NO: 22093735 NR Description: putative o-methyltransferase
  misc_feature (22)..(363): NCBI GI NO: 4098238 NR Description: o-methyltransferase [Triticum aestivum]
  misc_feature (23)..(363): NCBI GI NO: 38175602 NR Description: putative catechol O-methyltransferase
  misc_feature (11)..(363): NCBI GI NO: 20514369 NR Description: orcinol O-methyltransferase [Rosa hybrid cultivar]
  misc_feature (11)..(363): NCBI GI NO: 20514367 NR Description: orcinol O-methyltransferase [Rosa hybrid cultivar]
  misc_feature (22)..(363): NCBI GI NO: 2130032 NR Description: catechol O-methyltransferase (EC 2.1.1.6) - barley
  misc_feature (22)..(363): NCBI GI NO: 453244 NR Description: flavonoid 7-O-methyltransferase
MRRHMAPIKEQKHTTSAEQQVMLDAELQLWNHTFGYVKSMALKAAIDLGIPEAIHQHGGTATLPQIVTRVTLHPSKTPCLRRLMRVLTLTGVFGAQEAHDDDGGCDDELVYTLTPASRLLVGSPGQNVGPFLTVMLGPIFMSSFLDLRGWFQHETPDPSPFKMTHGRDIWELAAHDAAFGRLFDAGMVADSSFIMDVVVRECGGVFEGISSLVDVAGGLGGATQTIAKAFPNLECSVLDLPNVVASAPTDTAVKYVAGDMFESVPAADAVFLKGDADCVKILKNCKKAIPAQGGKVIILDIVVGAGSSCDRKNVETQCLFDLFIMFINGAERDERQWKKIIFEAGFTSYKIIPVLGIRSIIEVCL

SEQ ID NO: 23207 - protein, 361 aa, Zea mays subsp. mays
  peptide (1)..(361): Ceres Seq. ID no. 12341435
  misc_feature (102)..(336): Pfam Name: Pfam Description:  O-methyltransferase
  misc_feature (12)..(359): NCBI GI NO: 1353193 NR Description: O-METHYLTRANSFERASE ZRP4 (OMT)
  misc_feature (18)..(359): NCBI GI NO: 37530606 NR Description: putative o-methyltransferase ZRP4
  misc_feature (5)..(359): NCBI GI NO: 37530600 NR Description: putative o-methyltransferase ZRP4
  misc_feature (14)..(359): NCBI GI NO: 22093735 NR Description: putative o-methyltransferase
  misc_feature (18)..(359): NCBI GI NO: 4098238 NR Description: o-methyltransferase [Triticum aestivum]
  misc_feature (19)..(359): NCBI GI NO: 38175602 NR Description: putative catechol O-methyltransferase
  misc_feature (7)..(359): NCBI GI NO: 20514369 NR Description: orcinol O-methyltransferase [Rosa hybrid cultivar]
  misc_feature (7)..(359): NCBI GI NO: 20514367 NR Description: orcinol O-methyltransferase [Rosa hybrid cultivar]
  misc_feature (18)..(359): NCBI GI NO: 2130032 NR Description: catechol O-methyltransferase (EC 2.1.1.6) - barley
  misc_feature (18)..(359): NCBI GI NO: 453244 NR Description: flavonoid 7-O-methyltransferase
MAPIKEQKHTTSAEQQVMLDAELQLWNHTFGYVKSMALKAAIDLGIPEAIHQHGGTATLPQIVTRVTLHPSKTPCLRRLMRVLTLTGVFGAQEAHDDDGGCDDELVYTLTPASRLLVGSPGQNVGPFLTVMLGPIFMSSFLDLRGWFQHETPDPSPFKMTHGRDIWELAAHDAAFGRLFDAGMVADSSFIMDVVVRECGGVFEGISSLVDVAGGLGGATQTIAKAFPNLECSVLDLPNVVASAPTDTAVKYVAGDMFESVPAADAVFLKGDADCVKILKNCKKAIPAQGGKVIILDIVVGAGSSCDRKNVETQCLFDLFIMFINGAERDERQWKKIIFEAGFTSYKIIPVLGIRSIIEVCL

SEQ ID NO: 23208 - DNA, 1266 bp, Zea mays subsp. mays
  misc_feature (1)..(1266): Ceres Seq. ID no. 12405230
agttcctaccaactcccgttgttgcctacggcgattccaaattcccatctgccctcctgctgctccactccactccactccaggctcttttccctgctcctgtgggctgtggcgagcgcaaaccagcctcgcttcccaaaccctagctcctcgctctcccgcccgcgtggcctgccaggcaaccacccccggatcaactccgtacagcgtgcctccgcctcccggactccagcggcggcgggatgtggtctcactccaaggacttgctcgagatcgagcccctcgagctccgattcccattcgagacaaagaagcagatctcgtgctctatgcagttgacaaaccgaacagatgactacatcggctttaaggttaagacgacgagcccgaagaagtactgtgtccggcccaacagcggcatcgtgccacctcggtccaccagcgatgtcattgtgacaatgcaagcacaaaaggaggcgccaccggacatgcagtgcaaggacaagtttcttgtgcaaagtgtcgttgtggcggaagggaccttagtcaaggacatcactggcgatatgtttaccaaagaatcagctaatgtggtggatgaggttaagctgaaggtcgtctacatcccaccacccaaaccgccatccccagtgcatgaggaatctgaagaaggctcatcaccccgaccttcattgtccgatggaattaacttgaattatcaagagacaacgagggaatctgataagtcactgttgttctcggctgtaaaaactcatatagatcaaaaggactacacctccgagacatctgctttgatttcaaagttgacagaagagagaaactctgccattcagcagaacaataagcttcgagaggaactggaccttacgaggagggaagccaacaagcagaatggtggattctcctttgtggtcgtggtggccattgctctcctgggaatgctactgggatatatcatgaagagatagatgggctcataatgactcggcctcatgttagaccgttttcctcacagtattgaatattgtctaatgcacttatcacatgcacactgctactccatagcatattcatctggtgtcttacgtgatctgtttcgtgcttgggattgggatgactagtcaccagtcgcaacacaggctgtcaaacaatggtctgtgtgcttaatcttgttttagctgttatgttagtgtgtgcaactaaaactgggtaattaatgatgtcgttttggtcgaccgtttgtgc

SEQ ID NO: 23209 - protein, 248 aa, Zea mays subsp. mays
  peptide (1)..(248): Ceres Seq. ID no. 12405231
  misc_feature (1)..(248): NCBI GI NO: 11288307 NR Description: 27k vesicle-associated membrane protein-associatedprotein
  misc_feature (5)..(248): NCBI GI NO: 15225415 NR Description: putative VAMP-associated protein
  misc_feature (1)..(248): NCBI GI NO: 18411661 NR Description: putative protein; protein id: At3g60600
  misc_feature (5)..(248): NCBI GI NO: 21554053 NR Description: putative VAMP-associated protein
  misc_feature (1)..(248): NCBI GI NO: 11288305 NR Description: hypothetical protein T4C21
  misc_feature (7)..(248): NCBI GI NO: 18411240 NR Description: putative proline-rich protein
  misc_feature (7)..(248): NCBI GI NO: 21592874 NR Description: putative proline-rich protein
  misc_feature (5)..(142): NCBI GI NO: 37535894 NR Description: putative vesicle-associated membrane protein
  misc_feature (176)..(248): NCBI GI NO: 37535894 NR Description: putative vesicle-associated membrane protein
  misc_feature (7)..(234): NCBI GI NO: 7486542 NR Description: hypothetical protein F6N15
MWSHSKDLLEIEPLELRFPFETKKQISCSMQLTNRTDDYIGFKVKTTSPKKYCVRPNSGIVPPRSTSDVIVTMQAQKEAPPDMQCKDKFLVQSVVVAEGTLVKDITGDMFTKESANVVDEVKLKVVYIPPPKPPSPVHEESEEGSSPRPSLSDGINLNYQETTRESDKSLLFSAVKTHIDQKDYTSETSALISKLTEERNSAIQQNNKLREELDLTRREANKQNGGFSFVVVVAIALLGMLLGYIMKR

SEQ ID NO: 23210 - protein, 219 aa, Zea mays subsp. mays
  peptide (1)..(219): Ceres Seq. ID no. 12405232
  misc_feature (1)..(219): NCBI GI NO: 11288307 NR Description: 27k vesicle-associated membrane protein-associatedprotein
  misc_feature (1)..(219): NCBI GI NO: 15225415 NR Description: putative VAMP-associated protein
  misc_feature (1)..(219): NCBI GI NO: 18411661 NR Description: putative protein; protein id: At3g60600
  misc_feature (1)..(219): NCBI GI NO: 21554053 NR Description: putative VAMP-associated protein
  misc_feature (1)..(219): NCBI GI NO: 11288305 NR Description: hypothetical protein T4C21
  misc_feature (1)..(219): NCBI GI NO: 18411240 NR Description: putative proline-rich protein
  misc_feature (1)..(219): NCBI GI NO: 21592874 NR Description: putative proline-rich protein
  misc_feature (1)..(113): NCBI GI NO: 37535894 NR Description: putative vesicle-associated membrane protein
  misc_feature (147)..(219): NCBI GI NO: 37535894 NR Description: putative vesicle-associated membrane protein
  misc_feature (1)..(205): NCBI GI NO: 7486542 NR Description: hypothetical protein F6N15
MQLTNRTDDYIGFKVKTTSPKKYCVRPNSGIVPPRSTSDVIVTMQAQKEAPPDMQCKDKFLVQSVVVAEGTLVKDITGDMFTKESANVVDEVKLKVVYIPPPKPPSPVHEESEEGSSPRPSLSDGINLNYQETTRESDKSLLFSAVKTHIDQKDYTSETSALISKLTEERNSAIQQNNKLREELDLTRREANKQNGGFSFVVVVAIALLGMLLGYIMKR

SEQ ID NO: 23211 - protein, 176 aa, Zea mays subsp. mays
  peptide (1)..(176): Ceres Seq. ID no. 12405233
  misc_feature (1)..(176): NCBI GI NO: 11288307 NR Description: 27k vesicle-associated membrane protein-associatedprotein
  misc_feature (1)..(176): NCBI GI NO: 15225415 NR Description: putative VAMP-associated protein
  misc_feature (1)..(176): NCBI GI NO: 18411661 NR Description: putative protein; protein id: At3g60600
  misc_feature (1)..(176): NCBI GI NO: 21554053 NR Description: putative VAMP-associated protein
  misc_feature (1)..(176): NCBI GI NO: 11288305 NR Description: hypothetical protein T4C21
  misc_feature (1)..(176): NCBI GI NO: 18411240 NR Description: putative proline-rich protein
  misc_feature (1)..(176): NCBI GI NO: 21592874 NR Description: putative proline-rich protein
  misc_feature (1)..(70): NCBI GI NO: 37535894 NR Description: putative vesicle-associated membrane protein
  misc_feature (104)..(176): NCBI GI NO: 37535894 NR Description: putative vesicle-associated membrane protein
  misc_feature (1)..(162): NCBI GI NO: 7486542 NR Description: hypothetical protein F6N15
MQAQKEAPPDMQCKDKFLVQSVVVAEGTLVKDITGDMFTKESANVVDEVKLKVVYIPPPKPPSPVHEESEEGSSPRPSLSDGINLNYQETTRESDKSLLFSAVKTHIDQKDYTSETSALISKLTEERNSAIQQNNKLREELDLTRREANKQNGGFSFVVVVAIALLGMLLGYIMKR

SEQ ID NO: 23212 - DNA, 1764 bp, Zea mays subsp. mays
  misc_feature (1)..(1764): Ceres Seq. ID no. 13636367
aaccgaggcggtcaggctccctcctccttcctcctccctgcaaatcctgcaggcaccaccgctcgttttcctgtccgggggacaggagagaaggggagagaccgagagagggtgaggcgcggcgtccgcccgatctgctccgccccccgaagcagcctgtcacgtcgtcctcactctcagcaaccagcgaaaatgggtgccggaggcaggatgaccgagaaggagcgggagaagcatgagcaggagcaggtcgcccgtgctaccggcggtggcgcggcagtgcagcggtcgccggtggagaagccgccgttcacgttggggcagatcaagaaggcgatcccgccgcactgcttcgagcgctccgtgctgaggtccttctcgtacgtggcccacgacctgtcgctcgccgcggcgctcctctacctcgcggtggccgtgataccggcgctaccctgcccgctccgctacgcggcctggccgctgtactgggtggcccaggggtgcgtgtgcacgggcgtgtgggtgatcgcgcacgagtgcggccaccacgccttctccgaccacgcgctcctggacgacgccgtcggcctggcgctgcactcggcgctgctggtgccctacttctcgtggaagtacagccaccggcgccaccactccaacacggggtccctggagcgcgacgaggtgttcgtgccgaggaccaaggaggcgctgccgtggtacgccccgtacgtgcacggcagccccgcgggccggctggcgcacgtcgccgtgcagctcaccctgggctggccgctgtacctggccaccaacgcgtcggggcgcccgtacccgcgcttcgcctgccacttcgacccctacggcccgatctacggcgaccgggagcgcgcccagatcttcgtctcggacgccggcgtcgcggccgtggcgttcgggctgtacaagctggcggcggcgttcgggctctggtgggtggtgcgcgtgtacgccgtgccgctgctgatcgtcaacgcgtggctggtgctcatcacgtacctgcagcacacccacccggcgctgccccactacgactcgggcgagtgggactggctgcgcggcgcgctcgccaccgtcgaccgagactacggcgtcctcaaccgcgtgttccaccacatcacggacacgcacgtcgcgcaccacctcttctccaccatgccgcactaccacgccgtggaggccaccagggcgatcaggcccgtcctcggcgagtactaccagttcgacccgacccctgtcgccaaggccacctggcgcgaggccagggagtgcatctacgtcgagcctgagaaccgcaaccgcaagggcgtcttctggtacaacagcaagttctagccgccgcttgctttttccctaggaatgggaggagaaatcaggatgagaagatggtaatgtctgcatctacctgtctaatggttagtcaccagtctttagacaggaagagagcatttgggcttcagaaaaggaggcttactgcactactgcagtgccatcgctagatttaaggcaaattcagtgtgtctgtgcccatggctgtgagctttgggtactctcaagtagtcaagttctcttgtttttgtttttagtcgtcgctgttgtaggcttgccggcggcggtcgttgcgtggccgcgccttgtcgtgtgcgtcttgccatctcttcgtgctcccttcgtgttgttgtaaaacactagtctggtgtctttggcggaataacagatcgtcgaacg

SEQ ID NO: 23213 - protein, 456 aa, Zea mays subsp. mays
  peptide (1)..(456): Ceres Seq. ID no. 13636368
  misc_feature (162)..(414): Pfam Name: Pfam Description:  Fatty acid desaturase
  misc_feature (65)..(452): NCBI GI NO: 28371827 NR Description: delta-12 oleate desaturase [Punica granatum]
  misc_feature (65)..(452): NCBI GI NO: 28564441 NR Description: delta 12-acyl-lipid-desaturase [Punica granatum]
  misc_feature (65)..(456): NCBI GI NO: 27261181 NR Description: delta 12 oleic acid desaturase FAD2
  misc_feature (65)..(456): NCBI GI NO: 34903462 NR Description: putative omega-6 fatty acid desaturase
  misc_feature (65)..(456): NCBI GI NO: 8886726 NR Description: omega-6 fatty acid desaturase [Sesamum indicum]
  misc_feature (65)..(455): NCBI GI NO: 1345977 NR Description: Omega-6 fatty acid desaturase
  misc_feature (65)..(455): NCBI GI NO: 4378875 NR Description: delta-12 desaturase [Brassica carinata]
  misc_feature (65)..(455): NCBI GI NO: 7433295 NR Description: omega-6 desaturase, microsomal - upland cotton
  misc_feature (65)..(455): NCBI GI NO: 17225582 NR Description: delta-12 fatty acid desaturase
  misc_feature (248)..(455): NCBI GI NO: 32421083 NR Description: hypothetical protein [Neurospora crassa]
NRGGQAPSSFLLPANPAGTTARFPVRGTGEKGRDRERVRRGVRPICSAPRSSLSRRPHSQQPAKMGAGGRMTEKEREKHEQEQVARATGGGAAVQRSPVEKPPFTLGQIKKAIPPHCFERSVLRSFSYVAHDLSLAAALLYLAVAVIPALPCPLRYAAWPLYWVAQGCVCTGVWVIAHECGHHAFSDHALLDDAVGLALHSALLVPYFSWKYSHRRHHSNTGSLERDEVFVPRTKEALPWYAPYVHGSPAGRLAHVAVQLTLGWPLYLATNASGRPYPRFACHFDPYGPIYGDRERAQIFVSDAGVAAVAFGLYKLAAAFGLWWVVRVYAVPLLIVNAWLVLITYLQHTHPALPHYDSGEWDWLRGALATVDRDYGVLNRVFHHITDTHVAHHLFSTMPHYHAVEATRAIRPVLGEYYQFDPTPVAKATWREARECIYVEPENRNRKGVFWYNSKF

SEQ ID NO: 23214 - protein, 392 aa, Zea mays subsp. mays
  peptide (1)..(392): Ceres Seq. ID no. 13636369
  misc_feature (98)..(350): Pfam Name: Pfam Description:  Fatty acid desaturase
  misc_feature (1)..(388): NCBI GI NO: 28371827 NR Description: delta-12 oleate desaturase [Punica granatum]
  misc_feature (1)..(388): NCBI GI NO: 28564441 NR Description: delta 12-acyl-lipid-desaturase [Punica granatum]
  misc_feature (1)..(392): NCBI GI NO: 27261181 NR Description: delta 12 oleic acid desaturase FAD2
  misc_feature (1)..(392): NCBI GI NO: 34903462 NR Description: putative omega-6 fatty acid desaturase
  misc_feature (1)..(392): NCBI GI NO: 8886726 NR Description: omega-6 fatty acid desaturase [Sesamum indicum]
  misc_feature (1)..(391): NCBI GI NO: 1345977 NR Description: Omega-6 fatty acid desaturase
  misc_feature (1)..(391): NCBI GI NO: 4378875 NR Description: delta-12 desaturase [Brassica carinata]
  misc_feature (1)..(391): NCBI GI NO: 7433295 NR Description: omega-6 desaturase, microsomal - upland cotton
  misc_feature (1)..(391): NCBI GI NO: 17225582 NR Description: delta-12 fatty acid desaturase
  misc_feature (184)..(391): NCBI GI NO: 32421083 NR Description: hypothetical protein [Neurospora crassa]
MGAGGRMTEKEREKHEQEQVARATGGGAAVQRSPVEKPPFTLGQIKKAIPPHCFERSVLRSFSYVAHDLSLAAALLYLAVAVIPALPCPLRYAAWPLYWVAQGCVCTGVWVIAHECGHHAFSDHALLDDAVGLALHSALLVPYFSWKYSHRRHHSNTGSLERDEVFVPRTKEALPWYAPYVHGSPAGRLAHVAVQLTLGWPLYLATNASGRPYPRFACHFDPYGPIYGDRERAQIFVSDAGVAAVAFGLYKLAAAFGLWWVVRVYAVPLLIVNAWLVLITYLQHTHPALPHYDSGEWDWLRGALATVDRDYGVLNRVFHHITDTHVAHHLFSTMPHYHAVEATRAIRPVLGEYYQFDPTPVAKATWREARECIYVEPENRNRKGVFWYNSKF

SEQ ID NO: 23215 - protein, 386 aa, Zea mays subsp. mays
  peptide (1)..(386): Ceres Seq. ID no. 13636370
  misc_feature (92)..(344): Pfam Name: Pfam Description:  Fatty acid desaturase
  misc_feature (1)..(382): NCBI GI NO: 28371827 NR Description: delta-12 oleate desaturase [Punica granatum]
  misc_feature (1)..(382): NCBI GI NO: 28564441 NR Description: delta 12-acyl-lipid-desaturase [Punica granatum]
  misc_feature (1)..(386): NCBI GI NO: 27261181 NR Description: delta 12 oleic acid desaturase FAD2
  misc_feature (1)..(386): NCBI GI NO: 34903462 NR Description: putative omega-6 fatty acid desaturase
  misc_feature (1)..(386): NCBI GI NO: 8886726 NR Description: omega-6 fatty acid desaturase [Sesamum indicum]
  misc_feature (1)..(385): NCBI GI NO: 1345977 NR Description: Omega-6 fatty acid desaturase
  misc_feature (1)..(385): NCBI GI NO: 4378875 NR Description: delta-12 desaturase [Brassica carinata]
  misc_feature (1)..(385): NCBI GI NO: 7433295 NR Description: omega-6 desaturase, microsomal - upland cotton
  misc_feature (1)..(385): NCBI GI NO: 17225582 NR Description: delta-12 fatty acid desaturase
  misc_feature (178)..(385): NCBI GI NO: 32421083 NR Description: hypothetical protein [Neurospora crassa]
MTEKEREKHEQEQVARATGGGAAVQRSPVEKPPFTLGQIKKAIPPHCFERSVLRSFSYVAHDLSLAAALLYLAVAVIPALPCPLRYAAWPLYWVAQGCVCTGVWVIAHECGHHAFSDHALLDDAVGLALHSALLVPYFSWKYSHRRHHSNTGSLERDEVFVPRTKEALPWYAPYVHGSPAGRLAHVAVQLTLGWPLYLATNASGRPYPRFACHFDPYGPIYGDRERAQIFVSDAGVAAVAFGLYKLAAAFGLWWVVRVYAVPLLIVNAWLVLITYLQHTHPALPHYDSGEWDWLRGALATVDRDYGVLNRVFHHITDTHVAHHLFSTMPHYHAVEATRAIRPVLGEYYQFDPTPVAKATWREARECIYVEPENRNRKGVFWYNSKF

SEQ ID NO: 23216 - DNA, 1677 bp, Zea mays subsp. mays
  misc_feature (1)..(1677): Ceres Seq. ID no. 13498877
aacaacgcctcctccagtccttcttcgtaagccttcaaaccgacgaatttgagcaactgcacccagagcgcgatccattgccggggaagaagcaacttgttgcgagcctcctctatggcgagctccgaccatggttccaccaccgcccccaaggacgtgccgggcagctacggcctgccgctggtgggcgccgtgcgcgaccgcctcgacttctactacttccaggggcaggacaagtacttcgagtcccgcgtggagcgctacggctccaccgtggtgcgcatgaacgtgccgccgggccccttcatggcgcgcgacccgcgggtggtggcggtcctggacgccaagagcttccccgtgctcttcgacatggacaaggtggagaagaaggacctgttcacgggcacctacatgccgtccacctccctcaccggcggctaccgcgtctgctcgtacctggacccctccgagcccacccacaccaaggtgaagcagctgctcttctccctcctgctctcccgcaaggacgacgtgatccccaccttccgctccaacttctcctcgctcctcgccaccgtggaggcggagctggccaagggcggcaaggccgagttcaacaagctcaacgacgtcacctccttcgacttcatcggcgaggcctacttcggcgtgcgcccctcggcgaccgagctcggcaagggcgggccgagcaaggcggccaagtggctcatctggcagctccacccgctggtcacgctcggcctccccatggtcctggaggagccgctgctccacacgttccacctcccgcctttcctcgtcaagggcgactacagggcgctgtacaagtacttctccacggtggcgaagcaggcgctggacaccgccgagggcctgggcctgtcgcgcgaggaggcctgccacaacctcctcttcgccaccaccttcaacagctacggcggcctcaaggtgctgttcccgggcctgctggccaacgtggccagcggcggcgagaagctccacgagcggctggtggccgagatccgcggcgccgtggccgacgccggcggcaaggtcaccctcgcggcggtggagaggatggagctggccaagtcggtggtgtgggagtcgctgcgcctggacccgcccgtcaagttccagtacgggcacgccaagaaggacctgctggtggagagccacgacgcggtgttccaggtgaggaagggcgagatgctgttcggctaccagccgtgcgccaccaaggacccccgcgtgttcggcgacaccgcccggggacttcgtgcccgaccgcttcctcggcgaggagggcagcaagctgctgcagtacgtgtactggtccaacggccgtgagaccgagaaccccagcgtcgacaacaagcagtgccccgggaagaacttcgtggtgctggtcggcaggctcctcctcgtcgagctcttcctccgctacgacacattcaccgccgaggtcggcaaggagctgctcggcaccagcgtcatcttcaccggtgtcacgaaagctacctccggtccgggcagcgagtaaaccgccccggccggcgcgcgtcgttggatatatgatgagtggacgtgacagagtgtcccattatttcttaatttcgtcattttcctccttccttctaataagacttctctctc

SEQ ID NO: 23217 - protein, 558 aa, Zea mays subsp. mays
  peptide (1)..(558): Ceres Seq. ID no. 13498878
  misc_feature (436)..(508): Pfam Name: Pfam Description:  Equine herpesvirus glycoprotein gp2
  misc_feature (432)..(510): NCBI GI NO: 28574039 NR Description: Salivary gland secretion 1 CG3047-PA
  misc_feature (415)..(523): NCBI GI NO: 13592175 NR Description: ppg3 [Leishmania major]
  misc_feature (415)..(523): NCBI GI NO: 13592175 NR Description: ppg3 [Leishmania major]
  misc_feature (415)..(549): NCBI GI NO: 13592175 NR Description: ppg3 [Leishmania major]
  misc_feature (432)..(523): NCBI GI NO: 13592175 NR Description: ppg3 [Leishmania major]
  misc_feature (415)..(500): NCBI GI NO: 13592175 NR Description: ppg3 [Leishmania major]
  misc_feature (453)..(523): NCBI GI NO: 19923466 NR Description: splicing coactivator subunit SRm300
  misc_feature (453)..(523): NCBI GI NO: 5821151 NR Description: RNA binding protein [Homo sapiens]
  misc_feature (453)..(523): NCBI GI NO: 6634015 NR Description: KIAA0324 protein [Homo sapiens]
  misc_feature (453)..(523): NCBI GI NO: 7512967 NR Description: hypothetical protein KIAA0324 - human (fragment)
QRLLQSFFVSLQTDEFEQLHPERDPLPGKKQLVASLLYGELRPWFHHRPQGRAGQLRPAAGGRRARPPRLLLLPGAGQVLRVPRGALRLHRGAHERAAGPLHGARPAGGGGPGRQELPRALRHGQGGEEGPVHGHLHAVHLPHRRLPRLLVPGPLRAHPHQGEAAALLPPALPQGRRDPHLPLQLLLAPRHRGGGAGQGRQGRVQQAQRRHLLRLHRRGLLRRAPLGDRARQGRAEQGGQVAHLAAPPAGHARPPHGPGGAAAPHVPPPAFPRQGRLQGAVQVLLHGGEAGAGHRRGPGPVARGGLPQPPLRHHLQQLRRPQGAVPGPAGQRGQRRREAPRAAGGRDPRRRGRRRRQGHPRGGGEDGAGQVGGVGVAAPGPARQVPVRARQEGPAGGEPRRGVPGEEGRDAVRLPAVRHQGPPRVRRHRPGTSCPTASSARRAASCCSTCTGPTAVRPRTPASTTSSAPGRTSWCWSAGSSSSSSSSATTHSPPRSARSCSAPASSSPVSRKLPPVRAASKPPRPARVVGYMMSGRDRVSHYFLISSFSSFLLIRLLS

SEQ ID NO: 23218 - protein, 418 aa, Zea mays subsp. mays
  peptide (1)..(418): Ceres Seq. ID no. 13498879
  misc_feature (304)..(393): Pfam Name: Pfam Description:  Cytochrome P450
  misc_feature (1)..(393): NCBI GI NO: 7452979 NR Description: allene oxide synthase
  misc_feature (1)..(393): NCBI GI NO: 7452981 NR Description: allene oxide synthase
  misc_feature (13)..(393): NCBI GI NO: 16506652 NR Description: allene oxide synthase [Oryza sativa]
  misc_feature (1)..(418): NCBI GI NO: 28569578 NR Description: allene oxide synthase [Triticum aestivum]
  misc_feature (9)..(388): NCBI GI NO: 23956572 NR Description: allene oxide synthase [Solanum tuberosum]
  misc_feature (13)..(388): NCBI GI NO: 20160362 NR Description: allene oxide synthase [Solanum tuberosum]
  misc_feature (9)..(388): NCBI GI NO: 16973300 NR Description: allene oxide synthase [Nicotiana attenuata]
  misc_feature (1)..(388): NCBI GI NO: 1352186 NR Description: Allene oxide synthase, chloroplast precursor
  misc_feature (1)..(388): NCBI GI NO: 29373135 NR Description: allene oxide synthase [Citrus sinensis]
  misc_feature (83)..(390): NCBI GI NO: 7488048 NR Description: probable allene oxide synthase - Arabidopsisthaliana
MASSDHGSTTAPKDVPGSYGLPLVGAVRDRLDFYYFQGQDKYFESRVERYGSTVVRMNVPPGPFMARDPRVVAVLDAKSFPVLFDMDKVEKKDLFTGTYMPSTSLTGGYRVCSYLDPSEPTHTKVKQLLFSLLLSRKDDVIPTFRSNFSSLLATVEAELAKGGKAEFNKLNDVTSFDFIGEAYFGVRPSATELGKGGPSKAAKWLIWQLHPLVTLGLPMVLEEPLLHTFHLPPFLVKGDYRALYKYFSTVAKQALDTAEGLGLSREEACHNLLFATTFNSYGGLKVLFPGLLANVASGGEKLHERLVAEIRGAVADAGGKVTLAAVERMELAKSVVWESLRLDPPVKFQYGHAKKDLLVESHDAVFQVRKGEMLFGYQPCATKDPRVFGDTARGLRARPLPRRGGQQAAAVRVLVQRP

SEQ ID NO: 23219 - protein, 362 aa, Zea mays subsp. mays
  peptide (1)..(362): Ceres Seq. ID no. 13498880
  misc_feature (248)..(337): Pfam Name: Pfam Description:  Cytochrome P450
  misc_feature (1)..(337): NCBI GI NO: 7452979 NR Description: allene oxide synthase
  misc_feature (1)..(337): NCBI GI NO: 7452981 NR Description: allene oxide synthase
  misc_feature (1)..(337): NCBI GI NO: 16506652 NR Description: allene oxide synthase [Oryza sativa]
  misc_feature (1)..(362): NCBI GI NO: 28569578 NR Description: allene oxide synthase [Triticum aestivum]
  misc_feature (1)..(332): NCBI GI NO: 23956572 NR Description: allene oxide synthase [Solanum tuberosum]
  misc_feature (1)..(332): NCBI GI NO: 20160362 NR Description: allene oxide synthase [Solanum tuberosum]
  misc_feature (1)..(332): NCBI GI NO: 16973300 NR Description: allene oxide synthase [Nicotiana attenuata]
  misc_feature (1)..(332): NCBI GI NO: 1352186 NR Description: Allene oxide synthase, chloroplast precursor
  misc_feature (1)..(332): NCBI GI NO: 29373135 NR Description: allene oxide synthase [Citrus sinensis]
  misc_feature (27)..(334): NCBI GI NO: 7488048 NR Description: probable allene oxide synthase - Arabidopsisthaliana
MNVPPGPFMARDPRVVAVLDAKSFPVLFDMDKVEKKDLFTGTYMPSTSLTGGYRVCSYLDPSEPTHTKVKQLLFSLLLSRKDDVIPTFRSNFSSLLATVEAELAKGGKAEFNKLNDVTSFDFIGEAYFGVRPSATELGKGGPSKAAKWLIWQLHPLVTLGLPMVLEEPLLHTFHLPPFLVKGDYRALYKYFSTVAKQALDTAEGLGLSREEACHNLLFATTFNSYGGLKVLFPGLLANVASGGEKLHERLVAEIRGAVADAGGKVTLAAVERMELAKSVVWESLRLDPPVKFQYGHAKKDLLVESHDAVFQVRKGEMLFGYQPCATKDPRVFGDTARGLRARPLPRRGGQQAAAVRVLVQRP

SEQ ID NO: 23220 - DNA, 1596 bp, Zea mays subsp. mays
  misc_feature (1)..(1596): Ceres Seq. ID no. 13498873
aatttttcgcgaagtttgtgttgtgattgcgccgttacgttacgtgaagaagacggatcttctacaagctgacggaagggcggatcgtgaaattgcgagttgcgacgccgtcattacaaatacgttatctgttcatccgtcaagccgtcagatctcccggcctgaggattcgattattctttcgctctcgcccaagtcatcgtctggtcgtcgcccgcagaggcgcagacgcccaaaaccggaaggggcgccatggccgcgtcggatctggagagcaaggccaaggaggccttcgtcgacgacgacttcgagctggccaccgagctctacagccaggccatcgacgccgggcccgccaccgccgacctctatgccgaccgcgcccaggcgcacatcaagctcggcaactacactgaggctgtggcggatgctaacaaagcaattgagcttgatcctatgatgcataaagcttactaccggaaaggtgctgcatgcattaagcttgaagaataccaaactgcaaaggctgctcttgagttgggttcttcttatgcatcaggcgattcaaggtttgctcgtctattgaaggaatgtgatgagcgcatcgctgaggaatctagccaggcaccagtaaagaatgttgaggctactgtggctgctactattgaggacaaggaggatttcacaaatatggagaatacaccaccagtgatagaacccccaagcaaaccaaaatacaggcatgactactacaacagtgccacagaagtggtactgacaatatttgctaacggtgttcctgctgatagtgtagtcattgattttggtgaacagatgttgagtgtatccattgaagttcctggtgaagaaccataccattttcagccccgtctgttttctaagattatccctgagaaatgcaaatatcaagtcttatccaccaaggtcgaaatacgccttgcaaaagctgagcaggtgacatggacaaccctggattatagtggaagaccaaagactgttccccagaagataagcacgccagctgaaacagccccaagaccttcatacccatcttcaaaggcgaaaaaagactgggataaactggaagctgaagtcaaaaaggaggagaaggaagaaaaacttgatggtgatgctgcattgaacaaattcttccgtgacatctacaaggatgctgatgaagatatgcggagggccatgatgaagtcattcgtggaatcaaatggcactgttctctcaaccaattggaaagatgttggagcaaagaaggtagaagggagcccccctgatggtatggagctcaagaagtgggaatactaaagtttggactgcccatcttttgtaaatccaggtcttggaaactatgacctaattccgtccacccatagtgccatgagcttgcttggttaagtctctgcttttgtaagctttctgtatgacagtctagcgtgtgtctgagtgctacttgccgtagcttttgatggacataggtatgctattatgtggtatcgaccgggaaccatctgtggtatcaaagacagcaaactataatgtatggaatgcctattctttttggcc

SEQ ID NO: 23221 - protein, 361 aa, Zea mays subsp. mays
  peptide (1)..(361): Ceres Seq. ID no. 13498874
  misc_feature (278)..(359): Pfam Name: Pfam Description:  SGS domain
  misc_feature (2)..(361): NCBI GI NO: 34912836 NR Description: Sgt1 [Oryza sativa (japonica cultivar-group)]
  misc_feature (1)..(361): NCBI GI NO: 17017306 NR Description: SGT1 [Hordeum vulgare]
  misc_feature (2)..(361): NCBI GI NO: 6581058 NR Description: Sgt1 [Oryza sativa]
  misc_feature (3)..(360): NCBI GI NO: 29468339 NR Description: SGT1 [Nicotiana benthamiana]
  misc_feature (3)..(361): NCBI GI NO: 40974917 NR Description: SGT1-like protein [Brassica oleracea]
  misc_feature (34)..(360): NCBI GI NO: 6468695 NR Description: putative protein phosphatase [Rubus idaeus]
  misc_feature (3)..(361): NCBI GI NO: 15237122 NR Description: phosphatase - related [Arabidopsis thaliana]
  misc_feature (3)..(360): NCBI GI NO: 17017308 NR Description: SGT1a [Arabidopsis thaliana]
  misc_feature (3)..(361): NCBI GI NO: 40974915 NR Description: SGT1-like protein [Brassica oleracea]
  misc_feature (3)..(360): NCBI GI NO: 15236528 NR Description: phosphatase - related [Arabidopsis thaliana]
MAASDLESKAKEAFVDDDFELATELYSQAIDAGPATADLYADRAQAHIKLGNYTEAVADANKAIELDPMMHKAYYRKGAACIKLEEYQTAKAALELGSSYASGDSRFARLLKECDERIAEESSQAPVKNVEATVAATIEDKEDFTNMENTPPVIEPPSKPKYRHDYYNSATEVVLTIFANGVPADSVVIDFGEQMLSVSIEVPGEEPYHFQPRLFSKIIPEKCKYQVLSTKVEIRLAKAEQVTWTTLDYSGRPKTVPQKISTPAETAPRPSYPSSKAKKDWDKLEAEVKKEEKEEKLDGDAALNKFFRDIYKDADEDMRRAMMKSFVESNGTVLSTNWKDVGAKKVEGSPPDGMELKKWEY

SEQ ID NO: 23222 - protein, 293 aa, Zea mays subsp. mays
  peptide (1)..(293): Ceres Seq. ID no. 13498875
  misc_feature (210)..(291): Pfam Name: Pfam Description:  SGS domain
  misc_feature (1)..(293): NCBI GI NO: 34912836 NR Description: Sgt1 [Oryza sativa (japonica cultivar-group)]
  misc_feature (1)..(293): NCBI GI NO: 17017306 NR Description: SGT1 [Hordeum vulgare]
  misc_feature (1)..(293): NCBI GI NO: 6581058 NR Description: Sgt1 [Oryza sativa]
  misc_feature (1)..(292): NCBI GI NO: 29468339 NR Description: SGT1 [Nicotiana benthamiana]
  misc_feature (1)..(293): NCBI GI NO: 40974917 NR Description: SGT1-like protein [Brassica oleracea]
  misc_feature (1)..(292): NCBI GI NO: 6468695 NR Description: putative protein phosphatase [Rubus idaeus]
  misc_feature (1)..(293): NCBI GI NO: 15237122 NR Description: phosphatase - related [Arabidopsis thaliana]
  misc_feature (1)..(292): NCBI GI NO: 17017308 NR Description: SGT1a [Arabidopsis thaliana]
  misc_feature (1)..(293): NCBI GI NO: 40974915 NR Description: SGT1-like protein [Brassica oleracea]
  misc_feature (1)..(292): NCBI GI NO: 15236528 NR Description: phosphatase - related [Arabidopsis thaliana]
MMHKAYYRKGAACIKLEEYQTAKAALELGSSYASGDSRFARLLKECDERIAEESSQAPVKNVEATVAATIEDKEDFTNMENTPPVIEPPSKPKYRHDYYNSATEVVLTIFANGVPADSVVIDFGEQMLSVSIEVPGEEPYHFQPRLFSKIIPEKCKYQVLSTKVEIRLAKAEQVTWTTLDYSGRPKTVPQKISTPAETAPRPSYPSSKAKKDWDKLEAEVKKEEKEEKLDGDAALNKFFRDIYKDADEDMRRAMMKSFVESNGTVLSTNWKDVGAKKVEGSPPDGMELKKWEY

SEQ ID NO: 23223 - protein, 292 aa, Zea mays subsp. mays
  peptide (1)..(292): Ceres Seq. ID no. 13498876
  misc_feature (209)..(290): Pfam Name: Pfam Description:  SGS domain
  misc_feature (1)..(292): NCBI GI NO: 34912836 NR Description: Sgt1 [Oryza sativa (japonica cultivar-group)]
  misc_feature (1)..(292): NCBI GI NO: 17017306 NR Description: SGT1 [Hordeum vulgare]
  misc_feature (1)..(292): NCBI GI NO: 6581058 NR Description: Sgt1 [Oryza sativa]
  misc_feature (1)..(291): NCBI GI NO: 29468339 NR Description: SGT1 [Nicotiana benthamiana]
  misc_feature (1)..(292): NCBI GI NO: 40974917 NR Description: SGT1-like protein [Brassica oleracea]
  misc_feature (1)..(291): NCBI GI NO: 6468695 NR Description: putative protein phosphatase [Rubus idaeus]
  misc_feature (1)..(292): NCBI GI NO: 15237122 NR Description: phosphatase - related [Arabidopsis thaliana]
  misc_feature (1)..(291): NCBI GI NO: 17017308 NR Description: SGT1a [Arabidopsis thaliana]
  misc_feature (1)..(292): NCBI GI NO: 40974915 NR Description: SGT1-like protein [Brassica oleracea]
  misc_feature (1)..(291): NCBI GI NO: 15236528 NR Description: phosphatase - related [Arabidopsis thaliana]
MHKAYYRKGAACIKLEEYQTAKAALELGSSYASGDSRFARLLKECDERIAEESSQAPVKNVEATVAATIEDKEDFTNMENTPPVIEPPSKPKYRHDYYNSATEVVLTIFANGVPADSVVIDFGEQMLSVSIEVPGEEPYHFQPRLFSKIIPEKCKYQVLSTKVEIRLAKAEQVTWTTLDYSGRPKTVPQKISTPAETAPRPSYPSSKAKKDWDKLEAEVKKEEKEEKLDGDAALNKFFRDIYKDADEDMRRAMMKSFVESNGTVLSTNWKDVGAKKVEGSPPDGMELKKWEY

SEQ ID NO: 23224 - DNA, 1814 bp, Zea mays subsp. mays
  misc_feature (1)..(1814): Ceres Seq. ID no. 12373981
cccgtgatgttttaaatttcggatcctgtgttgcagctttgaagtgcatgaacgagacatgcagagccgcgtgacgtgagttctccccataccgcccgatctcggagatgtgcgcgtaccacatgaggctcaccggcggcgcggcctttgtgctccttatggttctcctcttgctgctgtatgcggtgcacaggtggaggaaccctcgatgcagcggccgcctgccgccgggctccatgggcctgccgctcgtcggagagacggctgcagttcttctcccctgaagcttccttggacgtcccgcgtttcgtccgacacagactgcaaaggtacggcccgatcttcaagacgagcctggtgggccacccggtcgtcgtctccgcggacgaggagctgaactacatggtgttccagcaggaggggcagctgttccagagctggtacccggactccttcgtggagatcctaggcagggacaacgtcggggagcagcagggcgccatgttcaagtacctcaagaacatggtgctccgctacttcggcccggagagcctcagggagtccatgctccgcgacgtcgagcacgccgtcagcagctcgctctgtacctggtcaaccttgccgtcggtcgagctgaaagaggccgtctccacgatggtgttcgatctttcagcgaacaagcttctcagcttggagccgtcgaggtccaagattctgaggaggagcttcttcgacttcgttcgagggctcatctcgttccctctgtatttgccaggaacagcatactactcatgcatgaagggccggcagagcgcaatggaggtgctgcaggaagtgctagcggagaggaagagactggtacaggtgcccggagcaggaggaggcgccatggaaacgatacgtcgccatggcggcgacttcttggacctcgtcatccaggaagtcacgaaggagaagccgctcgtgacggacagaatggcgctcgacctgatgttcgtgctcctgttcgccagcttccacacgacgtcgctagcgctcactctggctgtcaagctgcttgcagaccaccctcgcgtcctggaagagctcacggtggagcatgaagcgattctgaatgaacgtaacgcgcgccatggatctgatggaatcacatggatggagtacaagtctatgacgttcacatcccaggtcatcaacgagactgtccgattagccaatattgcgcctggcatcttcagaaaggcactgaaagatatacagttcagagggttcacaattccagcaggatggggagtgatggtctgtcctccagcagtgcacttgaacccagtcatttacccagatcccctcatctttaaccctacaaggttcaaggataaaccggagataaaccgtgggtcaagacacttcatggcattcggaggaggcctccgatcctgtgttggagcagacttcagcaagttgcaaatgtctattttcctccatttccttgtcactagatacaggtggagaagtcttgggggtggcaaggtagtccgaaatccggggctagaattccctgatggctaccacattcaaatacggcactggaattaattctgctaatactacagagtcaatctcgttgtgcattcaagccaagaaacggacggagggaaagaattactgttaggctctatttggatcttttgaattgaatttcattctaataattataattcaaacacagattaattagaataatataattttatgtgagatatatttttatagtactgttggtcaccatataaatttattataagcttatatcc

SEQ ID NO: 23225 - protein, 471 aa, Zea mays subsp. mays
  peptide (1)..(471): Ceres Seq. ID no. 12373982
  misc_feature (193)..(467): Pfam Name: Pfam Description:  Cytochrome P450
  misc_feature (30)..(469): NCBI GI NO: 38567916 NR Description: OSJNBa0088I22.12
  misc_feature (29)..(467): NCBI GI NO: 20520627 NR Description: putative cytochrome P450
  misc_feature (29)..(467): NCBI GI NO: 38567920 NR Description: OSJNBa0088I22.16
  misc_feature (29)..(467): NCBI GI NO: 30682922 NR Description: cytochrome P450, putative [Arabidopsis thaliana]
  misc_feature (29)..(467): NCBI GI NO: 9502380 NR Description: T12C24.27 [Arabidopsis thaliana]
  misc_feature (29)..(467): NCBI GI NO: 18483228 NR Description: putative cytochrome P450-like protein
  misc_feature (59)..(467): NCBI GI NO: 27764671 NR Description: putative hydroxylase
  misc_feature (30)..(398): NCBI GI NO: 38567917 NR Description: OSJNBa0088I22.13
  misc_feature (29)..(467): NCBI GI NO: 15222806 NR Description: cytochrome P450, putative; protein id: At1g55940.1
  misc_feature (31)..(467): NCBI GI NO: 30695347 NR Description: cytochrome p450 family [Arabidopsis thaliana]
MRCTGGGTLDAAAACRRAPWACRSSERRLQFFSPEASLDVPRFVRHRLQRYGPIFKTSLVGHPVVVSADEELNYMVFQQEGQLFQSWYPDSFVEILGRDNVGEQQGAMFKYLKNMVLRYFGPESLRESMLRDVEHAVSSSLCTWSTLPSVELKEAVSTMVFDLSANKLLSLEPSRSKILRRSFFDFVRGLISFPLYLPGTAYYSCMKGRQSAMEVLQEVLAERKRLVQVPGAGGGAMETIRRHGGDFLDLVIQEVTKEKPLVTDRMALDLMFVLLFASFHTTSLALTLAVKLLADHPRVLEELTVEHEAILNERNARHGSDGITWMEYKSMTFTSQVINETVRLANIAPGIFRKALKDIQFRGFTIPAGWGVMVCPPAVHLNPVIYPDPLIFNPTRFKDKPEINRGSRHFMAFGGGLRSCVGADFSKLQMSIFLHFLVTRYRWRSLGGGKVVRNPGLEFPDGYHIQIRHWN

SEQ ID NO: 23226 - protein, 397 aa, Zea mays subsp. mays
  peptide (1)..(397): Ceres Seq. ID no. 12373983
  misc_feature (119)..(393): Pfam Name: Pfam Description:  Cytochrome P450
  misc_feature (1)..(395): NCBI GI NO: 38567916 NR Description: OSJNBa0088I22.12
  misc_feature (1)..(393): NCBI GI NO: 20520627 NR Description: putative cytochrome P450
  misc_feature (1)..(393): NCBI GI NO: 38567920 NR Description: OSJNBa0088I22.16
  misc_feature (1)..(393): NCBI GI NO: 30682922 NR Description: cytochrome P450, putative [Arabidopsis thaliana]
  misc_feature (1)..(393): NCBI GI NO: 9502380 NR Description: T12C24.27 [Arabidopsis thaliana]
  misc_feature (1)..(393): NCBI GI NO: 18483228 NR Description: putative cytochrome P450-like protein
  misc_feature (1)..(393): NCBI GI NO: 27764671 NR Description: putative hydroxylase
  misc_feature (1)..(324): NCBI GI NO: 38567917 NR Description: OSJNBa0088I22.13
  misc_feature (1)..(393): NCBI GI NO: 15222806 NR Description: cytochrome P450, putative; protein id: At1g55940.1
  misc_feature (1)..(393): NCBI GI NO: 30695347 NR Description: cytochrome p450 family [Arabidopsis thaliana]
MVFQQEGQLFQSWYPDSFVEILGRDNVGEQQGAMFKYLKNMVLRYFGPESLRESMLRDVEHAVSSSLCTWSTLPSVELKEAVSTMVFDLSANKLLSLEPSRSKILRRSFFDFVRGLISFPLYLPGTAYYSCMKGRQSAMEVLQEVLAERKRLVQVPGAGGGAMETIRRHGGDFLDLVIQEVTKEKPLVTDRMALDLMFVLLFASFHTTSLALTLAVKLLADHPRVLEELTVEHEAILNERNARHGSDGITWMEYKSMTFTSQVINETVRLANIAPGIFRKALKDIQFRGFTIPAGWGVMVCPPAVHLNPVIYPDPLIFNPTRFKDKPEINRGSRHFMAFGGGLRSCVGADFSKLQMSIFLHFLVTRYRWRSLGGGKVVRNPGLEFPDGYHIQIRHWN

SEQ ID NO: 23227 - protein, 364 aa, Zea mays subsp. mays
  peptide (1)..(364): Ceres Seq. ID no. 12373984
  misc_feature (86)..(360): Pfam Name: Pfam Description:  Cytochrome P450
  misc_feature (1)..(362): NCBI GI NO: 38567916 NR Description: OSJNBa0088I22.12
  misc_feature (1)..(360): NCBI GI NO: 20520627 NR Description: putative cytochrome P450
  misc_feature (1)..(360): NCBI GI NO: 38567920 NR Description: OSJNBa0088I22.16
  misc_feature (1)..(360): NCBI GI NO: 30682922 NR Description: cytochrome P450, putative [Arabidopsis thaliana]
  misc_feature (1)..(360): NCBI GI NO: 9502380 NR Description: T12C24.27 [Arabidopsis thaliana]
  misc_feature (1)..(360): NCBI GI NO: 18483228 NR Description: putative cytochrome P450-like protein
  misc_feature (1)..(360): NCBI GI NO: 27764671 NR Description: putative hydroxylase
  misc_feature (1)..(291): NCBI GI NO: 38567917 NR Description: OSJNBa0088I22.13
  misc_feature (1)..(360): NCBI GI NO: 15222806 NR Description: cytochrome P450, putative; protein id: At1g55940.1
  misc_feature (1)..(360): NCBI GI NO: 30695347 NR Description: cytochrome p450 family [Arabidopsis thaliana]
MFKYLKNMVLRYFGPESLRESMLRDVEHAVSSSLCTWSTLPSVELKEAVSTMVFDLSANKLLSLEPSRSKILRRSFFDFVRGLISFPLYLPGTAYYSCMKGRQSAMEVLQEVLAERKRLVQVPGAGGGAMETIRRHGGDFLDLVIQEVTKEKPLVTDRMALDLMFVLLFASFHTTSLALTLAVKLLADHPRVLEELTVEHEAILNERNARHGSDGITWMEYKSMTFTSQVINETVRLANIAPGIFRKALKDIQFRGFTIPAGWGVMVCPPAVHLNPVIYPDPLIFNPTRFKDKPEINRGSRHFMAFGGGLRSCVGADFSKLQMSIFLHFLVTRYRWRSLGGGKVVRNPGLEFPDGYHIQIRHWN

SEQ ID NO: 23228 - DNA, 1475 bp, Zea mays subsp. mays
  misc_feature (1)..(1475): Ceres Seq. ID no. 12348910
gcgaattgcaattgcagaacggaattccattccagaaccatccttcgctcgcccccgccgccgcgctgccgcggccatatacggcgaaagccctattcgtgcccgcggccgtggatagataggtcagtgacgattgagaaacccgtagtcggagcagaggaggggtagaagatggtgttcggtcaggtggtgatcggcccgccgggctccggcaagaccacctactgcaacggcatgtcgcagttcctctccctcctcggcaggaaggttgcggttgtcaatttggaccctgcaaatgacgcattgccatatgagtgtgccataaacatcgaggacctcataaaactcagtgatgtcatgtctgagcattcgcttggccctaatggagggcttgtgtattgcatggattacttggagaagaatattgattggcttgaagaaaaactgaagccttttattgaagatcactatctgttatttgatttttctggtcaagtggaattgttcttccttcactcaaatgcaagaagtgttattaataaactcatcaaaaagatggacttgaggcttactgctgttcaccttattgatgcccatttatgctgtgatcctggaaagtatgtcattgctttgcttctttcactatcaacgatgctacacttggaattgccacatatcaatgtcttgtcaaagattgacctcattgagaactatggaaatttagcattcaaccttgacttctacactgatgtccaagatctttcttatttgcaatatcatcttgagcaggatccccgctcagccaagtacaggaaactgactaaggagctctgtgatgtgattgatgattttggtttagtcaatttttcaactttggacatccaggacaaggaaagtgttggcaatcttgtgaagctgattgacaagagcaacggatatatattttcttctattgacagtagtgctgttgagttcagcaaaattgcagcggcgcctcttgattgggactactacagaacagcggaagtgcaggagaagtacatgaaagatgatgagttcgcgcaactgacaagcaggatgcaatgaggctggcggtgccgtcccgcacccccactttggtagcacaacgggtgaacggtgaaccacgacagtgtggcacgtcgaacttcggttgccagaacgatgtgaaacctgtctaaattcatgtagctcagttgtaggtgtttactgaagctaattgctatagttgcctgatcttctgggagtaccctttgggcagtaaaaaaatgcacttgtcacctgtgaccaaccggtcaggtcctgttttgtttgttcgcttcaacttcgaactgcatcagctacaatctttagagacaaaatattgtagtgtttggactactgcagttgtaatctttaaagacaacattgtagaagcagtagaaatcagtatggattaaagccaaacgaataagctt

SEQ ID NO: 23229 - protein, 304 aa, Zea mays subsp. mays
  peptide (1)..(304): Ceres Seq. ID no. 12348911
  misc_feature (7)..(256): Pfam Name: Pfam Description:  Conserved hypothetical ATP binding protein
  misc_feature (1)..(282): NCBI GI NO: 15242226 NR Description: putative protein; protein id: At5g22370.1
  misc_feature (3)..(298): NCBI GI NO: 34871770 NR Description: similar to expressed sequence AI838661
  misc_feature (3)..(304): NCBI GI NO: 19527098 NR Description: expressed sequence AI838661 [Mus musculus]
  misc_feature (3)..(291): NCBI GI NO: 33303753 NR Description: hypothetical protein FLJ10349
  misc_feature (3)..(291): NCBI GI NO: 40254895 NR Description: hypothetical protein FLJ10349 [Homo sapiens]
  misc_feature (3)..(291): NCBI GI NO: 7981259 NR Description: dJ50O24
  misc_feature (3)..(291): NCBI GI NO: 14250403 NR Description: Unknown (protein for MGC:9656) [Homo sapiens]
  misc_feature (3)..(291): NCBI GI NO: 7022323 NR Description: unnamed protein product [Homo sapiens]
  misc_feature (1)..(295): NCBI GI NO: 6324836 NR Description: Protein required for cell viability; Yor262wp
  misc_feature (1)..(294): NCBI GI NO: 27735409 NR Description: Similar to expressed sequence AI838661
MVFGQVVIGPPGSGKTTYCNGMSQFLSLLGRKVAVVNLDPANDALPYECAINIEDLIKLSDVMSEHSLGPNGGLVYCMDYLEKNIDWLEEKLKPFIEDHYLLFDFSGQVELFFLHSNARSVINKLIKKMDLRLTAVHLIDAHLCCDPGKYVIALLLSLSTMLHLELPHINVLSKIDLIENYGNLAFNLDFYTDVQDLSYLQYHLEQDPRSAKYRKLTKELCDVIDDFGLVNFSTLDIQDKESVGNLVKLIDKSNGYIFSSIDSSAVEFSKIAAAPLDWDYYRTAEVQEKYMKDDEFAQLTSRMQ

SEQ ID NO: 23230 - protein, 283 aa, Zea mays subsp. mays
  peptide (1)..(283): Ceres Seq. ID no. 12348912
  misc_feature (1)..(235): Pfam Name: Pfam Description:  Conserved hypothetical ATP binding protein
  misc_feature (1)..(261): NCBI GI NO: 15242226 NR Description: putative protein; protein id: At5g22370.1
  misc_feature (1)..(277): NCBI GI NO: 34871770 NR Description: similar to expressed sequence AI838661
  misc_feature (1)..(283): NCBI GI NO: 19527098 NR Description: expressed sequence AI838661 [Mus musculus]
  misc_feature (1)..(270): NCBI GI NO: 33303753 NR Description: hypothetical protein FLJ10349
  misc_feature (1)..(270): NCBI GI NO: 40254895 NR Description: hypothetical protein FLJ10349 [Homo sapiens]
  misc_feature (1)..(270): NCBI GI NO: 7981259 NR Description: dJ50O24
  misc_feature (1)..(270): NCBI GI NO: 14250403 NR Description: Unknown (protein for MGC:9656) [Homo sapiens]
  misc_feature (1)..(270): NCBI GI NO: 7022323 NR Description: unnamed protein product [Homo sapiens]
  misc_feature (1)..(274): NCBI GI NO: 6324836 NR Description: Protein required for cell viability; Yor262wp
  misc_feature (1)..(273): NCBI GI NO: 27735409 NR Description: Similar to expressed sequence AI838661
MSQFLSLLGRKVAVVNLDPANDALPYECAINIEDLIKLSDVMSEHSLGPNGGLVYCMDYLEKNIDWLEEKLKPFIEDHYLLFDFSGQVELFFLHSNARSVINKLIKKMDLRLTAVHLIDAHLCCDPGKYVIALLLSLSTMLHLELPHINVLSKIDLIENYGNLAFNLDFYTDVQDLSYLQYHLEQDPRSAKYRKLTKELCDVIDDFGLVNFSTLDIQDKESVGNLVKLIDKSNGYIFSSIDSSAVEFSKIAAAPLDWDYYRTAEVQEKYMKDDEFAQLTSRMQ

SEQ ID NO: 23231 - protein, 242 aa, Zea mays subsp. mays
  peptide (1)..(242): Ceres Seq. ID no. 12348913
  misc_feature (1)..(194): Pfam Name: Pfam Description:  Conserved hypothetical ATP binding protein
  misc_feature (1)..(220): NCBI GI NO: 15242226 NR Description: putative protein; protein id: At5g22370.1
  misc_feature (1)..(236): NCBI GI NO: 34871770 NR Description: similar to expressed sequence AI838661
  misc_feature (1)..(242): NCBI GI NO: 19527098 NR Description: expressed sequence AI838661 [Mus musculus]
  misc_feature (1)..(229): NCBI GI NO: 33303753 NR Description: hypothetical protein FLJ10349
  misc_feature (1)..(229): NCBI GI NO: 40254895 NR Description: hypothetical protein FLJ10349 [Homo sapiens]
  misc_feature (1)..(229): NCBI GI NO: 7981259 NR Description: dJ50O24
  misc_feature (1)..(229): NCBI GI NO: 14250403 NR Description: Unknown (protein for MGC:9656) [Homo sapiens]
  misc_feature (1)..(229): NCBI GI NO: 7022323 NR Description: unnamed protein product [Homo sapiens]
  misc_feature (1)..(233): NCBI GI NO: 6324836 NR Description: Protein required for cell viability; Yor262wp
  misc_feature (1)..(232): NCBI GI NO: 27735409 NR Description: Similar to expressed sequence AI838661
MSEHSLGPNGGLVYCMDYLEKNIDWLEEKLKPFIEDHYLLFDFSGQVELFFLHSNARSVINKLIKKMDLRLTAVHLIDAHLCCDPGKYVIALLLSLSTMLHLELPHINVLSKIDLIENYGNLAFNLDFYTDVQDLSYLQYHLEQDPRSAKYRKLTKELCDVIDDFGLVNFSTLDIQDKESVGNLVKLIDKSNGYIFSSIDSSAVEFSKIAAAPLDWDYYRTAEVQEKYMKDDEFAQLTSRMQ

SEQ ID NO: 23232 - DNA, 1469 bp, Zea mays subsp. mays
  misc_feature (1)..(1469): Ceres Seq. ID no. 12411125
gcacgagaccattacctagaacatcctaatcgaaaaaaaaagagcgggcagtactggtggcccgtggccctggtggggcaccactaggctgctacgtgttcttccccaaatcggcctcacagccctcactgttgcaaagtagggactagggagtacctgctctctcgctctcgcccatcccattgccttcatcatcaaatcgccaccgaaaattccccccaaaaaacaataagcacttgttcatcatcatcagagtaaacacagcagaaccctagcgcgccgttcctccgacgactcacatcccacccactcacccaccccatggcggccaagctctccaccagcgccgacgccccggcctcggtgcggctctccgcagcagcgcaggcggctgcgatccagccctcctctccgcgcttcttcttctcctcgctggccgggaccaacccggcctccccgcatcgccgcatcgccattgccgtcgatctctccgacgagtccgccttcgccgtcaagtgggccgtgcagaactacctccgccccggggacgccgtcgtgctgctccacgtgcgccccacctccgttctctacggcgccgactggggttccatcccggtctccgtcgctgacgaggccgacgctgccgaggacgccgccgccgccgccgagggcggcccctccgaggaggagctgcagaagaagcgggaggaggaatacgacgccttcacctctaccaaggcgcaggacctcgcgcagccgcttgtcgatgcccagatccccttcaagatccatgtcgtcaaggaccacgacatgaaggagcgcctctgcctcgaggctgagcgccttggcctgtccgctatgatcatggggagccgcggttttggggcctctcggaaaggcggcaaggggaggcttgggagtgttagtgattactgtgtacaccactgtgtatgccccgttgtggttgttcgctaccctgatgatgctgcagatgccagtggagatgcatcaggggcgacagatgagttgcacactgtaccagaggacgaacctgtttatcacgatgcgcctgaggtgcagaaagaaaactgaggcaatggccgcaagcagctgaagaacgaaggaaaacatggggcctgtagtgactagtgaggcgattctgtgtatctgaaagatgggactggctgtttatcttcgcttctgtatatcaactgcgtgtcatgatcagtggctgcttcgcgtttgagtttcatatcggagtcctagatcatcgaagtctttgttggtttgcttgtgagatgtttatgttgtgaacaccatgtagagtactcttctcgtaggtagaagctgccttgaagatgcttatgcagttatgctggggtctgggctctcttgtcttgttttgcggagccggtgatgagctttattttctcaaatggtagttatctacacggtattatgtgctctgt

SEQ ID NO: 23233 - protein, 256 aa, Zea mays subsp. mays
  peptide (1)..(256): Ceres Seq. ID no. 12411126
  misc_feature (46)..(217): Pfam Name: Pfam Description:  Universal stress protein family
  misc_feature (8)..(254): NCBI GI NO: 34910112 NR Description: B1100D10.31
  misc_feature (1)..(256): NCBI GI NO: 28971968 NR Description: OSJNBb0041B22.10
  misc_feature (1)..(255): NCBI GI NO: 33146953 NR Description: CHP-rich zinc finger protein-like
  misc_feature (41)..(253): NCBI GI NO: 25402657 NR Description: protein T23J18.3 [imported] - Arabidopsis thaliana
  misc_feature (41)..(253): NCBI GI NO: 30682187 NR Description: expressed protein [Arabidopsis thaliana]
  misc_feature (28)..(235): NCBI GI NO: 7486798 NR Description: hypothetical protein M4I22
  misc_feature (28)..(235): NCBI GI NO: 18416966 NR Description: putative protein; protein id: At4g27320
  misc_feature (36)..(221): NCBI GI NO: 8885586 NR Description: gene_id:F24B18
  misc_feature (36)..(221): NCBI GI NO: 18423628 NR Description: putative protein; protein id: At5g54430
  misc_feature (138)..(227): NCBI GI NO: 15232490 NR Description: CHP-rich zinc finger protein, putative
MAAKLSTSADAPASVRLSAAAQAAAIQPSSPRFFFSSLAGTNPASPHRRIAIAVDLSDESAFAVKWAVQNYLRPGDAVVLLHVRPTSVLYGADWGSIPVSVADEADAAEDAAAAAEGGPSEEELQKKREEEYDAFTSTKAQDLAQPLVDAQIPFKIHVVKDHDMKERLCLEAERLGLSAMIMGSRGFGASRKGGKGRLGSVSDYCVHHCVCPVVVVRYPDDAADASGDASGATDELHTVPEDEPVYHDAPEVQKEN

SEQ ID NO: 23234 - DNA, 1211 bp, Zea mays subsp. mays
  misc_feature (1)..(1211): Ceres Seq. ID no. 12411121
acacatttcaatcactcgcttcccatgaattcgctcgctttccctagctgcccgtcagcattgacgcccgcctccaccaccgcccccgcgtcctctccctttccctcgccgcgtataaagattcgctgcccgcgacaagaagatgcagctcattaccacctccgcctccgcgatcgaagctcctcacaaaccgttatcgtcgccatggcagccgccgcgcctgcaagctccgtgaaggaagtgctgccatctcccctgacctccgcctccgagccccctcccctcttcgatggcaccaccaggctgtacgttgcctatcattgcccgtacgcgcagcgcgcttggattgccaggaactacaagggtttgcaggacaagattaagatagtcgccatcgatcttgctgacaggccaacatggtacaaggagaaggtttatccagaaaacaaggtgccttctctggagcacaacaaccaggtgaaaggtgagagtttggatctggtcaagtacattgacagcaactttgaaggcccatcgttgctcccagaggatccttcaaaaaagcagttcgctgaggagctgcttgcatatactgatgcatttaacaaagcattatacttttgtatagtctccaaggaagatgtgtctgaggaagctgtcgctgctttggataaaatagaagacgccctcgggaaattcaacgagggtccattctcccttggtcagttcagtctggtggacattgcgtatgtaccattcatcgagaggtttcagatattctattccaacataaagaactatgatattacaaagggcagacccaaccttcagaagttcattgaggaagtggacaagattgatgcatacacacagactaaacaggacccacagtttttacttgagcagacaaagaagcggcttgggattgcttaaagcttgcggccgaggatgactctcgacagaaataccagcatagtagatcgacacttgtttagtcatttgtgtgcttgaataatgaatactacatatatggttttcaataagacatggtcctctatactgggttgtacttctgaaaacaaactagttgtcctgatattatagctttcgtggtgtgtttacgtcactgtatatgaaagggtggggagagagaatgatatgccatgtattctgtcaaatgtttttttataatgtcaagagctctgactttt

SEQ ID NO: 23235 - protein, 310 aa, Zea mays subsp. mays
  peptide (1)..(310): Ceres Seq. ID no. 12411122
  misc_feature (67)..(310): NCBI GI NO: 24796806 NR Description: putative glutathione S-transferase
  misc_feature (70)..(310): NCBI GI NO: 7939638 NR Description: XIG [Oryza sativa]
  misc_feature (70)..(307): NCBI GI NO: 24796810 NR Description: putative glutathione S-transferase
  misc_feature (70)..(310): NCBI GI NO: 7489703 NR Description: safener-induced In2.1-like protein - wheat
  misc_feature (70)..(310): NCBI GI NO: 1352460 NR Description: IN2-1 PROTEIN
  misc_feature (78)..(306): NCBI GI NO: 11385579 NR Description: In2-1 protein [Glycine max]
  misc_feature (74)..(307): NCBI GI NO: 15233164 NR Description: In2-1 protein, putative; protein id: At3g55040.1
  misc_feature (73)..(306): NCBI GI NO: 15241956 NR Description: In2-1 protein, putative; protein id: At5g02790
  misc_feature (73)..(306): NCBI GI NO: 21537338 NR Description: In2-1 protein [Arabidopsis thaliana]
  misc_feature (108)..(308): NCBI GI NO: 24796802 NR Description: putative dehydroascorbate reductase
THFNHSLPMNSLAFPSCPSALTPASTTAPASSPFPSPRIKIRCPRQEDAAHYHLRLRDRSSSQTVIVAMAAAAPASSVKEVLPSPLTSASEPPPLFDGTTRLYVAYHCPYAQRAWIARNYKGLQDKIKIVAIDLADRPTWYKEKVYPENKVPSLEHNNQVKGESLDLVKYIDSNFEGPSLLPEDPSKKQFAEELLAYTDAFNKALYFCIVSKEDVSEEAVAALDKIEDALGKFNEGPFSLGQFSLVDIAYVPFIERFQIFYSNIKNYDITKGRPNLQKFIEEVDKIDAYTQTKQDPQFLLEQTKKRLGIA

SEQ ID NO: 23236 - protein, 302 aa, Zea mays subsp. mays
  peptide (1)..(302): Ceres Seq. ID no. 12411123
  misc_feature (59)..(302): NCBI GI NO: 24796806 NR Description: putative glutathione S-transferase
  misc_feature (62)..(302): NCBI GI NO: 7939638 NR Description: XIG [Oryza sativa]
  misc_feature (62)..(299): NCBI GI NO: 24796810 NR Description: putative glutathione S-transferase
  misc_feature (62)..(302): NCBI GI NO: 7489703 NR Description: safener-induced In2.1-like protein - wheat
  misc_feature (62)..(302): NCBI GI NO: 1352460 NR Description: IN2-1 PROTEIN
  misc_feature (70)..(298): NCBI GI NO: 11385579 NR Description: In2-1 protein [Glycine max]
  misc_feature (66)..(299): NCBI GI NO: 15233164 NR Description: In2-1 protein, putative; protein id: At3g55040.1
  misc_feature (65)..(298): NCBI GI NO: 15241956 NR Description: In2-1 protein, putative; protein id: At5g02790
  misc_feature (65)..(298): NCBI GI NO: 21537338 NR Description: In2-1 protein [Arabidopsis thaliana]
  misc_feature (100)..(300): NCBI GI NO: 24796802 NR Description: putative dehydroascorbate reductase
MNSLAFPSCPSALTPASTTAPASSPFPSPRIKIRCPRQEDAAHYHLRLRDRSSSQTVIVAMAAAAPASSVKEVLPSPLTSASEPPPLFDGTTRLYVAYHCPYAQRAWIARNYKGLQDKIKIVAIDLADRPTWYKEKVYPENKVPSLEHNNQVKGESLDLVKYIDSNFEGPSLLPEDPSKKQFAEELLAYTDAFNKALYFCIVSKEDVSEEAVAALDKIEDALGKFNEGPFSLGQFSLVDIAYVPFIERFQIFYSNIKNYDITKGRPNLQKFIEEVDKIDAYTQTKQDPQFLLEQTKKRLGIA

SEQ ID NO: 23237 - protein, 242 aa, Zea mays subsp. mays
  peptide (1)..(242): Ceres Seq. ID no. 12411124
  misc_feature (1)..(242): NCBI GI NO: 24796806 NR Description: putative glutathione S-transferase
  misc_feature (2)..(242): NCBI GI NO: 7939638 NR Description: XIG [Oryza sativa]
  misc_feature (2)..(239): NCBI GI NO: 24796810 NR Description: putative glutathione S-transferase
  misc_feature (2)..(242): NCBI GI NO: 7489703 NR Description: safener-induced In2.1-like protein - wheat
  misc_feature (2)..(242): NCBI GI NO: 1352460 NR Description: IN2-1 PROTEIN
  misc_feature (10)..(238): NCBI GI NO: 11385579 NR Description: In2-1 protein [Glycine max]
  misc_feature (6)..(239): NCBI GI NO: 15233164 NR Description: In2-1 protein, putative; protein id: At3g55040.1
  misc_feature (5)..(238): NCBI GI NO: 15241956 NR Description: In2-1 protein, putative; protein id: At5g02790
  misc_feature (5)..(238): NCBI GI NO: 21537338 NR Description: In2-1 protein [Arabidopsis thaliana]
  misc_feature (40)..(240): NCBI GI NO: 24796802 NR Description: putative dehydroascorbate reductase
MAAAAPASSVKEVLPSPLTSASEPPPLFDGTTRLYVAYHCPYAQRAWIARNYKGLQDKIKIVAIDLADRPTWYKEKVYPENKVPSLEHNNQVKGESLDLVKYIDSNFEGPSLLPEDPSKKQFAEELLAYTDAFNKALYFCIVSKEDVSEEAVAALDKIEDALGKFNEGPFSLGQFSLVDIAYVPFIERFQIFYSNIKNYDITKGRPNLQKFIEEVDKIDAYTQTKQDPQFLLEQTKKRLGIA

SEQ ID NO: 23238 - DNA, 1877 bp, Zea mays subsp. mays
  misc_feature (1)..(1877): Ceres Seq. ID no. 12411117
aaaatacaactcagtctcagtcccccaccacatccgctccccgccttccgcttccctaccccccgcatcacctaccaacgccgacaccatgggggccttcgcgaaggaggagcaccagttcctcgccgagctcggcctcgcgcagcgcaacccgggcgcgttcgcatgcggtgcgtggggcggctcaggtcccaccgtcacctccacgagcccgaccaacaatcaggtcatcgcagaggtcgtggaggcgtccgtgcacgactacgaggagggcatgcgcgcctgcttcgacgccgctaagacatggatggcgattcctgctccaaagcgaggagagatcgttaggcaaatcggtgatgcactgagagcaaagctccatcaccttggcaggcttgtgtcacttgagatggggaaaattcttcctgaagggatcggtgaggttcaggaaatcattgacatgtgtgattatgctgtgggactaagtcgccaactaaatggatccattataccatctgaacgaccaaaccatatgatgatggaggtgtggaatccccttggagttgtgggtgttataacggcatttaatttcccttgtgctgtgcttggttggaatgcttgcattgctttggtctgtggaaattgtgtcgtctggaaaggtgctccaacaactccactgatcactattgcaatgacaaaaatagtggctagtgtattggagaagaacaacttaccaggcgcaatttttacatctttttgtgggggcactgaaattggtcaagcaattgcccttgacattaggatacctttggtttcattcactggaagtacaagggctggtctaatggttcagcaacaagttagtgcaagatttggtaaatgccttcttgaacttagcggaaacaatgccatcattgttatggatgatgcagatatccagctagctgtgcgatctgtcttgttcgctgctgttggtacagcaggacaacgctgcactacatgtcgtaggctgattcttcatgagaacatatatcaaaccttccttgatcagcttgttgaggtatacaaacaagtccgaattggggatccgttggagaaaggcaccttactgggaccactgcacactcctgcttcaaaagagaactttttgaaaggcattcagactatcaaatctcagggagggaaaatcctttttggaggatctgccattgaatcagaaggaaactttgtgcaaccaacaattgtggaaattacaccttctgcaccagttgtgaaagaagaactctttggtcctgtcctttatgctatgaaatttcagaccttgaaggaagcaattgaaatcaataactctgttcctcaaggattgagcagttctatatttacaaagaggccagatattatttttaagtggctcgggccccatggtagtgattgtggcatagtgaatgtgaacatacctactaatggtgctgaaattggtggagcatttggtggagaaaaagcaactggtggtggacgagaagcagggagtgattcctggaagcagtacatgaggagggcgacttgtacaatcaactatgggagcgagctacctctagcccagggaatcaattttggttaatcctgcagaaatgttgcccgtggatctcggtgttttctgcagacgtggatgccgtacggaaagaactgatgcaaccgcatttgagatctcagcagacttgagcagcatttattggcgtcagttgtgaaacttaaactgcaggagcatcttgtacataaataaaataagatgtttgttgctcgtgggccgtggcacattttggtaccggtgtccagtctactaataaaatctaatgcaaaacggtcataactacattctc

SEQ ID NO: 23239 - protein, 538 aa, Zea mays subsp. mays
  peptide (1)..(538): Ceres Seq. ID no. 12411118
  misc_feature (30)..(538): NCBI GI NO: 11995457 NR Description: aldehyde dehydrogenase [Oryza sativa]
  misc_feature (30)..(538): NCBI GI NO: 25090068 NR Description: Aldehyde dehydrogenase family 7 member A1
  misc_feature (30)..(538): NCBI GI NO: 15221042 NR Description: aldehyde dehydrogenase homolog, putative
  misc_feature (30)..(538): NCBI GI NO: 29893325 NR Description: aldehyde dehydrogenase family 7 member A1
  misc_feature (40)..(538): NCBI GI NO: 118514 NR Description: Aldehyde dehydrogenase family 7 member A1
  misc_feature (30)..(520): NCBI GI NO: 25090053 NR Description: Aldehyde dehydrogenase family 7 member A1
  misc_feature (33)..(538): NCBI GI NO: 19525534 NR Description: aldehyde dehydrogenase Aldh7B6 [Tortula ruralis]
  misc_feature (37)..(537): NCBI GI NO: 27882244 NR Description: Similar to aldehyde dehydrogenase 7 family
  misc_feature (37)..(537): NCBI GI NO: 25090047 NR Description: Putative aldehyde dehydrogenase family 7 member A1homolog
  misc_feature (37)..(537): NCBI GI NO: 20070418 NR Description: aldehyde dehydrogenase family 7, member A1
KYNSVSVPHHIRSPPSASLPPASPTNADTMGAFAKEEHQFLAELGLAQRNPGAFACGAWGGSGPTVTSTSPTNNQVIAEVVEASVHDYEEGMRACFDAAKTWMAIPAPKRGEIVRQIGDALRAKLHHLGRLVSLEMGKILPEGIGEVQEIIDMCDYAVGLSRQLNGSIIPSERPNHMMMEVWNPLGVVGVITAFNFPCAVLGWNACIALVCGNCVVWKGAPTTPLITIAMTKIVASVLEKNNLPGAIFTSFCGGTEIGQAIALDIRIPLVSFTGSTRAGLMVQQQVSARFGKCLLELSGNNAIIVMDDADIQLAVRSVLFAAVGTAGQRCTTCRRLILHENIYQTFLDQLVEVYKQVRIGDPLEKGTLLGPLHTPASKENFLKGIQTIKSQGGKILFGGSAIESEGNFVQPTIVEITPSAPVVKEELFGPVLYAMKFQTLKEAIEINNSVPQGLSSSIFTKRPDIIFKWLGPHGSDCGIVNVNIPTNGAEIGGAFGGEKATGGGREAGSDSWKQYMRRATCTINYGSELPLAQGINFG

SEQ ID NO: 23240 - protein, 509 aa, Zea mays subsp. mays
  peptide (1)..(509): Ceres Seq. ID no. 12411119
  misc_feature (1)..(509): NCBI GI NO: 11995457 NR Description: aldehyde dehydrogenase [Oryza sativa]
  misc_feature (1)..(509): NCBI GI NO: 25090068 NR Description: Aldehyde dehydrogenase family 7 member A1
  misc_feature (1)..(509): NCBI GI NO: 15221042 NR Description: aldehyde dehydrogenase homolog, putative
  misc_feature (1)..(509): NCBI GI NO: 29893325 NR Description: aldehyde dehydrogenase family 7 member A1
  misc_feature (11)..(509): NCBI GI NO: 118514 NR Description: Aldehyde dehydrogenase family 7 member A1
  misc_feature (1)..(491): NCBI GI NO: 25090053 NR Description: Aldehyde dehydrogenase family 7 member A1
  misc_feature (4)..(509): NCBI GI NO: 19525534 NR Description: aldehyde dehydrogenase Aldh7B6 [Tortula ruralis]
  misc_feature (8)..(508): NCBI GI NO: 27882244 NR Description: Similar to aldehyde dehydrogenase 7 family
  misc_feature (8)..(508): NCBI GI NO: 25090047 NR Description: Putative aldehyde dehydrogenase family 7 member A1homolog
  misc_feature (8)..(508): NCBI GI NO: 20070418 NR Description: aldehyde dehydrogenase family 7, member A1
MGAFAKEEHQFLAELGLAQRNPGAFACGAWGGSGPTVTSTSPTNNQVIAEVVEASVHDYEEGMRACFDAAKTWMAIPAPKRGEIVRQIGDALRAKLHHLGRLVSLEMGKILPEGIGEVQEIIDMCDYAVGLSRQLNGSIIPSERPNHMMMEVWNPLGVVGVITAFNFPCAVLGWNACIALVCGNCVVWKGAPTTPLITIAMTKIVASVLEKNNLPGAIFTSFCGGTEIGQAIALDIRIPLVSFTGSTRAGLMVQQQVSARFGKCLLELSGNNAIIVMDDADIQLAVRSVLFAAVGTAGQRCTTCRRLILHENIYQTFLDQLVEVYKQVRIGDPLEKGTLLGPLHTPASKENFLKGIQTIKSQGGKILFGGSAIESEGNFVQPTIVEITPSAPVVKEELFGPVLYAMKFQTLKEAIEINNSVPQGLSSSIFTKRPDIIFKWLGPHGSDCGIVNVNIPTNGAEIGGAFGGEKATGGGREAGSDSWKQYMRRATCTINYGSELPLAQGINFG

SEQ ID NO: 23241 - protein, 447 aa, Zea mays subsp. mays
  peptide (1)..(447): Ceres Seq. ID no. 12411120
  misc_feature (1)..(447): NCBI GI NO: 11995457 NR Description: aldehyde dehydrogenase [Oryza sativa]
  misc_feature (1)..(447): NCBI GI NO: 25090068 NR Description: Aldehyde dehydrogenase family 7 member A1
  misc_feature (1)..(447): NCBI GI NO: 15221042 NR Description: aldehyde dehydrogenase homolog, putative
  misc_feature (1)..(447): NCBI GI NO: 29893325 NR Description: aldehyde dehydrogenase family 7 member A1
  misc_feature (1)..(447): NCBI GI NO: 118514 NR Description: Aldehyde dehydrogenase family 7 member A1
  misc_feature (1)..(429): NCBI GI NO: 25090053 NR Description: Aldehyde dehydrogenase family 7 member A1
  misc_feature (1)..(447): NCBI GI NO: 19525534 NR Description: aldehyde dehydrogenase Aldh7B6 [Tortula ruralis]
  misc_feature (1)..(446): NCBI GI NO: 27882244 NR Description: Similar to aldehyde dehydrogenase 7 family
  misc_feature (1)..(446): NCBI GI NO: 25090047 NR Description: Putative aldehyde dehydrogenase family 7 member A1homolog
  misc_feature (1)..(446): NCBI GI NO: 20070418 NR Description: aldehyde dehydrogenase family 7, member A1
MRACFDAAKTWMAIPAPKRGEIVRQIGDALRAKLHHLGRLVSLEMGKILPEGIGEVQEIIDMCDYAVGLSRQLNGSIIPSERPNHMMMEVWNPLGVVGVITAFNFPCAVLGWNACIALVCGNCVVWKGAPTTPLITIAMTKIVASVLEKNNLPGAIFTSFCGGTEIGQAIALDIRIPLVSFTGSTRAGLMVQQQVSARFGKCLLELSGNNAIIVMDDADIQLAVRSVLFAAVGTAGQRCTTCRRLILHENIYQTFLDQLVEVYKQVRIGDPLEKGTLLGPLHTPASKENFLKGIQTIKSQGGKILFGGSAIESEGNFVQPTIVEITPSAPVVKEELFGPVLYAMKFQTLKEAIEINNSVPQGLSSSIFTKRPDIIFKWLGPHGSDCGIVNVNIPTNGAEIGGAFGGEKATGGGREAGSDSWKQYMRRATCTINYGSELPLAQGINFG

SEQ ID NO: 23242 - DNA, 1660 bp, Zea mays subsp. mays
  misc_feature (1)..(1660): Ceres Seq. ID no. 12407366
gcacgagaccattacctagaacatcctaatcgaaaagcagaaccatggccggcgaggaacaccagcagcacagcagccactacggccaccacttcctggtggtggcctacggcatgcagggccacgtcaacccagcgcgcgctctggctcaccgcctcgccaagctcagcgacgtcgtaggcggctgccccatcctcgccacgctctccctgcacgtcgccgcccaccgccgcatgttcccggcacagctggacccggacgccgccggcgaggaggatgaggaggaggccagcgacggcgtcatctcctacgtgccccactcggacagcttcgacgacggctccttgcccagaacccccgaggactgggcccgcagacgccgcgcgagccgcgagagcctctccgccatgctcgcccgcttcgccggcggcgggcggcccgtcacctgcgtggtgtgcacgctgctggtgcccgcggcggtggacgccgcgacgcgccacggcgtccccttcgccgtgtactggatccagccggccaccgtcctcgccgccgcgtaccactacttccacggctacggcgagaccgtcgccgccgccgacccggcgcacgaggtgagcctgcctgggctacgccgccctctccgggtccgggacttcccgtcctacctggtggacacgacgggcagcccgctggccaggtccgtcgtcgggatgttccgagagctgttcgagagcgtggaccggtggcggcctaaagtcctcgtgaacacgttcgacgagctggaggcgggcgtgctctcggagatgaagcgacacctcgacgtgttcgccgtcggtcccatggtcgccggcgccggtggtggctcgggctcctctggcgcgtcaaacgacgaaggacggatccatctgtacaggcacgacgacgccgacaggaagaggtacatggagtggctcggagcgcagccggagagctcggtggtgtacgtgtcgttcgggagcatagcgacgcacaccttgcagcagatggaggaggttgtccaagggctgctgcaggctggacggccgtacttgctggccgcgcgcagctggcacgggctcgaggacgacggtgcgcgccgcgtcctggacaacgccgcccagagcagcggcggccgtgggacggtcgtggactggtgcgaccagccggaggtcctggcgcacccggccgtcgggtgcttcgtctcgcactgcggctggaactcgacgttggaggccgtggcggccggcgtgccgctcgtcggcgtgcccagcctgtttgaccagccaacgaacacgtacttggtggtggaggagtggggggtcggcgtcagaggggagcgtgacggtgagggcgtgttagctgcgacggagctggcgagatgcgttgagctggtcatgggtcaaggtacaaaagcaacggcgataagggagagagtaaaggctttgagagagatggcgcagcaggcggcacgagcaggtgggccggcggagagaaaccttgaggactttgttaactctgtcggtgatagcttccgtcctgtcggaatttcagttgcggaaaaaactgatgaatctcgtacatgttcatcagaatgacttccgtacagatattatttttatctacattctacaaggagtacctg

SEQ ID NO: 23243 - protein, 522 aa, Zea mays subsp. mays
  peptide (1)..(522): Ceres Seq. ID no. 12407367
  misc_feature (35)..(498): Pfam Name: Pfam Description:  UDP-glucoronosyl and UDP-glucosyl transferase
  misc_feature (1)..(498): NCBI GI NO: 34906162 NR Description: putative anthocyanin 5-O-glucosyltransferase
  misc_feature (224)..(496): NCBI GI NO: 2149127 NR Description: UDP-glucose: indole-3-acetate beta-D-glucosyltransferase
  misc_feature (10)..(267): NCBI GI NO: 2149127 NR Description: UDP-glucose: indole-3-acetate beta-D-glucosyltransferase
  misc_feature (87)..(502): NCBI GI NO: 6683052 NR Description: anthocyanin 5-O-glucosyltransferase
  misc_feature (224)..(496): NCBI GI NO: 18414478 NR Description: glucosyltransferase like protein
  misc_feature (10)..(267): NCBI GI NO: 18414478 NR Description: glucosyltransferase like protein
  misc_feature (50)..(501): NCBI GI NO: 14192682 NR Description: cold-induced glucosyl transferase
  misc_feature (50)..(499): NCBI GI NO: 20146093 NR Description: glucosyltransferase NTGT2 [Nicotiana tabacum]
  misc_feature (71)..(495): NCBI GI NO: 40714353 NR Description: anthocyanin 5-O-glucosyltransferase
  misc_feature (87)..(498): NCBI GI NO: 4115559 NR Description: UDP-glucose:anthocysnin 5-O-glucosyltransferase
MAGEEHQQHSSHYGHHFLVVAYGMQGHVNPARALAHRLAKLSDVVGGCPILATLSLHVAAHRRMFPAQLDPDAAGEEDEEEASDGVISYVPHSDSFDDGSLPRTPEDWARRRRASRESLSAMLARFAGGGRPVTCVVCTLLVPAAVDAATRHGVPFAVYWIQPATVLAAAYHYFHGYGETVAAADPAHEVSLPGLRRPLRVRDFPSYLVDTTGSPLARSVVGMFRELFESVDRWRPKVLVNTFDELEAGVLSEMKRHLDVFAVGPMVAGAGGGSGSSGASNDEGRIHLYRHDDADRKRYMEWLGAQPESSVVYVSFGSIATHTLQQMEEVVQGLLQAGRPYLLAARSWHGLEDDGARRVLDNAAQSSGGRGTVVDWCDQPEVLAHPAVGCFVSHCGWNSTLEAVAAGVPLVGVPSLFDQPTNTYLVVEEWGVGVRGERDGEGVLAATELARCVELVMGQGTKATAIRERVKALREMAQQAARAGGPAERNLEDFVNSVGDSFRPVGISVAEKTDESRTCSSE

SEQ ID NO: 23244 - protein, 499 aa, Zea mays subsp. mays
  peptide (1)..(499): Ceres Seq. ID no. 12407368
  misc_feature (12)..(475): Pfam Name: Pfam Description:  UDP-glucoronosyl and UDP-glucosyl transferase
  misc_feature (1)..(475): NCBI GI NO: 34906162 NR Description: putative anthocyanin 5-O-glucosyltransferase
  misc_feature (201)..(473): NCBI GI NO: 2149127 NR Description: UDP-glucose: indole-3-acetate beta-D-glucosyltransferase
  misc_feature (1)..(244): NCBI GI NO: 2149127 NR Description: UDP-glucose: indole-3-acetate beta-D-glucosyltransferase
  misc_feature (64)..(479): NCBI GI NO: 6683052 NR Description: anthocyanin 5-O-glucosyltransferase
  misc_feature (201)..(473): NCBI GI NO: 18414478 NR Description: glucosyltransferase like protein
  misc_feature (1)..(244): NCBI GI NO: 18414478 NR Description: glucosyltransferase like protein
  misc_feature (27)..(478): NCBI GI NO: 14192682 NR Description: cold-induced glucosyl transferase
  misc_feature (27)..(476): NCBI GI NO: 20146093 NR Description: glucosyltransferase NTGT2 [Nicotiana tabacum]
  misc_feature (48)..(472): NCBI GI NO: 40714353 NR Description: anthocyanin 5-O-glucosyltransferase
  misc_feature (64)..(475): NCBI GI NO: 4115559 NR Description: UDP-glucose:anthocysnin 5-O-glucosyltransferase
MQGHVNPARALAHRLAKLSDVVGGCPILATLSLHVAAHRRMFPAQLDPDAAGEEDEEEASDGVISYVPHSDSFDDGSLPRTPEDWARRRRASRESLSAMLARFAGGGRPVTCVVCTLLVPAAVDAATRHGVPFAVYWIQPATVLAAAYHYFHGYGETVAAADPAHEVSLPGLRRPLRVRDFPSYLVDTTGSPLARSVVGMFRELFESVDRWRPKVLVNTFDELEAGVLSEMKRHLDVFAVGPMVAGAGGGSGSSGASNDEGRIHLYRHDDADRKRYMEWLGAQPESSVVYVSFGSIATHTLQQMEEVVQGLLQAGRPYLLAARSWHGLEDDGARRVLDNAAQSSGGRGTVVDWCDQPEVLAHPAVGCFVSHCGWNSTLEAVAAGVPLVGVPSLFDQPTNTYLVVEEWGVGVRGERDGEGVLAATELARCVELVMGQGTKATAIRERVKALREMAQQAARAGGPAERNLEDFVNSVGDSFRPVGISVAEKTDESRTCSSE

SEQ ID NO: 23245 - protein, 459 aa, Zea mays subsp. mays
  peptide (1)..(459): Ceres Seq. ID no. 12407369
  misc_feature (1)..(435): Pfam Name: Pfam Description:  UDP-glucoronosyl and UDP-glucosyl transferase
  misc_feature (1)..(435): NCBI GI NO: 34906162 NR Description: putative anthocyanin 5-O-glucosyltransferase
  misc_feature (161)..(433): NCBI GI NO: 2149127 NR Description: UDP-glucose: indole-3-acetate beta-D-glucosyltransferase
  misc_feature (1)..(204): NCBI GI NO: 2149127 NR Description: UDP-glucose: indole-3-acetate beta-D-glucosyltransferase
  misc_feature (24)..(439): NCBI GI NO: 6683052 NR Description: anthocyanin 5-O-glucosyltransferase
  misc_feature (161)..(433): NCBI GI NO: 18414478 NR Description: glucosyltransferase like protein
  misc_feature (1)..(204): NCBI GI NO: 18414478 NR Description: glucosyltransferase like protein
  misc_feature (1)..(438): NCBI GI NO: 14192682 NR Description: cold-induced glucosyl transferase
  misc_feature (1)..(436): NCBI GI NO: 20146093 NR Description: glucosyltransferase NTGT2 [Nicotiana tabacum]
  misc_feature (8)..(432): NCBI GI NO: 40714353 NR Description: anthocyanin 5-O-glucosyltransferase
  misc_feature (24)..(435): NCBI GI NO: 4115559 NR Description: UDP-glucose:anthocysnin 5-O-glucosyltransferase
MFPAQLDPDAAGEEDEEEASDGVISYVPHSDSFDDGSLPRTPEDWARRRRASRESLSAMLARFAGGGRPVTCVVCTLLVPAAVDAATRHGVPFAVYWIQPATVLAAAYHYFHGYGETVAAADPAHEVSLPGLRRPLRVRDFPSYLVDTTGSPLARSVVGMFRELFESVDRWRPKVLVNTFDELEAGVLSEMKRHLDVFAVGPMVAGAGGGSGSSGASNDEGRIHLYRHDDADRKRYMEWLGAQPESSVVYVSFGSIATHTLQQMEEVVQGLLQAGRPYLLAARSWHGLEDDGARRVLDNAAQSSGGRGTVVDWCDQPEVLAHPAVGCFVSHCGWNSTLEAVAAGVPLVGVPSLFDQPTNTYLVVEEWGVGVRGERDGEGVLAATELARCVELVMGQGTKATAIRERVKALREMAQQAARAGGPAERNLEDFVNSVGDSFRPVGISVAEKTDESRTCSSE

SEQ ID NO: 23246 - DNA, 1144 bp, Zea mays subsp. mays
  misc_feature (1)..(1144): Ceres Seq. ID no. 12412127
ctcggaaggatggcggcggcggtttccagggccatctgcgtccagaaaccgggctccaaatgcagcagggacagggaagcgacctccttcgcccgccgaacggtcgcggcgccgaggcccccgcgcgccaaagccgccggcgtcatccgctccgactccggcgcgggacggggccagcagtgctcgccgctgagggccgtcgttgacgccgcgtcgatacagacgaccaaaaagagcaaatggcgcctcagtctcccgcgcgcaagctacaacggttcagggtccggtgctgcggcggctgagccgtctaccgtgggagacaccttggaacgggaggagggcggcggcacagaggcaggcgcttcggctgatgagtcatccaaccggaagcagccgccccctgttgaccccaagattgagaaggacctcaagaaggtagttcaaaagactgcggcaacctttgcaccaagggcgtccacgaaaacaaagaaccctgctgtccctggaagtaccctgtacaccgtctttgaagtccagggctatgtttccatgctgttgggcggagcactttccttcaatctcatattcccatcgaatgagccagacatctggaggttaatgggaatgtggtccatttggatgttcactataccttcgcttcgggctcgtgactgctccaataaagagaaagaagctctcaactacttatttctcctgattcctctgatcaacgttatgattccattcttcgtgaagtcctttgctgttgtttggtcagcagatacagttgctttcttcgtgatgtatgcatggaagcttggatggctgcaaaggttgaaatgaagatttttggtgtgctctcttggtgatgtgtgtatgaaagcttggatatttggtttgaaaaggtggagtcggtagcttttttgctgagagaaacatttgtcctcaaaattttcacatcttttggagggagctgcatgattagtttattccaagatttagttcatatagccttttatatcttgtgtatatgcagggagtatgaaaaaacagcctttcacatttaagtgataaatatatgtacctgaagtctgaacatttttgttgactacgaactgaacagctctaaatggttcttgatttc

SEQ ID NO: 23247 - protein, 280 aa, Zea mays subsp. mays
  peptide (1)..(280): Ceres Seq. ID no. 12412128
  misc_feature (130)..(278): NCBI GI NO: 18407519 NR Description: expressed protein; protein id: At2g48070
  misc_feature (130)..(276): NCBI GI NO: 25370849 NR Description: hypothetical protein At2g48070
  misc_feature (4)..(106): NCBI GI NO: 257805 NR Description: orthophosphate dikinase; PPDK [Zea mays]
  misc_feature (4)..(106): NCBI GI NO: 67155 NR Description: pyruvate, phosphate dikinase (EC 2
  misc_feature (4)..(78): NCBI GI NO: 22450 NR Description: pyruvate,orthophosphate dikinase precursor
  misc_feature (4)..(106): NCBI GI NO: 168586 NR Description: pyruvate,orthophosphate dikinase
  misc_feature (4)..(106): NCBI GI NO: 130385 NR Description: Pyruvate,phosphate dikinase, chloroplast precursor
  misc_feature (4)..(106): NCBI GI NO: 6274486 NR Description: pyruvate orthophosphate dikinase
  misc_feature (4)..(106): NCBI GI NO: 30385668 NR Description: pyruvate phosphate dikinase [Sorghum bicolor]
LGRMAAAVSRAICVQKPGSKCSRDREATSFARRTVAAPRPPRAKAAGVIRSDSGAGRGQQCSPLRAVVDAASIQTTKKSKWRLSLPRASYNGSGSGAAAAEPSTVGDTLEREEGGGTEAGASADESSNRKQPPPVDPKIEKDLKKVVQKTAATFAPRASTKTKNPAVPGSTLYTVFEVQGYVSMLLGGALSFNLIFPSNEPDIWRLMGMWSIWMFTIPSLRARDCSNKEKEALNYLFLLIPLINVMIPFFVKSFAVVWSADTVAFFVMYAWKLGWLQRLK

SEQ ID NO: 23248 - protein, 277 aa, Zea mays subsp. mays
  peptide (1)..(277): Ceres Seq. ID no. 12412129
  misc_feature (127)..(275): NCBI GI NO: 18407519 NR Description: expressed protein; protein id: At2g48070
  misc_feature (127)..(273): NCBI GI NO: 25370849 NR Description: hypothetical protein At2g48070
  misc_feature (1)..(103): NCBI GI NO: 257805 NR Description: orthophosphate dikinase; PPDK [Zea mays]
  misc_feature (1)..(103): NCBI GI NO: 67155 NR Description: pyruvate, phosphate dikinase (EC 2
  misc_feature (1)..(75): NCBI GI NO: 22450 NR Description: pyruvate,orthophosphate dikinase precursor
  misc_feature (1)..(103): NCBI GI NO: 168586 NR Description: pyruvate,orthophosphate dikinase
  misc_feature (1)..(103): NCBI GI NO: 130385 NR Description: Pyruvate,phosphate dikinase, chloroplast precursor
  misc_feature (1)..(103): NCBI GI NO: 6274486 NR Description: pyruvate orthophosphate dikinase
  misc_feature (1)..(103): NCBI GI NO: 30385668 NR Description: pyruvate phosphate dikinase [Sorghum bicolor]
MAAAVSRAICVQKPGSKCSRDREATSFARRTVAAPRPPRAKAAGVIRSDSGAGRGQQCSPLRAVVDAASIQTTKKSKWRLSLPRASYNGSGSGAAAAEPSTVGDTLEREEGGGTEAGASADESSNRKQPPPVDPKIEKDLKKVVQKTAATFAPRASTKTKNPAVPGSTLYTVFEVQGYVSMLLGGALSFNLIFPSNEPDIWRLMGMWSIWMFTIPSLRARDCSNKEKEALNYLFLLIPLINVMIPFFVKSFAVVWSADTVAFFVMYAWKLGWLQRLK

SEQ ID NO: 23249 - DNA, 1389 bp, Zea mays subsp. mays
  misc_feature (1)..(1389): Ceres Seq. ID no. 12411109
actcgtccacacgcgaaggcacccagcagcagccgctcccgaactgaggaaccctaccacgcgggcgacggcggtgcgcgaccggtgacgggacagcggcagcgccccctcctccatctgctggtcccaccgcctcctgacgttatccgatactgccaatccccctcttcgccgttgacggagcttaccgaggaaagaagggcagggccatggcgggagccttcgctttccgcctcgtgcctcgcctcgccgcagagccggcggcgagggggaagggtggcggaggaggagccaaccgcgacgccggcagcagggcgctggtgtcaaagaaaccaaacaagcagcagcatttgtggatcaggaaggagacagctgggtcagggaagaaggctctccgtcttattgatgctgtttcgaagttaccaaatgaaagagaagctatttatggtgcattggacaagtggagtgctttcgaacctgaatttcctattatagcagcagcaaaagctttggggatgttgaaaaggcgacgacaatggttaagaataatccaggtaaccaagtggttgatgagcaaaggacaggtgctgacatggacaacatatgatacacttctgctcgcacttcttatggataaacgggtagacgaagctgagtcagtttggaacactgtaatacagactcatacccgctcagtgcccaagaggttgttctctcggatgatcttgatctacgacattcaccagcgcccagataaagttttggagatattcgcggatatggaggagttaggtgtgcgtccggacgaggatacagcgagacggatcggaaaggcattcgtggcttctggccaagaagaaaaggagaagcatgtcctcgagaaatacttgaagaagtggaagtacatccatttcaacggcgagcgcgttcgcgtgcggagggacggaccattggcgtagtgcccgttttctgaaaaatgctcgaacctatcagagtatcgtgccggtaggcggtagggcaggggagatgctgttactgccgctgtgacagtcaggcacatggatatcggcactagtccctatcctatgtatgtggaatggaacggaaactggagattggttccatggctctagcctgtggaggagacgagcggatggggggtggctggctactaccggcgagatagtgatttaataggcactacataggcgtccagtgattgcgatggctttaacttgcgtatgtgtctgcggaatggtcccgtgctatttcggtgacttgtgcttgtggaattgtgaacacccactggaaagtgtatatcatgagagggacgatacctgacgtctgggcccatggcttgctgatttcacgcaacgaaccattttctgc

SEQ ID NO: 23250 - protein, 249 aa, Zea mays subsp. mays
  peptide (1)..(249): Ceres Seq. ID no. 12411110
  misc_feature (166)..(200): Pfam Name: Pfam Description:  PPR repeat
  misc_feature (1)..(248): NCBI GI NO: 34393638 NR Description: pentatricopeptide
  misc_feature (38)..(244): NCBI GI NO: 18415213 NR Description: putative protein; protein id: At4g18975.1
  misc_feature (38)..(238): NCBI GI NO: 7485419 NR Description: hypothetical protein F13C5
  misc_feature (44)..(243): NCBI GI NO: 18415645 NR Description: putative protein; protein id: At4g21190
  misc_feature (44)..(243): NCBI GI NO: 7486589 NR Description: hypothetical protein F7J7
  misc_feature (68)..(243): NCBI GI NO: 34909686 NR Description: B1131G08.1
  misc_feature (29)..(226): NCBI GI NO: 30678929 NR Description: expressed protein [Arabidopsis thaliana]
  misc_feature (29)..(226): NCBI GI NO: 18390413 NR Description: expressed protein; protein id: At1g04590
  misc_feature (71)..(226): NCBI GI NO: 25406795 NR Description: hypothetical protein
MAGAFAFRLVPRLAAEPAARGKGGGGGANRDAGSRALVSKKPNKQQHLWIRKETAGSGKKALRLIDAVSKLPNEREAIYGALDKWSAFEPEFPIIAAAKALGMLKRRRQWLRIIQVTKWLMSKGQVLTWTTYDTLLLALLMDKRVDEAESVWNTVIQTHTRSVPKRLFSRMILIYDIHQRPDKVLEIFADMEELGVRPDEDTARRIGKAFVASGQEEKEKHVLEKYLKKWKYIHFNGERVRVRRDGPLA

SEQ ID NO: 23251 - protein, 164 aa, Zea mays subsp. mays
  peptide (1)..(164): Ceres Seq. ID no. 12411111
TRPHAKAPSSSRSRTEEPYHAGDGGARPVTGQRQRPLLHLLVPPPPDVIRYCQSPSSPLTELTEERRAGPWREPSLSASCLASPQSRRRGGRVAEEEPTATPAAGRWCQRNQTSSSICGSGRRQLGQGRRLSVLLMLFRSYQMKEKLFMVHWTSGVLSNLNFLL

SEQ ID NO: 23252 - protein, 147 aa, Zea mays subsp. mays
  peptide (1)..(147): Ceres Seq. ID no. 12411112
  misc_feature (64)..(98): Pfam Name: Pfam Description:  PPR repeat
  misc_feature (1)..(146): NCBI GI NO: 34393638 NR Description: pentatricopeptide
  misc_feature (1)..(142): NCBI GI NO: 18415213 NR Description: putative protein; protein id: At4g18975.1
  misc_feature (1)..(136): NCBI GI NO: 7485419 NR Description: hypothetical protein F13C5
  misc_feature (1)..(141): NCBI GI NO: 18415645 NR Description: putative protein; protein id: At4g21190
  misc_feature (1)..(141): NCBI GI NO: 7486589 NR Description: hypothetical protein F7J7
  misc_feature (1)..(141): NCBI GI NO: 34909686 NR Description: B1131G08.1
  misc_feature (1)..(124): NCBI GI NO: 30678929 NR Description: expressed protein [Arabidopsis thaliana]
  misc_feature (1)..(124): NCBI GI NO: 18390413 NR Description: expressed protein; protein id: At1g04590
  misc_feature (1)..(124): NCBI GI NO: 25406795 NR Description: hypothetical protein
MLKRRRQWLRIIQVTKWLMSKGQVLTWTTYDTLLLALLMDKRVDEAESVWNTVIQTHTRSVPKRLFSRMILIYDIHQRPDKVLEIFADMEELGVRPDEDTARRIGKAFVASGQEEKEKHVLEKYLKKWKYIHFNGERVRVRRDGPLA

SEQ ID NO: 23253 - DNA, 895 bp, Zea mays subsp. mays
  misc_feature (1)..(895): Ceres Seq. ID no. 12351296
aagtcaagctgagcacaagtgatcgaacaactacagtacatacactctatcgatctctgtgaattaatttagttattaactcgatcatggcgcgcccccaaaacaaccagaaccccagggtgttcctggtcctcaacatcggcggcgtgacggttggccgcgtcgtcatcgagctgttcgccgacaaggtgcccaagacggcggagaacttccggctgctgtgcaccggagagcgcagcgtggggaagtggtccggcaagcgcctgcactacaagggcgcggcgttccaccgcgtggtgcccgggttcatgtgccagggcggcgacatcacggcgggcaacggcacgggcggcgagtctgcgatcggtgacgcccggtacttcgccgacgaggcgttcggagccgtccggcacgatggcgccggcgtggtgtccatggccaacgccgggcccaacaccaacggatctcagttcttcatcaccttcgccgacgcgccgtggctggacggccgccacgtcgcgttcggccgcgtcgtggatggcatggacgctctgcgtgccatcgaaaaggccgggtccatcagtggcaggactatgaggcatgtcgtcatcgccgactgcggcgagctcaagcactaagccgccatgtcctaattattcaggatcatacttactctctaccaaatctgacactatctagtaggtatacgtatacttatatattattatgattgttgtttgttgctgctgctgttacaagatgcgtttgagactaggtagatgatgagcatatatgcgtgattattttcgggtcttgatataaattctcaagtgtgagacaggttaattctgtgtaattgtaataccatggttaatgaagttgctcgctgttattg

SEQ ID NO: 23254 - protein, 183 aa, Zea mays subsp. mays
  peptide (1)..(183): Ceres Seq. ID no. 12351297
  misc_feature (6)..(181): NCBI GI NO: 37531200 NR Description: putative cyclophilin
  misc_feature (9)..(181): NCBI GI NO: 11270316 NR Description: peptidylprolyl isomerase (EC 5.2.1.8)
  misc_feature (9)..(181): NCBI GI NO: 18076088 NR Description: cyclophilin [Ricinus communis]
  misc_feature (10)..(181): NCBI GI NO: 11270318 NR Description: peptidylprolyl isomerase (EC 5.2.1.8) CYP18
  misc_feature (9)..(181): NCBI GI NO: 3334157 NR Description: Peptidyl-prolyl cis-trans isomerase
  misc_feature (9)..(181): NCBI GI NO: 18376589 NR Description: putative cyclosporin A-binding protein
  misc_feature (9)..(181): NCBI GI NO: 23394388 NR Description: peptidylprolyl isomerase [Phytophthora infestans]
  misc_feature (9)..(181): NCBI GI NO: 1084455 NR Description: peptidylprolyl isomerase (EC 5.2.1.8) Cyp2 - rice
  misc_feature (9)..(181): NCBI GI NO: 21886603 NR Description: peptidylprolyl isomerase (cyclophilin)
  misc_feature (9)..(181): NCBI GI NO: 11270322 NR Description: peptidylprolyl isomerase (EC 5.2.1.8)
MARPQNNQNPRVFLVLNIGGVTVGRVVIELFADKVPKTAENFRLLCTGERSVGKWSGKRLHYKGAAFHRVVPGFMCQGGDITAGNGTGGESAIGDARYFADEAFGAVRHDGAGVVSMANAGPNTNGSQFFITFADAPWLDGRHVAFGRVVDGMDALRAIEKAGSISGRTMRHVVIADCGELKH

SEQ ID NO: 23255 - protein, 109 aa, Zea mays subsp. mays
  peptide (1)..(109): Ceres Seq. ID no. 12351298
  misc_feature (1)..(107): NCBI GI NO: 37531200 NR Description: putative cyclophilin
  misc_feature (1)..(107): NCBI GI NO: 11270316 NR Description: peptidylprolyl isomerase (EC 5.2.1.8)
  misc_feature (1)..(107): NCBI GI NO: 18076088 NR Description: cyclophilin [Ricinus communis]
  misc_feature (1)..(107): NCBI GI NO: 11270318 NR Description: peptidylprolyl isomerase (EC 5.2.1.8) CYP18
  misc_feature (1)..(107): NCBI GI NO: 3334157 NR Description: Peptidyl-prolyl cis-trans isomerase
  misc_feature (1)..(107): NCBI GI NO: 18376589 NR Description: putative cyclosporin A-binding protein
  misc_feature (1)..(107): NCBI GI NO: 23394388 NR Description: peptidylprolyl isomerase [Phytophthora infestans]
  misc_feature (1)..(107): NCBI GI NO: 1084455 NR Description: peptidylprolyl isomerase (EC 5.2.1.8) Cyp2 - rice
  misc_feature (1)..(107): NCBI GI NO: 21886603 NR Description: peptidylprolyl isomerase (cyclophilin)
  misc_feature (1)..(107): NCBI GI NO: 11270322 NR Description: peptidylprolyl isomerase (EC 5.2.1.8)
MCQGGDITAGNGTGGESAIGDARYFADEAFGAVRHDGAGVVSMANAGPNTNGSQFFITFADAPWLDGRHVAFGRVVDGMDALRAIEKAGSISGRTMRHVVIADCGELKH

SEQ ID NO: 23256 - DNA, 1818 bp, Zea mays subsp. mays
  misc_feature (1)..(1818): Ceres Seq. ID no. 12355481
acagtcccactcctctctctctcgcgctctctctctttcatcgccaccaccgccgtgaaatccgcacgcgtgcttcctgtcgatttttgagctgtgactgtgagcgccatggccgtggaggctgtgtccggaaatggcaccgaggcagtggccgcggcgccggcgaaggaggtgagcaccaagcaggcgtctttccgggaggagagcaacttcctggacgatctcaaggagagcgagcgtaaggcgcttgccgagctccgcgacaaggtcgaggcggccatcgtggagggcaagctgttcgacgacggtaagccggaggtgaaggagaaggagaaggagaaggaggaggccaagaagaaggcagtggagaagaaagatgagcagcccgaagccgaggagaagggagaggaggatgacaagaaggaggccgacgccgaggaggagaagaaggaaggcgtggaggaaggggagaagaaggaaggccaggaggaaggggagaaggaggaggccgaggaggagagcggagacgacaccaagcaggaggccaaggaagaggaagccgacgacaaggcggcggcgaaggagccggagacggcggccgttgtcgtcgacaaggacatcgcgctgtggggcgtgcctttgctccctagcaagggcgacgaggccaccgacgtggtgctcctcaagttcctccgcgcgcgcgacttcaaggccggcgccgcgttcgagatgctccgccgcacgctccgctggcgcagggactggaccggcttcagctccggcgccgagtccgacgccgacctccccgaggagctcgcgggcgcgtgctacctcgacggcgcagaccacgagggccacccggtgtgctacaacgcgctgggcgtgttcgcggacgacgccgtgtacaagaaggcgctgggcaccgaggaaggcaaggccaggttcctccggtggcgggtgcgcgccatggagcgccacgtcgccgagctggacctgaggcccggcggcgtcgcgtcgctgctgcaggtgatcgacctcaggaactcgccggggccggccaagaaggacttccgagtcgccgtcaagcaggtgctcgacctgttccaggacaactaccccgagctcgtcgcgagaaacatcttggtcaacgtgccgttctggtactacgcgttcagcaccctgttctacccgttcctgacgcagaggacgaagagcaagttcgtcgttgctcgcccgtcaaaggtcaccgagaccctcctcaagtacattccgatcgaggccatcccggtgaagtacggcggcctgaagcgcgacggcgacaccgagttctcggcggacgacggcgaggtcgcggaggtcaccgtcaagggaagctccacggagaccatcgagatcgaagctactgaggctgatgccacgctgacatgggacctgactgtgctggggtgggaggtgaactacaaggaggagttcgtgccggcggacgagggctcctacactatcatcgtcaggaaaggcaagaagatggcgtccggcgaggaggcggtccgcaactcgttccgcgccggcgagccgggcaaggtcgtgctcaccgtccagaacacctcgcacaggaagaagaaggtgctgttcaggcacaaggccaagagcgcctgcgccaagaagtgctgagaggctaagaaatttgggagtgaaattggttgtggatttcaatattcgttacattctttgtgtgtgtgtaaggagagagagagagaacattgttcgctgattatttgaggtggttgttgcagcaaaaatgcaaagagttttcgattg

SEQ ID NO: 23257 - protein, 520 aa, Zea mays subsp. mays
  peptide (1)..(520): Ceres Seq. ID no. 12355482
  misc_feature (239)..(398): Pfam Name: Pfam Description:  CRAL/TRIO domain
  misc_feature (25)..(514): NCBI GI NO: 18397616 NR Description: expressed protein; protein id: At1g30690
  misc_feature (25)..(514): NCBI GI NO: 14334978 NR Description: unknown protein [Arabidopsis thaliana]
  misc_feature (12)..(514): NCBI GI NO: 34907288 NR Description: contains ESTsAU093915
  misc_feature (37)..(511): NCBI GI NO: 8894548 NR Description: hypothetical protein [Cicer arietinum]
  misc_feature (1)..(516): NCBI GI NO: 30680992 NR Description: expressed protein [Arabidopsis thaliana]
  misc_feature (38)..(513): NCBI GI NO: 15218383 NR Description: cytosolic factor, putative; protein id:At1g72160
  misc_feature (1)..(429): NCBI GI NO: 25407487 NR Description: hypothetical protein AT4g09160
  misc_feature (437)..(516): NCBI GI NO: 25407487 NR Description: hypothetical protein AT4g09160
  misc_feature (140)..(515): NCBI GI NO: 15230555 NR Description: putative protein; protein id: At3g51670
  misc_feature (122)..(513): NCBI GI NO: 15081614 NR Description: At1g72160/T9N14_8 [Arabidopsis thaliana]
MAVEAVSGNGTEAVAAAPAKEVSTKQASFREESNFLDDLKESERKALAELRDKVEAAIVEGKLFDDGKPEVKEKEKEKEEAKKKAVEKKDEQPEAEEKGEEDDKKEADAEEEKKEGVEEGEKKEGQEEGEKEEAEEESGDDTKQEAKEEEADDKAAAKEPETAAVVVDKDIALWGVPLLPSKGDEATDVVLLKFLRARDFKAGAAFEMLRRTLRWRRDWTGFSSGAESDADLPEELAGACYLDGADHEGHPVCYNALGVFADDAVYKKALGTEEGKARFLRWRVRAMERHVAELDLRPGGVASLLQVIDLRNSPGPAKKDFRVAVKQVLDLFQDNYPELVARNILVNVPFWYYAFSTLFYPFLTQRTKSKFVVARPSKVTETLLKYIPIEAIPVKYGGLKRDGDTEFSADDGEVAEVTVKGSSTETIEIEATEADATLTWDLTVLGWEVNYKEEFVPADEGSYTIIVRKGKKMASGEEAVRNSFRAGEPGKVVLTVQNTSHRKKKVLFRHKAKSACAKKC

SEQ ID NO: 23258 - protein, 313 aa, Zea mays subsp. mays
  peptide (1)..(313): Ceres Seq. ID no. 12355483
  misc_feature (32)..(191): Pfam Name: Pfam Description:  CRAL/TRIO domain
  misc_feature (1)..(307): NCBI GI NO: 18397616 NR Description: expressed protein; protein id: At1g30690
  misc_feature (1)..(307): NCBI GI NO: 14334978 NR Description: unknown protein [Arabidopsis thaliana]
  misc_feature (1)..(307): NCBI GI NO: 34907288 NR Description: contains ESTsAU093915
  misc_feature (1)..(304): NCBI GI NO: 8894548 NR Description: hypothetical protein [Cicer arietinum]
  misc_feature (1)..(309): NCBI GI NO: 30680992 NR Description: expressed protein [Arabidopsis thaliana]
  misc_feature (1)..(306): NCBI GI NO: 15218383 NR Description: cytosolic factor, putative; protein id:At1g72160
  misc_feature (1)..(222): NCBI GI NO: 25407487 NR Description: hypothetical protein AT4g09160
  misc_feature (230)..(309): NCBI GI NO: 25407487 NR Description: hypothetical protein AT4g09160
  misc_feature (1)..(308): NCBI GI NO: 15230555 NR Description: putative protein; protein id: At3g51670
  misc_feature (1)..(306): NCBI GI NO: 15081614 NR Description: At1g72160/T9N14_8 [Arabidopsis thaliana]
MLRRTLRWRRDWTGFSSGAESDADLPEELAGACYLDGADHEGHPVCYNALGVFADDAVYKKALGTEEGKARFLRWRVRAMERHVAELDLRPGGVASLLQVIDLRNSPGPAKKDFRVAVKQVLDLFQDNYPELVARNILVNVPFWYYAFSTLFYPFLTQRTKSKFVVARPSKVTETLLKYIPIEAIPVKYGGLKRDGDTEFSADDGEVAEVTVKGSSTETIEIEATEADATLTWDLTVLGWEVNYKEEFVPADEGSYTIIVRKGKKMASGEEAVRNSFRAGEPGKVVLTVQNTSHRKKKVLFRHKAKSACAKKC

SEQ ID NO: 23259 - DNA, 1177 bp, Zea mays subsp. mays
  misc_feature (1)..(1177): Ceres Seq. ID no. 12405858
  misc_feature (717)..(717): n is a, c, t, g, unknown, or other
gtctcaggtagcagtcgcgtgatgaatccgggggcgtgcagataaaaccctccctcgattaaccctaattccttttctcttcggggatactcctttcaccgagtctcttctggttctcggcgtgtgctcgtgtgcagatttgactccatgtcggcggcgctcgcggtgacggacgaggtggccctgccgatccgggcggtgggggatctggcggccgccgccgaggtctcgcgggaggaggtcgccgtcatcacccagtgcgcggcgctcggtgggaagttgccttttgaagatgcatcagttggtgcggttcttgcagtcattaaaaacgtggaaagcttgagggagcaattggttgctgaaatcaggcgggtgctgaaagctggtggaagagtattggtgcagagccctgcaccctcatccagtcagaagccgaacactgatattgagcgcaagttactgatgggtggatttgctgaagtgcaatcttctgctgcaagctcgcaggatagcgtgcaatctgttacagttaaggcaaagaaggctagctggagcatgggctcttcttttccccttaagaaaacaacaaaagcccttcccaagattcaaattgacgacgactctgatctgattgatgaagacagtctcttgactgaggaggacctgaagaaaccacaacttccagttgttggggactgtgaggtgggggcagcaaanaaagcatgcaagaactgtacttgtggcagggctgaggccgaggagaaggttgggaagctggagctcactgcggagcagatcaataaccctcagtcagcttgtggcagttgtgggttgggtgatgccttccgctgtggaacctgtccctacagaggtcttccaccattcaagcctggcgagaaggtttccttgtctggcaacttccttgctgctgacatatgatggcatcgccaacatcggcaaaacaaggagacgggggttacctacgttgttagtcgactgaactgcattccaaatagcttctgttagccaatgcgaatgtgcgtgtgagtgacttgtctttcggatgatatatatataagctggccaatcgcgcctctacacaaacacaaagtgtgcatcagtgcatgtgttttcagattgattttgtgagcctggatgtgaagaatgaatatcgctt

SEQ ID NO: 23260 - protein, 263 aa, Zea mays subsp. mays
  peptide (1)..(263): Ceres Seq. ID no. 12405859
  misc_feature (106)..(255): Pfam Name: DUF689 Pfam Description: Protein of unknown function
  misc_feature (1)..(263): NCBI GI NO: 38344920 NR Description: OSJNBa0018M05.11
  misc_feature (1)..(263): NCBI GI NO: 18418605 NR Description: putative protein; protein id: At5g18400
  misc_feature (1)..(263): NCBI GI NO: 30686798 NR Description: expressed protein [Arabidopsis thaliana]
  misc_feature (1)..(263): NCBI GI NO: 19424097 NR Description: unknown protein [Arabidopsis thaliana]
  misc_feature (58)..(263): NCBI GI NO: 2293332 NR Description: unknown [Dictyostelium discoideum]
  misc_feature (44)..(263): NCBI GI NO: 17933742 NR Description: lethal (2) 35Bg CG4180-PA
  misc_feature (112)..(259): NCBI GI NO: 18314528 NR Description: Unknown (protein for IMAGE:5100442) [Mus musculus]
  misc_feature (112)..(259): NCBI GI NO: 19527376 NR Description: RIKEN cDNA 2810413N20 [Mus musculus]
  misc_feature (112)..(259): NCBI GI NO: 27658522 NR Description: similar to RIKEN cDNA 2810413N20
  misc_feature (118)..(259): NCBI GI NO: 3252825 NR Description: Unknown gene product [Homo sapiens]
  misc_feature (190)..(190): Xaa is any aa, unknown or other
MSAALAVTDEVALPIRAVGDLAAAAEVSREEVAVITQCAALGGKLPFEDASVGAVLAVIKNVESLREQLVAEIRRVLKAGGRVLVQSPAPSSSQKPNTDIERKLLMGGFAEVQSSAASSQDSVQSVTVKAKKASWSMGSSFPLKKTTKALPKIQIDDDSDLIDEDSLLTEEDLKKPQLPVVGDCEVGAAXKACKNCTCGRAEAEEKVGKLELTAEQINNPQSACGSCGLGDAFRCGTCPYRGLPPFKPGEKVSLSGNFLAADI

SEQ ID NO: 23261 - protein, 158 aa, Zea mays subsp. mays
  peptide (1)..(158): Ceres Seq. ID no. 12405860
  misc_feature (1)..(150): Pfam Name: DUF689 Pfam Description: Protein of unknown function
  misc_feature (1)..(158): NCBI GI NO: 38344920 NR Description: OSJNBa0018M05.11
  misc_feature (1)..(158): NCBI GI NO: 18418605 NR Description: putative protein; protein id: At5g18400
  misc_feature (1)..(158): NCBI GI NO: 30686798 NR Description: expressed protein [Arabidopsis thaliana]
  misc_feature (1)..(158): NCBI GI NO: 19424097 NR Description: unknown protein [Arabidopsis thaliana]
  misc_feature (1)..(158): NCBI GI NO: 2293332 NR Description: unknown [Dictyostelium discoideum]
  misc_feature (1)..(158): NCBI GI NO: 17933742 NR Description: lethal (2) 35Bg CG4180-PA
  misc_feature (7)..(154): NCBI GI NO: 18314528 NR Description: Unknown (protein for IMAGE:5100442) [Mus musculus]
  misc_feature (7)..(154): NCBI GI NO: 19527376 NR Description: RIKEN cDNA 2810413N20 [Mus musculus]
  misc_feature (7)..(154): NCBI GI NO: 27658522 NR Description: similar to RIKEN cDNA 2810413N20
  misc_feature (13)..(154): NCBI GI NO: 3252825 NR Description: Unknown gene product [Homo sapiens]
  misc_feature (85)..(85): Xaa is any aa, unknown or other
MGGFAEVQSSAASSQDSVQSVTVKAKKASWSMGSSFPLKKTTKALPKIQIDDDSDLIDEDSLLTEEDLKKPQLPVVGDCEVGAAXKACKNCTCGRAEAEEKVGKLELTAEQINNPQSACGSCGLGDAFRCGTCPYRGLPPFKPGEKVSLSGNFLAADI

SEQ ID NO: 23262 - DNA, 955 bp, Zea mays subsp. mays
  misc_feature (1)..(955): Ceres Seq. ID no. 12413575
gtaccctcacactctgctttatatactgccgaaggtaatcccgttcgcagttcacctacgcggaaaatcactagtgattcgctgaacaaaaaaaaattacaagaaggaatcgagagcaaatgctatcttcaaccacactccgaccgccggcgccggcacacctcaccatctgctcctcgcccgcagcgtggcggcgtgcgccggcggtgcgcgcggtgcggaactacgactccatcccgaagcgggagcccttcagctccagccgcagcatcctccacgagttcctcaggcaggacaagcccctcatccagcgcaccaaggaccagatcacagattattgcacggccatcgaaggcgatgagtgctgcagctgttgggacgcttactttgaactgaataaacttgagcaagagctgcccaaagacgaaatcgcaaggatggtgaaggactcggagggtgacgtgaggtacctgatagagagcatccaccatcgctcggatctgcggaagaaggtggcagagaagtctcgcaattcagtaccgtcaagctcccagggtagtagagccgcgaagccaaggccgttccccgtgcctgatgggataccgaaaacgcaagaagagctcgctgaagaagaagaggcgttgatgccggagtctccgtacacgaggctgctgagaaggatgggaaggtaccctgattggtacaccccacgccctgatcatgagaccgactgaatcgagttgcccaccatcctagtgtcccttgtgggagtttttggagcatggtaatctgaggctccttttatggcctgtgttatgtggtaagattagctttgtatctattgcagtatgcagattagggtgttcttactcttttccaattgtactaatgaaaaccggtgtgtgctttatgctgtaaatatgtgataaatagctgaacgttttattcgaggttc

SEQ ID NO: 23263 - protein, 204 aa, Zea mays subsp. mays
  peptide (1)..(204): Ceres Seq. ID no. 12413576
  misc_feature (1)..(204): NCBI GI NO: 18397956 NR Description: expressed protein; protein id: At2g15890
MLSSTTLRPPAPAHLTICSSPAAWRRAPAVRAVRNYDSIPKREPFSSSRSILHEFLRQDKPLIQRTKDQITDYCTAIEGDECCSCWDAYFELNKLEQELPKDEIARMVKDSEGDVRYLIESIHHRSDLRKKVAEKSRNSVPSSSQGSRAAKPRPFPVPDGIPKTQEELAEEEEALMPESPYTRLLRRMGRYPDWYTPRPDHETD

SEQ ID NO: 23264 - protein, 131 aa, Zea mays subsp. mays
  peptide (1)..(131): Ceres Seq. ID no. 12413577
VPSHSALYTAEGNPVRSSPTRKITSDSLNKKKLQEGIESKCYLQPHSDRRRRHTSPSAPRPQRGGVRRRCARCGTTTPSRSGSPSAPAAASSTSSSGRTSPSSSAPRTRSQIIARPSKAMSAAAVGTLTLN

SEQ ID NO: 23265 - DNA, 1756 bp, Zea mays subsp. mays
  misc_feature (1)..(1756): Ceres Seq. ID no. 13495584
tctcgatccggaaacctctcaaaccctagccgcctcctgcaagtttcagagctcaggaatctgcgccatggcgagtgagacggagaccttcgcatttcaggctgagatcaaccagctgctctcactcatcatcaacaccttctactccaacaaggagatcttcctccgcgagcttatctccaactcttccgatgcgctggacaagatcaggttcgagagtctcactgacaagagcaagctcgatgcgcagcctgagcttttcatccaccttgtcccagacaaggccacgaacacgctctccatcatcgacagcggcatcggcatgaccaagtccgaccttgtcaacaacctcggtaccatcgccaggtccgggaccaaggagttcatggaagcccttgctgccggcgctgatgtgtccatgattggccagttcggcgtcggtttctactctgcctacctcgtcgccgatagagttgtcgtgaccaccaagcacaacgatgacgagcagtacgtgtgggagtcccaagcgggcgggtcgttcactgttactcgtgacacgtcaggggagcagcttggcaggggcactaagatcacactgttcctcaaggacgatcagctggagtaccttgaggagcgtcgcctcaaggatctggtcaagaagcactctgagttcatcagctaccccatctccctgtggactgaaaagacaacagagaaggaaatttctgacgacgaagacgaggaagagaagaaagatgctgaggaaggaaaggttgaggatgttgatgagaaggaagagaaagaaaagaagaaaaagaagatcaaggaggtttctcatgagtggtcattggtcaacaagcagaagcccatatggatgaggaagccagaagaaatcacaaaagaagaatatgctgccttctataagagcttgacaaatgactgggaggagcatctggctgtgaagcacttctctgtggagggtcaactggagttcaaggctgttctctttgttcctaagagggccccctttgatctctttgacaccaagaagaagcaaaacaacatcaagctctatgtgcgcagggtgttcatcatggacaactgcgaagagctgatccctgagtggctgagcttcgttaagggtattgttgactctgaggaccttcccctcaatatctctcgtgagactcttcagcagaacaagatcctgaaggtgatcaggaagaaccttgtgaagaagtgtgttgagctcttctttgagattgctgagaacaaggaggactacaacaagttttacgaggctttctccaagaacctcaagcttggcatccatgaggactcgcagaacaggaccaagatcgccgagcttctgagataccactccaccaagagtggtgatgagctgaccagcctcaaggactacgtgaccaggatgaaggagggacagaatgacatctactatatcactggtgagagcaagaaggcagtggagaactcccccttccttgagaagctgaagaagaggggctatgaggttctgcacatggttgatgccattgacgagtatgctgttggtcagctgctgctcttgatcgtctgtctagatcacagtagtgtgattgtgcagcaagcgaaacttaaattggttgctccgtgtacattaagcctattactgtcccaaagaactcgatgttatctatcggatactggaagtctgtctatcgactgcaacgcttaagcagatatggcctgtttt

SEQ ID NO: 23266 - protein, 578 aa, Zea mays subsp. mays
  peptide (1)..(578): Ceres Seq. ID no. 13495585
  misc_feature (207)..(527): Pfam Name: Pfam Description:  Hsp90 protein
  misc_feature (23)..(527): NCBI GI NO: 417154 NR Description: HEAT SHOCK PROTEIN 82
  misc_feature (23)..(527): NCBI GI NO: 5123910 NR Description: HSP80-2 [Triticum aestivum]
  misc_feature (23)..(527): NCBI GI NO: 4204859 NR Description: heat shock protein 80 [Triticum aestivum]
  misc_feature (25)..(527): NCBI GI NO: 547683 NR Description: HEAT SHOCK COGNATE PROTEIN 80
  misc_feature (25)..(527): NCBI GI NO: 15241115 NR Description: heat shock protein 81-2 (HSP81-2)
  misc_feature (25)..(527): NCBI GI NO: 23397152 NR Description: putative heat shock protein 81-2 (HSP81-2)
  misc_feature (25)..(527): NCBI GI NO: 15215642 NR Description: AT5g56010/MDA7_5 [Arabidopsis thaliana]
  misc_feature (25)..(527): NCBI GI NO: 15241113 NR Description: heat shock protein, putative
  misc_feature (25)..(527): NCBI GI NO: 15241102 NR Description: heat shock protein 81.4 (hsp81.4)
  misc_feature (25)..(527): NCBI GI NO: 17979041 NR Description: putative heat shock protein 90
LDPETSQTLAASCKFQSSGICAMASETETFAFQAEINQLLSLIINTFYSNKEIFLRELISNSSDALDKIRFESLTDKSKLDAQPELFIHLVPDKATNTLSIIDSGIGMTKSDLVNNLGTIARSGTKEFMEALAAGADVSMIGQFGVGFYSAYLVADRVVVTTKHNDDEQYVWESQAGGSFTVTRDTSGEQLGRGTKITLFLKDDQLEYLEERRLKDLVKKHSEFISYPISLWTEKTTEKEISDDEDEEEKKDAEEGKVEDVDEKEEKEKKKKKIKEVSHEWSLVNKQKPIWMRKPEEITKEEYAAFYKSLTNDWEEHLAVKHFSVEGQLEFKAVLFVPKRAPFDLFDTKKKQNNIKLYVRRVFIMDNCEELIPEWLSFVKGIVDSEDLPLNISRETLQQNKILKVIRKNLVKKCVELFFEIAENKEDYNKFYEAFSKNLKLGIHEDSQNRTKIAELLRYHSTKSGDELTSLKDYVTRMKEGQNDIYYITGESKKAVENSPFLEKLKKRGYEVLHMVDAIDEYAVGQLLLLIVCLDHSSVIVQQAKLKLVAPCTLSLLLSQRTRCYLSDTGSLSIDCNA

SEQ ID NO: 23267 - protein, 556 aa, Zea mays subsp. mays
  peptide (1)..(556): Ceres Seq. ID no. 13495586
  misc_feature (185)..(505): Pfam Name: Pfam Description:  Hsp90 protein
  misc_feature (1)..(505): NCBI GI NO: 417154 NR Description: HEAT SHOCK PROTEIN 82
  misc_feature (1)..(505): NCBI GI NO: 5123910 NR Description: HSP80-2 [Triticum aestivum]
  misc_feature (1)..(505): NCBI GI NO: 4204859 NR Description: heat shock protein 80 [Triticum aestivum]
  misc_feature (3)..(505): NCBI GI NO: 547683 NR Description: HEAT SHOCK COGNATE PROTEIN 80
  misc_feature (3)..(505): NCBI GI NO: 15241115 NR Description: heat shock protein 81-2 (HSP81-2)
  misc_feature (3)..(505): NCBI GI NO: 23397152 NR Description: putative heat shock protein 81-2 (HSP81-2)
  misc_feature (3)..(505): NCBI GI NO: 15215642 NR Description: AT5g56010/MDA7_5 [Arabidopsis thaliana]
  misc_feature (3)..(505): NCBI GI NO: 15241113 NR Description: heat shock protein, putative
  misc_feature (3)..(505): NCBI GI NO: 15241102 NR Description: heat shock protein 81.4 (hsp81.4)
  misc_feature (3)..(505): NCBI GI NO: 17979041 NR Description: putative heat shock protein 90
MASETETFAFQAEINQLLSLIINTFYSNKEIFLRELISNSSDALDKIRFESLTDKSKLDAQPELFIHLVPDKATNTLSIIDSGIGMTKSDLVNNLGTIARSGTKEFMEALAAGADVSMIGQFGVGFYSAYLVADRVVVTTKHNDDEQYVWESQAGGSFTVTRDTSGEQLGRGTKITLFLKDDQLEYLEERRLKDLVKKHSEFISYPISLWTEKTTEKEISDDEDEEEKKDAEEGKVEDVDEKEEKEKKKKKIKEVSHEWSLVNKQKPIWMRKPEEITKEEYAAFYKSLTNDWEEHLAVKHFSVEGQLEFKAVLFVPKRAPFDLFDTKKKQNNIKLYVRRVFIMDNCEELIPEWLSFVKGIVDSEDLPLNISRETLQQNKILKVIRKNLVKKCVELFFEIAENKEDYNKFYEAFSKNLKLGIHEDSQNRTKIAELLRYHSTKSGDELTSLKDYVTRMKEGQNDIYYITGESKKAVENSPFLEKLKKRGYEVLHMVDAIDEYAVGQLLLLIVCLDHSSVIVQQAKLKLVAPCTLSLLLSQRTRCYLSDTGSLSIDCNA

SEQ ID NO: 23268 - protein, 471 aa, Zea mays subsp. mays
  peptide (1)..(471): Ceres Seq. ID no. 13495587
  misc_feature (100)..(420): Pfam Name: Pfam Description:  Hsp90 protein
  misc_feature (1)..(420): NCBI GI NO: 417154 NR Description: HEAT SHOCK PROTEIN 82
  misc_feature (1)..(420): NCBI GI NO: 5123910 NR Description: HSP80-2 [Triticum aestivum]
  misc_feature (1)..(420): NCBI GI NO: 4204859 NR Description: heat shock protein 80 [Triticum aestivum]
  misc_feature (1)..(420): NCBI GI NO: 547683 NR Description: HEAT SHOCK COGNATE PROTEIN 80
  misc_feature (1)..(420): NCBI GI NO: 15241115 NR Description: heat shock protein 81-2 (HSP81-2)
  misc_feature (1)..(420): NCBI GI NO: 23397152 NR Description: putative heat shock protein 81-2 (HSP81-2)
  misc_feature (1)..(420): NCBI GI NO: 15215642 NR Description: AT5g56010/MDA7_5 [Arabidopsis thaliana]
  misc_feature (1)..(420): NCBI GI NO: 15241113 NR Description: heat shock protein, putative
  misc_feature (1)..(420): NCBI GI NO: 15241102 NR Description: heat shock protein 81.4 (hsp81.4)
  misc_feature (1)..(420): NCBI GI NO: 17979041 NR Description: putative heat shock protein 90
MTKSDLVNNLGTIARSGTKEFMEALAAGADVSMIGQFGVGFYSAYLVADRVVVTTKHNDDEQYVWESQAGGSFTVTRDTSGEQLGRGTKITLFLKDDQLEYLEERRLKDLVKKHSEFISYPISLWTEKTTEKEISDDEDEEEKKDAEEGKVEDVDEKEEKEKKKKKIKEVSHEWSLVNKQKPIWMRKPEEITKEEYAAFYKSLTNDWEEHLAVKHFSVEGQLEFKAVLFVPKRAPFDLFDTKKKQNNIKLYVRRVFIMDNCEELIPEWLSFVKGIVDSEDLPLNISRETLQQNKILKVIRKNLVKKCVELFFEIAENKEDYNKFYEAFSKNLKLGIHEDSQNRTKIAELLRYHSTKSGDELTSLKDYVTRMKEGQNDIYYITGESKKAVENSPFLEKLKKRGYEVLHMVDAIDEYAVGQLLLLIVCLDHSSVIVQQAKLKLVAPCTLSLLLSQRTRCYLSDTGSLSIDCNA

SEQ ID NO: 23269 - DNA, 2010 bp, Zea mays subsp. mays
  misc_feature (1)..(2010): Ceres Seq. ID no. 12406806
atccaccacaccactcgagcgcgcgcgcggcccaccgctccgccgctgcccgcccgccgccatgcgagggatcctctcctcttcctccgctctcctccggcgagccggcgcccagctctcgcgcacggactgcagtagcccctcagcgtccgcgacctctcctctccgccgctcccctcttcaggtatgatgaccgcgtatctcgctgccgctccctcgatcgcgggctcgtggcttgttgccgtgtgctagggactgtaacttccttttgcaatagaggattttcagtcggactggtaagtcctctttgctagttaatgttgtcaaactgcccttgacctttgttgggttagattggctgaaacagctgatatctgcaacggtttgaccatgagcgtacaagttctgctttgctggctcctgctcatgtgcacaagctactaaaacatagaagagtgagattcggagaaatatgcattatgggctgtaatgctgtacaatagtgctattcccacgtcagccttttcccactaggggagaactgtggcttttggtttcaattggtgtatgtgctgctttactgtttcgttctcactggctttaataccttcataagtgaagtatcgagttcacaatgcctacttgctcatatttcaagagatctgcgcaaattgctgataatctttcttccctgtgatgtcatttgctagaatgggaaaagagacacattttgttcgctttggttcaaaggtcgttcggtatcaaccacagttgatatgcagttagactatgagagtgatccccctcttgacgatacaaaagctattgagaaggagtcatcacttaatgttgctgtttctcaactcgcaattgacttcgatagagactctaatttatgtttggagcgattttcccgtgcaaggaaagcatctgtagtctctactggttctcttaagcttgacctcgctctcggcgttggaggattaccgaagggtagaatggtggagatatatgggaaagaagcatctgggaagacaacactcgcgcttcatgttattaaggaagctcaaaagaatggaggttattgtgcttatattgatgcagaaaatgccttcaacccttcatttgctgaatctattggcgtagacagtgaaaggctcttgatagcccaacctgattctgctgaaaattctctaagcattgtaaacactcttgttggtggttctgttgctgttgttgttgtggacagtgtggcagcacttattcccaaatgtgaaattgaaggtgaaatatacacaaattgtggagacatccaatcccatttgatgactcgggcccttagaaaaattcagtacactttatgtcgatctgaaacacttattatttttgtgaatcaggttagaacaaagaggacatcaagtaatcctgggatctacaaggaggtgccttgcggtggtaatgcactaggattctatgctgcagtcagaatgaggacttcaaggagagaactgcgctatagtgaagatgaggctaccggcgtaggtatatcagtgcagatcatcaagaacaaattggctccagcgaacctgaagaaggaagccggcatcgacatcacattcggtaaggggatctgccacgagtcggagatcctggagacggcttcctccgtcggagtgatcctgaaagacgggtgtgggtattggatcaacaacgagttcctggcaggcaaggtggaagcggagaagttcctgcgtgaaaacgctgcagtggcagatgagatctgcaataccgtgaggaacgagttcttgcaaaggtgacatagggcgaccgattagagaggctaatgcattgttagtcggaaatgttgtaccgtcatgtattcatagaagaagatttatgtaggatgttgctgtgcctgtcgtgtaactttgactcgcaacagttcattgagtttaccagggccattccctcccagatcatatcgttaggttcttctatgttgctggttgc

SEQ ID NO: 23270 - protein, 346 aa, Zea mays subsp. mays
  peptide (1)..(346): Ceres Seq. ID no. 12406807
  misc_feature (21)..(345): Pfam Name: Pfam Description:  recA bacterial DNA recombination protein
  misc_feature (75)..(346): NCBI GI NO: 24636781 NR Description: P0614D08.19
  misc_feature (1)..(345): NCBI GI NO: 22330951 NR Description: putative RecA protein; protein id: At3g10140
  misc_feature (1)..(345): NCBI GI NO: 6143863 NR Description: putative RecA protein [Arabidopsis thaliana]
  misc_feature (202)..(311): NCBI GI NO: 34906584 NR Description: hypothetical protein~similar to Arabidopsis RecA-like protein
  misc_feature (75)..(159): NCBI GI NO: 34906584 NR Description: hypothetical protein~similar to Arabidopsis RecA-like protein
  misc_feature (18)..(344): NCBI GI NO: 15224783 NR Description: putative recA protein; protein id: At2g19490.1
  misc_feature (42)..(340): NCBI GI NO: 34907710 NR Description: putative RecA protein
  misc_feature (11)..(340): NCBI GI NO: 17987070 NR Description: RECA PROTEIN [Brucella melitensis]
  misc_feature (11)..(340): NCBI GI NO: 23502079 NR Description: recA protein [Brucella suis 1330]
  misc_feature (11)..(340): NCBI GI NO: 22966246 NR Description: hypothetical protein [Rhodospirillum rubrum]
MQLDYESDPPLDDTKAIEKESSLNVAVSQLAIDFDRDSNLCLERFSRARKASVVSTGSLKLDLALGVGGLPKGRMVEIYGKEASGKTTLALHVIKEAQKNGGYCAYIDAENAFNPSFAESIGVDSERLLIAQPDSAENSLSIVNTLVGGSVAVVVVDSVAALIPKCEIEGEIYTNCGDIQSHLMTRALRKIQYTLCRSETLIIFVNQVRTKRTSSNPGIYKEVPCGGNALGFYAAVRMRTSRRELRYSEDEATGVGISVQIIKNKLAPANLKKEAGIDITFGKGICHESEILETASSVGVILKDGCGYWINNEFLAGKVEAEKFLRENAAVADEICNTVRNEFLQR

SEQ ID NO: 23271 - protein, 272 aa, Zea mays subsp. mays
  peptide (1)..(272): Ceres Seq. ID no. 12406808
  misc_feature (1)..(271): Pfam Name: Pfam Description:  recA bacterial DNA recombination protein
  misc_feature (1)..(272): NCBI GI NO: 24636781 NR Description: P0614D08.19
  misc_feature (1)..(271): NCBI GI NO: 22330951 NR Description: putative RecA protein; protein id: At3g10140
  misc_feature (1)..(271): NCBI GI NO: 6143863 NR Description: putative RecA protein [Arabidopsis thaliana]
  misc_feature (128)..(237): NCBI GI NO: 34906584 NR Description: hypothetical protein~similar to Arabidopsis RecA-like protein
  misc_feature (1)..(85): NCBI GI NO: 34906584 NR Description: hypothetical protein~similar to Arabidopsis RecA-like protein
  misc_feature (1)..(270): NCBI GI NO: 15224783 NR Description: putative recA protein; protein id: At2g19490.1
  misc_feature (1)..(266): NCBI GI NO: 34907710 NR Description: putative RecA protein
  misc_feature (1)..(266): NCBI GI NO: 17987070 NR Description: RECA PROTEIN [Brucella melitensis]
  misc_feature (1)..(266): NCBI GI NO: 23502079 NR Description: recA protein [Brucella suis 1330]
  misc_feature (1)..(266): NCBI GI NO: 22966246 NR Description: hypothetical protein [Rhodospirillum rubrum]
MVEIYGKEASGKTTLALHVIKEAQKNGGYCAYIDAENAFNPSFAESIGVDSERLLIAQPDSAENSLSIVNTLVGGSVAVVVVDSVAALIPKCEIEGEIYTNCGDIQSHLMTRALRKIQYTLCRSETLIIFVNQVRTKRTSSNPGIYKEVPCGGNALGFYAAVRMRTSRRELRYSEDEATGVGISVQIIKNKLAPANLKKEAGIDITFGKGICHESEILETASSVGVILKDGCGYWINNEFLAGKVEAEKFLRENAAVADEICNTVRNEFLQR

SEQ ID NO: 23272 - DNA, 1280 bp, Zea mays subsp. mays
  misc_feature (1)..(1280): Ceres Seq. ID no. 12340706
ctctcgagagggccacacacaaaaaccccaatgcgagcgcccctggcttgtcggcgtcgcctccttcagccaaaaccctagcttgcatacgcgcccgaacaaagcttcgtctgcgaggggcgtcctcctgccgccagaagctttcaggagcatcagcgatggtgtggttccaatgcgaggactgtggcgagaacctcaagaagcccaaacttgccggccacttccgctcctgctccgcgtacaagctgtcatgcatcgattgcggcgagttattcagccaggacaccgtgcaggggcacacgcagtgcatctccgaggccgagaagtacggtcctaagggacagaccaaaccatccaatggtgcacagggtaaggcagataagccaaagccaaatgcagatgtcgatatcaatgttgggctgtcgacacggcctccttggttctgtagcctatgcaagaccactaccacaagcaagcaaactctcttactacatgctgatgggaagaagcatagggcaaaggcgaaagccttccatgtgtctcagaaacaaaaagatggtgcagaacaaactccagatgtgaaggaagctggagttgtacccacaaaagaatctgctcaagtaaatggtggcgtgagtggtgatcatgaaagaaatgaagataaagatgctgggaaaaggaaacgaatggatgacatgaccatagagccaggtaacacaaaaagacagttgacacagtctggagatgagaagtcagaaaacaaagcgaagagtaaggccgatgaactagcaagtggtactgactgcaaaagtgttcaaaagcaaaagatcaaatggaagaagattattactaaaacattgaaggcgaacgcagatggagttatgaagctaaagaagctacaaaagatagtctccaaggagcttcaggaatgtggtgtctccaaagacaaggaggagctccgtgctaccttgatggataaaatagcttcaagttccagattttctgttgatggcaagaatgttagactggtggccaagaatgaagaagaatcttagaaagaggttgtcagtcattttttggcattgttgctggtttcattctttggtgtcaactttcagatggcttatagccaagtgttggttaaattgagtccatgaaccatcaattatatccatgacctgtagacggtatgggaatttagcatctgaattttctcgacaaccgttcaaaagtgaaatgtttactctttatgctgtcaagcaatggcaatgatggttggt

SEQ ID NO: 23273 - protein, 350 aa, Zea mays subsp. mays
  peptide (1)..(350): Ceres Seq. ID no. 12340707
  misc_feature (146)..(170): Pfam Name: Pfam Description:  Zinc finger, C2H2 type
  misc_feature (48)..(346): NCBI GI NO: 21902026 NR Description: B1097D05.27
  misc_feature (53)..(291): NCBI GI NO: 18399026 NR Description: Expressed protein; protein id: At2g19385
  misc_feature (53)..(291): NCBI GI NO: 21536909 NR Description: unknown [Arabidopsis thaliana]
  misc_feature (53)..(291): NCBI GI NO: 7486241 NR Description: probable RNA-binding protein At2g19380 -Arabidopsis thaliana
  misc_feature (53)..(336): NCBI GI NO: 18399023 NR Description: RRM-containing RNA-binding protein
  misc_feature (53)..(336): NCBI GI NO: 7486241 NR Description: probable RNA-binding protein At2g19380 -Arabidopsis thaliana
  misc_feature (53)..(135): NCBI GI NO: 39581890 NR Description: Hypothetical protein CBG20151
  misc_feature (277)..(343): NCBI GI NO: 39581890 NR Description: Hypothetical protein CBG20151
  misc_feature (214)..(346): NCBI GI NO: 18399026 NR Description: Expressed protein; protein id: At2g19385
  misc_feature (214)..(346): NCBI GI NO: 21536909 NR Description: unknown [Arabidopsis thaliana]
LERATHKNPNASAPGLSASPPSAKTLACIRARTKLRLRGASSCRQKLSGASAMVWFQCEDCGENLKKPKLAGHFRSCSAYKLSCIDCGELFSQDTVQGHTQCISEAEKYGPKGQTKPSNGAQGKADKPKPNADVDINVGLSTRPPWFCSLCKTTTTSKQTLLLHADGKKHRAKAKAFHVSQKQKDGAEQTPDVKEAGVVPTKESAQVNGGVSGDHERNEDKDAGKRKRMDDMTIEPGNTKRQLTQSGDEKSENKAKSKADELASGTDCKSVQKQKIKWKKIITKTLKANADGVMKLKKLQKIVSKELQECGVSKDKEELRATLMDKIASSSRFSVDGKNVRLVAKNEEES

SEQ ID NO: 23274 - protein, 298 aa, Zea mays subsp. mays
  peptide (1)..(298): Ceres Seq. ID no. 12340708
  misc_feature (94)..(118): Pfam Name: Pfam Description:  Zinc finger, C2H2 type
  misc_feature (1)..(294): NCBI GI NO: 21902026 NR Description: B1097D05.27
  misc_feature (1)..(239): NCBI GI NO: 18399026 NR Description: Expressed protein; protein id: At2g19385
  misc_feature (1)..(239): NCBI GI NO: 21536909 NR Description: unknown [Arabidopsis thaliana]
  misc_feature (1)..(239): NCBI GI NO: 7486241 NR Description: probable RNA-binding protein At2g19380 -Arabidopsis thaliana
  misc_feature (1)..(284): NCBI GI NO: 18399023 NR Description: RRM-containing RNA-binding protein
  misc_feature (1)..(284): NCBI GI NO: 7486241 NR Description: probable RNA-binding protein At2g19380 -Arabidopsis thaliana
  misc_feature (1)..(83): NCBI GI NO: 39581890 NR Description: Hypothetical protein CBG20151
  misc_feature (225)..(291): NCBI GI NO: 39581890 NR Description: Hypothetical protein CBG20151
  misc_feature (162)..(294): NCBI GI NO: 18399026 NR Description: Expressed protein; protein id: At2g19385
  misc_feature (162)..(294): NCBI GI NO: 21536909 NR Description: unknown [Arabidopsis thaliana]
MVWFQCEDCGENLKKPKLAGHFRSCSAYKLSCIDCGELFSQDTVQGHTQCISEAEKYGPKGQTKPSNGAQGKADKPKPNADVDINVGLSTRPPWFCSLCKTTTTSKQTLLLHADGKKHRAKAKAFHVSQKQKDGAEQTPDVKEAGVVPTKESAQVNGGVSGDHERNEDKDAGKRKRMDDMTIEPGNTKRQLTQSGDEKSENKAKSKADELASGTDCKSVQKQKIKWKKIITKTLKANADGVMKLKKLQKIVSKELQECGVSKDKEELRATLMDKIASSSRFSVDGKNVRLVAKNEEES

SEQ ID NO: 23275 - DNA, 1586 bp, Zea mays subsp. mays
  misc_feature (1)..(1586): Ceres Seq. ID no. 12363031
atccttgagcgcagacaaatcacccccttcctcctgttcatttcctcctgctcccccctcctccctcccccccccctcctcgccgctcgccgttgaagaggtaggcccacgggccggcgagaatggaggcggcgacgatggcgtggacggcggcggtggtcggggcggggctggtgtactggttcgtctcggtgatgggcgcggcggaggtgaagggcaagcgggcggtggatctcaagatgggatccatcacgcgggacaaggtgcaggacaagtacacgcagtactggtccttcttccgccgccccaaggagacggccaccacggcggcgtcggcggacaaggtgccggccttcgtcgacaccttctacaacctcgtgaccgacatctacgagtgggggtggggccagtccttccacttctccccgtccctccccggccgctcccaccgcgacgccacgcgcgtccacgaggagcgcgtcgccgacctcctcggcgccaggccgggccaccgcctcctggacgtcggctgcggcgtcggcgggcccatgcgcgccatcgccgcgcactcgggatccaacgtcgtcggcatcaccatcaacgagtaccaggtgaaccgcgcccgcgcgcacaaccgcaaggccggcctcgactccccgcgctgcgaggtcgtctgcggcaacttcctctccatgccgttcccggacgcctccttcgacggcgcctactccatcgaggccacctgccacgcgcccaggctgcaggacgtgtacggcgaggtctaccgcgtgctcaagccggggggactctacgtctcctacgagtgggtcaccaccccgctgtaccgcgccgaggacccggaccacgtcgagtgcatccacggcatcgagcgcggcgacgcgctaccggggctccgccgccaggacgagatcgcgtccatcgctaaggaggtcgggttcgaggtgctcaaggagcaggacctggcgctgccccccgcgctgccctggtggacgcgcctcaagatgggccgcatcgcctactggcgcaactccctcgtcgtccgcgtgctcaccatgctccgggtcgcgcccaagggcgtctccgaggtgcacgagatgctgtacgagaccgcgcagcacctcacccgcggcggcgagaccggcatcttcacgcccatgcacatggtgctcctccgcaagcccgccgccgccgcctccaccgaggaggccaactagtgtaagactacacaccgccaccaatcagttactactcgcccaccgcaagggggagaaaatggggagggaggaaaaagatgcaagcagcagcagcaccagaggtaagaagagcaggctaatcggcgacttgaagaagttacaaattgatctattagagaagaagatactactaggaacgattcttctctccgtttactcttttccctgttcgtagctttgagttttaatttttgttttttggtggacggattgttccggggaggtcgaggttgggatctaaatttattttcaatcggtggagatccatctatctatcagcagcagcagcaggagcaaccatgttttctctcc

SEQ ID NO: 23276 - protein, 370 aa, Zea mays subsp. mays
  peptide (1)..(370): Ceres Seq. ID no. 12363032
  misc_feature (87)..(287): Pfam Name: Pfam Description:  ubiE/COQ5 methyltransferase family
  misc_feature (1)..(360): NCBI GI NO: 3560533 NR Description: 24-methylene lophenol C24(1)methyltransferase
  misc_feature (1)..(360): NCBI GI NO: 7443718 NR Description: probable sterol 24-C-methyltransferase (EC2
  misc_feature (1)..(370): NCBI GI NO: 15217917 NR Description: sterol-C-methyltransferase; protein id:At1g20330
  misc_feature (1)..(370): NCBI GI NO: 22136020 NR Description: 24-sterol C-methyltransferase
  misc_feature (1)..(370): NCBI GI NO: 23397216 NR Description: putative sterol-C-methyltransferase
  misc_feature (1)..(370): NCBI GI NO: 1061040 NR Description: sterol-C-methyltransferase [Arabidopsis thaliana]
  misc_feature (9)..(360): NCBI GI NO: 7443717 NR Description: probable sterol 24-C-methyltransferase (EC2
  misc_feature (1)..(370): NCBI GI NO: 21555010 NR Description: sterol-C-methyltransferase [Arabidopsis thaliana]
  misc_feature (1)..(364): NCBI GI NO: 15222955 NR Description: S-adenosyl-methionine-sterol-C-methyltransferase
  misc_feature (1)..(364): NCBI GI NO: 2246456 NR Description: S-adenosyl-methionine-sterol-C-methyltransferase
MEAATMAWTAAVVGAGLVYWFVSVMGAAEVKGKRAVDLKMGSITRDKVQDKYTQYWSFFRRPKETATTAASADKVPAFVDTFYNLVTDIYEWGWGQSFHFSPSLPGRSHRDATRVHEERVADLLGARPGHRLLDVGCGVGGPMRAIAAHSGSNVVGITINEYQVNRARAHNRKAGLDSPRCEVVCGNFLSMPFPDASFDGAYSIEATCHAPRLQDVYGEVYRVLKPGGLYVSYEWVTTPLYRAEDPDHVECIHGIERGDALPGLRRQDEIASIAKEVGFEVLKEQDLALPPALPWWTRLKMGRIAYWRNSLVVRVLTMLRVAPKGVSEVHEMLYETAQHLTRGGETGIFTPMHMVLLRKPAAAASTEEAN

SEQ ID NO: 23277 - protein, 365 aa, Zea mays subsp. mays
  peptide (1)..(365): Ceres Seq. ID no. 12363033
  misc_feature (82)..(282): Pfam Name: Pfam Description:  ubiE/COQ5 methyltransferase family
  misc_feature (1)..(355): NCBI GI NO: 3560533 NR Description: 24-methylene lophenol C24(1)methyltransferase
  misc_feature (1)..(355): NCBI GI NO: 7443718 NR Description: probable sterol 24-C-methyltransferase (EC2
  misc_feature (1)..(365): NCBI GI NO: 15217917 NR Description: sterol-C-methyltransferase; protein id:At1g20330
  misc_feature (1)..(365): NCBI GI NO: 22136020 NR Description: 24-sterol C-methyltransferase
  misc_feature (1)..(365): NCBI GI NO: 23397216 NR Description: putative sterol-C-methyltransferase
  misc_feature (1)..(365): NCBI GI NO: 1061040 NR Description: sterol-C-methyltransferase [Arabidopsis thaliana]
  misc_feature (4)..(355): NCBI GI NO: 7443717 NR Description: probable sterol 24-C-methyltransferase (EC2
  misc_feature (1)..(365): NCBI GI NO: 21555010 NR Description: sterol-C-methyltransferase [Arabidopsis thaliana]
  misc_feature (1)..(359): NCBI GI NO: 15222955 NR Description: S-adenosyl-methionine-sterol-C-methyltransferase
  misc_feature (1)..(359): NCBI GI NO: 2246456 NR Description: S-adenosyl-methionine-sterol-C-methyltransferase
MAWTAAVVGAGLVYWFVSVMGAAEVKGKRAVDLKMGSITRDKVQDKYTQYWSFFRRPKETATTAASADKVPAFVDTFYNLVTDIYEWGWGQSFHFSPSLPGRSHRDATRVHEERVADLLGARPGHRLLDVGCGVGGPMRAIAAHSGSNVVGITINEYQVNRARAHNRKAGLDSPRCEVVCGNFLSMPFPDASFDGAYSIEATCHAPRLQDVYGEVYRVLKPGGLYVSYEWVTTPLYRAEDPDHVECIHGIERGDALPGLRRQDEIASIAKEVGFEVLKEQDLALPPALPWWTRLKMGRIAYWRNSLVVRVLTMLRVAPKGVSEVHEMLYETAQHLTRGGETGIFTPMHMVLLRKPAAAASTEEAN

SEQ ID NO: 23278 - protein, 346 aa, Zea mays subsp. mays
  peptide (1)..(346): Ceres Seq. ID no. 12363034
  misc_feature (63)..(263): Pfam Name: Pfam Description:  ubiE/COQ5 methyltransferase family
  misc_feature (1)..(336): NCBI GI NO: 3560533 NR Description: 24-methylene lophenol C24(1)methyltransferase
  misc_feature (1)..(336): NCBI GI NO: 7443718 NR Description: probable sterol 24-C-methyltransferase (EC2
  misc_feature (1)..(346): NCBI GI NO: 15217917 NR Description: sterol-C-methyltransferase; protein id:At1g20330
  misc_feature (1)..(346): NCBI GI NO: 22136020 NR Description: 24-sterol C-methyltransferase
  misc_feature (1)..(346): NCBI GI NO: 23397216 NR Description: putative sterol-C-methyltransferase
  misc_feature (1)..(346): NCBI GI NO: 1061040 NR Description: sterol-C-methyltransferase [Arabidopsis thaliana]
  misc_feature (1)..(336): NCBI GI NO: 7443717 NR Description: probable sterol 24-C-methyltransferase (EC2
  misc_feature (1)..(346): NCBI GI NO: 21555010 NR Description: sterol-C-methyltransferase [Arabidopsis thaliana]
  misc_feature (1)..(340): NCBI GI NO: 15222955 NR Description: S-adenosyl-methionine-sterol-C-methyltransferase
  misc_feature (1)..(340): NCBI GI NO: 2246456 NR Description: S-adenosyl-methionine-sterol-C-methyltransferase
MGAAEVKGKRAVDLKMGSITRDKVQDKYTQYWSFFRRPKETATTAASADKVPAFVDTFYNLVTDIYEWGWGQSFHFSPSLPGRSHRDATRVHEERVADLLGARPGHRLLDVGCGVGGPMRAIAAHSGSNVVGITINEYQVNRARAHNRKAGLDSPRCEVVCGNFLSMPFPDASFDGAYSIEATCHAPRLQDVYGEVYRVLKPGGLYVSYEWVTTPLYRAEDPDHVECIHGIERGDALPGLRRQDEIASIAKEVGFEVLKEQDLALPPALPWWTRLKMGRIAYWRNSLVVRVLTMLRVAPKGVSEVHEMLYETAQHLTRGGETGIFTPMHMVLLRKPAAAASTEEAN

SEQ ID NO: 23279 - DNA, 1721 bp, Zea mays subsp. mays
  misc_feature (1)..(1721): Ceres Seq. ID no. 12412138
  misc_feature (452)..(452): n is a, c, t, g, unknown, or other
  misc_feature (762)..(762): n is a, c, t, g, unknown, or other
  misc_feature (1082)..(1082): n is a, c, t, g, unknown, or other
  misc_feature (1445)..(1445): n is a, c, t, g, unknown, or other
  misc_feature (752)..(752): n is a, c, t, g, unknown, or other
  misc_feature (211)..(211): n is a, c, t, g, unknown, or other
  misc_feature (1323)..(1323): n is a, c, t, g, unknown, or other
acattctcttgtctcttgcacatcccccgcttccttcttggtcgtttctccccttctgatccgtgctagccagcttgcgttgtggctgcttgtcgccagatctacctatccaccgtaccacagtcgtccacagcgcgcgcttacgatggcggtcgccgccgctcgccttcttcttcgcgtcgtcgtcctcgcgctcctcgcagccgcgcanaggtccgtcgggaagagcgccgtgctgtctctgcgggagttggatggacgacgacggagtgccgcgacgacggatacccggagcagccgctactacgtcgacgcaatgcttgctgaaacgctaggggagcacaagaaagctggggcagcaacaagcgtgctagagctcaagcgccactccctcactgccattcctgaagaccccgtcgcccgcgaccggtaccttcgccgtctcctcgcanccgacgagtcgcgcgccaactcattccagccccgccgtaacaaggacagggcatcagcgtccacgcagtccgcctcggcagaggtcccgctgacctcgggcatccggctccagacgctcaactacgtcaccaccatctctctcggcggcagctccggctcgcccgccgcgaacctcaccgtcatcgtggacacggggagcgacctcacctgggtgcagtgcaagccgtgcagcgcgtgctacgcgcagcgcgacccgctcttcgacccagcgggctccgccacctacgctgcggtccggngcaacgcctncgcgtgcgcggactccctcagggccgccaccggcacgccgggatcctgtggttcgacgggggcaggcaacgagaagtgctactacgcgctagcctacggcgacgggtcgttcagccgcggcgtgctggccacggacacggtcgcgctcggcggcgccagcctgggcgggttcgtgttcgggtgcgggctcagcaaccgcggcctgttcggcggcacggcggggctcatggggctcggccgcaccgagctctcgctggtgtcccagaccgcgtcccggttacggcggcgtgttctcctactgccatgccggcggccacctncggcgacgcctcaggctcgctctccctcggcggcggggacgacgcggcgtcatcctaccgcaacacgacgcccgtggcgtacacccgcatgatcgccgacccggcgcagccgcccttctacttcctcaacgtcaccggcgcggccgtcggcggcaccgccctcgcggcgcaggggctgggcgcccgcaacgtgctcatcgactccggcacggtgatcacgcgcctggcgccgtccgtgtanccgctgtgcgcgccgagttcacgcgccagttcggcgccgcgggctacccggccgccccggggttctcgatcctggacacgtgctacgacctgacggggcacgacgaggtgaaggtgccgctntgacgctgcggctggagggcggggcggacgtgaccgtggacgcggctgggatgctgttcgtcgtgaggaaggacggctcgcaggtgtgcctggccatggcgagtctgtcgtacgaggacgagacgcctatcattggcaactaccagcagaagaacaagagggtggtgtatgacacgctggggtccaggctaggcttcgctgacgaggactgcaactatgtatagagacttgacagggaggaggatgtggaatatcggatttctagttatatgttgc

SEQ ID NO: 23280 - protein, 390 aa, Zea mays subsp. mays
  peptide (1)..(390): Ceres Seq. ID no. 12412139
  misc_feature (145)..(343): Pfam Name: Pfam Description:  Eukaryotic aspartyl protease
  misc_feature (118)..(343): NCBI GI NO: 18412482 NR Description: putative aspartyl protease; protein id:At1g79720
  misc_feature (118)..(343): NCBI GI NO: 25406599 NR Description: probable aspartyl proteinase, 105611-106921
  misc_feature (118)..(343): NCBI GI NO: 21595063 NR Description: putative aspartyl protease [Arabidopsis thaliana]
  misc_feature (110)..(346): NCBI GI NO: 24430421 NR Description: 41 kD chloroplast nucleoid DNA binding protein
  misc_feature (115)..(346): NCBI GI NO: 7489168 NR Description: nucleoid DNA-binding protein cnd41
  misc_feature (148)..(345): NCBI GI NO: 11358588 NR Description: nucleoid DNA-binding protein cnd41-like protein -Arabidopsis thaliana
  misc_feature (148)..(345): NCBI GI NO: 22326716 NR Description: nucleoid DNA-binding protein cnd41 - like protein
  misc_feature (148)..(345): NCBI GI NO: 24417232 NR Description: unknown [Arabidopsis thaliana]
  misc_feature (148)..(345): NCBI GI NO: 15238250 NR Description: nucleoid DNA-binding protein cnd41 - like protein
  misc_feature (101)..(342): NCBI GI NO: 38344196 NR Description: OSJNBa0064G10.12
  misc_feature (70)..(70): Xaa is any aa, unknown or other
  misc_feature (151)..(151): Xaa is any aa, unknown or other
  misc_feature (251)..(251): Xaa is any aa, unknown or other
  misc_feature (254)..(254): Xaa is any aa, unknown or other
  misc_feature (361)..(361): Xaa is any aa, unknown or other
HSLVSCTSPASFLVVSPLLIRASQLALWLLVARSTYPPYHSRPQRALTMAVAAARLLLRVVVLALLAAAXRSVGKSAVLSLRELDGRRRSAATTDTRSSRYYVDAMLAETLGEHKKAGAATSVLELKRHSLTAIPEDPVARDRYLRRLLAXDESRANSFQPRRNKDRASASTQSASAEVPLTSGIRLQTLNYVTTISLGGSSGSPAANLTVIVDTGSDLTWVQCKPCSACYAQRDPLFDPAGSATYAAVRXNAXACADSLRAATGTPGSCGSTGAGNEKCYYALAYGDGSFSRGVLATDTVALGGASLGGFVFGCGLSNRGLFGGTAGLMGLGRTELSLVSQTASRLRRRVLLLPCRRPPXATPQARSPSAAGTTRRHPTATRRPWRTPA

SEQ ID NO: 23281 - protein, 342 aa, Zea mays subsp. mays
  peptide (1)..(342): Ceres Seq. ID no. 12412140
  misc_feature (97)..(295): Pfam Name: Pfam Description:  Eukaryotic aspartyl protease
  misc_feature (70)..(295): NCBI GI NO: 18412482 NR Description: putative aspartyl protease; protein id:At1g79720
  misc_feature (70)..(295): NCBI GI NO: 25406599 NR Description: probable aspartyl proteinase, 105611-106921
  misc_feature (70)..(295): NCBI GI NO: 21595063 NR Description: putative aspartyl protease [Arabidopsis thaliana]
  misc_feature (62)..(298): NCBI GI NO: 24430421 NR Description: 41 kD chloroplast nucleoid DNA binding protein
  misc_feature (67)..(298): NCBI GI NO: 7489168 NR Description: nucleoid DNA-binding protein cnd41
  misc_feature (100)..(297): NCBI GI NO: 11358588 NR Description: nucleoid DNA-binding protein cnd41-like protein -Arabidopsis thaliana
  misc_feature (100)..(297): NCBI GI NO: 22326716 NR Description: nucleoid DNA-binding protein cnd41 - like protein
  misc_feature (100)..(297): NCBI GI NO: 24417232 NR Description: unknown [Arabidopsis thaliana]
  misc_feature (100)..(297): NCBI GI NO: 15238250 NR Description: nucleoid DNA-binding protein cnd41 - like protein
  misc_feature (53)..(294): NCBI GI NO: 38344196 NR Description: OSJNBa0064G10.12
  misc_feature (22)..(22): Xaa is any aa, unknown or other
  misc_feature (103)..(103): Xaa is any aa, unknown or other
  misc_feature (203)..(203): Xaa is any aa, unknown or other
  misc_feature (206)..(206): Xaa is any aa, unknown or other
  misc_feature (313)..(313): Xaa is any aa, unknown or other
MAVAAARLLLRVVVLALLAAAXRSVGKSAVLSLRELDGRRRSAATTDTRSSRYYVDAMLAETLGEHKKAGAATSVLELKRHSLTAIPEDPVARDRYLRRLLAXDESRANSFQPRRNKDRASASTQSASAEVPLTSGIRLQTLNYVTTISLGGSSGSPAANLTVIVDTGSDLTWVQCKPCSACYAQRDPLFDPAGSATYAAVRXNAXACADSLRAATGTPGSCGSTGAGNEKCYYALAYGDGSFSRGVLATDTVALGGASLGGFVFGCGLSNRGLFGGTAGLMGLGRTELSLVSQTASRLRRRVLLLPCRRPPXATPQARSPSAAGTTRRHPTATRRPWRTPA

SEQ ID NO: 23282 - protein, 285 aa, Zea mays subsp. mays
  peptide (1)..(285): Ceres Seq. ID no. 12412141
  misc_feature (40)..(238): Pfam Name: Pfam Description:  Eukaryotic aspartyl protease
  misc_feature (13)..(238): NCBI GI NO: 18412482 NR Description: putative aspartyl protease; protein id:At1g79720
  misc_feature (13)..(238): NCBI GI NO: 25406599 NR Description: probable aspartyl proteinase, 105611-106921
  misc_feature (13)..(238): NCBI GI NO: 21595063 NR Description: putative aspartyl protease [Arabidopsis thaliana]
  misc_feature (5)..(241): NCBI GI NO: 24430421 NR Description: 41 kD chloroplast nucleoid DNA binding protein
  misc_feature (10)..(241): NCBI GI NO: 7489168 NR Description: nucleoid DNA-binding protein cnd41
  misc_feature (43)..(240): NCBI GI NO: 11358588 NR Description: nucleoid DNA-binding protein cnd41-like protein -Arabidopsis thaliana
  misc_feature (43)..(240): NCBI GI NO: 22326716 NR Description: nucleoid DNA-binding protein cnd41 - like protein
  misc_feature (43)..(240): NCBI GI NO: 24417232 NR Description: unknown [Arabidopsis thaliana]
  misc_feature (43)..(240): NCBI GI NO: 15238250 NR Description: nucleoid DNA-binding protein cnd41 - like protein
  misc_feature (1)..(237): NCBI GI NO: 38344196 NR Description: OSJNBa0064G10.12
  misc_feature (46)..(46): Xaa is any aa, unknown or other
  misc_feature (146)..(146): Xaa is any aa, unknown or other
  misc_feature (149)..(149): Xaa is any aa, unknown or other
  misc_feature (256)..(256): Xaa is any aa, unknown or other
MLAETLGEHKKAGAATSVLELKRHSLTAIPEDPVARDRYLRRLLAXDESRANSFQPRRNKDRASASTQSASAEVPLTSGIRLQTLNYVTTISLGGSSGSPAANLTVIVDTGSDLTWVQCKPCSACYAQRDPLFDPAGSATYAAVRXNAXACADSLRAATGTPGSCGSTGAGNEKCYYALAYGDGSFSRGVLATDTVALGGASLGGFVFGCGLSNRGLFGGTAGLMGLGRTELSLVSQTASRLRRRVLLLPCRRPPXATPQARSPSAAGTTRRHPTATRRPWRTPA

SEQ ID NO: 23283 - DNA, 1284 bp, Zea mays subsp. mays
  misc_feature (1)..(1284): Ceres Seq. ID no. 12364595
aaacctcattccatgctctcttcattggttcatacttcatagctagtttgcctcccaaaaacacctgccctcgtgcgtggcaggagcacgggcacgatgatcagcacagcgcacagccggcagcagcaccatgccttcgagaagagccctggcaacagccacatgaagagcatcgacaggaagctgcagcaggccatgagccaggcggccagcaagtacatgcagaggatctaccctctaggcatgcagaggagcagctccagcctcacattgtcgtcgctctcgctgtcgcagaactccaacgactcctccatcagcagctccaactccagctgggagcctaaggtgccgctgctctacggcggcaccttcagcccctggggcgacgtcatggtgtctcgggagatgaggcgggaggacgatgacaaggtcagtgaccatgacgtcgaaggaggcgaggaggacttggactgcagtgagccggggagcctgcgtaggtgcagctggatcaccaagaacagtgacgaggcgtacgtccagttccacgacgagtgctggggcgtccctgtgtacagcgacaaccggctgttcgagcttctgtcgctgtcagggatgctgatcgaccacaactggacggagatactgaagcgtcgggacatgtacagggaggcgttcgccgacttcgaccccagcgcggtggcgcggatggaggaggaggacgtggcggagatcagcggcgacagggagctgaggatcgccgagtgcagggtccggtgcatcgtggagaacgccaggtgcatccagagggtggccagggagttcggctccttcagcggctacatgtggggccacgtgaaccaccggccggtggtgggcaagtaccgccaccacaagtacatcccgttccggacgcccaagtcggaggcggtgagcaaggacctcgtccgccggggcttccgcctcgtcggccccgtcatcgtctactctttcatgcaggccgccggcatggccatcgaccacctcgtcgactgcttccgcttccacgactgcgtccgcctcgccgagcgctcctggggcatcaccaacgtcgccgcgtagccagccggcccctcaatatctgtgcatgcattcctctccaactttttcacaccttcttcttggtgttgttattttttttttgtttggagatcgaaattgtgtgtgtaattacgtagagtatgtagtactctactaagttatgatgtaatacttctattaactctttgccaatgaaaagtagtactg

SEQ ID NO: 23284 - protein, 333 aa, Zea mays subsp. mays
  peptide (1)..(333): Ceres Seq. ID no. 12364596
  misc_feature (137)..(317): Pfam Name: Pfam Description:  Methyladenine glycosylase
  misc_feature (24)..(326): NCBI GI NO: 25518014 NR Description: F21F23.7 protein - Arabidopsis thaliana
  misc_feature (13)..(324): NCBI GI NO: 15242914 NR Description: putative protein; protein id: At5g57970.1
  misc_feature (68)..(324): NCBI GI NO: 18410766 NR Description: putative DNA-3-methyladenine glycosylase I
  misc_feature (50)..(323): NCBI GI NO: 15218379 NR Description: hypothetical protein; protein id: At1g15970.1
  misc_feature (50)..(319): NCBI GI NO: 15220860 NR Description: DNA-3-methyladenine glycosidase, putative
  misc_feature (47)..(325): NCBI GI NO: 38345034 NR Description: OSJNBa0029H02.18
  misc_feature (104)..(322): NCBI GI NO: 15241554 NR Description: putative protein; protein id: At5g44680
  misc_feature (104)..(322): NCBI GI NO: 21592537 NR Description: unknown [Arabidopsis thaliana]
  misc_feature (133)..(322): NCBI GI NO: 18399721 NR Description: expressed protein; protein id: At3g12710
  misc_feature (138)..(324): NCBI GI NO: 25406407 NR Description: hypothetical protein F9E10.6
MISTAHSRQQHHAFEKSPGNSHMKSIDRKLQQAMSQAASKYMQRIYPLGMQRSSSSLTLSSLSLSQNSNDSSISSSNSSWEPKVPLLYGGTFSPWGDVMVSREMRREDDDKVSDHDVEGGEEDLDCSEPGSLRRCSWITKNSDEAYVQFHDECWGVPVYSDNRLFELLSLSGMLIDHNWTEILKRRDMYREAFADFDPSAVARMEEEDVAEISGDRELRIAECRVRCIVENARCIQRVAREFGSFSGYMWGHVNHRPVVGKYRHHKYIPFRTPKSEAVSKDLVRRGFRLVGPVIVYSFMQAAGMAIDHLVDCFRFHDCVRLAERSWGITNVAA

SEQ ID NO: 23285 - protein, 311 aa, Zea mays subsp. mays
  peptide (1)..(311): Ceres Seq. ID no. 12364597
  misc_feature (115)..(295): Pfam Name: Pfam Description:  Methyladenine glycosylase
  misc_feature (2)..(304): NCBI GI NO: 25518014 NR Description: F21F23.7 protein - Arabidopsis thaliana
  misc_feature (1)..(302): NCBI GI NO: 15242914 NR Description: putative protein; protein id: At5g57970.1
  misc_feature (46)..(302): NCBI GI NO: 18410766 NR Description: putative DNA-3-methyladenine glycosylase I
  misc_feature (28)..(301): NCBI GI NO: 15218379 NR Description: hypothetical protein; protein id: At1g15970.1
  misc_feature (28)..(297): NCBI GI NO: 15220860 NR Description: DNA-3-methyladenine glycosidase, putative
  misc_feature (25)..(303): NCBI GI NO: 38345034 NR Description: OSJNBa0029H02.18
  misc_feature (82)..(300): NCBI GI NO: 15241554 NR Description: putative protein; protein id: At5g44680
  misc_feature (82)..(300): NCBI GI NO: 21592537 NR Description: unknown [Arabidopsis thaliana]
  misc_feature (111)..(300): NCBI GI NO: 18399721 NR Description: expressed protein; protein id: At3g12710
  misc_feature (116)..(302): NCBI GI NO: 25406407 NR Description: hypothetical protein F9E10.6
MKSIDRKLQQAMSQAASKYMQRIYPLGMQRSSSSLTLSSLSLSQNSNDSSISSSNSSWEPKVPLLYGGTFSPWGDVMVSREMRREDDDKVSDHDVEGGEEDLDCSEPGSLRRCSWITKNSDEAYVQFHDECWGVPVYSDNRLFELLSLSGMLIDHNWTEILKRRDMYREAFADFDPSAVARMEEEDVAEISGDRELRIAECRVRCIVENARCIQRVAREFGSFSGYMWGHVNHRPVVGKYRHHKYIPFRTPKSEAVSKDLVRRGFRLVGPVIVYSFMQAAGMAIDHLVDCFRFHDCVRLAERSWGITNVAA

SEQ ID NO: 23286 - protein, 300 aa, Zea mays subsp. mays
  peptide (1)..(300): Ceres Seq. ID no. 12364598
  misc_feature (104)..(284): Pfam Name: Pfam Description:  Methyladenine glycosylase
  misc_feature (1)..(293): NCBI GI NO: 25518014 NR Description: F21F23.7 protein - Arabidopsis thaliana
  misc_feature (1)..(291): NCBI GI NO: 15242914 NR Description: putative protein; protein id: At5g57970.1
  misc_feature (35)..(291): NCBI GI NO: 18410766 NR Description: putative DNA-3-methyladenine glycosylase I
  misc_feature (17)..(290): NCBI GI NO: 15218379 NR Description: hypothetical protein; protein id: At1g15970.1
  misc_feature (17)..(286): NCBI GI NO: 15220860 NR Description: DNA-3-methyladenine glycosidase, putative
  misc_feature (14)..(292): NCBI GI NO: 38345034 NR Description: OSJNBa0029H02.18
  misc_feature (71)..(289): NCBI GI NO: 15241554 NR Description: putative protein; protein id: At5g44680
  misc_feature (71)..(289): NCBI GI NO: 21592537 NR Description: unknown [Arabidopsis thaliana]
  misc_feature (100)..(289): NCBI GI NO: 18399721 NR Description: expressed protein; protein id: At3g12710
  misc_feature (105)..(291): NCBI GI NO: 25406407 NR Description: hypothetical protein F9E10.6
MSQAASKYMQRIYPLGMQRSSSSLTLSSLSLSQNSNDSSISSSNSSWEPKVPLLYGGTFSPWGDVMVSREMRREDDDKVSDHDVEGGEEDLDCSEPGSLRRCSWITKNSDEAYVQFHDECWGVPVYSDNRLFELLSLSGMLIDHNWTEILKRRDMYREAFADFDPSAVARMEEEDVAEISGDRELRIAECRVRCIVENARCIQRVAREFGSFSGYMWGHVNHRPVVGKYRHHKYIPFRTPKSEAVSKDLVRRGFRLVGPVIVYSFMQAAGMAIDHLVDCFRFHDCVRLAERSWGITNVAA

SEQ ID NO: 23287 - DNA, 954 bp, Zea mays subsp. mays
  misc_feature (1)..(954): Ceres Seq. ID no. 12412215
agcgaggggcaacagttttctcgaagaagggaaggcagcctcttcctcgtcgccggcgacgtcaccctcagcggctatcagggatgccggtcagggtggtagataccgccacgccttcctcccagccctccccagggcaagaagcaaatactggacacccatctcctcctagctgttcactcttaagtgctggaagatcttttgctgggactcaaaatgtttcaagcctgcagaaggatgaagcatggaaagtgaatgtacgcatccatggttgtgatcttgaacagggttatttatgtggaacgatggaagcgcttaatgttccattagcagatacacctgttgtgactttctgggagggggagatagtggatgctaaaaattacacttttttcactggaaagtgggaggcatcaccagatgatgatataagacattggtccaagttcccatcatttacgcctcttctgggtcagattgagacagatggtggcaagtctctggactttagcaactatccttatatatttatgagatggaaagagcaatattttgtcaatgttggagtcgactgtgggttaaccatcgctggtttctactacgtctgcttttcttgcagcgatggctccattaatggattttattatgatccaaatagcagtccatttcagaagctcgagctgaagtgtaccaatgagaagaaatccgggttcaccttttcatcctacgagctgcagtgacaggacagatgccctcgacagacaactttctgttagcatatagtgtgtgtactgaactcgtactccctaatgaaaggaatgagtggtcgtttacgtaacagtttgttttctagcaagactaagcaaactgtcactttgtaatctgcagaagcatcttgtcctttctaaaatctaccttttgtattacgttcctattccacaattgttatctgct

SEQ ID NO: 23288 - protein, 245 aa, Zea mays subsp. mays
  peptide (1)..(245): Ceres Seq. ID no. 12412216
  misc_feature (28)..(245): NCBI GI NO: 29150393 NR Description: unknown protein
  misc_feature (65)..(155): NCBI GI NO: 15224341 NR Description: hypothetical protein; protein id: At2g37680.1
  misc_feature (169)..(220): NCBI GI NO: 15224341 NR Description: hypothetical protein; protein id: At2g37680.1
  misc_feature (153)..(245): NCBI GI NO: 34895748 NR Description: P0024G09.20
  misc_feature (12)..(228): NCBI GI NO: 40747141 NR Description: hypothetical protein AN1179.2
  misc_feature (35)..(227): NCBI GI NO: 34870809 NR Description: similar to RIKEN cDNA 4933439F18
  misc_feature (29)..(227): NCBI GI NO: 12848536 NR Description: unnamed protein product [Mus musculus]
  misc_feature (29)..(227): NCBI GI NO: 34328469 NR Description: RIKEN cDNA 4933439F18 [Mus musculus]
  misc_feature (35)..(227): NCBI GI NO: 23111007 NR Description: hypothetical protein MGC3048 [Homo sapiens]
  misc_feature (35)..(227): NCBI GI NO: 18676842 NR Description: unnamed protein product [Homo sapiens]
RGATVFSKKGRQPLPRRRRRHPQRLSGMPVRVVDTATPSSQPSPGQEANTGHPSPPSCSLLSAGRSFAGTQNVSSLQKDEAWKVNVRIHGCDLEQGYLCGTMEALNVPLADTPVVTFWEGEIVDAKNYTFFTGKWEASPDDDIRHWSKFPSFTPLLGQIETDGGKSLDFSNYPYIFMRWKEQYFVNVGVDCGLTIAGFYYVCFSCSDGSINGFYYDPNSSPFQKLELKCTNEKKSGFTFSSYELQ

SEQ ID NO: 23289 - protein, 218 aa, Zea mays subsp. mays
  peptide (1)..(218): Ceres Seq. ID no. 12412217
  misc_feature (1)..(218): NCBI GI NO: 29150393 NR Description: unknown protein
  misc_feature (38)..(128): NCBI GI NO: 15224341 NR Description: hypothetical protein; protein id: At2g37680.1
  misc_feature (142)..(193): NCBI GI NO: 15224341 NR Description: hypothetical protein; protein id: At2g37680.1
  misc_feature (126)..(218): NCBI GI NO: 34895748 NR Description: P0024G09.20
  misc_feature (1)..(201): NCBI GI NO: 40747141 NR Description: hypothetical protein AN1179.2
  misc_feature (8)..(200): NCBI GI NO: 34870809 NR Description: similar to RIKEN cDNA 4933439F18
  misc_feature (2)..(200): NCBI GI NO: 12848536 NR Description: unnamed protein product [Mus musculus]
  misc_feature (2)..(200): NCBI GI NO: 34328469 NR Description: RIKEN cDNA 4933439F18 [Mus musculus]
  misc_feature (8)..(200): NCBI GI NO: 23111007 NR Description: hypothetical protein MGC3048 [Homo sapiens]
  misc_feature (8)..(200): NCBI GI NO: 18676842 NR Description: unnamed protein product [Homo sapiens]
MPVRVVDTATPSSQPSPGQEANTGHPSPPSCSLLSAGRSFAGTQNVSSLQKDEAWKVNVRIHGCDLEQGYLCGTMEALNVPLADTPVVTFWEGEIVDAKNYTFFTGKWEASPDDDIRHWSKFPSFTPLLGQIETDGGKSLDFSNYPYIFMRWKEQYFVNVGVDCGLTIAGFYYVCFSCSDGSINGFYYDPNSSPFQKLELKCTNEKKSGFTFSSYELQ

SEQ ID NO: 23290 - protein, 144 aa, Zea mays subsp. mays
  peptide (1)..(144): Ceres Seq. ID no. 12412218
  misc_feature (1)..(144): NCBI GI NO: 29150393 NR Description: unknown protein
  misc_feature (1)..(54): NCBI GI NO: 15224341 NR Description: hypothetical protein; protein id: At2g37680.1
  misc_feature (68)..(119): NCBI GI NO: 15224341 NR Description: hypothetical protein; protein id: At2g37680.1
  misc_feature (52)..(144): NCBI GI NO: 34895748 NR Description: P0024G09.20
  misc_feature (1)..(127): NCBI GI NO: 40747141 NR Description: hypothetical protein AN1179.2
  misc_feature (1)..(126): NCBI GI NO: 34870809 NR Description: similar to RIKEN cDNA 4933439F18
  misc_feature (1)..(126): NCBI GI NO: 12848536 NR Description: unnamed protein product [Mus musculus]
  misc_feature (1)..(126): NCBI GI NO: 34328469 NR Description: RIKEN cDNA 4933439F18 [Mus musculus]
  misc_feature (1)..(126): NCBI GI NO: 23111007 NR Description: hypothetical protein MGC3048 [Homo sapiens]
  misc_feature (1)..(126): NCBI GI NO: 18676842 NR Description: unnamed protein product [Homo sapiens]
MEALNVPLADTPVVTFWEGEIVDAKNYTFFTGKWEASPDDDIRHWSKFPSFTPLLGQIETDGGKSLDFSNYPYIFMRWKEQYFVNVGVDCGLTIAGFYYVCFSCSDGSINGFYYDPNSSPFQKLELKCTNEKKSGFTFSSYELQ

SEQ ID NO: 23291 - DNA, 1766 bp, Zea mays subsp. mays
  misc_feature (1)..(1766): Ceres Seq. ID no. 12386848
gcagtcgcagcagggccgagccgaccggtcaaaagcactgctgccccaccccaacccaccaccatccccgttccccaacccccaaagccgagagccatcccgcccgcagccgcaaccaggcaagcaagcgggagccgccaactcgtgcctctcggcagcggcgtctgaactctgaaccgaccgaccgaccgaccgttccgttccgttcaccccaccatggaggcgccgccgggaccggggcccatggagctggacgccccacctcccgccgccgccgccgcggcgattcctcccgccggcagcgacaagcacaaggacggggaagggggagacgctgtgacgggccatatcatctccaccaccatcggcgggaagaacggcgagcccaagcggaccatcagttacatggcagaacgtgtcgtgggcacaggctcatttgggatcgtcttccaggctaagtgtctggaaacaggagagaccttcgccatcaagaaggtgctgcaagatcggcgttacaagaaccgggagctgcaacttatgcgtgccatggagcaccccaacgtcatctgcctgaagcactgcttcttctcgacaacgagcagggacgaattgtttttaaaccttgtcatggaattcgtccctgagactctataccgagtcctgaagcactacagcaatgcgaaccagaggatgcctcttatctacgtcaagctctacatgtatcagctttttagaggcctagcttatattcataatgtaccaggagtctgccatagggatgtgaagccacaaaacgttttggttgatcctctcacccaccaggtcaagctctgtgactttggtagtgcaaaagttctgattcctggtgaaccgaacatatcttacatatgctctcgttactatcgtgcccctgagctcatatttggtgcgacggagtatacaagttcaatagacatatggtcagctggttgtgttctagctgagttgcttcttggacagccactatttccaggagagagcgctgttgatcagttggtagagatcatcaaggttcttggtactccaacccgtgaggagatacggtgcatgaatcccaactatactgagttcaggtttcctcagataaaggctcatccatggcacaagattttccacaagagaatgcctcctgaagccatagaccttgcttctcgtctccttcagtattcaccaagtcttcgctgctctgctcttgacgcatgtgctcatcccttcttcgatgagcttcggacaccgaacgcacgcctaccaaacggccgcccgttccctccgctctttaacttcaagcacgaactagcaaatgcctctccggacctcgtcagcaggcttgtgccggagcacattagacggcagatcggtgtcaacttcgggagcagctaggagggcaggcgctgtgatggtcgaagttttcggtcttggtttccccttctggagagtgggaggggctcaagcagtacctgagaaaagtagtgaaaccgtgtaaattatctgaccgtgaaggagtactaccgccagtaactggcgcatgttcgtccagtagttatggtaagaatgtaggaggtggagactggttaatgtgtagggtcgttttttttgttttgttttgatattactaccattttgttgtaatgttcgtcggtacttccagcagtagtgtagctggccacgttttgttcgtccgccatgatgtaaatgatcatcgcccaactgtaatgcatgttctctcg

SEQ ID NO: 23292 - protein, 400 aa, Zea mays subsp. mays
  peptide (1)..(400): Ceres Seq. ID no. 12386849
  misc_feature (63)..(347): Pfam Name: Pfam Description:  Protein kinase domain
  misc_feature (4)..(400): NCBI GI NO: 15221476 NR Description: shaggy-like kinase, putative; protein id:At1g06390
  misc_feature (36)..(397): NCBI GI NO: 15233984 NR Description: shaggy-like protein kinase etha (EC 2
  misc_feature (36)..(397): NCBI GI NO: 12643751 NR Description: Shaggy-related protein kinase eta (ASK-eta)
  misc_feature (4)..(397): NCBI GI NO: 12643750 NR Description: Shaggy-related protein kinase delta
  misc_feature (4)..(397): NCBI GI NO: 15224593 NR Description: putative shaggy-like protein kinase dzeta
  misc_feature (36)..(397): NCBI GI NO: 18700188 NR Description: AT4g18710/F28A21_120 [Arabidopsis thaliana]
  misc_feature (4)..(397): NCBI GI NO: 21593135 NR Description: putative shaggy-like protein kinase dzeta
  misc_feature (1)..(394): NCBI GI NO: 7434281 NR Description: probable shaggy-like protein kinase etha (EC2
  misc_feature (37)..(392): NCBI GI NO: 15230058 NR Description: shaggy related protein kinase, ASK-GAMMA
  misc_feature (7)..(391): NCBI GI NO: 7434282 NR Description: shaggy protein kinase (EC 2
MEAPPGPGPMELDAPPPAAAAAAIPPAGSDKHKDGEGGDAVTGHIISTTIGGKNGEPKRTISYMAERVVGTGSFGIVFQAKCLETGETFAIKKVLQDRRYKNRELQLMRAMEHPNVICLKHCFFSTTSRDELFLNLVMEFVPETLYRVLKHYSNANQRMPLIYVKLYMYQLFRGLAYIHNVPGVCHRDVKPQNVLVDPLTHQVKLCDFGSAKVLIPGEPNISYICSRYYRAPELIFGATEYTSSIDIWSAGCVLAELLLGQPLFPGESAVDQLVEIIKVLGTPTREEIRCMNPNYTEFRFPQIKAHPWHKIFHKRMPPEAIDLASRLLQYSPSLRCSALDACAHPFFDELRTPNARLPNGRPFPPLFNFKHELANASPDLVSRLVPEHIRRQIGVNFGSS

SEQ ID NO: 23293 - protein, 391 aa, Zea mays subsp. mays
  peptide (1)..(391): Ceres Seq. ID no. 12386850
  misc_feature (54)..(338): Pfam Name: Pfam Description:  Protein kinase domain
  misc_feature (1)..(391): NCBI GI NO: 15221476 NR Description: shaggy-like kinase, putative; protein id:At1g06390
  misc_feature (27)..(388): NCBI GI NO: 15233984 NR Description: shaggy-like protein kinase etha (EC 2
  misc_feature (27)..(388): NCBI GI NO: 12643751 NR Description: Shaggy-related protein kinase eta (ASK-eta)
  misc_feature (1)..(388): NCBI GI NO: 12643750 NR Description: Shaggy-related protein kinase delta
  misc_feature (1)..(388): NCBI GI NO: 15224593 NR Description: putative shaggy-like protein kinase dzeta
  misc_feature (27)..(388): NCBI GI NO: 18700188 NR Description: AT4g18710/F28A21_120 [Arabidopsis thaliana]
  misc_feature (1)..(388): NCBI GI NO: 21593135 NR Description: putative shaggy-like protein kinase dzeta
  misc_feature (1)..(385): NCBI GI NO: 7434281 NR Description: probable shaggy-like protein kinase etha (EC2
  misc_feature (28)..(383): NCBI GI NO: 15230058 NR Description: shaggy related protein kinase, ASK-GAMMA
  misc_feature (1)..(382): NCBI GI NO: 7434282 NR Description: shaggy protein kinase (EC 2
MELDAPPPAAAAAAIPPAGSDKHKDGEGGDAVTGHIISTTIGGKNGEPKRTISYMAERVVGTGSFGIVFQAKCLETGETFAIKKVLQDRRYKNRELQLMRAMEHPNVICLKHCFFSTTSRDELFLNLVMEFVPETLYRVLKHYSNANQRMPLIYVKLYMYQLFRGLAYIHNVPGVCHRDVKPQNVLVDPLTHQVKLCDFGSAKVLIPGEPNISYICSRYYRAPELIFGATEYTSSIDIWSAGCVLAELLLGQPLFPGESAVDQLVEIIKVLGTPTREEIRCMNPNYTEFRFPQIKAHPWHKIFHKRMPPEAIDLASRLLQYSPSLRCSALDACAHPFFDELRTPNARLPNGRPFPPLFNFKHELANASPDLVSRLVPEHIRRQIGVNFGSS

SEQ ID NO: 23294 - protein, 337 aa, Zea mays subsp. mays
  peptide (1)..(337): Ceres Seq. ID no. 12386851
  misc_feature (1)..(284): Pfam Name: Pfam Description:  Protein kinase domain
  misc_feature (1)..(337): NCBI GI NO: 15221476 NR Description: shaggy-like kinase, putative; protein id:At1g06390
  misc_feature (1)..(334): NCBI GI NO: 15233984 NR Description: shaggy-like protein kinase etha (EC 2
  misc_feature (1)..(334): NCBI GI NO: 12643751 NR Description: Shaggy-related protein kinase eta (ASK-eta)
  misc_feature (1)..(334): NCBI GI NO: 12643750 NR Description: Shaggy-related protein kinase delta
  misc_feature (1)..(334): NCBI GI NO: 15224593 NR Description: putative shaggy-like protein kinase dzeta
  misc_feature (1)..(334): NCBI GI NO: 18700188 NR Description: AT4g18710/F28A21_120 [Arabidopsis thaliana]
  misc_feature (1)..(334): NCBI GI NO: 21593135 NR Description: putative shaggy-like protein kinase dzeta
  misc_feature (1)..(331): NCBI GI NO: 7434281 NR Description: probable shaggy-like protein kinase etha (EC2
  misc_feature (1)..(329): NCBI GI NO: 15230058 NR Description: shaggy related protein kinase, ASK-GAMMA
  misc_feature (1)..(328): NCBI GI NO: 7434282 NR Description: shaggy protein kinase (EC 2
MAERVVGTGSFGIVFQAKCLETGETFAIKKVLQDRRYKNRELQLMRAMEHPNVICLKHCFFSTTSRDELFLNLVMEFVPETLYRVLKHYSNANQRMPLIYVKLYMYQLFRGLAYIHNVPGVCHRDVKPQNVLVDPLTHQVKLCDFGSAKVLIPGEPNISYICSRYYRAPELIFGATEYTSSIDIWSAGCVLAELLLGQPLFPGESAVDQLVEIIKVLGTPTREEIRCMNPNYTEFRFPQIKAHPWHKIFHKRMPPEAIDLASRLLQYSPSLRCSALDACAHPFFDELRTPNARLPNGRPFPPLFNFKHELANASPDLVSRLVPEHIRRQIGVNFGSS

SEQ ID NO: 23295 - DNA, 1710 bp, Zea mays subsp. mays
  misc_feature (1)..(1710): Ceres Seq. ID no. 12342530
cttcctcgtccgttccggcgtcctctctcccccagacccccaccccatgccaacgcccaccccgccgtctccgtccccgtctccctcttctggaacttgccctctgctccggatcggcgcgggccgtcgttttgccatggcatttccatcttgggcgactctgttcttcgccgggatgatggtggtgttggcagcggtggaagcggaagcggaagctggaggagggagcgtctgcttcgaccggatgttcggtttcggggactcgctcacggataccggcaacttcctgctctccgtgcctgacgacttcccggaccccgcgcggaacctcccctacggccagaccttcttcgggcgtccctccggccgctattccgacggccgcaacctgctcgacttcttcgcagaggcatttgggttgccatatgtgccaccttacctaggcagtggggacttccagaatggcgcaaactttgcagtcggcggcgcaactgctctcaatggctcgttcttccgtgagcgcggtgtggagcctacatggacgcctcactcccttgatgagcagatgcaatggttcaagaagcttctcccattcattgcaccatctgagacagagctaaatgaaataatgtccaagtcacttttgtttgtgggagagattggcggaaatgattacaaccatttaatcgttagggagaaatctgttgatgagctacatgaaattgttcctaatgttgttggcgccataagctcgggcatcacggaccttataaatcttggagcaaagaagttagttgttccagggaacttcccaatagggtgtgtcccattatatcttgcaatctttcagagccaaaaggagggttactatgaggaacaaacaggctgcattaagtggctcaatgaatttgctgagtaccataataggatgcttcaggaggagttggagaaactcaggaatcttcaccctgatgtaaccatcatttatgctgattattacggtgctgcattgaacatattccgtgccccactcaagtttggcttcacagtcccactgaatgcgtgctgcggaagtgacgctccgtacaactgttccccttcaatactgtgcgggcgtcctggatctacagtgtgccctgacccatcaaaatacatctcatgggatggtctacacttcaccgaggcgagttacaaagttgtcatccaaggagtactaggggggtacgccaaacctcctctttcagaagcctgcaagggtgcggagttcaaagtttctcaacttcaccaatgtacagataatccaacaaacaccgtatcatacgatgccttgagctcttttatttgatctgatgagctcaagtacttttagatttgtgctggtaaaaaaagtgcagtttagagttacagtgggcagtgtagatgctgcaggaccgggtatcttggacacttctcagagcggagaagagatccatcgatctagagtcatgtagttctacaatcaacttggctgctgggaggaggtaaaaaaaggtggggattttgtagtgtggaaatttgcaatcaccgaagggatacaggtggtcatactgctatataggaacctagatctatgattctgcttctgagggcaatgtatgcagatatgggctcagttgccttttaacagatacatgcatatatacagtgtaaatttgttgattcacattaacc

SEQ ID NO: 23296 - protein, 447 aa, Zea mays subsp. mays
  peptide (1)..(447): Ceres Seq. ID no. 12342531
  misc_feature (82)..(404): Pfam Name: Pfam Description:  GDSL-like Lipase/Acylhydrolase
  misc_feature (57)..(413): NCBI GI NO: 34911800 NR Description: lipase-like protein
  misc_feature (79)..(428): NCBI GI NO: 15225872 NR Description: putative lipase; protein id: At2g27360.1
  misc_feature (79)..(431): NCBI GI NO: 10764858 NR Description: F1K23.17 [Arabidopsis thaliana]
  misc_feature (79)..(428): NCBI GI NO: 15218731 NR Description: lipase, putative; protein id: At1g28600
  misc_feature (79)..(428): NCBI GI NO: 21593234 NR Description: lipase, putative [Arabidopsis thaliana]
  misc_feature (79)..(421): NCBI GI NO: 10764858 NR Description: F1K23.17 [Arabidopsis thaliana]
  misc_feature (79)..(421): NCBI GI NO: 15218728 NR Description: lipase, putative; protein id: At1g28590.1
  misc_feature (46)..(425): NCBI GI NO: 15218725 NR Description: lipase, putative; protein id: At1g28580
  misc_feature (79)..(426): NCBI GI NO: 15218723 NR Description: lipase, putative; protein id: At1g28570.1
  misc_feature (45)..(283): NCBI GI NO: 34912612 NR Description: P0046B10.23
FLVRSGVLSPPDPHPMPTPTPPSPSPSPSSGTCPLLRIGAGRRFAMAFPSWATLFFAGMMVVLAAVEAEAEAGGGSVCFDRMFGFGDSLTDTGNFLLSVPDDFPDPARNLPYGQTFFGRPSGRYSDGRNLLDFFAEAFGLPYVPPYLGSGDFQNGANFAVGGATALNGSFFRERGVEPTWTPHSLDEQMQWFKKLLPFIAPSETELNEIMSKSLLFVGEIGGNDYNHLIVREKSVDELHEIVPNVVGAISSGITDLINLGAKKLVVPGNFPIGCVPLYLAIFQSQKEGYYEEQTGCIKWLNEFAEYHNRMLQEELEKLRNLHPDVTIIYADYYGAALNIFRAPLKFGFTVPLNACCGSDAPYNCSPSILCGRPGSTVCPDPSKYISWDGLHFTEASYKVVIQGVLGGYAKPPLSEACKGAEFKVSQLHQCTDNPTNTVSYDALSSFI

SEQ ID NO: 23297 - protein, 432 aa, Zea mays subsp. mays
  peptide (1)..(432): Ceres Seq. ID no. 12342532
  misc_feature (67)..(389): Pfam Name: Pfam Description:  GDSL-like Lipase/Acylhydrolase
  misc_feature (42)..(398): NCBI GI NO: 34911800 NR Description: lipase-like protein
  misc_feature (64)..(413): NCBI GI NO: 15225872 NR Description: putative lipase; protein id: At2g27360.1
  misc_feature (64)..(416): NCBI GI NO: 10764858 NR Description: F1K23.17 [Arabidopsis thaliana]
  misc_feature (64)..(413): NCBI GI NO: 15218731 NR Description: lipase, putative; protein id: At1g28600
  misc_feature (64)..(413): NCBI GI NO: 21593234 NR Description: lipase, putative [Arabidopsis thaliana]
  misc_feature (64)..(406): NCBI GI NO: 10764858 NR Description: F1K23.17 [Arabidopsis thaliana]
  misc_feature (64)..(406): NCBI GI NO: 15218728 NR Description: lipase, putative; protein id: At1g28590.1
  misc_feature (31)..(410): NCBI GI NO: 15218725 NR Description: lipase, putative; protein id: At1g28580
  misc_feature (64)..(411): NCBI GI NO: 15218723 NR Description: lipase, putative; protein id: At1g28570.1
  misc_feature (30)..(268): NCBI GI NO: 34912612 NR Description: P0046B10.23
MPTPTPPSPSPSPSSGTCPLLRIGAGRRFAMAFPSWATLFFAGMMVVLAAVEAEAEAGGGSVCFDRMFGFGDSLTDTGNFLLSVPDDFPDPARNLPYGQTFFGRPSGRYSDGRNLLDFFAEAFGLPYVPPYLGSGDFQNGANFAVGGATALNGSFFRERGVEPTWTPHSLDEQMQWFKKLLPFIAPSETELNEIMSKSLLFVGEIGGNDYNHLIVREKSVDELHEIVPNVVGAISSGITDLINLGAKKLVVPGNFPIGCVPLYLAIFQSQKEGYYEEQTGCIKWLNEFAEYHNRMLQEELEKLRNLHPDVTIIYADYYGAALNIFRAPLKFGFTVPLNACCGSDAPYNCSPSILCGRPGSTVCPDPSKYISWDGLHFTEASYKVVIQGVLGGYAKPPLSEACKGAEFKVSQLHQCTDNPTNTVSYDALSSFI

SEQ ID NO: 23298 - protein, 402 aa, Zea mays subsp. mays
  peptide (1)..(402): Ceres Seq. ID no. 12342533
  misc_feature (37)..(359): Pfam Name: Pfam Description:  GDSL-like Lipase/Acylhydrolase
  misc_feature (12)..(368): NCBI GI NO: 34911800 NR Description: lipase-like protein
  misc_feature (34)..(383): NCBI GI NO: 15225872 NR Description: putative lipase; protein id: At2g27360.1
  misc_feature (34)..(386): NCBI GI NO: 10764858 NR Description: F1K23.17 [Arabidopsis thaliana]
  misc_feature (34)..(383): NCBI GI NO: 15218731 NR Description: lipase, putative; protein id: At1g28600
  misc_feature (34)..(383): NCBI GI NO: 21593234 NR Description: lipase, putative [Arabidopsis thaliana]
  misc_feature (34)..(376): NCBI GI NO: 10764858 NR Description: F1K23.17 [Arabidopsis thaliana]
  misc_feature (34)..(376): NCBI GI NO: 15218728 NR Description: lipase, putative; protein id: At1g28590.1
  misc_feature (1)..(380): NCBI GI NO: 15218725 NR Description: lipase, putative; protein id: At1g28580
  misc_feature (34)..(381): NCBI GI NO: 15218723 NR Description: lipase, putative; protein id: At1g28570.1
  misc_feature (1)..(238): NCBI GI NO: 34912612 NR Description: P0046B10.23
MAFPSWATLFFAGMMVVLAAVEAEAEAGGGSVCFDRMFGFGDSLTDTGNFLLSVPDDFPDPARNLPYGQTFFGRPSGRYSDGRNLLDFFAEAFGLPYVPPYLGSGDFQNGANFAVGGATALNGSFFRERGVEPTWTPHSLDEQMQWFKKLLPFIAPSETELNEIMSKSLLFVGEIGGNDYNHLIVREKSVDELHEIVPNVVGAISSGITDLINLGAKKLVVPGNFPIGCVPLYLAIFQSQKEGYYEEQTGCIKWLNEFAEYHNRMLQEELEKLRNLHPDVTIIYADYYGAALNIFRAPLKFGFTVPLNACCGSDAPYNCSPSILCGRPGSTVCPDPSKYISWDGLHFTEASYKVVIQGVLGGYAKPPLSEACKGAEFKVSQLHQCTDNPTNTVSYDALSSFI

SEQ ID NO: 23299 - DNA, 1398 bp, Zea mays subsp. mays
  misc_feature (1)..(1398): Ceres Seq. ID no. 12347860
gttttttctctgacttttctgatttggtcctggcttctcctccttccccctcggatcggcggcagttcccgtgccctcacagtcacaggggacgcggctcgcctttccttccccgccaatccatccgctcttctcagcggcgagaagaagagatggggagcaacgccgccggcaagcctcctcctcctgctgctgctgctgtgtcgtgggagttccacgcgacggggcctcgcaacttgaccagccccggctggagggacctcatccgctccagctggagagatccaagctacagaaggatcgcagtgtcgtgcttcgtgcaggccgcgtatctgctggagctggacaggcaggagggcagagccggtgaagccgcgctcgctcccaactggtggaagcccttcaagtacaagctggtgcgcccgctcatcgactccagagacgggtccatctacggggcgcttctagaatgggaccagctcgccgccctcgctgacctgatagtggccaagcctcagggcgctcccaaggtggtcctcgcgctcaggggcaccgtgctgaggcagctgaccgtggtgagggacctggaagacgaccttcggttgtttgccctggagagcctgagggggtccgtcaggttcacaggcgcgctggaggtgctcaagtcggcgatccacaggcacggcagcgccaacgtgtgcgttgccggccactccctgggcgccggctttgcgctgcaggtcggcagggccttggccaaggatggaaccttcgtggagtgccatctgttcaacccgccgtcggtgtcacttggcacgggcctcaggaaaatccaggaaaaggccagcagtgtcctcaagcggtatatcagtagaagccgcggcggcggcggcagcggcagcagctcctcgtcgaatgtttccccaggaccaggagaggagctacaagccgccgctcgagatggagttggagaagaagagatgagcagggaggtcaaaagatgggtgccaaacctgtacgtgaacagctgcgactacatctgctgcttctacgctgaccgtagcggcgtcgctaccgtcaccgaggagaagcgttccggagtgcattccaagctgtacgtgatcgccaaaggaccgagcaagttcctggaggctcacgggctgcagcagtggtggtccgatgattctgagctccacttggccgtgcacgacagcaaactcatgtataggcaccttaagtccctctatgttgaacagtagtagagaaggcattggtacttgtttctcagaatgcctagtttttcttctctagtccagacaagaaaacatgtaaaccgtcagctgattaagagctccaactcttgcaactcctctaagcatatttcttctcttctcgcgc

SEQ ID NO: 23300 - protein, 418 aa, Zea mays subsp. mays
  peptide (1)..(418): Ceres Seq. ID no. 12347861
  misc_feature (170)..(418): NCBI GI NO: 34904536 NR Description: B1066G12.13
  misc_feature (51)..(139): NCBI GI NO: 34904536 NR Description: B1066G12.13
  misc_feature (69)..(415): NCBI GI NO: 15241306 NR Description: putative protein; protein id: At5g50890.1
  misc_feature (48)..(415): NCBI GI NO: 34909578 NR Description: P0046E05.21
  misc_feature (59)..(415): NCBI GI NO: 34910916 NR Description: OSJNBb0063G05.3
  misc_feature (90)..(286): NCBI GI NO: 34901136 NR Description: contains EST AU161031
  misc_feature (71)..(350): NCBI GI NO: 30689345 NR Description: expressed protein [Arabidopsis thaliana]
  misc_feature (70)..(405): NCBI GI NO: 18413406 NR Description: unknown protein; protein id: At4g10955.1
  misc_feature (71)..(270): NCBI GI NO: 10177082 NR Description: gene_id:MOP9
  misc_feature (70)..(350): NCBI GI NO: 18396010 NR Description: expressed protein; protein id: At2g05260
FFSDFSDLVLASPPSPSDRRQFPCPHSHRGRGSPFLPRQSIRSSQRREEEMGSNAAGKPPPPAAAAVSWEFHATGPRNLTSPGWRDLIRSSWRDPSYRRIAVSCFVQAAYLLELDRQEGRAGEAALAPNWWKPFKYKLVRPLIDSRDGSIYGALLEWDQLAALADLIVAKPQGAPKVVLALRGTVLRQLTVVRDLEDDLRLFALESLRGSVRFTGALEVLKSAIHRHGSANVCVAGHSLGAGFALQVGRALAKDGTFVECHLFNPPSVSLGTGLRKIQEKASSVLKRYISRSRGGGGSGSSSSSNVSPGPGEELQAAARDGVGEEEMSREVKRWVPNLYVNSCDYICCFYADRSGVATVTEEKRSGVHSKLYVIAKGPSKFLEAHGLQQWWSDDSELHLAVHDSKLMYRHLKSLYVEQ

SEQ ID NO: 23301 - protein, 368 aa, Zea mays subsp. mays
  peptide (1)..(368): Ceres Seq. ID no. 12347862
  misc_feature (120)..(368): NCBI GI NO: 34904536 NR Description: B1066G12.13
  misc_feature (1)..(89): NCBI GI NO: 34904536 NR Description: B1066G12.13
  misc_feature (19)..(365): NCBI GI NO: 15241306 NR Description: putative protein; protein id: At5g50890.1
  misc_feature (1)..(365): NCBI GI NO: 34909578 NR Description: P0046E05.21
  misc_feature (9)..(365): NCBI GI NO: 34910916 NR Description: OSJNBb0063G05.3
  misc_feature (40)..(236): NCBI GI NO: 34901136 NR Description: contains EST AU161031
  misc_feature (21)..(300): NCBI GI NO: 30689345 NR Description: expressed protein [Arabidopsis thaliana]
  misc_feature (20)..(355): NCBI GI NO: 18413406 NR Description: unknown protein; protein id: At4g10955.1
  misc_feature (21)..(220): NCBI GI NO: 10177082 NR Description: gene_id:MOP9
  misc_feature (20)..(300): NCBI GI NO: 18396010 NR Description: expressed protein; protein id: At2g05260
MGSNAAGKPPPPAAAAVSWEFHATGPRNLTSPGWRDLIRSSWRDPSYRRIAVSCFVQAAYLLELDRQEGRAGEAALAPNWWKPFKYKLVRPLIDSRDGSIYGALLEWDQLAALADLIVAKPQGAPKVVLALRGTVLRQLTVVRDLEDDLRLFALESLRGSVRFTGALEVLKSAIHRHGSANVCVAGHSLGAGFALQVGRALAKDGTFVECHLFNPPSVSLGTGLRKIQEKASSVLKRYISRSRGGGGSGSSSSSNVSPGPGEELQAAARDGVGEEEMSREVKRWVPNLYVNSCDYICCFYADRSGVATVTEEKRSGVHSKLYVIAKGPSKFLEAHGLQQWWSDDSELHLAVHDSKLMYRHLKSLYVEQ

SEQ ID NO: 23302 - DNA, 1050 bp, Zea mays subsp. mays
  misc_feature (1)..(1050): Ceres Seq. ID no. 12411097
ccgtggttcaactcctaccactaccacagcaccaacgacggaccaggcagcagagaaaaagcagaccagacgagacctctcgcgttccgtcctcctcccccctgcccctgctgccgttccccttcttcctcagttctcccgcccgctgctgccctccgtccgcgtccagatcccgccaccaaccgatccggcgccctccagcatggcgggggcgggggcgaaggcggcgggagccctggctctggcgctcgtgctcgcgctcgcgggggccaactccgagggcgacgcgctctcggcgctgcgccggagcctcagggaccccggcggcgttctgcagagctgggaccccacgctcgtcaacccctgcacctggttccacgtcacctgcgaccgcgacaaccgcgtcacccgcctagatcttggtaatttgaacttatctggtcatctggtgcctgagcttgggaaactggagcatcttcagtatctggaactttataagaataacattcaaggaacagtcccttctgagcttggcaacttgaagaatctaataagcttcgacttgtacaagaacaacatttcggggacaatacctcctgcccttggaaagttgaagtcccttgtattcttgcgtctcaatggcaatcatttgactgggcccatcccaagggaactcgctggaatatctagtctcaaagttgttgatgtttcaagtaatgatttgtgcgggacgattcccacgtctggaccatttgaacatattcctctgagcaactttgagaagaacccgcgcttggaaggtccagagctacaaggcctggccatatacgacaccaactgctagaggcaccacgaagataagaactgctagaaagtaacgagcgaacaaggttacgagaaattgggcgatatagatttactaggtctggatctgtaatcctccctgcatagctcttattcgtaactcgctgcctgcacgaaagttggtgtgtgtttttagcagaatgctttctgtccgtgaaagtaaacttgaactgcttattacgactg

SEQ ID NO: 23303 - protein, 280 aa, Zea mays subsp. mays
  peptide (1)..(280): Ceres Seq. ID no. 12411098
  misc_feature (70)..(280): NCBI GI NO: 29468120 NR Description: leucine-rich repeat protein [Oryza sativa]
  misc_feature (70)..(280): NCBI GI NO: 27497122 NR Description: floral organ regulator 1
  misc_feature (68)..(280): NCBI GI NO: 34903344 NR Description: unnamed protein product
  misc_feature (84)..(280): NCBI GI NO: 30385250 NR Description: leucine-rich repeat protein
  misc_feature (74)..(280): NCBI GI NO: 7489030 NR Description: leucine-rich repeat protein LRP - tomato
  misc_feature (76)..(280): NCBI GI NO: 15242153 NR Description: leucine-rich repeat protein; protein id:At5g21090
  misc_feature (76)..(280): NCBI GI NO: 34146800 NR Description: At3g43740 [Arabidopsis thaliana]
  misc_feature (75)..(280): NCBI GI NO: 34896972 NR Description: putative leucine-rich repeat protein
  misc_feature (70)..(222): NCBI GI NO: 34909134 NR Description: putative leucine-rich repeat protein
  misc_feature (66)..(268): NCBI GI NO: 13897310 NR Description: SERK2 protein [Zea mays]
RGSTPTTTTAPTTDQAAEKKQTRRDLSRSVLLPPAPAAVPLLPQFSRPLLPSVRVQIPPPTDPAPSSMAGAGAKAAGALALALVLALAGANSEGDALSALRRSLRDPGGVLQSWDPTLVNPCTWFHVTCDRDNRVTRLDLGNLNLSGHLVPELGKLEHLQYLELYKNNIQGTVPSELGNLKNLISFDLYKNNISGTIPPALGKLKSLVFLRLNGNHLTGPIPRELAGISSLKVVDVSSNDLCGTIPTSGPFEHIPLSNFEKNPRLEGPELQGLAIYDTNC

SEQ ID NO: 23304 - protein, 213 aa, Zea mays subsp. mays
  peptide (1)..(213): Ceres Seq. ID no. 12411099
  misc_feature (3)..(213): NCBI GI NO: 29468120 NR Description: leucine-rich repeat protein [Oryza sativa]
  misc_feature (3)..(213): NCBI GI NO: 27497122 NR Description: floral organ regulator 1
  misc_feature (1)..(213): NCBI GI NO: 34903344 NR Description: unnamed protein product
  misc_feature (17)..(213): NCBI GI NO: 30385250 NR Description: leucine-rich repeat protein
  misc_feature (7)..(213): NCBI GI NO: 7489030 NR Description: leucine-rich repeat protein LRP - tomato
  misc_feature (9)..(213): NCBI GI NO: 15242153 NR Description: leucine-rich repeat protein; protein id:At5g21090
  misc_feature (9)..(213): NCBI GI NO: 34146800 NR Description: At3g43740 [Arabidopsis thaliana]
  misc_feature (8)..(213): NCBI GI NO: 34896972 NR Description: putative leucine-rich repeat protein
  misc_feature (3)..(155): NCBI GI NO: 34909134 NR Description: putative leucine-rich repeat protein
  misc_feature (1)..(201): NCBI GI NO: 13897310 NR Description: SERK2 protein [Zea mays]
MAGAGAKAAGALALALVLALAGANSEGDALSALRRSLRDPGGVLQSWDPTLVNPCTWFHVTCDRDNRVTRLDLGNLNLSGHLVPELGKLEHLQYLELYKNNIQGTVPSELGNLKNLISFDLYKNNISGTIPPALGKLKSLVFLRLNGNHLTGPIPRELAGISSLKVVDVSSNDLCGTIPTSGPFEHIPLSNFEKNPRLEGPELQGLAIYDTNC

SEQ ID NO: 23305 - protein, 141 aa, Zea mays subsp. mays
  peptide (1)..(141): Ceres Seq. ID no. 12411100
PWFNSYHYHSTNDGPGSREKADQTRPLAFRPPPPCPCCRSPSSSVLPPAAALRPRPDPATNRSGALQHGGGGGEGGGSPGSGARARARGGQLRGRRALGAAPEPQGPRRRSAELGPHARQPLHLVPRHLRPRQPRHPPRSW

SEQ ID NO: 23306 - DNA, 878 bp, Zea mays subsp. mays
  misc_feature (1)..(878): Ceres Seq. ID no. 12349908
acaacaccagaatccgcgaatcacagacgcgcctatctcagcttgctgcactgccctgccatcatatcaatatcatatcgtacgtgagcccggccgagagcgagggagaggcatggctgctccgaagctcgcgacgttggcgctggccgtgctcctggcggcgaccgtggtggctcccccggccgcggtgcgcgcggcgatgtcgtgctccaccgtgtacagcacgctgatgccgtgcctgccgttcgtccagatgggcggggccatgccgccccagccgtgctgcggcggcatccgcagcctgctgcagcaggccaacaacacccccgaccgccgcaccatctgcggctgcctcaagaacgtcgccaacggcgccaacgggagcggcacctacatcagccgcgccgccgcgctgcccagcaagtgcggcgtcgccctgccgtacaagatcagcaccaacgttaactgcaacacgattaattaagtgaggcgtcctgtgcgcgtcccgggcgaggaatgcatgcatggcgctggcggagagtaataaaataatgctactggtattttaagctatatcgaggtgtgcctgtctctagtcatttatggtgtttaggaatcgtctacacagttcgtaacggtgtatcgtggtcggatgcatgttgccgcgagcagagtacgtaggcatgaaccgacgtgtgcgcttctgtctgtgtactctctctatgttgtaatgtgtgggtgctttgatccagatgtattcgctcgtgagtcgtggaagtagatcgtttcagtatcattaccgtgtgttctttcttaattttacatgcgattctgaaaatgaacatacacgaagctggactggtccagtatacgttgcc

SEQ ID NO: 23307 - protein, 160 aa, Zea mays subsp. mays
  peptide (1)..(160): Ceres Seq. ID no. 12349909
  misc_feature (69)..(156): Pfam Name: Pfam Description:  Protease inhibitor/seed storage/LTP family
  misc_feature (40)..(157): NCBI GI NO: 34907830 NR Description: putative lipid transfer protein
  misc_feature (38)..(160): NCBI GI NO: 6492243 NR Description: lipid transfer protein [Hordeum vulgare]
  misc_feature (42)..(159): NCBI GI NO: 6782436 NR Description: lipid-transfer protein [Nicotiana glauca]
  misc_feature (38)..(160): NCBI GI NO: 2497746 NR Description: NONSPECIFIC LIPID-TRANSFER PROTEIN 2 PRECURSOR
  misc_feature (38)..(160): NCBI GI NO: 7438275 NR Description: lipid transfer protein LPT II - rice
  misc_feature (44)..(160): NCBI GI NO: 7438277 NR Description: lipid transfer protein LPT IV - rice
  misc_feature (50)..(159): NCBI GI NO: 15224899 NR Description: putative nonspecific lipid-transfer protein
  misc_feature (44)..(160): NCBI GI NO: 2506826 NR Description: Nonspecific lipid-transfer protein 1 precursor
  misc_feature (38)..(159): NCBI GI NO: 14423814 NR Description: Nonspecific lipid-transfer protein precursor
  misc_feature (38)..(160): NCBI GI NO: 2497747 NR Description: NONSPECIFIC LIPID-TRANSFER PROTEIN 3 PRECURSOR
QHQNPRITDAPISACCTALPSYQYHIVREPGRERGRGMAAPKLATLALAVLLAATVVAPPAAVRAAMSCSTVYSTLMPCLPFVQMGGAMPPQPCCGGIRSLLQQANNTPDRRTICGCLKNVANGANGSGTYISRAAALPSKCGVALPYKISTNVNCNTIN

SEQ ID NO: 23308 - protein, 123 aa, Zea mays subsp. mays
  peptide (1)..(123): Ceres Seq. ID no. 12349910
  misc_feature (32)..(119): Pfam Name: Pfam Description:  Protease inhibitor/seed storage/LTP family
  misc_feature (3)..(120): NCBI GI NO: 34907830 NR Description: putative lipid transfer protein
  misc_feature (1)..(123): NCBI GI NO: 6492243 NR Description: lipid transfer protein [Hordeum vulgare]
  misc_feature (5)..(122): NCBI GI NO: 6782436 NR Description: lipid-transfer protein [Nicotiana glauca]
  misc_feature (1)..(123): NCBI GI NO: 2497746 NR Description: NONSPECIFIC LIPID-TRANSFER PROTEIN 2 PRECURSOR
  misc_feature (1)..(123): NCBI GI NO: 7438275 NR Description: lipid transfer protein LPT II - rice
  misc_feature (7)..(123): NCBI GI NO: 7438277 NR Description: lipid transfer protein LPT IV - rice
  misc_feature (13)..(122): NCBI GI NO: 15224899 NR Description: putative nonspecific lipid-transfer protein
  misc_feature (7)..(123): NCBI GI NO: 2506826 NR Description: Nonspecific lipid-transfer protein 1 precursor
  misc_feature (1)..(122): NCBI GI NO: 14423814 NR Description: Nonspecific lipid-transfer protein precursor
  misc_feature (1)..(123): NCBI GI NO: 2497747 NR Description: NONSPECIFIC LIPID-TRANSFER PROTEIN 3 PRECURSOR
MAAPKLATLALAVLLAATVVAPPAAVRAAMSCSTVYSTLMPCLPFVQMGGAMPPQPCCGGIRSLLQQANNTPDRRTICGCLKNVANGANGSGTYISRAAALPSKCGVALPYKISTNVNCNTIN

SEQ ID NO: 23309 - protein, 94 aa, Zea mays subsp. mays
  peptide (1)..(94): Ceres Seq. ID no. 12349911
  misc_feature (3)..(90): Pfam Name: Pfam Description:  Protease inhibitor/seed storage/LTP family
  misc_feature (1)..(91): NCBI GI NO: 34907830 NR Description: putative lipid transfer protein
  misc_feature (1)..(94): NCBI GI NO: 6492243 NR Description: lipid transfer protein [Hordeum vulgare]
  misc_feature (1)..(93): NCBI GI NO: 6782436 NR Description: lipid-transfer protein [Nicotiana glauca]
  misc_feature (1)..(94): NCBI GI NO: 2497746 NR Description: NONSPECIFIC LIPID-TRANSFER PROTEIN 2 PRECURSOR
  misc_feature (1)..(94): NCBI GI NO: 7438275 NR Description: lipid transfer protein LPT II - rice
  misc_feature (1)..(94): NCBI GI NO: 7438277 NR Description: lipid transfer protein LPT IV - rice
  misc_feature (1)..(93): NCBI GI NO: 15224899 NR Description: putative nonspecific lipid-transfer protein
  misc_feature (1)..(94): NCBI GI NO: 2506826 NR Description: Nonspecific lipid-transfer protein 1 precursor
  misc_feature (1)..(93): NCBI GI NO: 14423814 NR Description: Nonspecific lipid-transfer protein precursor
  misc_feature (1)..(94): NCBI GI NO: 2497747 NR Description: NONSPECIFIC LIPID-TRANSFER PROTEIN 3 PRECURSOR
MSCSTVYSTLMPCLPFVQMGGAMPPQPCCGGIRSLLQQANNTPDRRTICGCLKNVANGANGSGTYISRAAALPSKCGVALPYKISTNVNCNTIN

SEQ ID NO: 23310 - DNA, 1656 bp, Zea mays subsp. mays
  misc_feature (1)..(1656): Ceres Seq. ID no. 12345858
atttcctacttcttccagactaaaaccccaggcctcgcgagtcgccgccgaccgccgcaaccacgcgctacgcccccgatggctcacctccagctcctcttctcatactcgcggcggaacccgcagcgccaccgcctgctctcactcttccacttctcctccgacgccaagtccagctccgcctcgccgccgcctcctcccatcaagcccgtctcctacgctccgaagccgcagcagcaggccccgcccgaggagtctgccgccccgacaaccccggacgttgcccctagggaccaatccccactgccacgacggcctcagcagccgatgccgccgcgggagtggacgcggcaggatatgcggtacgtgaaggacgcggcgcccgcgatctcgcccgtctcgtacccgtccagggtcgcgccgctgccggaggaccgtccggtcggcggcgaggtggaggaggtgcaggacggggggctgcagggggagtcggagcggatccagatgaacgcggtgcgtcccaccaggagcgtctttgggatgcacgaggaggataggctgccgtacccgacggtcatacccgtcgtcaagcggccgcagaaggtcgccattgatttaatcgacgccatccgcctagttaagactagtgcaaacgagaagaagcggaattttgttgaaactgttgaagctcatgtgatattaggtgttgatcctcgtcgtggtgaccagatggttcgtggcgccttaacattgcctcatggcactggcaagactgttagggtagcagtatttgctgaaggtcctggagcagacgaagctagagctgccggagcagatgttgttggtggtgatgagttgattgaggagatccgcacaggaggaggcaaactaagctttgacaagtgcatagcaaccccaatgttcatgccccgattgtcaaaggttgctaggatattgggtccacgtggtttgatgcctaatcctaagctaggatctgtgacgaatgatgtttctggtgcggtcaaagcggcaaaatcaggacgtgttgatttcaaaatagataaaactgctatagtgcatgttggccttgggaaggtaaactttactgaggagagtttacgtgaaaatattggtgcttttgtgcatgcacttttacttgctaagccagtgggcttaaagaaaacttcaaaatatgtcggatatgtgaagaagttcacactgagtagcacaatgggacccggacttcctgttaccataccatcactatctgtggccgccgatcactataacaaggttcaagtcagctaagtcaatacagtagaacatcgaatgtagctttctttctccaatagccgcggcctgcagatggcggcttgtttggcagtggagcttaaccattcagcaaggttgagatttgggtggcttgctgttttgttattggggataataccttttgtggacaaggatcattcaacaaacatcataacctataactttattttatccttgtcactgcaattttgagattgcgttgctggtctacctatgttatccagagtcttgtcatttgttgcacgaaatgtaatattgaaatacggtagttttagggcattacttatgataataagaaatgaagtattaaccatgattcgattc

SEQ ID NO: 23311 - protein, 435 aa, Zea mays subsp. mays
  peptide (1)..(435): Ceres Seq. ID no. 12345859
  misc_feature (200)..(414): Pfam Name: Pfam Description:  Ribosomal protein L1p/L10e family
  misc_feature (27)..(434): NCBI GI NO: 30689119 NR Description: ribosomal protein L1p family
  misc_feature (199)..(425): NCBI GI NO: 15965098 NR Description: PROBABLE 50S RIBOSOMAL PROTEIN L1
  misc_feature (205)..(426): NCBI GI NO: 22966133 NR Description: hypothetical protein [Rhodospirillum rubrum]
  misc_feature (199)..(426): NCBI GI NO: 15889253 NR Description: AGR_C_3573p [Agrobacterium tumefaciens]
  misc_feature (199)..(426): NCBI GI NO: 17935849 NR Description: 50S ribosomal protein L1
  misc_feature (201)..(421): NCBI GI NO: 22957081 NR Description: hypothetical protein [Rhodobacter sphaeroides]
  misc_feature (206)..(426): NCBI GI NO: 9957210 NR Description: L1 [EDTA-degrading bacterium BNC1]
  misc_feature (206)..(417): NCBI GI NO: 27380525 NR Description: 50S ribosomal protein L1
  misc_feature (199)..(425): NCBI GI NO: 13470539 NR Description: 50S ribosomal protein L1 [Mesorhizobium loti]
  misc_feature (210)..(423): NCBI GI NO: 23012511 NR Description: hypothetical protein
ISYFFQTKTPGLASRRRPPQPRATPPMAHLQLLFSYSRRNPQRHRLLSLFHFSSDAKSSSASPPPPPIKPVSYAPKPQQQAPPEESAAPTTPDVAPRDQSPLPRRPQQPMPPREWTRQDMRYVKDAAPAISPVSYPSRVAPLPEDRPVGGEVEEVQDGGLQGESERIQMNAVRPTRSVFGMHEEDRLPYPTVIPVVKRPQKVAIDLIDAIRLVKTSANEKKRNFVETVEAHVILGVDPRRGDQMVRGALTLPHGTGKTVRVAVFAEGPGADEARAAGADVVGGDELIEEIRTGGGKLSFDKCIATPMFMPRLSKVARILGPRGLMPNPKLGSVTNDVSGAVKAAKSGRVDFKIDKTAIVHVGLGKVNFTEESLRENIGAFVHALLLAKPVGLKKTSKYVGYVKKFTLSSTMGPGLPVTIPSLSVAADHYNKVQVS

SEQ ID NO: 23312 - protein, 409 aa, Zea mays subsp. mays
  peptide (1)..(409): Ceres Seq. ID no. 12345860
  misc_feature (174)..(388): Pfam Name: Pfam Description:  Ribosomal protein L1p/L10e family
  misc_feature (1)..(408): NCBI GI NO: 30689119 NR Description: ribosomal protein L1p family
  misc_feature (173)..(399): NCBI GI NO: 15965098 NR Description: PROBABLE 50S RIBOSOMAL PROTEIN L1
  misc_feature (179)..(400): NCBI GI NO: 22966133 NR Description: hypothetical protein [Rhodospirillum rubrum]
  misc_feature (173)..(400): NCBI GI NO: 15889253 NR Description: AGR_C_3573p [Agrobacterium tumefaciens]
  misc_feature (173)..(400): NCBI GI NO: 17935849 NR Description: 50S ribosomal protein L1
  misc_feature (175)..(395): NCBI GI NO: 22957081 NR Description: hypothetical protein [Rhodobacter sphaeroides]
  misc_feature (180)..(400): NCBI GI NO: 9957210 NR Description: L1 [EDTA-degrading bacterium BNC1]
  misc_feature (180)..(391): NCBI GI NO: 27380525 NR Description: 50S ribosomal protein L1
  misc_feature (173)..(399): NCBI GI NO: 13470539 NR Description: 50S ribosomal protein L1 [Mesorhizobium loti]
  misc_feature (184)..(397): NCBI GI NO: 23012511 NR Description: hypothetical protein
MAHLQLLFSYSRRNPQRHRLLSLFHFSSDAKSSSASPPPPPIKPVSYAPKPQQQAPPEESAAPTTPDVAPRDQSPLPRRPQQPMPPREWTRQDMRYVKDAAPAISPVSYPSRVAPLPEDRPVGGEVEEVQDGGLQGESERIQMNAVRPTRSVFGMHEEDRLPYPTVIPVVKRPQKVAIDLIDAIRLVKTSANEKKRNFVETVEAHVILGVDPRRGDQMVRGALTLPHGTGKTVRVAVFAEGPGADEARAAGADVVGGDELIEEIRTGGGKLSFDKCIATPMFMPRLSKVARILGPRGLMPNPKLGSVTNDVSGAVKAAKSGRVDFKIDKTAIVHVGLGKVNFTEESLRENIGAFVHALLLAKPVGLKKTSKYVGYVKKFTLSSTMGPGLPVTIPSLSVAADHYNKVQVS

SEQ ID NO: 23313 - protein, 326 aa, Zea mays subsp. mays
  peptide (1)..(326): Ceres Seq. ID no. 12345861
  misc_feature (91)..(305): Pfam Name: Pfam Description:  Ribosomal protein L1p/L10e family
  misc_feature (1)..(325): NCBI GI NO: 30689119 NR Description: ribosomal protein L1p family
  misc_feature (90)..(316): NCBI GI NO: 15965098 NR Description: PROBABLE 50S RIBOSOMAL PROTEIN L1
  misc_feature (96)..(317): NCBI GI NO: 22966133 NR Description: hypothetical protein [Rhodospirillum rubrum]
  misc_feature (90)..(317): NCBI GI NO: 15889253 NR Description: AGR_C_3573p [Agrobacterium tumefaciens]
  misc_feature (90)..(317): NCBI GI NO: 17935849 NR Description: 50S ribosomal protein L1
  misc_feature (92)..(312): NCBI GI NO: 22957081 NR Description: hypothetical protein [Rhodobacter sphaeroides]
  misc_feature (97)..(317): NCBI GI NO: 9957210 NR Description: L1 [EDTA-degrading bacterium BNC1]
  misc_feature (97)..(308): NCBI GI NO: 27380525 NR Description: 50S ribosomal protein L1
  misc_feature (90)..(316): NCBI GI NO: 13470539 NR Description: 50S ribosomal protein L1 [Mesorhizobium loti]
  misc_feature (101)..(314): NCBI GI NO: 23012511 NR Description: hypothetical protein
MPPREWTRQDMRYVKDAAPAISPVSYPSRVAPLPEDRPVGGEVEEVQDGGLQGESERIQMNAVRPTRSVFGMHEEDRLPYPTVIPVVKRPQKVAIDLIDAIRLVKTSANEKKRNFVETVEAHVILGVDPRRGDQMVRGALTLPHGTGKTVRVAVFAEGPGADEARAAGADVVGGDELIEEIRTGGGKLSFDKCIATPMFMPRLSKVARILGPRGLMPNPKLGSVTNDVSGAVKAAKSGRVDFKIDKTAIVHVGLGKVNFTEESLRENIGAFVHALLLAKPVGLKKTSKYVGYVKKFTLSSTMGPGLPVTIPSLSVAADHYNKVQVS

SEQ ID NO: 23314 - DNA, 2064 bp, Zea mays subsp. mays
  misc_feature (1)..(2064): Ceres Seq. ID no. 12411078
aagcttttcccattctcgttgatacgagcgagagtcgagacaggtcaaaaggagattgagtaaggaaaagaaaaaaaaaatcgctgctcccgaggcacggcggcggcgagcgtgcgacacctccggcggctccacagatccggcgaccgatctccggccgcctgcggatgctccggggccggcgcggtaaggcccaggggtccacgctcgtagccagatctcggggcgctgctgggaagtggggttcgttccgtccctgcctccctggtggtggggatggggtggtccgcggggctgtggtggctcgtggccgcgctgtgggtggtggcggcggcggcggcggcggcggagggtgaggtcgtggtcgggtcagcgccgaggcggcacgcgtacgcgtcgatgatgtacatgggcactccacgggactacgagttctacgtggccacgcgcgtcatgatgcagtccctgcgccggctcagcgccgacgccgaccgcgtcgtgatcgcctccctcgacgtcccaccgctctgggtccaggcgctatgatggtgtaaaggtggtctctgtggagaatttgaaaaatccatacgagagacaagagaatttcaacatgcgattcaagttgaccttaaacaagctgtatgcatggagcttggtttcgtatgagcgagttgttatgcttgactccgacaacattttcctccaaaatactgattagttatttcagtgtggtcagttctgtgctgtcttcatcaatccctgtatcttccatacaggtctctttgtgcttcagccctcaatgaacgtttttaagaatatgctacatgagctatcggttggacgtgaaaacccagatggtgcagaccaaggctttcttgctagttatttcccggacttacttgatcagccaatgttccatccaccagctaatggtacaaaacttcagggtacttaccgcctccctctaggctaccagatggatgcgtcttactattatctgaagcttcgctggagtattccatgtggaccgaacagtgtgattacatttccaagtgctccatggtttaagccatggtactggtggtcttggccagttttacctttggggctctcttggcatgaacaacgtcgtgaaaacctagggtattcatctgagataccagtagtattaattcaggctgtactgtacattggagtcatagcagtgacccgactggcgaagcctaccttgaacaagatgtgctacaacagaagaatggagaaaaacactatgttcttgctctctgttctcagagtcgtggctgcttggtccatacttgctgcctacaccatacccttcttcatcatcccaaggaccgtgcatccactgcttggctggcctctctacttgctcggttcttttgctctttcttccattgttatcaacattttcctcttccacccgatcaccgtcctcacaacatggtttggattcataggcgcactcctggtgatggccttcccttggtatctaaatggttttgtcagggccttggcagtgtttgcgtatgctttctgctgcgcgcccttgatctgggcatctttgggtcaagacaatgagctccttgcaggtcctgattgagagggatgcattcaggctcggagaacctagccagaatgcggagttcacaaagctatactgaggtgggcatggcagatacatgtgatttatcactttcgttgctcagtttgaacagttaatctgcattcacattgtcaaattctgatggccaattcaaatgtacaactaaacctgcagcctgggagcaagagtggttgtacacaatggaactatctggaaacctctagaatccatgaatgttgttatcttagacatgtaggtgacatatacagtggaaaaggggggagggctgtagaattggtgctgaactgaagaggaactgactggggtcagttgttagttattttgatttattgttcctctgaaaagccaaggcatttttggctttgtttgtaattgatatgatatgttccttcacaaatgaagaaaagggttgaaagtgc

SEQ ID NO: 23315 - protein, 273 aa, Zea mays subsp. mays
  peptide (1)..(273): Ceres Seq. ID no. 12411079
  misc_feature (1)..(262): NCBI GI NO: 38345479 NR Description: OSJNBa0010H02.17
  misc_feature (1)..(262): NCBI GI NO: 37536746 NR Description: hypothetical protein
  misc_feature (1)..(261): NCBI GI NO: 17380986 NR Description: unknown protein [Arabidopsis thaliana]
  misc_feature (1)..(261): NCBI GI NO: 18403930 NR Description: putative glycogenin; protein id: At2g35710.1
  misc_feature (1)..(65): NCBI GI NO: 25408409 NR Description: probable glycogenin
  misc_feature (116)..(261): NCBI GI NO: 25408409 NR Description: probable glycogenin
  misc_feature (1)..(71): NCBI GI NO: 15235811 NR Description: glucosyltransferase like protein
  misc_feature (116)..(261): NCBI GI NO: 15235811 NR Description: glucosyltransferase like protein
  misc_feature (1)..(211): NCBI GI NO: 39596633 NR Description: Hypothetical protein CBG07620
  misc_feature (1)..(150): NCBI GI NO: 7507569 NR Description: hypothetical protein T10B10
MNVFKNMLHELSVGRENPDGADQGFLASYFPDLLDQPMFHPPANGTKLQGTYRLPLGYQMDASYYYLKLRWSIPCGPNSVITFPSAPWFKPWYWWSWPVLPLGLSWHEQRRENLGYSSEIPVVLIQAVLYIGVIAVTRLAKPTLNKMCYNRRMEKNTMFLLSVLRVVAAWSILAAYTIPFFIIPRTVHPLLGWPLYLLGSFALSSIVINIFLFHPITVLTTWFGFIGALLVMAFPWYLNGFVRALAVFAYAFCCAPLIWASLGQDNELLAGPD

SEQ ID NO: 23316 - protein, 267 aa, Zea mays subsp. mays
  peptide (1)..(267): Ceres Seq. ID no. 12411080
  misc_feature (1)..(256): NCBI GI NO: 38345479 NR Description: OSJNBa0010H02.17
  misc_feature (1)..(256): NCBI GI NO: 37536746 NR Description: hypothetical protein
  misc_feature (1)..(255): NCBI GI NO: 17380986 NR Description: unknown protein [Arabidopsis thaliana]
  misc_feature (1)..(255): NCBI GI NO: 18403930 NR Description: putative glycogenin; protein id: At2g35710.1
  misc_feature (1)..(59): NCBI GI NO: 25408409 NR Description: probable glycogenin
  misc_feature (110)..(255): NCBI GI NO: 25408409 NR Description: probable glycogenin
  misc_feature (1)..(65): NCBI GI NO: 15235811 NR Description: glucosyltransferase like protein
  misc_feature (110)..(255): NCBI GI NO: 15235811 NR Description: glucosyltransferase like protein
  misc_feature (1)..(205): NCBI GI NO: 39596633 NR Description: Hypothetical protein CBG07620
  misc_feature (1)..(144): NCBI GI NO: 7507569 NR Description: hypothetical protein T10B10
MLHELSVGRENPDGADQGFLASYFPDLLDQPMFHPPANGTKLQGTYRLPLGYQMDASYYYLKLRWSIPCGPNSVITFPSAPWFKPWYWWSWPVLPLGLSWHEQRRENLGYSSEIPVVLIQAVLYIGVIAVTRLAKPTLNKMCYNRRMEKNTMFLLSVLRVVAAWSILAAYTIPFFIIPRTVHPLLGWPLYLLGSFALSSIVINIFLFHPITVLTTWFGFIGALLVMAFPWYLNGFVRALAVFAYAFCCAPLIWASLGQDNELLAGPD

SEQ ID NO: 23317 - protein, 236 aa, Zea mays subsp. mays
  peptide (1)..(236): Ceres Seq. ID no. 12411081
  misc_feature (1)..(225): NCBI GI NO: 38345479 NR Description: OSJNBa0010H02.17
  misc_feature (1)..(225): NCBI GI NO: 37536746 NR Description: hypothetical protein
  misc_feature (1)..(224): NCBI GI NO: 17380986 NR Description: unknown protein [Arabidopsis thaliana]
  misc_feature (1)..(224): NCBI GI NO: 18403930 NR Description: putative glycogenin; protein id: At2g35710.1
  misc_feature (1)..(28): NCBI GI NO: 25408409 NR Description: probable glycogenin
  misc_feature (79)..(224): NCBI GI NO: 25408409 NR Description: probable glycogenin
  misc_feature (1)..(34): NCBI GI NO: 15235811 NR Description: glucosyltransferase like protein
  misc_feature (79)..(224): NCBI GI NO: 15235811 NR Description: glucosyltransferase like protein
  misc_feature (1)..(174): NCBI GI NO: 39596633 NR Description: Hypothetical protein CBG07620
  misc_feature (1)..(113): NCBI GI NO: 7507569 NR Description: hypothetical protein T10B10
MFHPPANGTKLQGTYRLPLGYQMDASYYYLKLRWSIPCGPNSVITFPSAPWFKPWYWWSWPVLPLGLSWHEQRRENLGYSSEIPVVLIQAVLYIGVIAVTRLAKPTLNKMCYNRRMEKNTMFLLSVLRVVAAWSILAAYTIPFFIIPRTVHPLLGWPLYLLGSFALSSIVINIFLFHPITVLTTWFGFIGALLVMAFPWYLNGFVRALAVFAYAFCCAPLIWASLGQDNELLAGPD

SEQ ID NO: 23318 - DNA, 649 bp, Zea mays subsp. mays
  misc_feature (1)..(649): Ceres Seq. ID no. 12363035
  misc_feature (554)..(554): n is a, c, t, g, unknown, or other
  misc_feature (553)..(553): n is a, c, t, g, unknown, or other
  misc_feature (597)..(597): n is a, c, t, g, unknown, or other
  misc_feature (629)..(629): n is a, c, t, g, unknown, or other
  misc_feature (619)..(619): n is a, c, t, g, unknown, or other
gcacgagaccattacctagaacatcctaatcgaaaaatccctgaaaacctcacaaaaccctcgtttgctccccaccaccccgccgcgccgccgcctgtaccagctgcgtcaagatgagtcggcaccctgaggtgaagtgggctcagaggatcgacaaggtttacatcactgtacagttacctgacgcaaaggatgctaaggtcaatttggatccagatggtgtcttcacattctctggcagcgctggtacaaacttgtatgaattgaaactagatctgaatgacaaagtaaacgttgaggctagcaaaataagtgtgtaccagcggtcgggcggcgcccccggtggcgatgccgacggcggcgtcgacgacgaccacgacgagctgtagatggtggtggggagcggtgacgtggagtgccgggaaccaagccaaattttgtaatggtgtttaggggggagggtggtggacaaaaaaactaatcttggtgctgctctgccaatagacgggctgaccatagaacttttttttcccttctacttccttgtgattgnnctttttatagaggattcgcattgcagtgtaatgtaaaaaaaanatgacccacttctgaaacttgntactacaagntaataatgaaatggtgcatc

SEQ ID NO: 23319 - protein, 91 aa, Zea mays subsp. mays
  peptide (1)..(91): Ceres Seq. ID no. 12363036
  misc_feature (1)..(72): NCBI GI NO: 38637531 NR Description: putative p23 co-chaperone
  misc_feature (1)..(72): NCBI GI NO: 11229591 NR Description: p23 co-chaperone [Arabidopsis thaliana]
  misc_feature (1)..(72): NCBI GI NO: 30679149 NR Description: glycine-rich protein [Arabidopsis thaliana]
  misc_feature (3)..(72): NCBI GI NO: 7487014 NR Description: hypothetical protein T14P8
  misc_feature (1)..(72): NCBI GI NO: 11934654 NR Description: p23 [Brassica napus]
  misc_feature (1)..(72): NCBI GI NO: 12231292 NR Description: ripening regulated protein DDTFR8
  misc_feature (1)..(72): NCBI GI NO: 40882701 NR Description: putative ripening regulated protein
  misc_feature (43)..(91): NCBI GI NO: 168424 NR Description: polypeptide chain-binding protein
  misc_feature (1)..(65): NCBI GI NO: 22330824 NR Description: similar to p23 {Brassica napus}
MSRHPEVKWAQRIDKVYITVQLPDAKDAKVNLDPDGVFTFSGSAGTNLYELKLDLNDKVNVEASKISVYQRSGGAPGGDADGGVDDDHDEL

SEQ ID NO: 23320 - DNA, 1209 bp, Zea mays subsp. mays
  misc_feature (1)..(1209): Ceres Seq. ID no. 12355859
agaattccatttatttcatcctctctttttttttttccattccacgcccctcccaacactcccagacccatttccctttccttcccctccggctccgcctcctcgaccactccgacaacccccagcgcctcctctccggcgagctccacctctccaccggcggcggcgagaagcgggggggctaactaagtctgtaggctgcggcggaggtgatcccggagccggagccgagtctagggcgatggggcagcagtcgctgatctacgcgttcgtggcgcgtggcaccgtggtgctggccgagtacaccgagttcaccggcaacttcaccaccatcgccgcccagtgcctgcagaagctccccgccagcaacaacaagttcacctacaactgcgacggccacaccttcaactacctcgtcgaggacggattcacgtattgtgtagttgctgttgaatcagttgggcgacaaatccccatagctttcctggacagagttaaggaagacttcaccaaaaagtatggaggcgggaaagcagctactgctgcagcgaacagcttgaacagggagtttggatcaaagcttaaagagcacatgcagtactgtgtggaccaccctgaggaggttagcaagcttgccaaggtgaaggcccaagtctccgaagtcaaaggagttatgatggaaaacattgagaaggttcttgaccgtggcgagaagattgaactgcttgtcgacaaaactgaaaatctgcgttctcaggcacaagatttcaggcagcagggcaccaaggtgcggcggaagatgtggctccaaaacatgaaaatcaagctgatcgtcctgggcatcatcatcgtgctcatcctcatcatcatcctgtcggtgtgccatggcttcaagtgcggcagcaagtgaggagggggacttacagatggccgtgccctgccctgccctgccctggcacctgcgagaaggaggagactacatgtggagttttttttttttttgcttctttagtcgtcgtgttaagtcgtcctgcgccgataattcttggtggtcaccagataagagtcattcctgatgtcggtgttgattgctgttgggttggtcgggaaatgactgggtgaaccggggggcgaagtgggaggggggttgtgtcgtgtaattttggatgccactattgtgcatgtatagccccgtgtgctgtgctaccc

SEQ ID NO: 23321 - protein, 302 aa, Zea mays subsp. mays
  peptide (1)..(302): Ceres Seq. ID no. 12355860
  misc_feature (207)..(294): Pfam Name: Pfam Description:  Synaptobrevin
  misc_feature (81)..(299): NCBI GI NO: 29150380 NR Description: synaptobrevin-like protein
  misc_feature (78)..(299): NCBI GI NO: 30685375 NR Description: synaptobrevin -related [Arabidopsis thaliana]
  misc_feature (81)..(299): NCBI GI NO: 27805753 NR Description: Vesicle-associated membrane protein 725
  misc_feature (81)..(299): NCBI GI NO: 15220943 NR Description: synaptobrevin 7B, putative; protein id: At1g04750
  misc_feature (81)..(299): NCBI GI NO: 15220315 NR Description: synaptobrevin 7B, putative; protein id: At1g04760
  misc_feature (81)..(300): NCBI GI NO: 15225796 NR Description: putative synaptobrevin; protein id: At2g33120
  misc_feature (81)..(300): NCBI GI NO: 600710 NR Description: formerly called HAT24
  misc_feature (81)..(299): NCBI GI NO: 27805765 NR Description: Putative vesicle-associated membrane protein 726
  misc_feature (81)..(274): NCBI GI NO: 33347409 NR Description: synptobrevin-related protein [Pyrus pyrifolia]
  misc_feature (81)..(299): NCBI GI NO: 27805752 NR Description: Vesicle-associated membrane protein 724
EFHLFHPLFFFFHSTPLPTLPDPFPFPSPPAPPPRPLRQPPAPPLRRAPPLHRRRREAGGLTKSVGCGGGDPGAGAESRAMGQQSLIYAFVARGTVVLAEYTEFTGNFTTIAAQCLQKLPASNNKFTYNCDGHTFNYLVEDGFTYCVVAVESVGRQIPIAFLDRVKEDFTKKYGGGKAATAAANSLNREFGSKLKEHMQYCVDHPEEVSKLAKVKAQVSEVKGVMMENIEKVLDRGEKIELLVDKTENLRSQAQDFRQQGTKVRRKMWLQNMKIKLIVLGIIIVLILIIILSVCHGFKCGSK

SEQ ID NO: 23322 - protein, 222 aa, Zea mays subsp. mays
  peptide (1)..(222): Ceres Seq. ID no. 12355861
  misc_feature (127)..(214): Pfam Name: Pfam Description:  Synaptobrevin
  misc_feature (1)..(219): NCBI GI NO: 29150380 NR Description: synaptobrevin-like protein
  misc_feature (1)..(219): NCBI GI NO: 30685375 NR Description: synaptobrevin -related [Arabidopsis thaliana]
  misc_feature (1)..(219): NCBI GI NO: 27805753 NR Description: Vesicle-associated membrane protein 725
  misc_feature (1)..(219): NCBI GI NO: 15220943 NR Description: synaptobrevin 7B, putative; protein id: At1g04750
  misc_feature (1)..(219): NCBI GI NO: 15220315 NR Description: synaptobrevin 7B, putative; protein id: At1g04760
  misc_feature (1)..(220): NCBI GI NO: 15225796 NR Description: putative synaptobrevin; protein id: At2g33120
  misc_feature (1)..(220): NCBI GI NO: 600710 NR Description: formerly called HAT24
  misc_feature (1)..(219): NCBI GI NO: 27805765 NR Description: Putative vesicle-associated membrane protein 726
  misc_feature (1)..(194): NCBI GI NO: 33347409 NR Description: synptobrevin-related protein [Pyrus pyrifolia]
  misc_feature (1)..(219): NCBI GI NO: 27805752 NR Description: Vesicle-associated membrane protein 724
MGQQSLIYAFVARGTVVLAEYTEFTGNFTTIAAQCLQKLPASNNKFTYNCDGHTFNYLVEDGFTYCVVAVESVGRQIPIAFLDRVKEDFTKKYGGGKAATAAANSLNREFGSKLKEHMQYCVDHPEEVSKLAKVKAQVSEVKGVMMENIEKVLDRGEKIELLVDKTENLRSQAQDFRQQGTKVRRKMWLQNMKIKLIVLGIIIVLILIIILSVCHGFKCGSK

SEQ ID NO: 23323 - DNA, 1117 bp, Zea mays subsp. mays
  misc_feature (1)..(1117): Ceres Seq. ID no. 12348922
aaaaaaggccagccaacagaggccggtggaaaggagagaatcgagcagagccaccaggttgctcctcatttccactttccactgcgcctccgctgcccatcgccgtccccgaccgcagcgcaggactgaggatgagtgaagaggataaggctgctgcttctgctgagcagcctaagagggcccctaagctcaatgaaaggatcctctcctctctgtccaggaggtccgtagctgctcatccatggcatgatctcgagatcggtcctggtgctcctgctgtattcaatgttgttgttgagatcacaaagggaagcaaagtcaaatacgagcttgacaagaaaactggactgattaaggttgatcgagtcctttactcatcagttgtataccctcacaattatggtttcattccaaggactctttgtgaagacaatgacccaatggatgtgttggtcctgatgcaggagcctgttgttcctggttcgttcctgagagctagagcaattggccttatgcccatgattgaccagggtgaaaaggatgacaagataatagcagtatgtgctgacgatcctgaataccgtcactacaacgacatcagcgagctgtctcctcaccgcctgcaagagatcaagcgcttctttgaagattacaagaaaaacgagaacaaagaagtcgcagttgatgcattcttgcccgcgacaacagctcaagaagccattcagtactccatggacctgtatgcccagtatattttgcaaagcttgaggcagtagattgcaagcaacaatttatctatcatgcgtcttggatcggggcgtgattttaataagccgaatcgcttgctatattgcgaaccttggaattgagaacagcgtcactagctgtgattcgctcctttctcgttaaattatcatatgaataggccaagtccatacgtttaccgtgtggcgctctgtcagtcttcgtctacccaagtagctagctgcatggagggatgtctagcgttgctatgagatggcactcgtgggtctgcgggctgactacatgggtccgttcctgtgttttccgtaaaataaaattataattctatataattgaatcatttaatttatgc

SEQ ID NO: 23324 - protein, 257 aa, Zea mays subsp. mays
  peptide (1)..(257): Ceres Seq. ID no. 12348923
  misc_feature (95)..(249): Pfam Name: Pfam Description:  Inorganic pyrophosphatase
  misc_feature (44)..(257): NCBI GI NO: 4033424 NR Description: Soluble inorganic pyrophosphatase
  misc_feature (44)..(257): NCBI GI NO: 38345829 NR Description: OSJNBa0070M12.12
  misc_feature (44)..(257): NCBI GI NO: 4033417 NR Description: Soluble inorganic pyrophosphatase
  misc_feature (44)..(257): NCBI GI NO: 15226453 NR Description: putative inorganic pyrophosphatase
  misc_feature (44)..(257): NCBI GI NO: 5669924 NR Description: soluble inorganic pyrophosphatase
  misc_feature (44)..(257): NCBI GI NO: 15223288 NR Description: soluble inorganic pyrophosphatase, putative
  misc_feature (44)..(257): NCBI GI NO: 26451240 NR Description: putative inorganic pyrophosphatase
  misc_feature (58)..(257): NCBI GI NO: 2500047 NR Description: Soluble inorganic pyrophosphatase
  misc_feature (44)..(216): NCBI GI NO: 25290346 NR Description: protein T25K16.5 [imported] - Arabidopsis thaliana
  misc_feature (218)..(257): NCBI GI NO: 25290346 NR Description: protein T25K16.5 [imported] - Arabidopsis thaliana
KRPANRGRWKGENRAEPPGCSSFPLSTAPPLPIAVPDRSAGLRMSEEDKAAASAEQPKRAPKLNERILSSLSRRSVAAHPWHDLEIGPGAPAVFNVVVEITKGSKVKYELDKKTGLIKVDRVLYSSVVYPHNYGFIPRTLCEDNDPMDVLVLMQEPVVPGSFLRARAIGLMPMIDQGEKDDKIIAVCADDPEYRHYNDISELSPHRLQEIKRFFEDYKKNENKEVAVDAFLPATTAQEAIQYSMDLYAQYILQSLRQ

SEQ ID NO: 23325 - protein, 214 aa, Zea mays subsp. mays
  peptide (1)..(214): Ceres Seq. ID no. 12348924
  misc_feature (52)..(206): Pfam Name: Pfam Description:  Inorganic pyrophosphatase
  misc_feature (1)..(214): NCBI GI NO: 4033424 NR Description: Soluble inorganic pyrophosphatase
  misc_feature (1)..(214): NCBI GI NO: 38345829 NR Description: OSJNBa0070M12.12
  misc_feature (1)..(214): NCBI GI NO: 4033417 NR Description: Soluble inorganic pyrophosphatase
  misc_feature (1)..(214): NCBI GI NO: 15226453 NR Description: putative inorganic pyrophosphatase
  misc_feature (1)..(214): NCBI GI NO: 5669924 NR Description: soluble inorganic pyrophosphatase
  misc_feature (1)..(214): NCBI GI NO: 15223288 NR Description: soluble inorganic pyrophosphatase, putative
  misc_feature (1)..(214): NCBI GI NO: 26451240 NR Description: putative inorganic pyrophosphatase
  misc_feature (15)..(214): NCBI GI NO: 2500047 NR Description: Soluble inorganic pyrophosphatase
  misc_feature (1)..(173): NCBI GI NO: 25290346 NR Description: protein T25K16.5 [imported] - Arabidopsis thaliana
  misc_feature (175)..(214): NCBI GI NO: 25290346 NR Description: protein T25K16.5 [imported] - Arabidopsis thaliana
MSEEDKAAASAEQPKRAPKLNERILSSLSRRSVAAHPWHDLEIGPGAPAVFNVVVEITKGSKVKYELDKKTGLIKVDRVLYSSVVYPHNYGFIPRTLCEDNDPMDVLVLMQEPVVPGSFLRARAIGLMPMIDQGEKDDKIIAVCADDPEYRHYNDISELSPHRLQEIKRFFEDYKKNENKEVAVDAFLPATTAQEAIQYSMDLYAQYILQSLRQ

SEQ ID NO: 23326 - DNA, 1493 bp, Zea mays subsp. mays
  misc_feature (1)..(1493): Ceres Seq. ID no. 12355953
tcgcgatgggtggcggcagggaacacagcccacggtttttgctggctccccgcctcgtccccgtcacccccctcctccgctccgcctcctgtttatagtcgcctgctgtcgcggcccctttttccttccaccacccaccggccaccaccctccgcggttgcctagttgccttgactgcctgcctcgtcttaccaccaagctaagctagcgcgttccttcgttcgttcgttcgttccttcctccctcgcttcctgttgctcggtccatggaggtggcggcggccgcggcggcgggcgcgggggttgtggagctgcagctggacctcctcgaggcggcggcgccgacggagcgagaggccaagaggcgccgggtgcacccggttccagcgggcccaccggccggggcagcagcggcggcagcagcgccggggcgccgcagccgcaggcgccgcgccgtgcagcgtctcttccaggcctgccgccacgtcttccggggccccggcaccgtgcccagtcccggcgaggtccagctgctccgccacatgctcgacaggatgcggccggaggacgtgggcctgagcccggacctgagcttcttcagagctcgagacgccacacgtggcggtggcaccccgaccataacgcacacgacgatatacaaatgcccgaatttctcgatggtcatcctcttcctgccgcgaaacgcggtgatcccgctccacaaccaccctgggatgacggtgttcagcaagctgctcctggggtcgatgcacgtcaagtcgtacgactggctcaacactgctgaccccgacccttcttccgccacgagcaccaccagctcttcgtcctccgatggcccatgcctgaggctggcgaaactggtggttgacgacgtcttcacggcgccctgcgacacctccgtgctgtacccgacggcgggagggaacatgcaccggttcaccgccatggcgccctgcgcgatcctcgacgtcctcggccccccctactccatagaggaggacagggactgcacgtactacgcggaattaccgtacgcaaaccactcgctggtggctgcgggcgacgacgtggagcggggccagggccaaggccatctggcgtggcttgaggagatcgacatgccgagagagctcaagatgtgcagcgtccactatggcggaccgccgatctccgacgagtgacgtcgccggccgtcgtctccctcactggttgtactatgtctaactgatcgcggcacggcagagccgtgccgccgtctaacgttgtgtatagcaggcagcagcaagccataggctgtagttacacaaagtcccgatcgagtacaatgcttctcgcttgcctgcatcgttgttctctagatgccctttctttcttgttatttttgtttctactactacaagtagacgatgttttgtcctgacgatggatgatacagataagtcatatatatccacatatttcatttttgtcgtt

SEQ ID NO: 23327 - protein, 311 aa, Zea mays subsp. mays
  peptide (1)..(311): Ceres Seq. ID no. 12355954
  misc_feature (25)..(308): NCBI GI NO: 29244630 NR Description: hypothetical protein
  misc_feature (63)..(310): NCBI GI NO: 15242218 NR Description: putative protein; protein id: At5g15120.1
  misc_feature (47)..(310): NCBI GI NO: 34906308 NR Description: unnamed protein product
  misc_feature (56)..(310): NCBI GI NO: 10176982 NR Description: contains similarity to unknownprotein~emb|CAB89322
  misc_feature (56)..(310): NCBI GI NO: 15242505 NR Description: putative protein; protein id: At5g39890
  misc_feature (56)..(308): NCBI GI NO: 18394617 NR Description: expressed protein; protein id: At1g18490
  misc_feature (56)..(308): NCBI GI NO: 21618020 NR Description: unknown [Arabidopsis thaliana]
  misc_feature (65)..(308): NCBI GI NO: 21536850 NR Description: unknown [Arabidopsis thaliana]
  misc_feature (56)..(308): NCBI GI NO: 25402861 NR Description: protein F15H18.4 [imported] - Arabidopsis thaliana
  misc_feature (65)..(308): NCBI GI NO: 18406030 NR Description: expressed protein; protein id: At2g42670
MEVAAAAAAGAGVVELQLDLLEAAAPTEREAKRRRVHPVPAGPPAGAAAAAAAPGRRSRRRRAVQRLFQACRHVFRGPGTVPSPGEVQLLRHMLDRMRPEDVGLSPDLSFFRARDATRGGGTPTITHTTIYKCPNFSMVILFLPRNAVIPLHNHPGMTVFSKLLLGSMHVKSYDWLNTADPDPSSATSTTSSSSSDGPCLRLAKLVVDDVFTAPCDTSVLYPTAGGNMHRFTAMAPCAILDVLGPPYSIEEDRDCTYYAELPYANHSLVAAGDDVERGQGQGHLAWLEEIDMPRELKMCSVHYGGPPISDE

SEQ ID NO: 23328 - protein, 219 aa, Zea mays subsp. mays
  peptide (1)..(219): Ceres Seq. ID no. 12355955
  misc_feature (1)..(216): NCBI GI NO: 29244630 NR Description: hypothetical protein
  misc_feature (1)..(218): NCBI GI NO: 15242218 NR Description: putative protein; protein id: At5g15120.1
  misc_feature (1)..(218): NCBI GI NO: 34906308 NR Description: unnamed protein product
  misc_feature (1)..(218): NCBI GI NO: 10176982 NR Description: contains similarity to unknownprotein~emb|CAB89322
  misc_feature (1)..(218): NCBI GI NO: 15242505 NR Description: putative protein; protein id: At5g39890
  misc_feature (1)..(216): NCBI GI NO: 18394617 NR Description: expressed protein; protein id: At1g18490
  misc_feature (1)..(216): NCBI GI NO: 21618020 NR Description: unknown [Arabidopsis thaliana]
  misc_feature (1)..(216): NCBI GI NO: 21536850 NR Description: unknown [Arabidopsis thaliana]
  misc_feature (1)..(216): NCBI GI NO: 25402861 NR Description: protein F15H18.4 [imported] - Arabidopsis thaliana
  misc_feature (1)..(216): NCBI GI NO: 18406030 NR Description: expressed protein; protein id: At2g42670
MLDRMRPEDVGLSPDLSFFRARDATRGGGTPTITHTTIYKCPNFSMVILFLPRNAVIPLHNHPGMTVFSKLLLGSMHVKSYDWLNTADPDPSSATSTTSSSSSDGPCLRLAKLVVDDVFTAPCDTSVLYPTAGGNMHRFTAMAPCAILDVLGPPYSIEEDRDCTYYAELPYANHSLVAAGDDVERGQGQGHLAWLEEIDMPRELKMCSVHYGGPPISDE

SEQ ID NO: 23329 - protein, 215 aa, Zea mays subsp. mays
  peptide (1)..(215): Ceres Seq. ID no. 12355956
  misc_feature (1)..(212): NCBI GI NO: 29244630 NR Description: hypothetical protein
  misc_feature (1)..(214): NCBI GI NO: 15242218 NR Description: putative protein; protein id: At5g15120.1
  misc_feature (1)..(214): NCBI GI NO: 34906308 NR Description: unnamed protein product
  misc_feature (1)..(214): NCBI GI NO: 10176982 NR Description: contains similarity to unknownprotein~emb|CAB89322
  misc_feature (1)..(214): NCBI GI NO: 15242505 NR Description: putative protein; protein id: At5g39890
  misc_feature (1)..(212): NCBI GI NO: 18394617 NR Description: expressed protein; protein id: At1g18490
  misc_feature (1)..(212): NCBI GI NO: 21618020 NR Description: unknown [Arabidopsis thaliana]
  misc_feature (1)..(212): NCBI GI NO: 21536850 NR Description: unknown [Arabidopsis thaliana]
  misc_feature (1)..(212): NCBI GI NO: 25402861 NR Description: protein F15H18.4 [imported] - Arabidopsis thaliana
  misc_feature (1)..(212): NCBI GI NO: 18406030 NR Description: expressed protein; protein id: At2g42670
MRPEDVGLSPDLSFFRARDATRGGGTPTITHTTIYKCPNFSMVILFLPRNAVIPLHNHPGMTVFSKLLLGSMHVKSYDWLNTADPDPSSATSTTSSSSSDGPCLRLAKLVVDDVFTAPCDTSVLYPTAGGNMHRFTAMAPCAILDVLGPPYSIEEDRDCTYYAELPYANHSLVAAGDDVERGQGQGHLAWLEEIDMPRELKMCSVHYGGPPISDE

SEQ ID NO: 23330 - DNA, 1370 bp, Zea mays subsp. mays
  misc_feature (1)..(1370): Ceres Seq. ID no. 12359684
gagcgagcccccgcacgtcgccacttcaccgcccccacccaaaatcgtctcgatggaaccgctgcggcgcgtgctgcgcctccgactcggacggcctctcgctataaaccccgcccactgaatacggccgttccatttttgactctattccccgcttcccgattcaagtcagcggtttttagggttcgagatctcggcatcgtgtcgcggaagccatggcgacaagcatgcttagtaccgtgaaggtgagcaatgtatcactgaaagcagcacaacgtgatataaaggaattcttttccttttctggtgacattgtgcatgttgaaatgcagagtttcgatgagctttctcaagttgcctacattacttttaaagacaaacaaggagcagagacggcaatgcttctcacgggggccaccatagttgatatggctgtaatcgtcacaccagcaaatgattatgagctaccatcttctgttttagctgctcttgagcccaaagacacaaaaccttctgcccttcaaaaggccgaggacattgttgggaccatgctggcaaagggatttatcctcggtagggatgcactggacaaagcgaaagctttggatgagaagcatcagctgacgtcgactgccacagctagagtatcttccttcgacaagagaatcggtctaagtgagaagatcagtgttggcacttcagttgtaaacgataaagtgaaggaaatggatcagaaataccaagtctctgagaagacaaagtcagcactggcagctgctgaacatagtgtctcgactgctggatctgctatcatgaagaacaggtatgtgctaaccggagctgcatgggtaactggtgctttcagcaaggtcaccagtgcagccaacgaggccggtgcaaaggctaaggaaaaaatagcagtcgagcaggagcacaagaatgctgagggtggacctgcacaagcgaacatctcagagacccatgaagcgcacaggggtttggacggcggattctcaaggctacatgactctgaaacccctgaagatatccccatctctactgcgagtgtcccagctgttacggatgaggagcccagcaaggcttctccaccagctggtgttcctgaaaagccagaagctgcgcacgaattggtactataattgatgcggttttgcttcatacatgcatgtaaatagacatgaaatgggatagccctggaactcattctgtggtcttgtggttggcatcttcagattgaaaacctctttgaaggttgaaagttattgggatctaaaggagtttgcaatttgtacctggtctttttgatcaattagtaatcagtattacccggcagtggggaaatgaacttc

SEQ ID NO: 23331 - protein, 314 aa, Zea mays subsp. mays
  peptide (1)..(314): Ceres Seq. ID no. 12359685
  misc_feature (9)..(76): Pfam Name: a.k.a. RRM, RBD, or RNP domain Pfam Description: RNA recognition motif.
  misc_feature (1)..(314): NCBI GI NO: 38347069 NR Description: OSJNBa0006A01.10
  misc_feature (57)..(294): NCBI GI NO: 18542166 NR Description: putative aldose reductase-related protein
  misc_feature (5)..(292): NCBI GI NO: 38344181 NR Description: OSJNBa0053K19.20
  misc_feature (6)..(306): NCBI GI NO: 18414951 NR Description: RRM-containing protein; protein id: At4g17720
  misc_feature (6)..(306): NCBI GI NO: 7485085 NR Description: hypothetical protein - Arabidopsis thaliana
  misc_feature (4)..(276): NCBI GI NO: 30695063 NR Description: RNA recognition motif (RRM)-containing protein
  misc_feature (8)..(276): NCBI GI NO: 8809670 NR Description: gene_id:MSD23
  misc_feature (1)..(248): NCBI GI NO: 34897896 NR Description: ESTs D15336
  misc_feature (4)..(273): NCBI GI NO: 15237419 NR Description: RRM-containing protein; protein id: At5g16840
  misc_feature (4)..(273): NCBI GI NO: 21592997 NR Description: unknown [Arabidopsis thaliana]
MATSMLSTVKVSNVSLKAAQRDIKEFFSFSGDIVHVEMQSFDELSQVAYITFKDKQGAETAMLLTGATIVDMAVIVTPANDYELPSSVLAALEPKDTKPSALQKAEDIVGTMLAKGFILGRDALDKAKALDEKHQLTSTATARVSSFDKRIGLSEKISVGTSVVNDKVKEMDQKYQVSEKTKSALAAAEHSVSTAGSAIMKNRYVLTGAAWVTGAFSKVTSAANEAGAKAKEKIAVEQEHKNAEGGPAQANISETHEAHRGLDGGFSRLHDSETPEDIPISTASVPAVTDEEPSKASPPAGVPEKPEAAHELVL

SEQ ID NO: 23332 - protein, 310 aa, Zea mays subsp. mays
  peptide (1)..(310): Ceres Seq. ID no. 12359686
  misc_feature (5)..(72): Pfam Name: a.k.a. RRM, RBD, or RNP domain Pfam Description: RNA recognition motif.
  misc_feature (1)..(310): NCBI GI NO: 38347069 NR Description: OSJNBa0006A01.10
  misc_feature (53)..(290): NCBI GI NO: 18542166 NR Description: putative aldose reductase-related protein
  misc_feature (1)..(288): NCBI GI NO: 38344181 NR Description: OSJNBa0053K19.20
  misc_feature (2)..(302): NCBI GI NO: 18414951 NR Description: RRM-containing protein; protein id: At4g17720
  misc_feature (2)..(302): NCBI GI NO: 7485085 NR Description: hypothetical protein - Arabidopsis thaliana
  misc_feature (1)..(272): NCBI GI NO: 30695063 NR Description: RNA recognition motif (RRM)-containing protein
  misc_feature (4)..(272): NCBI GI NO: 8809670 NR Description: gene_id:MSD23
  misc_feature (1)..(244): NCBI GI NO: 34897896 NR Description: ESTs D15336
  misc_feature (1)..(269): NCBI GI NO: 15237419 NR Description: RRM-containing protein; protein id: At5g16840
  misc_feature (1)..(269): NCBI GI NO: 21592997 NR Description: unknown [Arabidopsis thaliana]
MLSTVKVSNVSLKAAQRDIKEFFSFSGDIVHVEMQSFDELSQVAYITFKDKQGAETAMLLTGATIVDMAVIVTPANDYELPSSVLAALEPKDTKPSALQKAEDIVGTMLAKGFILGRDALDKAKALDEKHQLTSTATARVSSFDKRIGLSEKISVGTSVVNDKVKEMDQKYQVSEKTKSALAAAEHSVSTAGSAIMKNRYVLTGAAWVTGAFSKVTSAANEAGAKAKEKIAVEQEHKNAEGGPAQANISETHEAHRGLDGGFSRLHDSETPEDIPISTASVPAVTDEEPSKASPPAGVPEKPEAAHELVL

SEQ ID NO: 23333 - protein, 277 aa, Zea mays subsp. mays
  peptide (1)..(277): Ceres Seq. ID no. 12359687
  misc_feature (1)..(277): NCBI GI NO: 38347069 NR Description: OSJNBa0006A01.10
  misc_feature (20)..(257): NCBI GI NO: 18542166 NR Description: putative aldose reductase-related protein
  misc_feature (1)..(255): NCBI GI NO: 38344181 NR Description: OSJNBa0053K19.20
  misc_feature (1)..(269): NCBI GI NO: 18414951 NR Description: RRM-containing protein; protein id: At4g17720
  misc_feature (1)..(269): NCBI GI NO: 7485085 NR Description: hypothetical protein - Arabidopsis thaliana
  misc_feature (1)..(239): NCBI GI NO: 30695063 NR Description: RNA recognition motif (RRM)-containing protein
  misc_feature (1)..(239): NCBI GI NO: 8809670 NR Description: gene_id:MSD23
  misc_feature (1)..(211): NCBI GI NO: 34897896 NR Description: ESTs D15336
  misc_feature (1)..(236): NCBI GI NO: 15237419 NR Description: RRM-containing protein; protein id: At5g16840
  misc_feature (1)..(236): NCBI GI NO: 21592997 NR Description: unknown [Arabidopsis thaliana]
MQSFDELSQVAYITFKDKQGAETAMLLTGATIVDMAVIVTPANDYELPSSVLAALEPKDTKPSALQKAEDIVGTMLAKGFILGRDALDKAKALDEKHQLTSTATARVSSFDKRIGLSEKISVGTSVVNDKVKEMDQKYQVSEKTKSALAAAEHSVSTAGSAIMKNRYVLTGAAWVTGAFSKVTSAANEAGAKAKEKIAVEQEHKNAEGGPAQANISETHEAHRGLDGGFSRLHDSETPEDIPISTASVPAVTDEEPSKASPPAGVPEKPEAAHELVL

SEQ ID NO: 23334 - DNA, 1607 bp, Zea mays subsp. mays
  misc_feature (1)..(1607): Ceres Seq. ID no. 12351896
atcatctcttcgacactctcacatgcatcggaagattccgctgacactaaaaagatcgaaatggcgccgggatcgtcgtcgtctcgtaaggccaaggccctcaaggcatcgtaccggctcgtcgccgacaacttcctcgccgtcctcgccatggtttctgtcgtcgccgtgctcttcgctgcatggccgatcagcatcgaggaccttgcctgccggctgcacgcggtgcggccactccacgtcctcacggcggcgatcctgacggcggccctcgcgaagctgaggcgcatgagccggccgagcgacgtgtatctcgtggagtacggctgcttctggcccaagccgtgcttccgggcgccgttcgcgacgtgcctggagcacgtgcggctcttgccgtacctggtcaacgaggacgacatcagctggggctggcggctcctccagcggtccgggatcggcgaggagacctgcgtgccgtacgcctaccactacctgcccccggaccgcagctttagggcctccctggacgagaccgagctggtcatcttctccgccgtcgacgatgtgttcgcccggacgacggccgtgacgcccgcggacatcggcgtggtgatcgtgaactgcagcatcttcacgcccacgccggtgttcacggacatgatcgtgaacaggtacaagctgcgcgccgacgtgcggagcgtgaacctgtccgggatggggtgcagcgcggcgctcatctcgatcggtctcgccaggaacatgctgcaggtggcgccgccgggcacgcacgcgctgatcgtgtccacggagatcctctcgtcgcagtactacgtcggcatggaccgctccatgctcctgcccaactgcctcttccgcatgggcgccgccgccatgatcatgtccaacaccgcggcccgaggcgcgcggttccggctcgcccgcgtcgtgcgcacggtggcctccgcgcgggacgccgcctaccggtgcgtgttccaggtggaggacgaggagagcaacacggggatccggctctccaaggacctcgtgcccactgccgcccagaccctgaaaagcaacatcgtcgccttcgggcccctggtcctgcctgcctcggagaagctcctcgtcgctctgtccatcctgaggcggaggctagtacagagcagccgggggagggtgtaccgcccggacttccgcaccgcgttcgagcacttctgcatccacgccggcgggcgcggggtcatcgacgaggtgcagcgcggcctcggcctctccgacgaggacgtggaggcgtcgcggatgacgctgcaccggttcgggaacacgtccagcagttcggtggtgtacgagctggcgtacatcgaggccaagggcagcatgaggaagggagaccgcgtgtggatgatctccttcggcgccggcttcgactgcagcagcgtggcgtgggagtgcatcgagcccgccgccgacgctgctgggccgtgggccgactgtatccaccgctacccagtgcagctccctaaattgatggaggcccttgattgaatccgtacatgtagacgtgaagtggcataatcaatcaatgttgtactgtatctttaatgtcc

SEQ ID NO: 23335 - protein, 514 aa, Zea mays subsp. mays
  peptide (1)..(514): Ceres Seq. ID no. 12351897
  misc_feature (341)..(486): Pfam Name: Pfam Description:  Chalcone and stilbene synthases
  misc_feature (34)..(509): NCBI GI NO: 34913436 NR Description: putative fatty acid condensing enzyme CUT1
  misc_feature (26)..(511): NCBI GI NO: 21618184 NR Description: fatty acid condensing enzyme CUT1, putative
  misc_feature (23)..(511): NCBI GI NO: 17979464 NR Description: At1g68530/T26J14_10 [Arabidopsis thaliana]
  misc_feature (26)..(511): NCBI GI NO: 15222592 NR Description: fatty acid condensing enzyme CUT1, putative
  misc_feature (26)..(511): NCBI GI NO: 28393607 NR Description: putative fatty acid condensing enzyme CUT1
  misc_feature (23)..(511): NCBI GI NO: 15221431 NR Description: very-long-chain fatty acid condensing enzyme
  misc_feature (23)..(511): NCBI GI NO: 21593111 NR Description: very-long-chain fatty acid condensing enzyme CUT1
  misc_feature (17)..(506): NCBI GI NO: 15223556 NR Description: very-long-chain fatty acid condensing enzyme CUT1
  misc_feature (23)..(506): NCBI GI NO: 15226724 NR Description: putative beta-ketoacyl-CoA synthase
  misc_feature (24)..(506): NCBI GI NO: 15236133 NR Description: putative ketoacyl-CoA synthase
IISSTLSHASEDSADTKKIEMAPGSSSSRKAKALKASYRLVADNFLAVLAMVSVVAVLFAAWPISIEDLACRLHAVRPLHVLTAAILTAALAKLRRMSRPSDVYLVEYGCFWPKPCFRAPFATCLEHVRLLPYLVNEDDISWGWRLLQRSGIGEETCVPYAYHYLPPDRSFRASLDETELVIFSAVDDVFARTTAVTPADIGVVIVNCSIFTPTPVFTDMIVNRYKLRADVRSVNLSGMGCSAALISIGLARNMLQVAPPGTHALIVSTEILSSQYYVGMDRSMLLPNCLFRMGAAAMIMSNTAARGARFRLARVVRTVASARDAAYRCVFQVEDEESNTGIRLSKDLVPTAAQTLKSNIVAFGPLVLPASEKLLVALSILRRRLVQSSRGRVYRPDFRTAFEHFCIHAGGRGVIDEVQRGLGLSDEDVEASRMTLHRFGNTSSSSVVYELAYIEAKGSMRKGDRVWMISFGAGFDCSSVAWECIEPAADAAGPWADCIHRYPVQLPKLMEALD

SEQ ID NO: 23336 - protein, 494 aa, Zea mays subsp. mays
  peptide (1)..(494): Ceres Seq. ID no. 12351898
  misc_feature (321)..(466): Pfam Name: Pfam Description:  Chalcone and stilbene synthases
  misc_feature (14)..(489): NCBI GI NO: 34913436 NR Description: putative fatty acid condensing enzyme CUT1
  misc_feature (6)..(491): NCBI GI NO: 21618184 NR Description: fatty acid condensing enzyme CUT1, putative
  misc_feature (3)..(491): NCBI GI NO: 17979464 NR Description: At1g68530/T26J14_10 [Arabidopsis thaliana]
  misc_feature (6)..(491): NCBI GI NO: 15222592 NR Description: fatty acid condensing enzyme CUT1, putative
  misc_feature (6)..(491): NCBI GI NO: 28393607 NR Description: putative fatty acid condensing enzyme CUT1
  misc_feature (3)..(491): NCBI GI NO: 15221431 NR Description: very-long-chain fatty acid condensing enzyme
  misc_feature (3)..(491): NCBI GI NO: 21593111 NR Description: very-long-chain fatty acid condensing enzyme CUT1
  misc_feature (1)..(486): NCBI GI NO: 15223556 NR Description: very-long-chain fatty acid condensing enzyme CUT1
  misc_feature (3)..(486): NCBI GI NO: 15226724 NR Description: putative beta-ketoacyl-CoA synthase
  misc_feature (4)..(486): NCBI GI NO: 15236133 NR Description: putative ketoacyl-CoA synthase
MAPGSSSSRKAKALKASYRLVADNFLAVLAMVSVVAVLFAAWPISIEDLACRLHAVRPLHVLTAAILTAALAKLRRMSRPSDVYLVEYGCFWPKPCFRAPFATCLEHVRLLPYLVNEDDISWGWRLLQRSGIGEETCVPYAYHYLPPDRSFRASLDETELVIFSAVDDVFARTTAVTPADIGVVIVNCSIFTPTPVFTDMIVNRYKLRADVRSVNLSGMGCSAALISIGLARNMLQVAPPGTHALIVSTEILSSQYYVGMDRSMLLPNCLFRMGAAAMIMSNTAARGARFRLARVVRTVASARDAAYRCVFQVEDEESNTGIRLSKDLVPTAAQTLKSNIVAFGPLVLPASEKLLVALSILRRRLVQSSRGRVYRPDFRTAFEHFCIHAGGRGVIDEVQRGLGLSDEDVEASRMTLHRFGNTSSSSVVYELAYIEAKGSMRKGDRVWMISFGAGFDCSSVAWECIEPAADAAGPWADCIHRYPVQLPKLMEALD

SEQ ID NO: 23337 - protein, 464 aa, Zea mays subsp. mays
  peptide (1)..(464): Ceres Seq. ID no. 12351899
  misc_feature (291)..(436): Pfam Name: Pfam Description:  Chalcone and stilbene synthases
  misc_feature (1)..(459): NCBI GI NO: 34913436 NR Description: putative fatty acid condensing enzyme CUT1
  misc_feature (1)..(461): NCBI GI NO: 21618184 NR Description: fatty acid condensing enzyme CUT1, putative
  misc_feature (1)..(461): NCBI GI NO: 17979464 NR Description: At1g68530/T26J14_10 [Arabidopsis thaliana]
  misc_feature (1)..(461): NCBI GI NO: 15222592 NR Description: fatty acid condensing enzyme CUT1, putative
  misc_feature (1)..(461): NCBI GI NO: 28393607 NR Description: putative fatty acid condensing enzyme CUT1
  misc_feature (1)..(461): NCBI GI NO: 15221431 NR Description: very-long-chain fatty acid condensing enzyme
  misc_feature (1)..(461): NCBI GI NO: 21593111 NR Description: very-long-chain fatty acid condensing enzyme CUT1
  misc_feature (1)..(456): NCBI GI NO: 15223556 NR Description: very-long-chain fatty acid condensing enzyme CUT1
  misc_feature (1)..(456): NCBI GI NO: 15226724 NR Description: putative beta-ketoacyl-CoA synthase
  misc_feature (1)..(456): NCBI GI NO: 15236133 NR Description: putative ketoacyl-CoA synthase
MVSVVAVLFAAWPISIEDLACRLHAVRPLHVLTAAILTAALAKLRRMSRPSDVYLVEYGCFWPKPCFRAPFATCLEHVRLLPYLVNEDDISWGWRLLQRSGIGEETCVPYAYHYLPPDRSFRASLDETELVIFSAVDDVFARTTAVTPADIGVVIVNCSIFTPTPVFTDMIVNRYKLRADVRSVNLSGMGCSAALISIGLARNMLQVAPPGTHALIVSTEILSSQYYVGMDRSMLLPNCLFRMGAAAMIMSNTAARGARFRLARVVRTVASARDAAYRCVFQVEDEESNTGIRLSKDLVPTAAQTLKSNIVAFGPLVLPASEKLLVALSILRRRLVQSSRGRVYRPDFRTAFEHFCIHAGGRGVIDEVQRGLGLSDEDVEASRMTLHRFGNTSSSSVVYELAYIEAKGSMRKGDRVWMISFGAGFDCSSVAWECIEPAADAAGPWADCIHRYPVQLPKLMEALD

SEQ ID NO: 23338 - DNA, 1024 bp, Zea mays subsp. mays
  misc_feature (1)..(1024): Ceres Seq. ID no. 12341440
ataaattcctccgctccccttcgccgcttcctgtcgcgccgccgctcccctcccaacccactagctcaaaaccctagagctctcgcctgctcgcctccgccgccggagcgagctccccatcttcatccgtcaaccatggcgacccagatcagcaagaagaagaagttcgtcagcgacggtgttttctacgccgagctcaatgagatgctgacgcgggagctggcggaggacggctactctggcgtggaggtgcgcgtcacgccgatgcgcacggagatcatcatccgcgccacgcgcacgcagaacgtgctcggcgagaagggccgtaggatcagggagctcacctccgtcgtccagaagaggttcaacttccctgagaatggcgttgagctttatgccgagaaggtcgtcaaccgtgggctctgtgccatcgcgcaggccgagtccctccgttacaagctcctcggtggccttgccgtccgcagggcttgctacggtgttcttcgttatgttatggagagtggtgccaagggttgtgaggtgatcgtgagtggaaagctcagggcccaaagagccaagtccatgaagttcaaggatggctacatgatctcatctggtcaaccagtgaacgagtacattgactcggctgtgagacacgttcttctcagacagggtgttcttggcatcaaggtgaagatcatgcttgactgggacccgaagggcaaggttggcccgatcactcctcttccggacctggtgaccatccacaccccgaaggacgaggacgagccgcgccctccggtcttggcacctcctgaggtgtaaggtcccaactgtgtccttgaaatggcagtttgatcgggtcctagataggtttctatcttacgataaggacaatgctaaggcagttggttaccttaatctttatggacagatgctatgtgttgcttctgtggcacttttgtttaagctaagttttgcggagacaagatacttatatatgttcccgatgaaattatggttc

SEQ ID NO: 23339 - protein, 274 aa, Zea mays subsp. mays
  peptide (1)..(274): Ceres Seq. ID no. 12341441
  misc_feature (149)..(233): Pfam Name: Pfam Description:  Ribosomal protein S3, C-terminal domain
  misc_feature (46)..(269): NCBI GI NO: 22204124 NR Description: putative 40S ribosomal protein S3
  misc_feature (48)..(270): NCBI GI NO: 14192875 NR Description: Putative 40S ribosomal protein
  misc_feature (46)..(262): NCBI GI NO: 15238533 NR Description: 40S ribosomal protein S3; protein id: At5g35530
  misc_feature (46)..(274): NCBI GI NO: 15232352 NR Description: 40S ribosomal protein S3, putative
  misc_feature (46)..(261): NCBI GI NO: 15225107 NR Description: 40S ribosomal protein S3, putative
  misc_feature (46)..(274): NCBI GI NO: 37595356 NR Description: ribosomal protein S3 [Danio rerio]
  misc_feature (46)..(268): NCBI GI NO: 133940 NR Description: 40S ribosomal protein S3A (S1A)
  misc_feature (46)..(268): NCBI GI NO: 12847921 NR Description: unnamed protein product [Mus musculus]
  misc_feature (46)..(268): NCBI GI NO: 27735393 NR Description: Similar to ribosomal protein S3 [Xenopus laevis]
  misc_feature (46)..(274): NCBI GI NO: 28374213 NR Description: similar to 40S ribosomal protein S3 [Danio rerio]
INSSAPLRRFLSRRRSPPNPLAQNPRALACSPPPPERAPHLHPSTMATQISKKKKFVSDGVFYAELNEMLTRELAEDGYSGVEVRVTPMRTEIIIRATRTQNVLGEKGRRIRELTSVVQKRFNFPENGVELYAEKVVNRGLCAIAQAESLRYKLLGGLAVRRACYGVLRYVMESGAKGCEVIVSGKLRAQRAKSMKFKDGYMISSGQPVNEYIDSAVRHVLLRQGVLGIKVKIMLDWDPKGKVGPITPLPDLVTIHTPKDEDEPRPPVLAPPEV

SEQ ID NO: 23340 - protein, 229 aa, Zea mays subsp. mays
  peptide (1)..(229): Ceres Seq. ID no. 12341442
  misc_feature (104)..(188): Pfam Name: Pfam Description:  Ribosomal protein S3, C-terminal domain
  misc_feature (1)..(224): NCBI GI NO: 22204124 NR Description: putative 40S ribosomal protein S3
  misc_feature (3)..(225): NCBI GI NO: 14192875 NR Description: Putative 40S ribosomal protein
  misc_feature (1)..(217): NCBI GI NO: 15238533 NR Description: 40S ribosomal protein S3; protein id: At5g35530
  misc_feature (1)..(229): NCBI GI NO: 15232352 NR Description: 40S ribosomal protein S3, putative
  misc_feature (1)..(216): NCBI GI NO: 15225107 NR Description: 40S ribosomal protein S3, putative
  misc_feature (1)..(229): NCBI GI NO: 37595356 NR Description: ribosomal protein S3 [Danio rerio]
  misc_feature (1)..(223): NCBI GI NO: 133940 NR Description: 40S ribosomal protein S3A (S1A)
  misc_feature (1)..(223): NCBI GI NO: 27735393 NR Description: Similar to ribosomal protein S3 [Xenopus laevis]
  misc_feature (1)..(223): NCBI GI NO: 12847921 NR Description: unnamed protein product [Mus musculus]
  misc_feature (1)..(229): NCBI GI NO: 28374213 NR Description: similar to 40S ribosomal protein S3 [Danio rerio]
MATQISKKKKFVSDGVFYAELNEMLTRELAEDGYSGVEVRVTPMRTEIIIRATRTQNVLGEKGRRIRELTSVVQKRFNFPENGVELYAEKVVNRGLCAIAQAESLRYKLLGGLAVRRACYGVLRYVMESGAKGCEVIVSGKLRAQRAKSMKFKDGYMISSGQPVNEYIDSAVRHVLLRQGVLGIKVKIMLDWDPKGKVGPITPLPDLVTIHTPKDEDEPRPPVLAPPEV

SEQ ID NO: 23341 - protein, 206 aa, Zea mays subsp. mays
  peptide (1)..(206): Ceres Seq. ID no. 12341443
  misc_feature (81)..(165): Pfam Name: Pfam Description:  Ribosomal protein S3, C-terminal domain
  misc_feature (1)..(201): NCBI GI NO: 22204124 NR Description: putative 40S ribosomal protein S3
  misc_feature (1)..(202): NCBI GI NO: 14192875 NR Description: Putative 40S ribosomal protein
  misc_feature (1)..(194): NCBI GI NO: 15238533 NR Description: 40S ribosomal protein S3; protein id: At5g35530
  misc_feature (1)..(206): NCBI GI NO: 15232352 NR Description: 40S ribosomal protein S3, putative
  misc_feature (1)..(193): NCBI GI NO: 15225107 NR Description: 40S ribosomal protein S3, putative
  misc_feature (1)..(206): NCBI GI NO: 37595356 NR Description: ribosomal protein S3 [Danio rerio]
  misc_feature (1)..(200): NCBI GI NO: 133940 NR Description: 40S ribosomal protein S3A (S1A)
  misc_feature (1)..(200): NCBI GI NO: 12847921 NR Description: unnamed protein product [Mus musculus]
  misc_feature (1)..(200): NCBI GI NO: 27735393 NR Description: Similar to ribosomal protein S3 [Xenopus laevis]
  misc_feature (1)..(206): NCBI GI NO: 28374213 NR Description: similar to 40S ribosomal protein S3 [Danio rerio]
MLTRELAEDGYSGVEVRVTPMRTEIIIRATRTQNVLGEKGRRIRELTSVVQKRFNFPENGVELYAEKVVNRGLCAIAQAESLRYKLLGGLAVRRACYGVLRYVMESGAKGCEVIVSGKLRAQRAKSMKFKDGYMISSGQPVNEYIDSAVRHVLLRQGVLGIKVKIMLDWDPKGKVGPITPLPDLVTIHTPKDEDEPRPPVLAPPEV

SEQ ID NO: 23342 - DNA, 1515 bp, Zea mays subsp. mays
  misc_feature (1)..(1515): Ceres Seq. ID no. 12405850
agtcagtcgcagttcacaactgcgactaaaaaccatctttggggcccttcgccgcgatttgcttcgcttctcggactaggttaagttgccttttcgattctcagaaaaagactggctctgcactcggataattttaaaatggatagtgcacagcagcccactggggaattgaacaattcgttcgatactcttatggtttctggaggtgaccagagtcgacagcctcaggatgctggcaatgaaacgagcttcacgaattggaaagacctccccatggagctgctcctgcgtatcatttcactagttggagatgacaggatagtcattgtggcctccggtgtatgcacaggatggcgtgacaccttggggtggggggttgcaaatctttcactatcatggtgccaggaccgcatgaatgacttggtgatatcactggctcacaaattcacgaagctgcaagttctatctctacgccagatcaggcctcagctagaagacagcggcgtggaggccgtggcaaaccactgccacgacctgcgcgagctggatctcagcagaagcttcaggctgagcgaccggtccttgtacgccctggcgcacgggtgccctcagcttaccaggctcaacatcagcgggtgctccagtttcagcgacgtggcgctcgtgttcctctccagccagtgcgggaacctgagatgcctgaacctgtgcgggtgtgtgagggcggcctctgacagagcgctacaggccatcgcctgttactgtggccagctgcagtcgttgaacctgggctggtgtgatggcatcactgacaagggggtgaccagcctggcttcgggatgccctgaactcagggccgtcgacctgtgcggctgtgttcttataacagatgagagcgtggttgcgctggcgaacggctgccttcacctgcgctccctgggtctctactactgccagaacatcacggaccgcgccatgtactccctggccgccaacagccgcgtgaggagtcggggccggggctgggacgcgacagcgaagagcggcggcggtggcaaggaccgggagcgggacggactggcgagcctgaacatcagccagtgcacggcgctgaccccgcccgcggtgcaggcggtgtgcgactcgttcccggcgctgcacacgtgcccggagcggcactcgctcaacatcagcgggtgcctcagcctaacctccgtgcactgcgcctgtgcgctgcaccctcaccggggccgggcgagtcatcctctccaaccacgcctactgaacgcaatgcgtgaataggcggcgatgctcagatgtgtggataggccgttcaaccgtgagcgacggtgtccgctgtttatgtgaggtgcttgttttgtgtttaggcgtcaaggcgtgtacttggggtctctactctctagggaaccgtgtagaagcaaccgagttgagttcatcgtctgtaaaaacatggactgtatctgactatctgttgtcatgtcttttgagatcttt

SEQ ID NO: 23343 - protein, 387 aa, Zea mays subsp. mays
  peptide (1)..(387): Ceres Seq. ID no. 12405851
  misc_feature (1)..(373): NCBI GI NO: 34907434 NR Description: P0018C10.44
  misc_feature (19)..(376): NCBI GI NO: 18394987 NR Description: F-box protein family; protein id: At1g21410
  misc_feature (19)..(376): NCBI GI NO: 21554029 NR Description: F-box protein AtFBL5 [Arabidopsis thaliana]
  misc_feature (39)..(376): NCBI GI NO: 18411319 NR Description: F-box protein family, AtFBL5; protein id:At1g77000
  misc_feature (230)..(376): NCBI GI NO: 26450797 NR Description: unknown protein [Arabidopsis thaliana]
  misc_feature (106)..(343): NCBI GI NO: 7512791 NR Description: hypothetical protein DKFZp564P0622
  misc_feature (20)..(290): NCBI GI NO: 11560093 NR Description: F-box protein FBL2 [Rattus norvegicus]
  misc_feature (77)..(286): NCBI GI NO: 12848653 NR Description: unnamed protein product [Mus musculus]
  misc_feature (77)..(286): NCBI GI NO: 38503178 NR Description: F-box/LRR-repeat protein 2-like
  misc_feature (77)..(286): NCBI GI NO: 27734755 NR Description: hypothetical protein MGC15482 [Homo sapiens]
MDSAQQPTGELNNSFDTLMVSGGDQSRQPQDAGNETSFTNWKDLPMELLLRIISLVGDDRIVIVASGVCTGWRDTLGWGVANLSLSWCQDRMNDLVISLAHKFTKLQVLSLRQIRPQLEDSGVEAVANHCHDLRELDLSRSFRLSDRSLYALAHGCPQLTRLNISGCSSFSDVALVFLSSQCGNLRCLNLCGCVRAASDRALQAIACYCGQLQSLNLGWCDGITDKGVTSLASGCPELRAVDLCGCVLITDESVVALANGCLHLRSLGLYYCQNITDRAMYSLAANSRVRSRGRGWDATAKSGGGGKDRERDGLASLNISQCTALTPPAVQAVCDSFPALHTCPERHSLNISGCLSLTSVHCACALHPHRGRASHPLQPRLLNAMRE

SEQ ID NO: 23344 - protein, 369 aa, Zea mays subsp. mays
  peptide (1)..(369): Ceres Seq. ID no. 12405852
  misc_feature (1)..(355): NCBI GI NO: 34907434 NR Description: P0018C10.44
  misc_feature (1)..(358): NCBI GI NO: 18394987 NR Description: F-box protein family; protein id: At1g21410
  misc_feature (1)..(358): NCBI GI NO: 21554029 NR Description: F-box protein AtFBL5 [Arabidopsis thaliana]
  misc_feature (21)..(358): NCBI GI NO: 18411319 NR Description: F-box protein family, AtFBL5; protein id:At1g77000
  misc_feature (212)..(358): NCBI GI NO: 26450797 NR Description: unknown protein [Arabidopsis thaliana]
  misc_feature (88)..(325): NCBI GI NO: 7512791 NR Description: hypothetical protein DKFZp564P0622
  misc_feature (2)..(272): NCBI GI NO: 11560093 NR Description: F-box protein FBL2 [Rattus norvegicus]
  misc_feature (59)..(268): NCBI GI NO: 12848653 NR Description: unnamed protein product [Mus musculus]
  misc_feature (59)..(268): NCBI GI NO: 38503178 NR Description: F-box/LRR-repeat protein 2-like
  misc_feature (59)..(268): NCBI GI NO: 27734755 NR Description: hypothetical protein MGC15482 [Homo sapiens]
MVSGGDQSRQPQDAGNETSFTNWKDLPMELLLRIISLVGDDRIVIVASGVCTGWRDTLGWGVANLSLSWCQDRMNDLVISLAHKFTKLQVLSLRQIRPQLEDSGVEAVANHCHDLRELDLSRSFRLSDRSLYALAHGCPQLTRLNISGCSSFSDVALVFLSSQCGNLRCLNLCGCVRAASDRALQAIACYCGQLQSLNLGWCDGITDKGVTSLASGCPELRAVDLCGCVLITDESVVALANGCLHLRSLGLYYCQNITDRAMYSLAANSRVRSRGRGWDATAKSGGGGKDRERDGLASLNISQCTALTPPAVQAVCDSFPALHTCPERHSLNISGCLSLTSVHCACALHPHRGRASHPLQPRLLNAMRE

SEQ ID NO: 23345 - protein, 342 aa, Zea mays subsp. mays
  peptide (1)..(342): Ceres Seq. ID no. 12405853
  misc_feature (1)..(328): NCBI GI NO: 34907434 NR Description: P0018C10.44
  misc_feature (1)..(331): NCBI GI NO: 18394987 NR Description: F-box protein family; protein id: At1g21410
  misc_feature (1)..(331): NCBI GI NO: 21554029 NR Description: F-box protein AtFBL5 [Arabidopsis thaliana]
  misc_feature (1)..(331): NCBI GI NO: 18411319 NR Description: F-box protein family, AtFBL5; protein id:At1g77000
  misc_feature (185)..(331): NCBI GI NO: 26450797 NR Description: unknown protein [Arabidopsis thaliana]
  misc_feature (61)..(298): NCBI GI NO: 7512791 NR Description: hypothetical protein DKFZp564P0622
  misc_feature (1)..(245): NCBI GI NO: 11560093 NR Description: F-box protein FBL2 [Rattus norvegicus]
  misc_feature (32)..(241): NCBI GI NO: 12848653 NR Description: unnamed protein product [Mus musculus]
  misc_feature (32)..(241): NCBI GI NO: 38503178 NR Description: F-box/LRR-repeat protein 2-like
  misc_feature (32)..(241): NCBI GI NO: 27734755 NR Description: hypothetical protein MGC15482 [Homo sapiens]
MELLLRIISLVGDDRIVIVASGVCTGWRDTLGWGVANLSLSWCQDRMNDLVISLAHKFTKLQVLSLRQIRPQLEDSGVEAVANHCHDLRELDLSRSFRLSDRSLYALAHGCPQLTRLNISGCSSFSDVALVFLSSQCGNLRCLNLCGCVRAASDRALQAIACYCGQLQSLNLGWCDGITDKGVTSLASGCPELRAVDLCGCVLITDESVVALANGCLHLRSLGLYYCQNITDRAMYSLAANSRVRSRGRGWDATAKSGGGGKDRERDGLASLNISQCTALTPPAVQAVCDSFPALHTCPERHSLNISGCLSLTSVHCACALHPHRGRASHPLQPRLLNAMRE

SEQ ID NO: 23346 - DNA, 1548 bp, Zea mays subsp. mays
  misc_feature (1)..(1548): Ceres Seq. ID no. 12341545
gtgtctcttccccccaccactccgccaccggcgccgaagcagagcagccatggccggctccgagcagcgcgtcgtcgccgtcatcatggtcggcggccccaccaaagggacgcggttccggccgctgtcgctgaacgtgcccaagccgctcttccctatcgccggccagcccatggtgcaccaccccatctccgcctgcagccggatcccccacctggcacagatatacctcatcgggttctatgaggagcgggagttcgcgctctatgtctcgtctatctcccacgagctcaggatccctgtcaggtacctacgagaggataagcctcacgggtcagctggagggctctacagctttagagattacatcatggaagacagtccgtcacacatagttctgctgaattgcgacgtctgttctagcttccctcttccagacatgctagaggcccataaaaagtatggaggaatgggtactttactagtcaacaaggtatcagcagagtcagcaaaccagttcggcgagttggtagctgatcctgaaacaaatgaactgctgcactatacggaaaagccggagacttttgtgagtgatctcataaattgcggagtatatatatttactcccgatatccttagcgccattgaggatgtcttaaaacagaaaaaagacagagcaaatttgcggcgtgtatctagcattgaagctcttcattcagcaactaaggcgcttccaccagactttgttaggttagatcaagacattttatcccctcgagcgggaaagaaggagctgtacacataccagacacttgatttctgggaacagatcaaaaccccagggatgtctttgagatgctctgggttatatctctctcagtttcgccatacctctcctcatcttttagcctcaggagatggcaaaagaactgccactattgttggcgatgtctatatctatccatctgccaaggtgcatcctacttcaaagattggcccaaatgtctctatatcagcaaatgcacgcgttggagctggtgccaggcttatcaattgcataattctggatgatgttgaaattatggaaaatgctgttgttatacattcaattgtagggtggaaatcatccattggaaaatggtcacgtgtacagggcgaaggtgatcacaatgccaaacttggcattactattcttggtgaagccgttgatgttgaagatgaagtagttgtagttaacagcatcgtgctcccaaataaaactctcaatgtcagtgtccaagaggagatcatcctataataaccatcgtttttttttgtctaattccatataacgtctgagtaccaatcacatagtttaagtttattcgttctcaccatgtaatgtaaccttccattagattgagattattagtttgcatttatacctgtcttgcagcatgacactgcacaatcttgacttgctatgctactttggttagcgattgtggtgatgtaaaaaatgtacaaacaggtgacaccattttttgtgagaatgactcaagacattac

SEQ ID NO: 23347 - protein, 431 aa, Zea mays subsp. mays
  peptide (1)..(431): Ceres Seq. ID no. 12341546
  misc_feature (25)..(262): Pfam Name: Pfam Description:  Nucleotidyl transferase
  misc_feature (21)..(431): NCBI GI NO: 5882732 NR Description: Similar to gb|AF135422 GDP-mannosepyrophosphorylase A
  misc_feature (21)..(431): NCBI GI NO: 15222037 NR Description: putative GDP-mannose pyrophosphorylase
  misc_feature (20)..(431): NCBI GI NO: 22325477 NR Description: putative GDP-mannose  pyrophosphorylase
  misc_feature (20)..(431): NCBI GI NO: 17064890 NR Description: putative GDP-mannose pyrophosphorylase
  misc_feature (21)..(384): NCBI GI NO: 30699056 NR Description: ADP-glucose pyrophosphorylase family
  misc_feature (17)..(361): NCBI GI NO: 26006499 NR Description: Putative GDP-mannose pyrophosphorylase
  misc_feature (20)..(410): NCBI GI NO: 25411099 NR Description: probable GDP-mannose pyrophosphorylase
  misc_feature (26)..(431): NCBI GI NO: 33416563 NR Description: Unknown (protein for MGC:66135) [Danio rerio]
  misc_feature (26)..(431): NCBI GI NO: 28830182 NR Description: similar to Homo sapiens (Human)
  misc_feature (26)..(431): NCBI GI NO: 31881779 NR Description: GDP-mannose pyrophosphorylase A
CLFPPPLRHRRRSRAAMAGSEQRVVAVIMVGGPTKGTRFRPLSLNVPKPLFPIAGQPMVHHPISACSRIPHLAQIYLIGFYEEREFALYVSSISHELRIPVRYLREDKPHGSAGGLYSFRDYIMEDSPSHIVLLNCDVCSSFPLPDMLEAHKKYGGMGTLLVNKVSAESANQFGELVADPETNELLHYTEKPETFVSDLINCGVYIFTPDILSAIEDVLKQKKDRANLRRVSSIEALHSATKALPPDFVRLDQDILSPRAGKKELYTYQTLDFWEQIKTPGMSLRCSGLYLSQFRHTSPHLLASGDGKRTATIVGDVYIYPSAKVHPTSKIGPNVSISANARVGAGARLINCIILDDVEIMENAVVIHSIVGWKSSIGKWSRVQGEGDHNAKLGITILGEAVDVEDEVVVVNSIVLPNKTLNVSVQEEIIL

SEQ ID NO: 23348 - protein, 415 aa, Zea mays subsp. mays
  peptide (1)..(415): Ceres Seq. ID no. 12341547
  misc_feature (9)..(246): Pfam Name: Pfam Description:  Nucleotidyl transferase
  misc_feature (5)..(415): NCBI GI NO: 5882732 NR Description: Similar to gb|AF135422 GDP-mannosepyrophosphorylase A
  misc_feature (5)..(415): NCBI GI NO: 15222037 NR Description: putative GDP-mannose pyrophosphorylase
  misc_feature (4)..(415): NCBI GI NO: 22325477 NR Description: putative GDP-mannose  pyrophosphorylase
  misc_feature (4)..(415): NCBI GI NO: 17064890 NR Description: putative GDP-mannose pyrophosphorylase
  misc_feature (5)..(368): NCBI GI NO: 30699056 NR Description: ADP-glucose pyrophosphorylase family
  misc_feature (1)..(345): NCBI GI NO: 26006499 NR Description: Putative GDP-mannose pyrophosphorylase
  misc_feature (4)..(394): NCBI GI NO: 25411099 NR Description: probable GDP-mannose pyrophosphorylase
  misc_feature (10)..(415): NCBI GI NO: 33416563 NR Description: Unknown (protein for MGC:66135) [Danio rerio]
  misc_feature (10)..(415): NCBI GI NO: 28830182 NR Description: similar to Homo sapiens (Human)
  misc_feature (10)..(415): NCBI GI NO: 31881779 NR Description: GDP-mannose pyrophosphorylase A
MAGSEQRVVAVIMVGGPTKGTRFRPLSLNVPKPLFPIAGQPMVHHPISACSRIPHLAQIYLIGFYEEREFALYVSSISHELRIPVRYLREDKPHGSAGGLYSFRDYIMEDSPSHIVLLNCDVCSSFPLPDMLEAHKKYGGMGTLLVNKVSAESANQFGELVADPETNELLHYTEKPETFVSDLINCGVYIFTPDILSAIEDVLKQKKDRANLRRVSSIEALHSATKALPPDFVRLDQDILSPRAGKKELYTYQTLDFWEQIKTPGMSLRCSGLYLSQFRHTSPHLLASGDGKRTATIVGDVYIYPSAKVHPTSKIGPNVSISANARVGAGARLINCIILDDVEIMENAVVIHSIVGWKSSIGKWSRVQGEGDHNAKLGITILGEAVDVEDEVVVVNSIVLPNKTLNVSVQEEIIL

SEQ ID NO: 23349 - protein, 403 aa, Zea mays subsp. mays
  peptide (1)..(403): Ceres Seq. ID no. 12341548
  misc_feature (1)..(234): Pfam Name: Pfam Description:  Nucleotidyl transferase
  misc_feature (1)..(403): NCBI GI NO: 5882732 NR Description: Similar to gb|AF135422 GDP-mannosepyrophosphorylase A
  misc_feature (1)..(403): NCBI GI NO: 15222037 NR Description: putative GDP-mannose pyrophosphorylase
  misc_feature (1)..(403): NCBI GI NO: 22325477 NR Description: putative GDP-mannose  pyrophosphorylase
  misc_feature (1)..(403): NCBI GI NO: 17064890 NR Description: putative GDP-mannose pyrophosphorylase
  misc_feature (1)..(356): NCBI GI NO: 30699056 NR Description: ADP-glucose pyrophosphorylase family
  misc_feature (1)..(333): NCBI GI NO: 26006499 NR Description: Putative GDP-mannose pyrophosphorylase
  misc_feature (1)..(382): NCBI GI NO: 25411099 NR Description: probable GDP-mannose pyrophosphorylase
  misc_feature (1)..(403): NCBI GI NO: 33416563 NR Description: Unknown (protein for MGC:66135) [Danio rerio]
  misc_feature (1)..(403): NCBI GI NO: 28830182 NR Description: similar to Homo sapiens (Human)
  misc_feature (1)..(403): NCBI GI NO: 31881779 NR Description: GDP-mannose pyrophosphorylase A
MVGGPTKGTRFRPLSLNVPKPLFPIAGQPMVHHPISACSRIPHLAQIYLIGFYEEREFALYVSSISHELRIPVRYLREDKPHGSAGGLYSFRDYIMEDSPSHIVLLNCDVCSSFPLPDMLEAHKKYGGMGTLLVNKVSAESANQFGELVADPETNELLHYTEKPETFVSDLINCGVYIFTPDILSAIEDVLKQKKDRANLRRVSSIEALHSATKALPPDFVRLDQDILSPRAGKKELYTYQTLDFWEQIKTPGMSLRCSGLYLSQFRHTSPHLLASGDGKRTATIVGDVYIYPSAKVHPTSKIGPNVSISANARVGAGARLINCIILDDVEIMENAVVIHSIVGWKSSIGKWSRVQGEGDHNAKLGITILGEAVDVEDEVVVVNSIVLPNKTLNVSVQEEIIL

SEQ ID NO: 23350 - DNA, 1522 bp, Zea mays subsp. mays
  misc_feature (1)..(1522): Ceres Seq. ID no. 12411062
ttccgctcgtcccgccaatcgccattattaacagctccgcggtccctccctccctcggtcggtcggcgtcggtccctccctccccacccagttagtcctcagcctatcccgtgcccgcgcagagcaccgcctctgctcgacccaccaccctctgtgcagagttaattaaccttgaggtttccgattgcccttcccttccgctcctctcgcccattcgcggcgagattcagcggcaaggatgcgcctgcacgcggaggtgcgggatgagatggaggaggggagcgaggagggggctgtgacggcttcggcggggctgtcgccaccgccactcatcggtgcggcggcgccggttccccggctagtggtggggttcgcccctcacgaagaagaaggtgaagagcttcctgcagcccaagctgctcctgctggccaggaagaatggaatcagttttgtatctattgatgagtctcttcccctctcagaacaaggcccttttgatgttattttacacaagattactaggaaggagtggcagaaggttctggaggactatcacgaagaacatccagaagttactgtccttgacccaccaaatgctatcgagcatctgaacaatcgacaatcaatgcttgaagaagtagctgatttgaacctgtcaaatttctatggagaagtttgtatcccacgccagctggtcattacgaaagatccatcctctataccaacttctgtagctatggctggactaactttgcccttggttgccaagccattggttgttgatgggacgtctaaaggtcatgaactatatcttgcatatgacgaggcatccttgtcaatgcttgatccgcctctggttctacaggaattcataaaccatggcgggatcctctttaaggtgtatatcattggtgaaacaatacaggttgtccgcaggttctctcttcctgatgttaacacatatgacttactaaacaacgttggcatctatcgattgccaagagtttcatgtgctgcagctagtgcggatgatgcagatcttgaccctcttattgcagagcttcctccaaggccacttctagagaaactgggcagggagcttcgtggccggcttggtttgagattgttcaatatagatatgattagagaacttggaaccaaagatcggtactacataattgatatcaactacttcccaggttacggcaaaatgccaggatatgagcgcatgttcacagacttcttactaagtctcgcacaaagcaagtacaaaaggtatgcttccccaccgcgccaatgtacatttgctggagacataagcataagcgggaggcttgaggaagttggcaagtctcagtgtgtgtgttcaaaatcggtggcacatgctggactggagtaggaaataaccaaggaaacgcttggatgcgctgtactcatgttgtaaaatgtttaactgaatgaacaccttcctcgtgatggctccctccatcgtaatttggcaaccatgagaattaattctgc

SEQ ID NO: 23351 - protein, 257 aa, Zea mays subsp. mays
  peptide (1)..(257): Ceres Seq. ID no. 12411063
  misc_feature (1)..(209): Pfam Name: Pfam Description:  Inositol 1, 3, 4-trisphosphate 5/6-kinase
  misc_feature (1)..(220): NCBI GI NO: 27311236 NR Description: Putative inositol 1,3,4-trisphosphate 5/6-kinase
  misc_feature (1)..(220): NCBI GI NO: 37530372 NR Description: putative inositol 1,3,4-trisphosphate 5/6-kinase
  misc_feature (1)..(219): NCBI GI NO: 18413088 NR Description: inositol 1
  misc_feature (1)..(192): NCBI GI NO: 7487925 NR Description: inositol 1
  misc_feature (46)..(217): NCBI GI NO: 30689810 NR Description: expressed protein [Arabidopsis thaliana]
  misc_feature (1)..(45): NCBI GI NO: 30689810 NR Description: expressed protein [Arabidopsis thaliana]
  misc_feature (1)..(219): NCBI GI NO: 30680654 NR Description: inositol 1
  misc_feature (46)..(192): NCBI GI NO: 7487088 NR Description: hypothetical protein T16L1
  misc_feature (1)..(45): NCBI GI NO: 7487088 NR Description: hypothetical protein T16L1
  misc_feature (1)..(206): NCBI GI NO: 37537118 NR Description: putative inositol 1,3,4-trisphosphate 5/6-kinase
MLEEVADLNLSNFYGEVCIPRQLVITKDPSSIPTSVAMAGLTLPLVAKPLVVDGTSKGHELYLAYDEASLSMLDPPLVLQEFINHGGILFKVYIIGETIQVVRRFSLPDVNTYDLLNNVGIYRLPRVSCAAASADDADLDPLIAELPPRPLLEKLGRELRGRLGLRLFNIDMIRELGTKDRYYIIDINYFPGYGKMPGYERMFTDFLLSLAQSKYKRYASPPRQCTFAGDISISGRLEEVGKSQCVCSKSVAHAGLE

SEQ ID NO: 23352 - protein, 220 aa, Zea mays subsp. mays
  peptide (1)..(220): Ceres Seq. ID no. 12411064
  misc_feature (1)..(172): Pfam Name: Pfam Description:  Inositol 1, 3, 4-trisphosphate 5/6-kinase
  misc_feature (1)..(183): NCBI GI NO: 27311236 NR Description: Putative inositol 1,3,4-trisphosphate 5/6-kinase
  misc_feature (1)..(183): NCBI GI NO: 37530372 NR Description: putative inositol 1,3,4-trisphosphate 5/6-kinase
  misc_feature (1)..(182): NCBI GI NO: 18413088 NR Description: inositol 1
  misc_feature (1)..(155): NCBI GI NO: 7487925 NR Description: inositol 1
  misc_feature (9)..(180): NCBI GI NO: 30689810 NR Description: expressed protein [Arabidopsis thaliana]
  misc_feature (1)..(182): NCBI GI NO: 30680654 NR Description: inositol 1
  misc_feature (9)..(155): NCBI GI NO: 7487088 NR Description: hypothetical protein T16L1
  misc_feature (1)..(169): NCBI GI NO: 37537118 NR Description: putative inositol 1,3,4-trisphosphate 5/6-kinase
  misc_feature (1)..(169): NCBI GI NO: 27549256 NR Description: inositol phosphate kinase [Zea mays]
  misc_feature (1)..(177): NCBI GI NO: 7487924 NR Description: inositol 1,3,4-trisphosphate 5/6-kinase (EC 2
MAGLTLPLVAKPLVVDGTSKGHELYLAYDEASLSMLDPPLVLQEFINHGGILFKVYIIGETIQVVRRFSLPDVNTYDLLNNVGIYRLPRVSCAAASADDADLDPLIAELPPRPLLEKLGRELRGRLGLRLFNIDMIRELGTKDRYYIIDINYFPGYGKMPGYERMFTDFLLSLAQSKYKRYASPPRQCTFAGDISISGRLEEVGKSQCVCSKSVAHAGLE

SEQ ID NO: 23353 - protein, 186 aa, Zea mays subsp. mays
  peptide (1)..(186): Ceres Seq. ID no. 12411065
  misc_feature (1)..(138): Pfam Name: Pfam Description:  Inositol 1, 3, 4-trisphosphate 5/6-kinase
  misc_feature (1)..(149): NCBI GI NO: 27311236 NR Description: Putative inositol 1,3,4-trisphosphate 5/6-kinase
  misc_feature (1)..(149): NCBI GI NO: 37530372 NR Description: putative inositol 1,3,4-trisphosphate 5/6-kinase
  misc_feature (1)..(148): NCBI GI NO: 18413088 NR Description: inositol 1
  misc_feature (1)..(121): NCBI GI NO: 7487925 NR Description: inositol 1
  misc_feature (1)..(146): NCBI GI NO: 30689810 NR Description: expressed protein [Arabidopsis thaliana]
  misc_feature (1)..(148): NCBI GI NO: 30680654 NR Description: inositol 1
  misc_feature (1)..(121): NCBI GI NO: 7487088 NR Description: hypothetical protein T16L1
  misc_feature (1)..(135): NCBI GI NO: 37537118 NR Description: putative inositol 1,3,4-trisphosphate 5/6-kinase
  misc_feature (1)..(135): NCBI GI NO: 27549256 NR Description: inositol phosphate kinase [Zea mays]
  misc_feature (1)..(143): NCBI GI NO: 7487924 NR Description: inositol 1,3,4-trisphosphate 5/6-kinase (EC 2
MLDPPLVLQEFINHGGILFKVYIIGETIQVVRRFSLPDVNTYDLLNNVGIYRLPRVSCAAASADDADLDPLIAELPPRPLLEKLGRELRGRLGLRLFNIDMIRELGTKDRYYIIDINYFPGYGKMPGYERMFTDFLLSLAQSKYKRYASPPRQCTFAGDISISGRLEEVGKSQCVCSKSVAHAGLE

SEQ ID NO: 23354 - DNA, 1549 bp, Zea mays subsp. mays
  misc_feature (1)..(1549): Ceres Seq. ID no. 12351900
actcgacaccgcacggcctcaagcagaggaagctttccgcccgggaacgccatggggtcgcttcctctccttgctgcctgctgctccctcctgctcacggtcgcagctcctgcccgggacagcactaccagcgtctgcgcttcgcaaatcggcgatttcccgcaccggaacagttcgggcctccacctgacgctgcaccacccgcagagcccctgctcgccggcgccgctcccgtccgacctccccttctccacagtcctcacccacgacgatgcgcgcgtcgcccacctcgcgtcgcgactcgccgccagtgatccgccgtcccgccgtccgacatcactccgcaagcagaagaaggccgccggtggtgcttccggcggccaccacctcgacgacgactccctggcctccgtgcctctctcgcccggaacgtcagtgggcgtggggaactacgttacccagctcggcctcggcacgccgtccacctcctacgcaatggtagtcgacacgggctcctcgctcacctggctgcagtgctcgccttgcgtcgtgtcgtgccaccgccaggtggggccgctcttcgaccccagggcctccagcacctacgcctccgtgcgctgctcggcgtcgcagtgcgacgagctccaggccgccacgctcaacccgtccgcctgctccgcctcaaacgtctgcatctaccaggccagctacggcgacagctccttctccgtcggctccctcagcacggacaccgtctccttcggctccacccgctacccgagcttctactacggctgcggccaggacaatgaggggctcttcggccgctcggcggggctcatcggcctcgcgcgcaacaagctctcgctgctctaccagctcgcgcccagcctcggctactccttctcctattgcctcccgacggctgcgtcaacggggtatctctccatcgggccctacaacacggggcactactactcgtacacgcccatggcctcgagctctctcgacgcctcgctctacttcatcaccctgtccgggatgtcggtcggcgggagcccactcgcggtctcgccgtcggagtacagcagcctgcccacgatcatagactcgggcacggtgatcacgcgcctgccgacggctgtgcacacggcgctcagcaaggcggtggcccaggccatggcaggggcgcagcgcgcaccggccttctccatcctggacacgtgcttcgagggccaggcgtcgcagctgcgcgtgcccaccgtggccatggcgttcgcgggcggcgcctccatgaagctgacgacgcggaacgtgctcatagacgtcgacgactccacgacgtgcctggcgtttgcgcccaccgacagcacggccatcatcggcaacacgcagcagcagacgttcagcgtcatctacgacgtcgcgcaatccaggatcggcttctcggcaggcggatgcagctgaatagctgatgggtgaaaagtgaaaactgattattgagctctatggagtgggcagctcaagcttggtaatagaaaatgcgtac

SEQ ID NO: 23355 - protein, 488 aa, Zea mays subsp. mays
  peptide (1)..(488): Ceres Seq. ID no. 12351901
  misc_feature (133)..(482): Pfam Name: Pfam Description:  Eukaryotic aspartyl protease
  misc_feature (60)..(488): NCBI GI NO: 24430421 NR Description: 41 kD chloroplast nucleoid DNA binding protein
  misc_feature (60)..(488): NCBI GI NO: 7489168 NR Description: nucleoid DNA-binding protein cnd41
  misc_feature (129)..(488): NCBI GI NO: 11358588 NR Description: nucleoid DNA-binding protein cnd41-like protein -Arabidopsis thaliana
  misc_feature (129)..(488): NCBI GI NO: 22326716 NR Description: nucleoid DNA-binding protein cnd41 - like protein
  misc_feature (64)..(487): NCBI GI NO: 24417232 NR Description: unknown [Arabidopsis thaliana]
  misc_feature (64)..(487): NCBI GI NO: 15238250 NR Description: nucleoid DNA-binding protein cnd41 - like protein
  misc_feature (46)..(488): NCBI GI NO: 15223368 NR Description: chloroplast nucleoid DNA binding protein, putative
  misc_feature (6)..(487): NCBI GI NO: 15229656 NR Description: putative chloroplast nucleoid DNA-binding protein
  misc_feature (6)..(487): NCBI GI NO: 19424106 NR Description: putative chloroplast nucleoid DNA-binding protein
  misc_feature (46)..(488): NCBI GI NO: 21594980 NR Description: chloroplast nucleoid DNA binding protein, putative
TRHRTASSRGSFPPGNAMGSLPLLAACCSLLLTVAAPARDSTTSVCASQIGDFPHRNSSGLHLTLHHPQSPCSPAPLPSDLPFSTVLTHDDARVAHLASRLAASDPPSRRPTSLRKQKKAAGGASGGHHLDDDSLASVPLSPGTSVGVGNYVTQLGLGTPSTSYAMVVDTGSSLTWLQCSPCVVSCHRQVGPLFDPRASSTYASVRCSASQCDELQAATLNPSACSASNVCIYQASYGDSSFSVGSLSTDTVSFGSTRYPSFYYGCGQDNEGLFGRSAGLIGLARNKLSLLYQLAPSLGYSFSYCLPTAASTGYLSIGPYNTGHYYSYTPMASSSLDASLYFITLSGMSVGGSPLAVSPSEYSSLPTIIDSGTVITRLPTAVHTALSKAVAQAMAGAQRAPAFSILDTCFEGQASQLRVPTVAMAFAGGASMKLTTRNVLIDVDDSTTCLAFAPTDSTAIIGNTQQQTFSVIYDVAQSRIGFSAGGCS

SEQ ID NO: 23356 - protein, 471 aa, Zea mays subsp. mays
  peptide (1)..(471): Ceres Seq. ID no. 12351902
  misc_feature (116)..(465): Pfam Name: Pfam Description:  Eukaryotic aspartyl protease
  misc_feature (43)..(471): NCBI GI NO: 24430421 NR Description: 41 kD chloroplast nucleoid DNA binding protein
  misc_feature (43)..(471): NCBI GI NO: 7489168 NR Description: nucleoid DNA-binding protein cnd41
  misc_feature (112)..(471): NCBI GI NO: 11358588 NR Description: nucleoid DNA-binding protein cnd41-like protein -Arabidopsis thaliana
  misc_feature (112)..(471): NCBI GI NO: 22326716 NR Description: nucleoid DNA-binding protein cnd41 - like protein
  misc_feature (47)..(470): NCBI GI NO: 24417232 NR Description: unknown [Arabidopsis thaliana]
  misc_feature (47)..(470): NCBI GI NO: 15238250 NR Description: nucleoid DNA-binding protein cnd41 - like protein
  misc_feature (29)..(471): NCBI GI NO: 15223368 NR Description: chloroplast nucleoid DNA binding protein, putative
  misc_feature (1)..(470): NCBI GI NO: 15229656 NR Description: putative chloroplast nucleoid DNA-binding protein
  misc_feature (1)..(470): NCBI GI NO: 19424106 NR Description: putative chloroplast nucleoid DNA-binding protein
  misc_feature (29)..(471): NCBI GI NO: 21594980 NR Description: chloroplast nucleoid DNA binding protein, putative
MGSLPLLAACCSLLLTVAAPARDSTTSVCASQIGDFPHRNSSGLHLTLHHPQSPCSPAPLPSDLPFSTVLTHDDARVAHLASRLAASDPPSRRPTSLRKQKKAAGGASGGHHLDDDSLASVPLSPGTSVGVGNYVTQLGLGTPSTSYAMVVDTGSSLTWLQCSPCVVSCHRQVGPLFDPRASSTYASVRCSASQCDELQAATLNPSACSASNVCIYQASYGDSSFSVGSLSTDTVSFGSTRYPSFYYGCGQDNEGLFGRSAGLIGLARNKLSLLYQLAPSLGYSFSYCLPTAASTGYLSIGPYNTGHYYSYTPMASSSLDASLYFITLSGMSVGGSPLAVSPSEYSSLPTIIDSGTVITRLPTAVHTALSKAVAQAMAGAQRAPAFSILDTCFEGQASQLRVPTVAMAFAGGASMKLTTRNVLIDVDDSTTCLAFAPTDSTAIIGNTQQQTFSVIYDVAQSRIGFSAGGCS

SEQ ID NO: 23357 - protein, 323 aa, Zea mays subsp. mays
  peptide (1)..(323): Ceres Seq. ID no. 12351903
  misc_feature (1)..(317): Pfam Name: Pfam Description:  Eukaryotic aspartyl protease
  misc_feature (1)..(323): NCBI GI NO: 24430421 NR Description: 41 kD chloroplast nucleoid DNA binding protein
  misc_feature (1)..(323): NCBI GI NO: 7489168 NR Description: nucleoid DNA-binding protein cnd41
  misc_feature (1)..(323): NCBI GI NO: 11358588 NR Description: nucleoid DNA-binding protein cnd41-like protein -Arabidopsis thaliana
  misc_feature (1)..(323): NCBI GI NO: 22326716 NR Description: nucleoid DNA-binding protein cnd41 - like protein
  misc_feature (1)..(322): NCBI GI NO: 24417232 NR Description: unknown [Arabidopsis thaliana]
  misc_feature (1)..(322): NCBI GI NO: 15238250 NR Description: nucleoid DNA-binding protein cnd41 - like protein
  misc_feature (1)..(323): NCBI GI NO: 15223368 NR Description: chloroplast nucleoid DNA binding protein, putative
  misc_feature (1)..(322): NCBI GI NO: 15229656 NR Description: putative chloroplast nucleoid DNA-binding protein
  misc_feature (1)..(322): NCBI GI NO: 19424106 NR Description: putative chloroplast nucleoid DNA-binding protein
  misc_feature (1)..(323): NCBI GI NO: 21594980 NR Description: chloroplast nucleoid DNA binding protein, putative
MVVDTGSSLTWLQCSPCVVSCHRQVGPLFDPRASSTYASVRCSASQCDELQAATLNPSACSASNVCIYQASYGDSSFSVGSLSTDTVSFGSTRYPSFYYGCGQDNEGLFGRSAGLIGLARNKLSLLYQLAPSLGYSFSYCLPTAASTGYLSIGPYNTGHYYSYTPMASSSLDASLYFITLSGMSVGGSPLAVSPSEYSSLPTIIDSGTVITRLPTAVHTALSKAVAQAMAGAQRAPAFSILDTCFEGQASQLRVPTVAMAFAGGASMKLTTRNVLIDVDDSTTCLAFAPTDSTAIIGNTQQQTFSVIYDVAQSRIGFSAGGCS

SEQ ID NO: 23358 - DNA, 764 bp, Zea mays subsp. mays
  misc_feature (1)..(764): Ceres Seq. ID no. 12406283
gtcgagtctaaccctagcgcgcgccgccacacctgccgttgctaccgccccgtacctcgcttgctttcccgtcgccgaaatgacgaagcgcaccaagaaggctggaattgttggcaaatatggaaccaggtatggcgctagcttgcgtaagcaaatcaagaagatggaggtatctcagcactccaagtacttctgcgagttttgtgggaagtttgctgtgaagaggaaagcagttggaatttggggatgcaaggactgtgggaaggtcaaggctggcggtgcttacaccatgaacactgctagtgcctcaaccagatcccgaaccccaacccgaaccatccaagccaggccctaaaccccaacctgaaccatccaagctagaacctcagccaggatctaaacctacaccggagccaaaaccctaaccagaaccatcgaagcggagccaccgtcgtctcttccaccaccatttggcacgggcgtcgtggaagggaactgagaggagcatagtggaaccgatcatcatcgtggatgccatctatagcttttggctatgactgataagtaatactgtttgtgtaagagtgagctctcttttttatatagggtgtgtgtattgtgtgtagtactatatttggacgatgtgtgtgtacccacctttttccgtgtgtttccatcagcatgcatccatgatccatgtatatgtcttgctaagtttgtattatcaatgaataaaaaaacatgcctttgtatgtcttgttttg

SEQ ID NO: 23359 - protein, 117 aa, Zea mays subsp. mays
  peptide (1)..(117): Ceres Seq. ID no. 12406284
  misc_feature (28)..(111): NCBI GI NO: 34911166 NR Description: putative 60S ribosomal protein L37a
  misc_feature (27)..(111): NCBI GI NO: 6831607 NR Description: 60S ribosomal protein L37a
  misc_feature (27)..(111): NCBI GI NO: 1173045 NR Description: 60S RIBOSOMAL PROTEIN L37A
  misc_feature (27)..(111): NCBI GI NO: 6831602 NR Description: 60S RIBOSOMAL PROTEIN L37A
  misc_feature (27)..(111): NCBI GI NO: 18411538 NR Description: Expressed protein; protein id: At3g60245
  misc_feature (27)..(111): NCBI GI NO: 15228411 NR Description: putative 60S ribosomal protein L37a
  misc_feature (32)..(111): NCBI GI NO: 11358898 NR Description: translation initiation factor eIF-4 gamma homologF27H5
  misc_feature (27)..(114): NCBI GI NO: 6093889 NR Description: 60S RIBOSOMAL PROTEIN L37A
  misc_feature (27)..(111): NCBI GI NO: 33637090 NR Description: N1 [Toxoplasma gondii]
  misc_feature (27)..(111): NCBI GI NO: 7441206 NR Description: ribosomal protein L37a
SSLTLARAATPAVATAPYLACFPVAEMTKRTKKAGIVGKYGTRYGASLRKQIKKMEVSQHSKYFCEFCGKFAVKRKAVGIWGCKDCGKVKAGGAYTMNTASASTRSRTPTRTIQARP

SEQ ID NO: 23360 - protein, 91 aa, Zea mays subsp. mays
  peptide (1)..(91): Ceres Seq. ID no. 12406285
  misc_feature (2)..(85): NCBI GI NO: 34911166 NR Description: putative 60S ribosomal protein L37a
  misc_feature (1)..(85): NCBI GI NO: 6831607 NR Description: 60S ribosomal protein L37a
  misc_feature (1)..(85): NCBI GI NO: 1173045 NR Description: 60S RIBOSOMAL PROTEIN L37A
  misc_feature (1)..(85): NCBI GI NO: 6831602 NR Description: 60S RIBOSOMAL PROTEIN L37A
  misc_feature (1)..(85): NCBI GI NO: 18411538 NR Description: Expressed protein; protein id: At3g60245
  misc_feature (1)..(85): NCBI GI NO: 15228411 NR Description: putative 60S ribosomal protein L37a
  misc_feature (6)..(85): NCBI GI NO: 11358898 NR Description: translation initiation factor eIF-4 gamma homologF27H5
  misc_feature (1)..(88): NCBI GI NO: 6093889 NR Description: 60S RIBOSOMAL PROTEIN L37A
  misc_feature (1)..(85): NCBI GI NO: 33637090 NR Description: N1 [Toxoplasma gondii]
  misc_feature (1)..(85): NCBI GI NO: 7441206 NR Description: ribosomal protein L37a
MTKRTKKAGIVGKYGTRYGASLRKQIKKMEVSQHSKYFCEFCGKFAVKRKAVGIWGCKDCGKVKAGGAYTMNTASASTRSRTPTRTIQARP

SEQ ID NO: 23361 - protein, 63 aa, Zea mays subsp. mays
  peptide (1)..(63): Ceres Seq. ID no. 12406286
  misc_feature (1)..(57): NCBI GI NO: 34911166 NR Description: putative 60S ribosomal protein L37a
  misc_feature (1)..(57): NCBI GI NO: 6831607 NR Description: 60S ribosomal protein L37a
  misc_feature (1)..(57): NCBI GI NO: 1173045 NR Description: 60S RIBOSOMAL PROTEIN L37A
  misc_feature (1)..(57): NCBI GI NO: 6831602 NR Description: 60S RIBOSOMAL PROTEIN L37A
  misc_feature (1)..(57): NCBI GI NO: 18411538 NR Description: Expressed protein; protein id: At3g60245
  misc_feature (1)..(57): NCBI GI NO: 15228411 NR Description: putative 60S ribosomal protein L37a
  misc_feature (1)..(57): NCBI GI NO: 11358898 NR Description: translation initiation factor eIF-4 gamma homologF27H5
  misc_feature (1)..(60): NCBI GI NO: 6093889 NR Description: 60S RIBOSOMAL PROTEIN L37A
  misc_feature (1)..(57): NCBI GI NO: 33637090 NR Description: N1 [Toxoplasma gondii]
  misc_feature (1)..(57): NCBI GI NO: 7441206 NR Description: ribosomal protein L37a
MEVSQHSKYFCEFCGKFAVKRKAVGIWGCKDCGKVKAGGAYTMNTASASTRSRTPTRTIQARP

SEQ ID NO: 23362 - DNA, 1361 bp, Zea mays subsp. mays
  misc_feature (1)..(1361): Ceres Seq. ID no. 12407362
acaatccacagatacggtcataccgactgctgttgcccccgatttcccgtccgcccgcagtttctgaaggcacaccaaaacgatgagacctgtagacagtactctagtctctagtccacgaaatcctcgtacttgtgttggctggccctcgactagcgtgttgtagcacactagcgccacagtaatcgagagtgctctcccaggtcgaggtggtgtaggtgtttggcggagcagccggagcgttagaatctgaggaggagaagatggtggtgctggtggtggccacgacgtcggacccggcgtccattgggcccgccgccgccttcctcgccatgcccggatggtcccccggcccgcccatcgccgaggcgatggagagttttactaatgggaatgttcgattactgaagcatgagcgtagcattgtcgcagaggatgatcttgaccagcgatggcaggaagccactggagagtctgtttctgaggtcatattcctcagcaaacacactgcagtctccaaacgtccagcactcacagtgcatccaattggtgtgccacatctgaaggaggatgaaaccccaccccaaggaggaactcctggatgggcagcaattccaagtcctcgaattggaccttggctccggttgatgcaaaagatagctgtagaacaaggccttgttccagagtttgaggttacgcttgaggctactcaccatggaccagttaccagcacacccaccatgtttgttgagataggaagtacagaagaccactggggtcgacaagatgctgcacaggcaattgctctagttctatggaaaggtcttggtctggaggatggaaatgctgttggaacttggcagaggaattgtgaaaaggttctattaggtataggaggtggtcactatgttcctcgtcacatggatattgtcatcaaagatggtgtatgggtcggtcatttactctctggctactccttgccaatggacatgccgtcgcaagtaaatgtaaagagttctgaagaggttgctggaatgtggaagcactccatcaaagtttcttatgaagcaacaaaggcagcatttcctggtggtgaagttatcgcgcatcttgatcacaagagcttcaagggctggcagaagaatgctgttacatgcttcttgcaggagcagaacatcaggataggaaagcctagcgatttcctgtgacgtgctgcgacagcagtgctggacaggacaggtggaagaggctgtgaatgcttgagctgatttccctggtcacgcccacgcgcgcgctgaataaatatgagacgtatagtaagactcgatccttaatgcggttcaagagcttgaatttgccgc

SEQ ID NO: 23363 - protein, 314 aa, Zea mays subsp. mays
  peptide (1)..(314): Ceres Seq. ID no. 12407363
  misc_feature (49)..(310): Pfam Name: DUF516 Pfam Description: Protein of unknown function
  misc_feature (1)..(313): NCBI GI NO: 38636945 NR Description: putative GEKO1
  misc_feature (1)..(313): NCBI GI NO: 15227708 NR Description: unknown protein; protein id: At2g03800.1
  misc_feature (66)..(247): NCBI GI NO: 14601434 NR Description: hypothetical protein [Aeropyrum pernix]
  misc_feature (76)..(260): NCBI GI NO: 15668338 NR Description: conserved hypothetical protein
  misc_feature (70)..(237): NCBI GI NO: 22406443 NR Description: hypothetical protein [Ferroplasma acidarmanus]
  misc_feature (5)..(262): NCBI GI NO: 14589968 NR Description: hypothetical protein [Pyrococcus horikoshii]
  misc_feature (75)..(235): NCBI GI NO: 16081204 NR Description: hypothetical protein [Thermoplasma acidophilum]
  misc_feature (5)..(241): NCBI GI NO: 14520224 NR Description: hypothetical protein [Pyrococcus abyssi]
  misc_feature (69)..(235): NCBI GI NO: 13540908 NR Description: Uncharacterized conserved protein
  misc_feature (144)..(262): NCBI GI NO: 18978354 NR Description: hypothetical protein
MVVLVVATTSDPASIGPAAAFLAMPGWSPGPPIAEAMESFTNGNVRLLKHERSIVAEDDLDQRWQEATGESVSEVIFLSKHTAVSKRPALTVHPIGVPHLKEDETPPQGGTPGWAAIPSPRIGPWLRLMQKIAVEQGLVPEFEVTLEATHHGPVTSTPTMFVEIGSTEDHWGRQDAAQAIALVLWKGLGLEDGNAVGTWQRNCEKVLLGIGGGHYVPRHMDIVIKDGVWVGHLLSGYSLPMDMPSQVNVKSSEEVAGMWKHSIKVSYEATKAAFPGGEVIAHLDHKSFKGWQKNAVTCFLQEQNIRIGKPSDFL

SEQ ID NO: 23364 - protein, 291 aa, Zea mays subsp. mays
  peptide (1)..(291): Ceres Seq. ID no. 12407364
  misc_feature (26)..(287): Pfam Name: DUF516 Pfam Description: Protein of unknown function
  misc_feature (1)..(290): NCBI GI NO: 38636945 NR Description: putative GEKO1
  misc_feature (1)..(290): NCBI GI NO: 15227708 NR Description: unknown protein; protein id: At2g03800.1
  misc_feature (43)..(224): NCBI GI NO: 14601434 NR Description: hypothetical protein [Aeropyrum pernix]
  misc_feature (53)..(237): NCBI GI NO: 15668338 NR Description: conserved hypothetical protein
  misc_feature (47)..(214): NCBI GI NO: 22406443 NR Description: hypothetical protein [Ferroplasma acidarmanus]
  misc_feature (1)..(239): NCBI GI NO: 14589968 NR Description: hypothetical protein [Pyrococcus horikoshii]
  misc_feature (52)..(212): NCBI GI NO: 16081204 NR Description: hypothetical protein [Thermoplasma acidophilum]
  misc_feature (1)..(218): NCBI GI NO: 14520224 NR Description: hypothetical protein [Pyrococcus abyssi]
  misc_feature (46)..(212): NCBI GI NO: 13540908 NR Description: Uncharacterized conserved protein
  misc_feature (121)..(239): NCBI GI NO: 18978354 NR Description: hypothetical protein
MPGWSPGPPIAEAMESFTNGNVRLLKHERSIVAEDDLDQRWQEATGESVSEVIFLSKHTAVSKRPALTVHPIGVPHLKEDETPPQGGTPGWAAIPSPRIGPWLRLMQKIAVEQGLVPEFEVTLEATHHGPVTSTPTMFVEIGSTEDHWGRQDAAQAIALVLWKGLGLEDGNAVGTWQRNCEKVLLGIGGGHYVPRHMDIVIKDGVWVGHLLSGYSLPMDMPSQVNVKSSEEVAGMWKHSIKVSYEATKAAFPGGEVIAHLDHKSFKGWQKNAVTCFLQEQNIRIGKPSDFL

SEQ ID NO: 23365 - protein, 278 aa, Zea mays subsp. mays
  peptide (1)..(278): Ceres Seq. ID no. 12407365
  misc_feature (13)..(274): Pfam Name: DUF516 Pfam Description: Protein of unknown function
  misc_feature (1)..(277): NCBI GI NO: 38636945 NR Description: putative GEKO1
  misc_feature (1)..(277): NCBI GI NO: 15227708 NR Description: unknown protein; protein id: At2g03800.1
  misc_feature (30)..(211): NCBI GI NO: 14601434 NR Description: hypothetical protein [Aeropyrum pernix]
  misc_feature (40)..(224): NCBI GI NO: 15668338 NR Description: conserved hypothetical protein
  misc_feature (34)..(201): NCBI GI NO: 22406443 NR Description: hypothetical protein [Ferroplasma acidarmanus]
  misc_feature (1)..(226): NCBI GI NO: 14589968 NR Description: hypothetical protein [Pyrococcus horikoshii]
  misc_feature (39)..(199): NCBI GI NO: 16081204 NR Description: hypothetical protein [Thermoplasma acidophilum]
  misc_feature (1)..(205): NCBI GI NO: 14520224 NR Description: hypothetical protein [Pyrococcus abyssi]
  misc_feature (33)..(199): NCBI GI NO: 13540908 NR Description: Uncharacterized conserved protein
  misc_feature (108)..(226): NCBI GI NO: 18978354 NR Description: hypothetical protein
MESFTNGNVRLLKHERSIVAEDDLDQRWQEATGESVSEVIFLSKHTAVSKRPALTVHPIGVPHLKEDETPPQGGTPGWAAIPSPRIGPWLRLMQKIAVEQGLVPEFEVTLEATHHGPVTSTPTMFVEIGSTEDHWGRQDAAQAIALVLWKGLGLEDGNAVGTWQRNCEKVLLGIGGGHYVPRHMDIVIKDGVWVGHLLSGYSLPMDMPSQVNVKSSEEVAGMWKHSIKVSYEATKAAFPGGEVIAHLDHKSFKGWQKNAVTCFLQEQNIRIGKPSDFL

SEQ ID NO: 23366 - DNA, 1454 bp, Zea mays subsp. mays
  misc_feature (1)..(1454): Ceres Seq. ID no. 12358320
atcgtcatatctccaggcggcgtcgtcaggcccttccgccgtcgtcacgcaaccgagctcggcacgcggcaacagccgcctccacacagcgcctgcaacctcctcctgcccacccatggccgccgctcgtcccggcaatctcagcgaattggagcagaaatggcataacggcggcgggcctgcgtgtgtgcttggcgtcggcacagccaacccagccaactgcgttcggcaagatgagtacactgactggtacttccgtatcaccaagagcgatcatcttacgcacaccaaagcaatcatgaggaaaacgtgtgagaagatgatggtaaaaaaacgctacttgcaagtcaatgaggagctcttcagtgtgcaccccgagttcttggaccctgcagctccaagtctgcaaggcaagctagctgtcgtggccggtgccatgccagggcttgtggctgctgccgcagagaaagccattgccgactggggccgcccggccggagacatcacccacctcgtcttcgccaccagttccagtgcccagctgcctcacattgacctccgcatcgctgcccttctcgggttaagcaccactgtgcagcgcacggtgatcggctttcacgcctgcagcggcagctccgccgcgctccgcgttgccaagtacatcgccgagaacaaccgcagcgcgcgagtcctcgtcgcttgcgcggacatgtggagcgtcatggatagttacgtagttcctaacgtagaccaccgctacggaattattggccacgcctttatcggtgacggtgccggcgcagttgtcgtcggaagccgaccacaggaacccgttgagcgcccaatcttcgagatggtatcagcgtcgcaggccacggtgcccggctcggagcgggcggttgccgtcgagctcaccaattgtggcctggagtatcgcctcgagtttggagatgtggcggcggaggtcggtggcaacatcgagcggtgcctgcttgacgcgctgtcgccgttgggcattggtagtgttggctggaataacctcttctgggtggtgcacccgggtggccccaggatcatggacaccttcacggcggctctcaagctacagcccgagaagctgtctgccagtcggcgtgtgcttagggagtacggcaacatcaccggcccgactctgatctttgtcctcgacgaggctatacgccgtcgccagctcgaccacgaggaggggagctgcgagtgggggctcatggtgggattgggcccggggttcaccattgatgtaatggcattgcgtgcgtgcagtggtaaatccacaccaacaccaagaatcaagagtagtctgtaagggagagccagaactcagaagcggccctttggttgtctgtttgtcagtgcgtttgtacgtgtcttcatcccaataaaataaataaataactgtggtttggctttgtggc

SEQ ID NO: 23367 - protein, 447 aa, Zea mays subsp. mays
  peptide (1)..(447): Ceres Seq. ID no. 12358321
  misc_feature (59)..(274): Pfam Name: Pfam Description:  Chalcone and stilbene synthases
  misc_feature (30)..(435): NCBI GI NO: 34393320 NR Description: putative Chalcone synthase
  misc_feature (41)..(432): NCBI GI NO: 34393972 NR Description: putative chalcone synthase 1
  misc_feature (59)..(431): NCBI GI NO: 37531436 NR Description: putative chalcone synthase
  misc_feature (59)..(431): NCBI GI NO: 37531256 NR Description: putative chalcone synthase
  misc_feature (47)..(434): NCBI GI NO: 33146463 NR Description: putative chalcone synthase
  misc_feature (52)..(432): NCBI GI NO: 13774973 NR Description: chalcone synthase [Ipomoea purpurea]
  misc_feature (59)..(432): NCBI GI NO: 1345809 NR Description: Chalcone synthase (Naregenin-chalcone synthase)
  misc_feature (59)..(432): NCBI GI NO: 13442780 NR Description: chalcone synthase
  misc_feature (52)..(432): NCBI GI NO: 6166004 NR Description: CHALCONE SYNTHASE (NARINGENIN-CHALCONE SYNTHASE)
  misc_feature (59)..(432): NCBI GI NO: 12231190 NR Description: stilbene synthase [Vitis labrusca]
SSYLQAASSGPSAVVTQPSSARGNSRLHTAPATSSCPPMAAARPGNLSELEQKWHNGGGPACVLGVGTANPANCVRQDEYTDWYFRITKSDHLTHTKAIMRKTCEKMMVKKRYLQVNEELFSVHPEFLDPAAPSLQGKLAVVAGAMPGLVAAAAEKAIADWGRPAGDITHLVFATSSSAQLPHIDLRIAALLGLSTTVQRTVIGFHACSGSSAALRVAKYIAENNRSARVLVACADMWSVMDSYVVPNVDHRYGIIGHAFIGDGAGAVVVGSRPQEPVERPIFEMVSASQATVPGSERAVAVELTNCGLEYRLEFGDVAAEVGGNIERCLLDALSPLGIGSVGWNNLFWVVHPGGPRIMDTFTAALKLQPEKLSASRRVLREYGNITGPTLIFVLDEAIRRRQLDHEEGSCEWGLMVGLGPGFTIDVMALRACSGKSTPTPRIKSSL

SEQ ID NO: 23368 - protein, 409 aa, Zea mays subsp. mays
  peptide (1)..(409): Ceres Seq. ID no. 12358322
  misc_feature (21)..(236): Pfam Name: Pfam Description:  Chalcone and stilbene synthases
  misc_feature (1)..(397): NCBI GI NO: 34393320 NR Description: putative Chalcone synthase
  misc_feature (3)..(394): NCBI GI NO: 34393972 NR Description: putative chalcone synthase 1
  misc_feature (21)..(393): NCBI GI NO: 37531436 NR Description: putative chalcone synthase
  misc_feature (21)..(393): NCBI GI NO: 37531256 NR Description: putative chalcone synthase
  misc_feature (9)..(396): NCBI GI NO: 33146463 NR Description: putative chalcone synthase
  misc_feature (14)..(394): NCBI GI NO: 13774973 NR Description: chalcone synthase [Ipomoea purpurea]
  misc_feature (21)..(394): NCBI GI NO: 1345809 NR Description: Chalcone synthase (Naregenin-chalcone synthase)
  misc_feature (21)..(394): NCBI GI NO: 13442780 NR Description: chalcone synthase
  misc_feature (14)..(394): NCBI GI NO: 6166004 NR Description: CHALCONE SYNTHASE (NARINGENIN-CHALCONE SYNTHASE)
  misc_feature (21)..(394): NCBI GI NO: 12231190 NR Description: stilbene synthase [Vitis labrusca]
MAAARPGNLSELEQKWHNGGGPACVLGVGTANPANCVRQDEYTDWYFRITKSDHLTHTKAIMRKTCEKMMVKKRYLQVNEELFSVHPEFLDPAAPSLQGKLAVVAGAMPGLVAAAAEKAIADWGRPAGDITHLVFATSSSAQLPHIDLRIAALLGLSTTVQRTVIGFHACSGSSAALRVAKYIAENNRSARVLVACADMWSVMDSYVVPNVDHRYGIIGHAFIGDGAGAVVVGSRPQEPVERPIFEMVSASQATVPGSERAVAVELTNCGLEYRLEFGDVAAEVGGNIERCLLDALSPLGIGSVGWNNLFWVVHPGGPRIMDTFTAALKLQPEKLSASRRVLREYGNITGPTLIFVLDEAIRRRQLDHEEGSCEWGLMVGLGPGFTIDVMALRACSGKSTPTPRIKSSL

SEQ ID NO: 23369 - protein, 348 aa, Zea mays subsp. mays
  peptide (1)..(348): Ceres Seq. ID no. 12358323
  misc_feature (1)..(175): Pfam Name: Pfam Description:  Chalcone and stilbene synthases
  misc_feature (1)..(336): NCBI GI NO: 34393320 NR Description: putative Chalcone synthase
  misc_feature (1)..(333): NCBI GI NO: 34393972 NR Description: putative chalcone synthase 1
  misc_feature (1)..(332): NCBI GI NO: 37531436 NR Description: putative chalcone synthase
  misc_feature (1)..(332): NCBI GI NO: 37531256 NR Description: putative chalcone synthase
  misc_feature (1)..(335): NCBI GI NO: 33146463 NR Description: putative chalcone synthase
  misc_feature (1)..(333): NCBI GI NO: 13774973 NR Description: chalcone synthase [Ipomoea purpurea]
  misc_feature (1)..(333): NCBI GI NO: 1345809 NR Description: Chalcone synthase (Naregenin-chalcone synthase)
  misc_feature (1)..(333): NCBI GI NO: 13442780 NR Description: chalcone synthase
  misc_feature (1)..(333): NCBI GI NO: 6166004 NR Description: CHALCONE SYNTHASE (NARINGENIN-CHALCONE SYNTHASE)
  misc_feature (1)..(333): NCBI GI NO: 12231190 NR Description: stilbene synthase [Vitis labrusca]
MRKTCEKMMVKKRYLQVNEELFSVHPEFLDPAAPSLQGKLAVVAGAMPGLVAAAAEKAIADWGRPAGDITHLVFATSSSAQLPHIDLRIAALLGLSTTVQRTVIGFHACSGSSAALRVAKYIAENNRSARVLVACADMWSVMDSYVVPNVDHRYGIIGHAFIGDGAGAVVVGSRPQEPVERPIFEMVSASQATVPGSERAVAVELTNCGLEYRLEFGDVAAEVGGNIERCLLDALSPLGIGSVGWNNLFWVVHPGGPRIMDTFTAALKLQPEKLSASRRVLREYGNITGPTLIFVLDEAIRRRQLDHEEGSCEWGLMVGLGPGFTIDVMALRACSGKSTPTPRIKSSL

SEQ ID NO: 23370 - DNA, 1722 bp, Zea mays subsp. mays
  misc_feature (1)..(1722): Ceres Seq. ID no. 12341549
atcgcctccacgaacaaaccacacaccccacctaccccggccggaccggcaggcagcacaacatggacctcgccctcctggagaaggccctgctgggcctgttcgccgcggctgtggtggccatcgccgtggccaagctgagcggcaagcggtaccgcctcccaccggggcccccgggcgcccccgtggttggaaactggctgcaggtgggcgacgacctgaaccaccgcaacctgatggccatggcgaagcggttcggcgacatcttcctgctgcgcatgggcgtgcgcaacctggtggtggtgtcgaccccggagctggccaaggaggtgctccacacgcagggcgtggagttcggctcccgcacccgcaacgtggtgttcgacatcttcacgggcaaggggcaggacatggtgttcacggtgtacggcgaccactggcgcaagatgcggcgcatcatgaccgtccccttcttcaccaacaaggtggtggcccagaaccgcgccgggtgggaggaggaggcccggctggtggtggaggacgtgaggaaggaccccgaggccgcggccggcggcgtcgtgctccgccgccgcctccagctgatgatgtacaacgacatgttccgcatcatgttcgaccgccggttcgacagcgagcacgaccccgctcttcaacaagctcaaggcgctcaacgcggagcgcagccgcctgtcgcagagcttcgagtacaactacggcgacttcatccccgtgctccgccccttcctccgcggctacctcaaccgctgccacgacctcaagacgcgccgcatgaagttcttcgaggacaacttcgtacaggagcgcaagaaggtgatggctcagactggtgagatccggtgcgccatggatcacatcctcgaggccgagaggaagggcgagatcaaccacgacaacgtcctctacatcgtcgagaacatcaacgtcgcagcgatcgagacgacactgtggtcgatcgagtggggcatcgccgagctggtgaaccacccggccatccagcacaagctccgggaggagctcgcctccgtgctgggcgccggcgtgcctgtgacggagccggacctcgagcgcctcccctaccttcaggccatcgtcaaggagacgctccgcctgcgcatggccatcccgctgctggtcccccacatgaacctcaacgacggcaagctcgccggctacgacatccccgccgagtccaagatcctcgtcaatgcctggttcctcgccaacgaccccaagaggtgggtgcggcccgacgagttccggcccgagcgcttcctggaggaggagaagtccgtggaggcccacggcaacgacttccgcttcgtgccctttggggtcggccgccggagctgccctgggatcatcctcgcgctgcctatcatcggcatcaccctgggccggctggtgcagaacttccagctgctgccgccgccggggctggacaagatcgacaccacggagaagcccggccagttcagcaaccagatcgccaagcatgccaccatcgtctgcaagcccctcgaggcctagaaatcaatgcctgtttcctgcacgcgcccccgcagatgaagcactatgtattttgtcttttttttgtgtgttgtgtttttttactaagaggagatgtatttcttgtttgtaaaatgcacttagtcaaatgagtcgagattatgttgatcatcg

SEQ ID NO: 23371 - protein, 289 aa, Zea mays subsp. mays
  peptide (1)..(289): Ceres Seq. ID no. 12341550
  misc_feature (54)..(231): Pfam Name: Pfam Description:  Cytochrome P450
  misc_feature (21)..(231): NCBI GI NO: 14192803 NR Description: cinnamic acid 4-hydroxylase [Sorghum bicolor]
  misc_feature (21)..(231): NCBI GI NO: 10442761 NR Description: cytochrome P450 [Triticum aestivum]
  misc_feature (21)..(239): NCBI GI NO: 3915095 NR Description: Trans-cinnamate 4-monooxygenase
  misc_feature (21)..(239): NCBI GI NO: 3915111 NR Description: Trans-cinnamate 4-monooxygenase
  misc_feature (21)..(239): NCBI GI NO: 586082 NR Description: Trans-cinnamate 4-monooxygenase
  misc_feature (21)..(239): NCBI GI NO: 9965897 NR Description: cinnamate-4-hydroxylase [Gossypium arboreum]
  misc_feature (21)..(239): NCBI GI NO: 1351206 NR Description: Trans-cinnamate 4-monooxygenase
  misc_feature (21)..(239): NCBI GI NO: 14210375 NR Description: cinnamate 4-hydroxylase [Citrus x paradisi]
  misc_feature (21)..(239): NCBI GI NO: 12276037 NR Description: cinnamate 4-hydroxylase
  misc_feature (21)..(239): NCBI GI NO: 3915089 NR Description: Trans-cinnamate 4-monooxygenase
RLHEQTTHPTYPGRTGRQHNMDLALLEKALLGLFAAAVVAIAVAKLSGKRYRLPPGPPGAPVVGNWLQVGDDLNHRNLMAMAKRFGDIFLLRMGVRNLVVVSTPELAKEVLHTQGVEFGSRTRNVVFDIFTGKGQDMVFTVYGDHWRKMRRIMTVPFFTNKVVAQNRAGWEEEARLVVEDVRKDPEAAAGGVVLRRRLQLMMYNDMFRIMFDRRFDSEHDPALQQAQGAQRGAQPPVAELRVQLRRLHPRAPPLPPRLPQPLPRPQDAPHEVLRGQLRTGAQEGDGSDW

SEQ ID NO: 23372 - protein, 270 aa, Zea mays subsp. mays
  peptide (1)..(270): Ceres Seq. ID no. 12341551
  misc_feature (219)..(270): Pfam Name: Pfam Description:  Equine herpesvirus glycoprotein gp2
  misc_feature (223)..(270): NCBI GI NO: 31204765 NR Description: ENSANGP00000001657 [Anopheles gambiae]
  misc_feature (223)..(270): NCBI GI NO: 31204765 NR Description: ENSANGP00000001657 [Anopheles gambiae]
  misc_feature (205)..(270): NCBI GI NO: 30313663 NR Description: sublingual apomucin [Mus musculus]
  misc_feature (222)..(270): NCBI GI NO: 30313663 NR Description: sublingual apomucin [Mus musculus]
  misc_feature (223)..(270): NCBI GI NO: 30313663 NR Description: sublingual apomucin [Mus musculus]
  misc_feature (168)..(270): NCBI GI NO: 30424862 NR Description: RIKEN cDNA 5033413A03 [Mus musculus]
  misc_feature (1)..(270): NCBI GI NO: 30424862 NR Description: RIKEN cDNA 5033413A03 [Mus musculus]
  misc_feature (248)..(270): NCBI GI NO: 31204765 NR Description: ENSANGP00000001657 [Anopheles gambiae]
  misc_feature (221)..(270): NCBI GI NO: 30313663 NR Description: sublingual apomucin [Mus musculus]
  misc_feature (12)..(193): NCBI GI NO: 29829093 NR Description: putative translation initiation factor IF-2
SPPRTNHTPHLPRPDRQAAQHGPRPPGEGPAGPVRRGCGGHRRGQAERQAVPPPTGAPGRPRGWKLAAGGRRPEPPQPDGHGEAVRRHLPAAHGRAQPGGGVDPGAGQGGAPHAGRGVRLPHPQRGVRHLHGQGAGHGVHGVRRPLAQDAAHHDRPLLHQQGGGPEPRRVGGGGPAGGGGREEGPRGRGRRRRAPPPPPADDVQRHVPHHVRPPVRQRARPRSSTSSRRSTRSAAACRRASSTTTATSSPCSAPSSAATSTAATTSRRAA

SEQ ID NO: 23373 - protein, 269 aa, Zea mays subsp. mays
  peptide (1)..(269): Ceres Seq. ID no. 12341552
  misc_feature (34)..(211): Pfam Name: Pfam Description:  Cytochrome P450
  misc_feature (1)..(211): NCBI GI NO: 14192803 NR Description: cinnamic acid 4-hydroxylase [Sorghum bicolor]
  misc_feature (1)..(211): NCBI GI NO: 10442761 NR Description: cytochrome P450 [Triticum aestivum]
  misc_feature (1)..(219): NCBI GI NO: 3915095 NR Description: Trans-cinnamate 4-monooxygenase
  misc_feature (1)..(219): NCBI GI NO: 3915111 NR Description: Trans-cinnamate 4-monooxygenase
  misc_feature (1)..(219): NCBI GI NO: 586082 NR Description: Trans-cinnamate 4-monooxygenase
  misc_feature (1)..(219): NCBI GI NO: 9965897 NR Description: cinnamate-4-hydroxylase [Gossypium arboreum]
  misc_feature (1)..(219): NCBI GI NO: 1351206 NR Description: Trans-cinnamate 4-monooxygenase
  misc_feature (1)..(219): NCBI GI NO: 14210375 NR Description: cinnamate 4-hydroxylase [Citrus x paradisi]
  misc_feature (1)..(219): NCBI GI NO: 12276037 NR Description: cinnamate 4-hydroxylase
  misc_feature (1)..(219): NCBI GI NO: 3915089 NR Description: Trans-cinnamate 4-monooxygenase
MDLALLEKALLGLFAAAVVAIAVAKLSGKRYRLPPGPPGAPVVGNWLQVGDDLNHRNLMAMAKRFGDIFLLRMGVRNLVVVSTPELAKEVLHTQGVEFGSRTRNVVFDIFTGKGQDMVFTVYGDHWRKMRRIMTVPFFTNKVVAQNRAGWEEEARLVVEDVRKDPEAAAGGVVLRRRLQLMMYNDMFRIMFDRRFDSEHDPALQQAQGAQRGAQPPVAELRVQLRRLHPRAPPLPPRLPQPLPRPQDAPHEVLRGQLRTGAQEGDGSDW

SEQ ID NO: 23374 - DNA, 1682 bp, Zea mays subsp. mays
  misc_feature (1)..(1682): Ceres Seq. ID no. 13577771
gcacgagaccattacctagaacatcctaatcgaaaacccagcgccccccgcgcacacacgcacacactgtcttagtgtctttctctgcctttctttccctagcgccgcgccggcgccgccattcgatcagtcttcgtcggccgcttcgccggcgacagcatactccagtcggttggttttggcacttcggaccggcggccatggcttccgacggcatcggccccagagatgtatgtgttgttggggttgcacgcaccccaatgggcggtttccttggtgccttgtctcccttgcctgctacgaaacttggctctatagtaattcaagctgctctggaaagagcaaacgtggatccagccctcgtgcaggaggtctactttggaaacgtattgagtgctaatttggggcaagctcctgcaaggcaagctgctctgggtgccgggataccaaactctgttgtttgcaccactgttaacaaagtctgtgcatctggcatgaaagctactatgtttgcagcacagtcaattcaattgggtatcaatgatattgttgtggctggtggcatggaaagcatgtccaatgccccaaagtacattgctgaagctaggaaggggtctcgttttggtcatgacacacttgttgatgccatgcttaaggatgggctttgggatgtatacaatgattgtgccatgggaatgtgtgccgagctttgtgctgacaatcatgccctcacaagagaagaccaggatgcatttgctatccaaagcaacgagcgtggaattgctgctcgtgacagtggtgcttttgcatgggagattattccggttcaagttcctgttggtagaggaaaacccccaacattaattgaaagagatgaaagcctggataagtttgacccagtaaaactaaagaaacttcgcccaagtttcaaggagaatggtggtacagttacagctggaaatgcttctagtataagtgatggagctgctgcattagttttggtgagtgggcagaaggctcaagagcttggccttcaagtccttgcaaggatcaaaggttatgctgatgcagctcaagctccggagctttttacaaccactccaggcacttgcaataccaaaggctatcgcaaatgctggattagagtcatcccgtgttgatttctatgagattaatgaagccttttcggctgttgcgcttgcaaatcaaaagcttcttggaattccttcagaaaagattaatgttcatggaggagctgtatctttaggacatcctctcgggtgcagtggtgctcgcattttggttacccttattggtgttctcagggcgaagagtggcaagatcggagttgctggtgtctgcaacggtggaggcggagcatcagctcttgttctggagctcgcataagaaatctagaccttgtagttagcaaaagctccctgaggtgatcttgtagtcttattttccgttgtagtagtcccatagaacatttcttaatttaatttggcaataaagcgaagtcgtgcttctgttggttgcatagtagagtatcatgtaataagagcaatggggatgtttcatagacacagcttagatatttttgaggatgctacagaaatattttatatatttgtcatgtgtctcgtacatttatctaggtcacatcacctatcctgccgccc

SEQ ID NO: 23375 - protein, 319 aa, Zea mays subsp. mays
  peptide (1)..(319): Ceres Seq. ID no. 13577772
  misc_feature (8)..(271): Pfam Name: Pfam Description:  Thiolase, N-terminal domain
  misc_feature (1)..(301): NCBI GI NO: 8777413 NR Description: acetyl-CoA C-acetyltransferase
  misc_feature (1)..(301): NCBI GI NO: 30695411 NR Description: acetyl-CoA C-acetyltransferase
  misc_feature (10)..(301): NCBI GI NO: 30695409 NR Description: acetyl-CoA C-acetyltransferase
  misc_feature (1)..(301): NCBI GI NO: 34894172 NR Description: putative acetoacyl-CoA-thiolase
  misc_feature (1)..(311): NCBI GI NO: 15238793 NR Description: acetoacyl-CoA-thiolase; protein id: At5g47720
  misc_feature (1)..(311): NCBI GI NO: 30695277 NR Description: acetyl-CoA C-acetyltransferase
  misc_feature (2)..(301): NCBI GI NO: 16417944 NR Description: acetyl Co-A acetyltransferase [Hevea brasiliensis]
  misc_feature (1)..(301): NCBI GI NO: 7433657 NR Description: acetyl-CoA C-acetyltransferase (EC 2
  misc_feature (10)..(314): NCBI GI NO: 19113478 NR Description: acetyl-coa acetyltransferase (EC 2.3.1.9)
  misc_feature (10)..(314): NCBI GI NO: 11257345 NR Description: probable acetyl-CoA C-acetyltransferase (EC2
MASDGIGPRDVCVVGVARTPMGGFLGALSPLPATKLGSIVIQAALERANVDPALVQEVYFGNVLSANLGQAPARQAALGAGIPNSVVCTTVNKVCASGMKATMFAAQSIQLGINDIVVAGGMESMSNAPKYIAEARKGSRFGHDTLVDAMLKDGLWDVYNDCAMGMCAELCADNHALTREDQDAFAIQSNERGIAARDSGAFAWEIIPVQVPVGRGKPPTLIERDESLDKFDPVKLKKLRPSFKENGGTVTAGNASSISDGAAALVLVSGQKAQELGLQVLARIKGYADAAQAPELFTTTPGTCNTKGYRKCWIRVIPC

SEQ ID NO: 23376 - protein, 299 aa, Zea mays subsp. mays
  peptide (1)..(299): Ceres Seq. ID no. 13577773
  misc_feature (1)..(251): Pfam Name: Pfam Description:  Thiolase, N-terminal domain
  misc_feature (1)..(281): NCBI GI NO: 8777413 NR Description: acetyl-CoA C-acetyltransferase
  misc_feature (1)..(281): NCBI GI NO: 30695411 NR Description: acetyl-CoA C-acetyltransferase
  misc_feature (1)..(281): NCBI GI NO: 30695409 NR Description: acetyl-CoA C-acetyltransferase
  misc_feature (1)..(281): NCBI GI NO: 34894172 NR Description: putative acetoacyl-CoA-thiolase
  misc_feature (1)..(291): NCBI GI NO: 15238793 NR Description: acetoacyl-CoA-thiolase; protein id: At5g47720
  misc_feature (1)..(291): NCBI GI NO: 30695277 NR Description: acetyl-CoA C-acetyltransferase
  misc_feature (1)..(281): NCBI GI NO: 16417944 NR Description: acetyl Co-A acetyltransferase [Hevea brasiliensis]
  misc_feature (1)..(281): NCBI GI NO: 7433657 NR Description: acetyl-CoA C-acetyltransferase (EC 2
  misc_feature (1)..(294): NCBI GI NO: 19113478 NR Description: acetyl-coa acetyltransferase (EC 2.3.1.9)
  misc_feature (1)..(294): NCBI GI NO: 11257345 NR Description: probable acetyl-CoA C-acetyltransferase (EC2
MGGFLGALSPLPATKLGSIVIQAALERANVDPALVQEVYFGNVLSANLGQAPARQAALGAGIPNSVVCTTVNKVCASGMKATMFAAQSIQLGINDIVVAGGMESMSNAPKYIAEARKGSRFGHDTLVDAMLKDGLWDVYNDCAMGMCAELCADNHALTREDQDAFAIQSNERGIAARDSGAFAWEIIPVQVPVGRGKPPTLIERDESLDKFDPVKLKKLRPSFKENGGTVTAGNASSISDGAAALVLVSGQKAQELGLQVLARIKGYADAAQAPELFTTTPGTCNTKGYRKCWIRVIPC

SEQ ID NO: 23377 - protein, 221 aa, Zea mays subsp. mays
  peptide (1)..(221): Ceres Seq. ID no. 13577774
  misc_feature (1)..(173): Pfam Name: Pfam Description:  Thiolase, N-terminal domain
  misc_feature (1)..(203): NCBI GI NO: 8777413 NR Description: acetyl-CoA C-acetyltransferase
  misc_feature (1)..(203): NCBI GI NO: 30695411 NR Description: acetyl-CoA C-acetyltransferase
  misc_feature (1)..(203): NCBI GI NO: 30695409 NR Description: acetyl-CoA C-acetyltransferase
  misc_feature (1)..(203): NCBI GI NO: 34894172 NR Description: putative acetoacyl-CoA-thiolase
  misc_feature (1)..(213): NCBI GI NO: 15238793 NR Description: acetoacyl-CoA-thiolase; protein id: At5g47720
  misc_feature (1)..(213): NCBI GI NO: 30695277 NR Description: acetyl-CoA C-acetyltransferase
  misc_feature (1)..(203): NCBI GI NO: 16417944 NR Description: acetyl Co-A acetyltransferase [Hevea brasiliensis]
  misc_feature (1)..(203): NCBI GI NO: 7433657 NR Description: acetyl-CoA C-acetyltransferase (EC 2
  misc_feature (1)..(216): NCBI GI NO: 19113478 NR Description: acetyl-coa acetyltransferase (EC 2.3.1.9)
  misc_feature (1)..(216): NCBI GI NO: 11257345 NR Description: probable acetyl-CoA C-acetyltransferase (EC2
MKATMFAAQSIQLGINDIVVAGGMESMSNAPKYIAEARKGSRFGHDTLVDAMLKDGLWDVYNDCAMGMCAELCADNHALTREDQDAFAIQSNERGIAARDSGAFAWEIIPVQVPVGRGKPPTLIERDESLDKFDPVKLKKLRPSFKENGGTVTAGNASSISDGAAALVLVSGQKAQELGLQVLARIKGYADAAQAPELFTTTPGTCNTKGYRKCWIRVIPC

SEQ ID NO: 23378 - DNA, 845 bp, Zea mays subsp. mays
  misc_feature (1)..(845): Ceres Seq. ID no. 12345824
agagcggaatggaggaaatgcccctacctgttcacagtgactggcctcccgactcgactctcctccccctatctctatctgcttcctgctgagctcaaaccccttccgcctccccatccaccattccatccgccgccgccgccgccgcctgtgcaagatgaatgtggagaagctcaagaagatggctggcgctgtacgcaccggagggaagggcagcatgcgcaggaagaagaaggcagttcacaagaccacgaccaccgatgacaagcggcttcagagcaccttgaaaaggatcggggggaacaccattcctggtatcgaggaggtcaacatcttcaaggacgatgttgttatccagtttcagaaccctaaagtgcaagcatccattcctgcaaatacatgggtggttagtggagtaccccagacaaaaagtctgcaagaccttctgccatcaattatcaaccaactgggccctgataacctggacaaccttaagaagctggctgcagattttccagaggcaggtacctggtgctgaagcagctgcacaggatgatgacgacgtccctgagcttgtccaaggagagacatttgaggaggctgcagagaaggagcctcaactggagcaggatgagaacaaagaatcgtgattttgttgtgaagggtcgtcggtttaattgttggcatcagccttgcgagagaccctacctgctcatctggcgtgcctctttacatgtgctccagctttgtgtcaagtgtgctttgggttcgaaaagcattactgcattatgttttctgaagacagtgtaggcatatattttcctcgagccatagtgagtttccgc

SEQ ID NO: 23379 - protein, 126 aa, Zea mays subsp. mays
  peptide (1)..(126): Ceres Seq. ID no. 12345825
  misc_feature (34)..(91): Pfam Name: Pfam Description:  NAC domain
  misc_feature (1)..(119): NCBI GI NO: 24431603 NR Description: Putative transcription factor
  misc_feature (1)..(119): NCBI GI NO: 29367567 NR Description: putative transcription factor BTF3
  misc_feature (1)..(119): NCBI GI NO: 37535464 NR Description: putative transcription factor
  misc_feature (1)..(118): NCBI GI NO: 27573340 NR Description: putative transcription factor
  misc_feature (1)..(123): NCBI GI NO: 33945882 NR Description: transcription factor homolog BTF3-like protein
  misc_feature (1)..(119): NCBI GI NO: 15219413 NR Description: putative transcription factor BTF3
  misc_feature (1)..(119): NCBI GI NO: 21537065 NR Description: putative transcription factor BTF3
  misc_feature (1)..(119): NCBI GI NO: 15220876 NR Description: transcription factor, putative
  misc_feature (1)..(119): NCBI GI NO: 16323127 NR Description: At1g17880/F2H15_10 [Arabidopsis thaliana]
  misc_feature (1)..(106): NCBI GI NO: 29367579 NR Description: putative transcription factor BTF3
MNVEKLKKMAGAVRTGGKGSMRRKKKAVHKTTTTDDKRLQSTLKRIGGNTIPGIEEVNIFKDDVVIQFQNPKVQASIPANTWVVSGVPQTKSLQDLLPSIINQLGPDNLDNLKKLAADFPEAGTWC

SEQ ID NO: 23380 - protein, 118 aa, Zea mays subsp. mays
  peptide (1)..(118): Ceres Seq. ID no. 12345826
  misc_feature (26)..(83): Pfam Name: Pfam Description:  NAC domain
  misc_feature (1)..(111): NCBI GI NO: 24431603 NR Description: Putative transcription factor
  misc_feature (1)..(111): NCBI GI NO: 29367567 NR Description: putative transcription factor BTF3
  misc_feature (1)..(111): NCBI GI NO: 37535464 NR Description: putative transcription factor
  misc_feature (1)..(110): NCBI GI NO: 27573340 NR Description: putative transcription factor
  misc_feature (1)..(115): NCBI GI NO: 33945882 NR Description: transcription factor homolog BTF3-like protein
  misc_feature (1)..(111): NCBI GI NO: 15219413 NR Description: putative transcription factor BTF3
  misc_feature (1)..(111): NCBI GI NO: 21537065 NR Description: putative transcription factor BTF3
  misc_feature (1)..(111): NCBI GI NO: 15220876 NR Description: transcription factor, putative
  misc_feature (1)..(111): NCBI GI NO: 16323127 NR Description: At1g17880/F2H15_10 [Arabidopsis thaliana]
  misc_feature (1)..(98): NCBI GI NO: 29367579 NR Description: putative transcription factor BTF3
MAGAVRTGGKGSMRRKKKAVHKTTTTDDKRLQSTLKRIGGNTIPGIEEVNIFKDDVVIQFQNPKVQASIPANTWVVSGVPQTKSLQDLLPSIINQLGPDNLDNLKKLAADFPEAGTWC

SEQ ID NO: 23381 - protein, 106 aa, Zea mays subsp. mays
  peptide (1)..(106): Ceres Seq. ID no. 12345827
  misc_feature (14)..(71): Pfam Name: Pfam Description:  NAC domain
  misc_feature (1)..(99): NCBI GI NO: 24431603 NR Description: Putative transcription factor
  misc_feature (1)..(99): NCBI GI NO: 29367567 NR Description: putative transcription factor BTF3
  misc_feature (1)..(99): NCBI GI NO: 37535464 NR Description: putative transcription factor
  misc_feature (1)..(98): NCBI GI NO: 27573340 NR Description: putative transcription factor
  misc_feature (1)..(103): NCBI GI NO: 33945882 NR Description: transcription factor homolog BTF3-like protein
  misc_feature (1)..(99): NCBI GI NO: 15219413 NR Description: putative transcription factor BTF3
  misc_feature (1)..(99): NCBI GI NO: 21537065 NR Description: putative transcription factor BTF3
  misc_feature (1)..(99): NCBI GI NO: 15220876 NR Description: transcription factor, putative
  misc_feature (1)..(99): NCBI GI NO: 16323127 NR Description: At1g17880/F2H15_10 [Arabidopsis thaliana]
  misc_feature (1)..(86): NCBI GI NO: 29367579 NR Description: putative transcription factor BTF3
MRRKKKAVHKTTTTDDKRLQSTLKRIGGNTIPGIEEVNIFKDDVVIQFQNPKVQASIPANTWVVSGVPQTKSLQDLLPSIINQLGPDNLDNLKKLAADFPEAGTWC

SEQ ID NO: 23382 - DNA, 1258 bp, Zea mays subsp. mays
  misc_feature (1)..(1258): Ceres Seq. ID no. 12349912
gacaaccttctcatccccaaccccgtcagcccgtgcggccgtgccctctgcctcctctgccactcctcgcccaaagcgccagaggcgcagcccgagccacaggttgcctcctctccctctcctcgtggcctcgtccttctcgttcaagacgaaaccgtacgcgagcgagctggtgagggaggaagagcagggaggtgggatcaggccggctccatggacgccacgctcctcctcctccccgccaactgcacggccgccgccagcgggcggatgcggcctcgactgcctgcaggcccacatgtggcttcccctggtccctccgcgcggccaaggacctccatccgggcctcagccgtgtccgcagccctcgccgttcgtggcctcccgcaacacgcttccgtggccgggcaaagcactggaagttatagggttggtgatgttatgaccaaaagggaagagctccatgttgtgaaaccaacaacttcagttgatgacgcccttgagatgctggtgaagcataggatctctggctttcctgttattgatgatgactggaatttggttggcgttgtgtcagattatgatttattggcactggatacaatatcaggagctggaccggctgaagcagacatatttcctgaggtggatagcacttcgaagacatttcatgagatacagaagcttttgagcaaaaccaacgggaaggttattgctgatgttatgaccccagcgcctctcgtggtgcgtgaaacaactaaccttgaagatgctgcaaggttactccttgtgactaagtaccgcaggcttccagtggtcgatagctcaggcaaactggttgggatcattacaagagggaacgtcgtccaagccgccctcgaaatcaagaaaaaggttgaagggacactctgagatgactacctccaggtatcctttttgctgccacatgtggggcttaggacttggacacatctctagttggcaactgatcaatcaaagcgactgtcagagtgagcgatgaaagtcgctatgtttatgaagatttgcccggagaagcacaggtgtatgtgtagtgtttgttatatatgctgatgcagtccttgctggccaaaacacaggttaccgattgttctggtttcctgggcttctttggacaccaaattcttaacctaggtcttgtttgggtgcacacgtatctagttcaacttacttgtattgaggttcattgaagtggaaaatcaactagttttcgcacttc

SEQ ID NO: 23383 - protein, 303 aa, Zea mays subsp. mays
  peptide (1)..(303): Ceres Seq. ID no. 12349913
  misc_feature (148)..(201): Pfam Name: Pfam Description:  CBS domain
  misc_feature (117)..(303): NCBI GI NO: 34015153 NR Description: putative CBS domain containing protein
  misc_feature (72)..(297): NCBI GI NO: 15234564 NR Description: putative protein; protein id: At4g36910.1
  misc_feature (113)..(302): NCBI GI NO: 18418376 NR Description: putative protein; protein id: At4g34120
  misc_feature (113)..(203): NCBI GI NO: 7486280 NR Description: hypothetical protein F28A23
  misc_feature (218)..(282): NCBI GI NO: 7486280 NR Description: hypothetical protein F28A23
  misc_feature (141)..(291): NCBI GI NO: 16331252 NR Description: IMP dehydrogenase [Synechocystis sp. PCC 6803]
  misc_feature (144)..(291): NCBI GI NO: 17231305 NR Description: hypothetical protein [Nostoc sp. PCC 7120]
  misc_feature (144)..(291): NCBI GI NO: 23040753 NR Description: hypothetical protein
  misc_feature (143)..(291): NCBI GI NO: 15678671 NR Description: conserved protein
  misc_feature (144)..(291): NCBI GI NO: 23127710 NR Description: hypothetical protein [Nostoc punctiforme]
DNLLIPNPVSPCGRALCLLCHSSPKAPEAQPEPQVASSPSPRGLVLLVQDETVRERAGEGGRAGRWDQAGSMDATLLLLPANCTAAASGRMRPRLPAGPHVASPGPSARPRTSIRASAVSAALAVRGLPQHASVAGQSTGSYRVGDVMTKREELHVVKPTTSVDDALEMLVKHRISGFPVIDDDWNLVGVVSDYDLLALDTISGAGPAEADIFPEVDSTSKTFHEIQKLLSKTNGKVIADVMTPAPLVVRETTNLEDAARLLLVTKYRRLPVVDSSGKLVGIITRGNVVQAALEIKKKVEGTL

SEQ ID NO: 23384 - protein, 232 aa, Zea mays subsp. mays
  peptide (1)..(232): Ceres Seq. ID no. 12349914
  misc_feature (77)..(130): Pfam Name: Pfam Description:  CBS domain
  misc_feature (46)..(232): NCBI GI NO: 34015153 NR Description: putative CBS domain containing protein
  misc_feature (1)..(226): NCBI GI NO: 15234564 NR Description: putative protein; protein id: At4g36910.1
  misc_feature (42)..(231): NCBI GI NO: 18418376 NR Description: putative protein; protein id: At4g34120
  misc_feature (42)..(132): NCBI GI NO: 7486280 NR Description: hypothetical protein F28A23
  misc_feature (147)..(211): NCBI GI NO: 7486280 NR Description: hypothetical protein F28A23
  misc_feature (70)..(220): NCBI GI NO: 16331252 NR Description: IMP dehydrogenase [Synechocystis sp. PCC 6803]
  misc_feature (73)..(220): NCBI GI NO: 17231305 NR Description: hypothetical protein [Nostoc sp. PCC 7120]
  misc_feature (73)..(220): NCBI GI NO: 23040753 NR Description: hypothetical protein
  misc_feature (72)..(220): NCBI GI NO: 15678671 NR Description: conserved protein
  misc_feature (73)..(220): NCBI GI NO: 23127710 NR Description: hypothetical protein [Nostoc punctiforme]
MDATLLLLPANCTAAASGRMRPRLPAGPHVASPGPSARPRTSIRASAVSAALAVRGLPQHASVAGQSTGSYRVGDVMTKREELHVVKPTTSVDDALEMLVKHRISGFPVIDDDWNLVGVVSDYDLLALDTISGAGPAEADIFPEVDSTSKTFHEIQKLLSKTNGKVIADVMTPAPLVVRETTNLEDAARLLLVTKYRRLPVVDSSGKLVGIITRGNVVQAALEIKKKVEGTL

SEQ ID NO: 23385 - protein, 213 aa, Zea mays subsp. mays
  peptide (1)..(213): Ceres Seq. ID no. 12349915
  misc_feature (58)..(111): Pfam Name: Pfam Description:  CBS domain
  misc_feature (27)..(213): NCBI GI NO: 34015153 NR Description: putative CBS domain containing protein
  misc_feature (1)..(207): NCBI GI NO: 15234564 NR Description: putative protein; protein id: At4g36910.1
  misc_feature (23)..(212): NCBI GI NO: 18418376 NR Description: putative protein; protein id: At4g34120
  misc_feature (23)..(113): NCBI GI NO: 7486280 NR Description: hypothetical protein F28A23
  misc_feature (128)..(192): NCBI GI NO: 7486280 NR Description: hypothetical protein F28A23
  misc_feature (51)..(201): NCBI GI NO: 16331252 NR Description: IMP dehydrogenase [Synechocystis sp. PCC 6803]
  misc_feature (54)..(201): NCBI GI NO: 17231305 NR Description: hypothetical protein [Nostoc sp. PCC 7120]
  misc_feature (54)..(201): NCBI GI NO: 23040753 NR Description: hypothetical protein
  misc_feature (53)..(201): NCBI GI NO: 15678671 NR Description: conserved protein
  misc_feature (54)..(201): NCBI GI NO: 23127710 NR Description: hypothetical protein [Nostoc punctiforme]
MRPRLPAGPHVASPGPSARPRTSIRASAVSAALAVRGLPQHASVAGQSTGSYRVGDVMTKREELHVVKPTTSVDDALEMLVKHRISGFPVIDDDWNLVGVVSDYDLLALDTISGAGPAEADIFPEVDSTSKTFHEIQKLLSKTNGKVIADVMTPAPLVVRETTNLEDAARLLLVTKYRRLPVVDSSGKLVGIITRGNVVQAALEIKKKVEGTL

SEQ ID NO: 23386 - DNA, 1746 bp, Zea mays subsp. mays
  misc_feature (1)..(1746): Ceres Seq. ID no. 12365228
atcatctcatttgctgcgttgttttgtttgccgcgcccacaaataggcgccagttcatccgcttccattcctagttctcaccacccagaagtccacctccttgttgccttcctccaatcccaaatctcacctccttccagttccagctatcgcttctcgtgttggctcgcctcttcctccattcagtggctccttagatcggctcagggacacaccagctgatcgtgtcggcgccgaatctagtggcaatttctcgctattgttgccccggagcagtggtttggatccaagaaagcggccgaccttcttggttgtatatcctcccgcaatggcggcgctcctggagctgttcctgggctcctcgtccgcaccggtggactgggaggcagaggcctacccggcgtacggggacttcgccgtgctacccttactcgtcgcctttttccccgccgtccggttcctcctcgaccgactcgtcttcgaggttttagcacggaaacttatatttggaaaagaacatgataagctttctgaaacagatgacagtagaaagaaaatcaataaatttaaggaatcagcatggaagtttgtttattttctttctggagaactgctttcactatctgtaacatacaatgagccatggtttaagaacaccagatacttttggataggccctggtgaccagatctggcctgatcaaatgataaaactgaagctcaaagctgtctacatgtatgctgctggattttacacatattcaattttcgctcttctgttctgggaaacaaggcgttcggactttggagtatcaatgtcccaccatatagcaactgttgttctgattgttctttcctacattttcagatttgctcgtgttggctctgttgttttagcccttcatgatgcaagtgatatattcctagagattgggaagatggccaagtacagtagctgcgagtggctagcagttgtggcatttcttcttttcgtggcatcgtggatacttctccggcttgttatattccctttctggatcctaagaagcacaagctatgaagtactgctgaccctggacaaggagaaacatcagttttatggccccatatactattatgttttcaactgtcttctgttctcactcctagttcttcacatatattggtgggtactgatatggcggatgctagttaagcagattcaatcgaaagggcatgttggtgatgatgttcgatccgattctgaaggcgaagaggaacatgaagattaactttttaggttgaatgcttaactgaagaactatgttgtgtgatacctacagcaaggcacaccttctgaaaccacctttttccttctaaagaagatttgcagatattagattttattagatcatatcattctttcagcatcaaagatgacaactatcatttgcgagttgccactgaagccgtctgtgctcttggatgtttgcatgaaaacagaagtgaattgtatttttttcccagtcaaccgtcgtttgtaaaagatacagaataatcgcttgttcatccattcttgtaactagacagttgatttgatttcaaatcatgtaatttgctacatcagcttagttgattacttggtgtatcatccattatgatgtaaatgggagtcttgggaagttcacaacaagaatgtgacactatgtactgttatttctcctattattttaataagagcacagagaagtagcccaagtgcaaggat

SEQ ID NO: 23387 - protein, 313 aa, Zea mays subsp. mays
  peptide (1)..(313): Ceres Seq. ID no. 12365229
  misc_feature (98)..(310): Pfam Name: LAG1 Pfam Description: Longevity-assurance protein
  misc_feature (16)..(313): NCBI GI NO: 16974114 NR Description: putative resistance protein
  misc_feature (16)..(313): NCBI GI NO: 25518747 NR Description: hypothetical protein F13B4
  misc_feature (9)..(313): NCBI GI NO: 18404559 NR Description: expressed protein; protein id: At3g25540
  misc_feature (13)..(313): NCBI GI NO: 7688742 NR Description: ASC1 [Lycopersicon esculentum]
  misc_feature (16)..(243): NCBI GI NO: 30683361 NR Description: longevity assurance protein -related
  misc_feature (38)..(310): NCBI GI NO: 15230323 NR Description: longevity factor-like protein
  misc_feature (24)..(309): NCBI GI NO: 34901974 NR Description: unknown protein
  misc_feature (38)..(310): NCBI GI NO: 7658241 NR Description: LAG1 homolog 2 [Arabidopsis thaliana]
  misc_feature (16)..(128): NCBI GI NO: 8920562 NR Description: Contains similarity to LAG1 homolog 1 fromArabidopsis thaliana gb|AF198179
  misc_feature (77)..(313): NCBI GI NO: 27769146 NR Description: Similar to RIKEN cDNA 0610013I17 gene
MAALLELFLGSSSAPVDWEAEAYPAYGDFAVLPLLVAFFPAVRFLLDRLVFEVLARKLIFGKEHDKLSETDDSRKKINKFKESAWKFVYFLSGELLSLSVTYNEPWFKNTRYFWIGPGDQIWPDQMIKLKLKAVYMYAAGFYTYSIFALLFWETRRSDFGVSMSHHIATVVLIVLSYIFRFARVGSVVLALHDASDIFLEIGKMAKYSSCEWLAVVAFLLFVASWILLRLVIFPFWILRSTSYEVLLTLDKEKHQFYGPIYYYVFNCLLFSLLVLHIYWWVLIWRMLVKQIQSKGHVGDDVRSDSEGEEEHED

SEQ ID NO: 23388 - protein, 188 aa, Zea mays subsp. mays
  peptide (1)..(188): Ceres Seq. ID no. 12365230
  misc_feature (1)..(185): Pfam Name: LAG1 Pfam Description: Longevity-assurance protein
  misc_feature (1)..(188): NCBI GI NO: 16974114 NR Description: putative resistance protein
  misc_feature (1)..(188): NCBI GI NO: 25518747 NR Description: hypothetical protein F13B4
  misc_feature (1)..(188): NCBI GI NO: 18404559 NR Description: expressed protein; protein id: At3g25540
  misc_feature (1)..(188): NCBI GI NO: 7688742 NR Description: ASC1 [Lycopersicon esculentum]
  misc_feature (1)..(118): NCBI GI NO: 30683361 NR Description: longevity assurance protein -related
  misc_feature (1)..(185): NCBI GI NO: 15230323 NR Description: longevity factor-like protein
  misc_feature (1)..(184): NCBI GI NO: 34901974 NR Description: unknown protein
  misc_feature (1)..(185): NCBI GI NO: 7658241 NR Description: LAG1 homolog 2 [Arabidopsis thaliana]
  misc_feature (1)..(188): NCBI GI NO: 27769146 NR Description: Similar to RIKEN cDNA 0610013I17 gene
  misc_feature (1)..(188): NCBI GI NO: 24119257 NR Description: trh3 protein [Danio rerio]
MIKLKLKAVYMYAAGFYTYSIFALLFWETRRSDFGVSMSHHIATVVLIVLSYIFRFARVGSVVLALHDASDIFLEIGKMAKYSSCEWLAVVAFLLFVASWILLRLVIFPFWILRSTSYEVLLTLDKEKHQFYGPIYYYVFNCLLFSLLVLHIYWWVLIWRMLVKQIQSKGHVGDDVRSDSEGEEEHED

SEQ ID NO: 23389 - protein, 178 aa, Zea mays subsp. mays
  peptide (1)..(178): Ceres Seq. ID no. 12365231
  misc_feature (1)..(175): Pfam Name: LAG1 Pfam Description: Longevity-assurance protein
  misc_feature (1)..(178): NCBI GI NO: 16974114 NR Description: putative resistance protein
  misc_feature (1)..(178): NCBI GI NO: 25518747 NR Description: hypothetical protein F13B4
  misc_feature (1)..(178): NCBI GI NO: 18404559 NR Description: expressed protein; protein id: At3g25540
  misc_feature (1)..(178): NCBI GI NO: 7688742 NR Description: ASC1 [Lycopersicon esculentum]
  misc_feature (1)..(108): NCBI GI NO: 30683361 NR Description: longevity assurance protein -related
  misc_feature (1)..(175): NCBI GI NO: 15230323 NR Description: longevity factor-like protein
  misc_feature (1)..(174): NCBI GI NO: 34901974 NR Description: unknown protein
  misc_feature (1)..(175): NCBI GI NO: 7658241 NR Description: LAG1 homolog 2 [Arabidopsis thaliana]
  misc_feature (1)..(178): NCBI GI NO: 27769146 NR Description: Similar to RIKEN cDNA 0610013I17 gene
  misc_feature (1)..(178): NCBI GI NO: 24119257 NR Description: trh3 protein [Danio rerio]
MYAAGFYTYSIFALLFWETRRSDFGVSMSHHIATVVLIVLSYIFRFARVGSVVLALHDASDIFLEIGKMAKYSSCEWLAVVAFLLFVASWILLRLVIFPFWILRSTSYEVLLTLDKEKHQFYGPIYYYVFNCLLFSLLVLHIYWWVLIWRMLVKQIQSKGHVGDDVRSDSEGEEEHED

SEQ ID NO: 23390 - DNA, 1196 bp, Zea mays subsp. mays
  misc_feature (1)..(1196): Ceres Seq. ID no. 13498872
ctcccctcctccgcacaaacgcgtcgcatccgctccacaggatcctctgcgccaccgcaaccgtgtgaccgcccgtgccgccggcgatcccgatccgccgacccgtcccagccccgctcgcagccatgtcgccgtcggagccgacgcgggaggagagcgtgtacatggccaagcttgcggagcaggcggagcggtacgaggagatggtcgagttcatggagcgcgtcgcgcgstacgccgggggcgccggcggcggggacgagctctcggtggaggagcgcaacctgctgtccgtcgcctacaagaacgtcatcggcgcccgcagggcctcgtggcggatcatctcctccatcgagcagaaggaggaaggccgcgggaacgaggcgcacgccgcatccatccgcgcctaccgctccaagatcgaggccgagcttgcccgcatctgcgacggcatcctcgcgctcctcgactcccacctcgtcccatccgccggcggcccgagtccaaggtcttctacctcaagatgaagggtgactaccacaggtaccttgctgagttcaagtcaggtgcagagaggaaggatgctgcggagagcaccatgaatgcctacaaagctgctcaggatattgctcttgctgatctggccccaacccaccccatcaggctcgggcttgctctcaacttctcagtgttctactacgagatcctcaactcccctgaccgtgcttgcaaccttgcaaagcaggcctttgatgaggcaatctccgaactagacagcctgggagaggagtcctacaaggacagcactctgatcatgcagctcctgcgtgacaacttgaccctatggacttccgacaccaacgaggacgccggagatgagatcaaggaagcagctgctgcccccaaagaatccgcccccgagggccagtaagacggatccgatctcccgacctgatgcgtgtctgctgatgtcggggagtttaccaggactgtgccgttcttgatttctgatagcttatcttctagtacacctcgtgttgttctcttcgtcacggcgccggtgcgtgtgcgctgaagctgcctgccattgccattgccgctgtttttaattaagcacacactctagatgttatgcccgcatgctatgtttcgattctcaaagttgataaatgatggctggatgctggttttcgtgc

SEQ ID NO: 23391 - protein, 309 aa, Zea mays subsp. mays
  peptide (1)..(309): Ceres Seq. ID no. 15223053
  misc_feature (167)..(289): Pfam Name: Pfam Description:  14-3-3 protein
  misc_feature (167)..(309): NCBI GI NO: 9798603 NR Description: TaWIN1 [Triticum aestivum]
  misc_feature (167)..(303): NCBI GI NO: 7435023 NR Description: GF14-d protein - rice
  misc_feature (161)..(300): NCBI GI NO: 12229593 NR Description: 14-3-3-like protein
  misc_feature (161)..(300): NCBI GI NO: 2921512 NR Description: GF14 protein [Fritillaria agrestis]
  misc_feature (161)..(302): NCBI GI NO: 100554 NR Description: 14-3-3 protein homolog - barley
  misc_feature (161)..(302): NCBI GI NO: 112684 NR Description: 14-3-3-LIKE PROTEIN A (14-3-3A)
  misc_feature (161)..(298): NCBI GI NO: 13702816 NR Description: putative 14-3-3 protein [Oryza sativa]
  misc_feature (161)..(309): NCBI GI NO: 7435022 NR Description: GF14-c protein - rice
  misc_feature (161)..(307): NCBI GI NO: 3023187 NR Description: 14-3-3-LIKE PROTEIN (G-BOX BINDING FACTOR)
  misc_feature (161)..(307): NCBI GI NO: 8515888 NR Description: 14-3-3 protein [Populus x canescens]
  misc_feature (78)..(78): Xaa is any aa, unknown or other
SPPPHKRVASAPQDPLRHRNRVTARAAGDPDPPTRPSPARSHVAVGADAGGERVHGQACGAGGAVRGDGRVHGARRAXRRGRRRRGRALGGGAQPAVRRLQERHRRPQGLVADHLLHRAEGGRPRERGARRIHPRLPLQDRGRACPHLRRHPRAPRLPPRPIRRRPESKVFYLKMKGDYHRYLAEFKSGAERKDAAESTMNAYKAAQDIALADLAPTHPIRLGLALNFSVFYYEILNSPDRACNLAKQAFDEAISELDSLGEESYKDSTLIMQLLRDNLTLWTSDTNEDAGDEIKEAAAAPKESAPEGQ

SEQ ID NO: 23392 - protein, 177 aa, Zea mays subsp. mays
  peptide (1)..(177): Ceres Seq. ID no. 15223054
  misc_feature (78)..(78): Xaa is any aa, unknown or other
LPSSAQTRRIRSTGSSAPPQPCDRPCRRRSRSADPSQPRSQPCRRRSRRGRRACTWPSLRSRRSGTRRWSSSWSASRXTPGAPAAGTSSRWRSATCCPSPTRTSSAPAGPRGGSSPPSSRRRKAAGTRRTPHPSAPTAPRSRPSLPASATASSRSSTPTSSHPPAARVQGLLPQDEG

SEQ ID NO: 23393 - DNA, 1302 bp, Zea mays subsp. mays
  misc_feature (1)..(1302): Ceres Seq. ID no. 12411041
aagagcgcggcaacaccgcgcatatacatggaatgagaagggctcagctacagccaagcgaataaatatactgtgaattaaccctaacctaaccgaagcgtccgcctcccacacacgggactccggccgcgagaacccgcgactaagccaggacgcgggacgccacagccaccggcctcagcatccgcctaggacgaataacccttctaggctgccgccgccgcccgtccttagctcatattgttgccggcgaagagcgccccagatccgcccctgctatggagtcggcggtgaacccgaaggcgtacccgctggctgatgcgcagctgacgataggtatcatcgatatcatccagcaggccgccaactacaagcagctcaagaagggagctaacgaagcgacgaagaccctgaacagggggatatcggagttcgtagtgatggcggcggacacggagccgctcgagatcctcctccacctccccttgctagctgaggataagaacgtgccatatgtatttgttccatcgaaacaagctcttggccgtgcttgtggtgtgacaaggcctgtcattgcttgctcagtgaccagcaatgagggtagccagctgaaacaacagatacagggtctcaaggtacttagggtgcgtttggttgcaatgacaggacgggatgagacgagacgattcctcaaatagggttgtttggttcagggtcaggggttgggacaggactatcccagtgttgtccccagttatccctcaaaattggagggacgagagagaacgccaggggacgtccctgtcctggctgtcccgcaaccaaacacacccttaatgtcctgtcttgtagtagttgttaatacttgatatgttgctatttttatatatgaatattatgattctgtaatatttatatgctgtttaatagtcagtcttatcatgttcttgtatgcatatctctgtggattaaacaaatttaatgaaattgcaggactcgattgagaagcttctcatctgatttaccaaagacctttcagggtgatgggcctcagcgacacatttttcagaggcttggactggtgatggtgtcttgtttactagattttacgtctttccaaactatgtttgaacactgttaggtcgaccatacttgaattgtgcttatatatttgactgtcatgtattctgaagatgcatctgcattctggtgccttggtttatgttgagattctgaccatcattgtaacggttgattactatgagtttgagaattggatcgattggatggttgcaatttccg

SEQ ID NO: 23394 - protein, 139 aa, Zea mays subsp. mays
  peptide (1)..(139): Ceres Seq. ID no. 12411042
  misc_feature (19)..(112): Pfam Name: Pfam Description:  Ribosomal protein L7Ae/L30e/S12e/Gadd45 family
  misc_feature (5)..(119): NCBI GI NO: 21592866 NR Description: Ribosomal protein L7Ae-like [Arabidopsis thaliana]
  misc_feature (5)..(119): NCBI GI NO: 15241276 NR Description: ribosomal protein L7Ae-like; protein id:At5g20160
  misc_feature (5)..(119): NCBI GI NO: 15236127 NR Description: Ribosomal protein L7Ae - like
  misc_feature (5)..(119): NCBI GI NO: 15235416 NR Description: Ribosomal protein L7Ae -like; protein id:At4g12600
  misc_feature (41)..(119): NCBI GI NO: 30687670 NR Description: ribosomal protein L7Ae family
  misc_feature (5)..(45): NCBI GI NO: 30687670 NR Description: ribosomal protein L7Ae family
  misc_feature (2)..(126): NCBI GI NO: 28302201 NR Description: Similar to NHP2 non-histone chromosome protein 2-like 1
  misc_feature (5)..(126): NCBI GI NO: 37530712 NR Description: putative ribosomal protein L7Ae-like
  misc_feature (2)..(126): NCBI GI NO: 38174386 NR Description: Unknown (protein for MGC:75724)
  misc_feature (2)..(126): NCBI GI NO: 4826860 NR Description: NHP2 non-histone chromosome protein 2-like 1; 15
MESAVNPKAYPLADAQLTIGIIDIIQQAANYKQLKKGANEATKTLNRGISEFVVMAADTEPLEILLHLPLLAEDKNVPYVFVPSKQALGRACGVTRPVIACSVTSNEGSQLKQQIQGLKVLRVRLVAMTGRDETRRFLK

SEQ ID NO: 23395 - protein, 85 aa, Zea mays subsp. mays
  peptide (1)..(85): Ceres Seq. ID no. 12411043
  misc_feature (1)..(58): Pfam Name: Pfam Description:  Ribosomal protein L7Ae/L30e/S12e/Gadd45 family
  misc_feature (1)..(65): NCBI GI NO: 21592866 NR Description: Ribosomal protein L7Ae-like [Arabidopsis thaliana]
  misc_feature (1)..(65): NCBI GI NO: 15241276 NR Description: ribosomal protein L7Ae-like; protein id:At5g20160
  misc_feature (1)..(65): NCBI GI NO: 15236127 NR Description: Ribosomal protein L7Ae - like
  misc_feature (1)..(65): NCBI GI NO: 15235416 NR Description: Ribosomal protein L7Ae -like; protein id:At4g12600
  misc_feature (1)..(65): NCBI GI NO: 30687670 NR Description: ribosomal protein L7Ae family
  misc_feature (1)..(72): NCBI GI NO: 28302201 NR Description: Similar to NHP2 non-histone chromosome protein 2-like 1
  misc_feature (1)..(72): NCBI GI NO: 37530712 NR Description: putative ribosomal protein L7Ae-like
  misc_feature (1)..(72): NCBI GI NO: 38174386 NR Description: Unknown (protein for MGC:75724)
  misc_feature (1)..(72): NCBI GI NO: 4826860 NR Description: NHP2 non-histone chromosome protein 2-like 1; 15
  misc_feature (1)..(72): NCBI GI NO: 12835698 NR Description: unnamed protein product [Mus musculus]
MAADTEPLEILLHLPLLAEDKNVPYVFVPSKQALGRACGVTRPVIACSVTSNEGSQLKQQIQGLKVLRVRLVAMTGRDETRRFLK

SEQ ID NO: 23396 - DNA, 789 bp, Zea mays subsp. mays
  misc_feature (1)..(789): Ceres Seq. ID no. 12355957
acagtcgcctccttcctgcgccgccgccgccgccgccgccgccgctaccaccgcctcgcggccgcctgcggctccgcgtttccgcacggaagttggtgaaggtttcttgaggctgagaacatggtgctgaagacggaactttgccgcttcagcggccagaagatttatcctgggaaaggcattagatttatccgtgctgattctcaggtcttcctttttgccaactcgaaatgcaagcgctacttccacaaccgcctgaagcctgcaaagcttacctggacagcaatgtacaggaagcagcacaagaaggatatccatgctgaagcggtaaagaagaggcgccgcgccaccaagaagccatactccaggtcaattgtgggtgcttccttggaagtaatccagaagaagagagctgagaagccagaggtccgcgatgctgctagagaagctgctcttcgtgagatcaaggagcgcatcaagaagaccaaggatgagaagaaagcgaagaaggcggaggtgagcaagtcccagaagacgcagacaaagggtgcggtccagaagggttccaagggccccaagttgggcggcggtggtgggaagcgctgaaagaacttagtgtcgtttctcgacattgcagtcgttccttagccaaagccactttcgtagaacctgtgttgaatttgcaagacttattcaagcgttgcttgtgcgtgctaaataccatggcaagagaacggatttatatttatgcctgaaaaaaatgaccgttcatattcttaactcatcttg

SEQ ID NO: 23397 - protein, 161 aa, Zea mays subsp. mays
  peptide (1)..(161): Ceres Seq. ID no. 12355958
  misc_feature (3)..(73): Pfam Name: Pfam Description:  Ribosomal protein L24e
  misc_feature (1)..(161): NCBI GI NO: 1710521 NR Description: 60S RIBOSOMAL PROTEIN L24
  misc_feature (4)..(161): NCBI GI NO: 34900364 NR Description: putative 60S ribosomal protein L24
  misc_feature (1)..(160): NCBI GI NO: 6094040 NR Description: 60S ribosomal protein L24
  misc_feature (1)..(156): NCBI GI NO: 10180025 NR Description: 60S ribosomal protein L24 [Prunus avium]
  misc_feature (1)..(161): NCBI GI NO: 18404176 NR Description: 60S ribosomal protein L24; protein id: At2g36620
  misc_feature (1)..(161): NCBI GI NO: 15231730 NR Description: 60S ribosomal protein - like; protein id:At3g53020
  misc_feature (5)..(161): NCBI GI NO: 25295112 NR Description: 60S ribosomal protein L24
  misc_feature (3)..(150): NCBI GI NO: 19075214 NR Description: 60s ribosomal protein L24
  misc_feature (3)..(150): NCBI GI NO: 19115030 NR Description: 60S ribosomal protein L24
  misc_feature (10)..(154): NCBI GI NO: 40741063 NR Description: conserved hypothetical protein
MVLKTELCRFSGQKIYPGKGIRFIRADSQVFLFANSKCKRYFHNRLKPAKLTWTAMYRKQHKKDIHAEAVKKRRRATKKPYSRSIVGASLEVIQKKRAEKPEVRDAAREAALREIKERIKKTKDEKKAKKAEVSKSQKTQTKGAVQKGSKGPKLGGGGGKR

SEQ ID NO: 23398 - protein, 106 aa, Zea mays subsp. mays
  peptide (1)..(106): Ceres Seq. ID no. 12355959
  misc_feature (1)..(106): NCBI GI NO: 1710521 NR Description: 60S RIBOSOMAL PROTEIN L24
  misc_feature (1)..(106): NCBI GI NO: 34900364 NR Description: putative 60S ribosomal protein L24
  misc_feature (1)..(105): NCBI GI NO: 6094040 NR Description: 60S ribosomal protein L24
  misc_feature (1)..(101): NCBI GI NO: 10180025 NR Description: 60S ribosomal protein L24 [Prunus avium]
  misc_feature (1)..(106): NCBI GI NO: 18404176 NR Description: 60S ribosomal protein L24; protein id: At2g36620
  misc_feature (1)..(106): NCBI GI NO: 15231730 NR Description: 60S ribosomal protein - like; protein id:At3g53020
  misc_feature (1)..(106): NCBI GI NO: 25295112 NR Description: 60S ribosomal protein L24
  misc_feature (1)..(95): NCBI GI NO: 19075214 NR Description: 60s ribosomal protein L24
  misc_feature (1)..(95): NCBI GI NO: 19115030 NR Description: 60S ribosomal protein L24
  misc_feature (1)..(99): NCBI GI NO: 40741063 NR Description: conserved hypothetical protein
MYRKQHKKDIHAEAVKKRRRATKKPYSRSIVGASLEVIQKKRAEKPEVRDAAREAALREIKERIKKTKDEKKAKKAEVSKSQKTQTKGAVQKGSKGPKLGGGGGKR

SEQ ID NO: 23399 - DNA, 1301 bp, Zea mays subsp. mays
  misc_feature (1)..(1301): Ceres Seq. ID no. 12345828
ctccccacccgcagcgcctcctcccattcccccaacggacattgcctaggaggctaggacagaaccacccagagcgcacaaccttatccgaatcgccgttgcatggaggccgtgcgcgcgtcggcggcgtgggttgccagtcgctcctcccatgtcacggtcgaccttcaagaaattgagaaggtagtggaccaaatccaaggagatgttccaaaagttcagtgggattacgaaggaattcactactttgacaatgggccactcacagtccagtacctgttcgtcttggatgcactaaacttctgcttctggccagataaggacttgagctatgaccatttggcttctggactgaagtcagccttggagaaagacaaaaatgcccttgattcagatcgtctccagaattacactgggccccagctccgccaacttctgaactggccacgaccactgccaattgaggaggaaagagtacgccttctccacgaggttgggcaggaacttaaaagaagctttggaggtcaggctgctaatctagtgaagtctgctggaaactctgctgcgactcttattgaactgattactcgacattttcctggtttccgggaccattcactctacaaggggcaccaggttttcctgtacaagagagcccagatctttgttgctgatttgtggggcgccttcaagggacaaaactatggcgagttccacgatatcaattccatcaccatatttgctgactacattgttccagcggtcctgagggagcttggagtacttaaatatggctcgaatctatcttgcttcatcgactcgaacagtgagatagtgcctggaagcgaggaggaagtggagatacgcgcgtgctccatctatgcagtggagaagatgagggacctgatcagcaagaagtttggaaagcagcttctgagcattgacattgatctctggctctggtcctgcggcgtgcagaacatggcgctgtcacatcaccgcactctgtcgatttactactagacagtcaggcaggcaggaagctgaccctgctggtgcgctcgttcagctggccgggcgttgtcgtcgcttgttcgtcctaaccataacggtgcatgtaggtgtcgagagttttgtctccttgggaatgcacacaggtgcaagatattgtaggcccgtcccatgaggatgcatggtagtacaacacttttttttttgtgatttagagacttgaactgctgcagttttcacatgaatgttatccctaaggacaaggcgggagcgagtgtttctctatctcc

SEQ ID NO: 23400 - protein, 306 aa, Zea mays subsp. mays
  peptide (1)..(306): Ceres Seq. ID no. 12345829
  misc_feature (1)..(306): NCBI GI NO: 28564818 NR Description: OSJNBb0005G07.5
  misc_feature (118)..(306): NCBI GI NO: 32404344 NR Description: hypothetical protein ( hypothetical proteinB2A19
  misc_feature (4)..(73): NCBI GI NO: 32404344 NR Description: hypothetical protein ( hypothetical proteinB2A19
  misc_feature (58)..(306): NCBI GI NO: 24656903 NR Description: CG9752-PA [Drosophila melanogaster]
  misc_feature (58)..(306): NCBI GI NO: 38074709 NR Description: RIKEN cDNA 2210016F16 [Mus musculus]
  misc_feature (118)..(287): NCBI GI NO: 19114965 NR Description: conserved hypothetical protein
  misc_feature (118)..(306): NCBI GI NO: 31543144 NR Description: hypothetical protein MGC10999 [Homo sapiens]
  misc_feature (56)..(305): NCBI GI NO: 39584221 NR Description: Hypothetical protein CBG05511
  misc_feature (118)..(303): NCBI GI NO: 40745001 NR Description: hypothetical protein AN2451.2
  misc_feature (55)..(306): NCBI GI NO: 31214594 NR Description: ENSANGP00000017465 [Anopheles gambiae]
MEAVRASAAWVASRSSHVTVDLQEIEKVVDQIQGDVPKVQWDYEGIHYFDNGPLTVQYLFVLDALNFCFWPDKDLSYDHLASGLKSALEKDKNALDSDRLQNYTGPQLRQLLNWPRPLPIEEERVRLLHEVGQELKRSFGGQAANLVKSAGNSAATLIELITRHFPGFRDHSLYKGHQVFLYKRAQIFVADLWGAFKGQNYGEFHDINSITIFADYIVPAVLRELGVLKYGSNLSCFIDSNSEIVPGSEEEVEIRACSIYAVEKMRDLISKKFGKQLLSIDIDLWLWSCGVQNMALSHHRTLSIYY

SEQ ID NO: 23401 - DNA, 1372 bp, Zea mays subsp. mays
  misc_feature (1)..(1372): Ceres Seq. ID no. 12373449
agacgtcctctgtccatggcctcccatcctgagcacccggcggaaccgcgagcaccgcccgccccaacgaccataggcgatctctccgacgacctcctgcgcgagatcctcctccgcctcccttcccttccttcactcgtctgcgcctccctcagctgccgcgccttcctggccgccgtccgctcctcccgcgccttccgccgccgcttccgcgcgctgcacccgcctcctctcctcggcttcttcttcgaccccgacggcaacgaaaatcccaccttcatgcccattcgccgcggctccgaccggggccacgcggccgccgtccgcggcctggacgccttcctgacccgcgtcccgcacgaggacgacgtcttccccgggtggcagataatggagtgccgcggcggctgccttctcctcctcaactggagaaccaagcagctcgccgcctacaaccccctcacgggggccttggatctcgtccccaaactgcctgacgacatctgcaaagggcaccgcggcaagttcatctccggtgattttttcctggtagtccccgacgacgaggctcccgacaggcgttcgttccgcgtggtctcctcctgccacgacaagtaccgggtgcgcgtcgccgtcttctcgtctgccaccaggaagtggcagattctcccctggtcggagcctgtgccgacacagccggcgagcggtaagtactggcttctctcggggaggcaggtgagtgggttcctgtgctggtcacaccataagaatgcctacaaggtgttgctggacactgcgaccctgcaattctccgtcatcgatctgccgtatggcttgagtgggcaaggtcacctctacaggactggggataccaaggatgggaagctctgcatcgttgccgcaatcgatttctcgctgttcgtttggttccggacaccagacgccggtggcattgacaggtgggtgctccgacatgtattgcagctggaggatgaggttcttgaggccaccgagggctcacggaatgaacttgaacagcttaaagtgtttgcaattctggacggcatcgtgtacatgacgacatttgagacgtttagagatgctaccttgccttgttggtacctatccttctgcctggaaacaaggaagctggaaaaactcttctatgtaaaagctaatggccatgctcatccctacttcatgccatggcctactgctttagtaggtaacaatttgagcccctgactaggaggaggtgcttgttcaagtgaaactggttacagtaacatgtaagtttcttgttctgtctagactcaacagtttgttcacttatcctcttatatactagtaacgggtgcgcgctttgcgtggc

SEQ ID NO: 23402 - protein, 414 aa, Zea mays subsp. mays
  peptide (1)..(414): Ceres Seq. ID no. 12373450
  misc_feature (1)..(333): NCBI GI NO: 34901902 NR Description: OSJNBa0036M16.17
  misc_feature (91)..(410): NCBI GI NO: 34901902 NR Description: OSJNBa0036M16.17
  misc_feature (19)..(357): NCBI GI NO: 34914942 NR Description: B1096D03.38
  misc_feature (29)..(335): NCBI GI NO: 34914580 NR Description: P0455H0310.25
  misc_feature (16)..(331): NCBI GI NO: 37530900 NR Description: hypothetical protein
  misc_feature (7)..(299): NCBI GI NO: 34914940 NR Description: B1096D03.37
  misc_feature (18)..(284): NCBI GI NO: 34393352 NR Description: hypothetical protein
  misc_feature (18)..(341): NCBI GI NO: 37531214 NR Description: unknown protein
  misc_feature (1)..(309): NCBI GI NO: 37530944 NR Description: hypothetical protein
  misc_feature (28)..(282): NCBI GI NO: 34393354 NR Description: hypothetical protein
RRPLSMASHPEHPAEPRAPPAPTTIGDLSDDLLREILLRLPSLPSLVCASLSCRAFLAAVRSSRAFRRRFRALHPPPLLGFFFDPDGNENPTFMPIRRGSDRGHAAAVRGLDAFLTRVPHEDDVFPGWQIMECRGGCLLLLNWRTKQLAAYNPLTGALDLVPKLPDDICKGHRGKFISGDFFLVVPDDEAPDRRSFRVVSSCHDKYRVRVAVFSSATRKWQILPWSEPVPTQPASGKYWLLSGRQVSGFLCWSHHKNAYKVLLDTATLQFSVIDLPYGLSGQGHLYRTGDTKDGKLCIVAAIDFSLFVWFRTPDAGGIDRWVLRHVLQLEDEVLEATEGSRNELEQLKVFAILDGIVYMTTFETFRDATLPCWYLSFCLETRKLEKLFYVKANGHAHPYFMPWPTALVGNNLSP

SEQ ID NO: 23403 - protein, 409 aa, Zea mays subsp. mays
  peptide (1)..(409): Ceres Seq. ID no. 12373451
  misc_feature (1)..(328): NCBI GI NO: 34901902 NR Description: OSJNBa0036M16.17
  misc_feature (86)..(405): NCBI GI NO: 34901902 NR Description: OSJNBa0036M16.17
  misc_feature (14)..(352): NCBI GI NO: 34914942 NR Description: B1096D03.38
  misc_feature (24)..(330): NCBI GI NO: 34914580 NR Description: P0455H0310.25
  misc_feature (11)..(326): NCBI GI NO: 37530900 NR Description: hypothetical protein
  misc_feature (2)..(294): NCBI GI NO: 34914940 NR Description: B1096D03.37
  misc_feature (13)..(279): NCBI GI NO: 34393352 NR Description: hypothetical protein
  misc_feature (13)..(336): NCBI GI NO: 37531214 NR Description: unknown protein
  misc_feature (1)..(304): NCBI GI NO: 37530944 NR Description: hypothetical protein
  misc_feature (23)..(277): NCBI GI NO: 34393354 NR Description: hypothetical protein
MASHPEHPAEPRAPPAPTTIGDLSDDLLREILLRLPSLPSLVCASLSCRAFLAAVRSSRAFRRRFRALHPPPLLGFFFDPDGNENPTFMPIRRGSDRGHAAAVRGLDAFLTRVPHEDDVFPGWQIMECRGGCLLLLNWRTKQLAAYNPLTGALDLVPKLPDDICKGHRGKFISGDFFLVVPDDEAPDRRSFRVVSSCHDKYRVRVAVFSSATRKWQILPWSEPVPTQPASGKYWLLSGRQVSGFLCWSHHKNAYKVLLDTATLQFSVIDLPYGLSGQGHLYRTGDTKDGKLCIVAAIDFSLFVWFRTPDAGGIDRWVLRHVLQLEDEVLEATEGSRNELEQLKVFAILDGIVYMTTFETFRDATLPCWYLSFCLETRKLEKLFYVKANGHAHPYFMPWPTALVGNNLSP

SEQ ID NO: 23404 - protein, 321 aa, Zea mays subsp. mays
  peptide (1)..(321): Ceres Seq. ID no. 12373452
  misc_feature (1)..(240): NCBI GI NO: 34901902 NR Description: OSJNBa0036M16.17
  misc_feature (1)..(317): NCBI GI NO: 34901902 NR Description: OSJNBa0036M16.17
  misc_feature (1)..(264): NCBI GI NO: 34914942 NR Description: B1096D03.38
  misc_feature (1)..(242): NCBI GI NO: 34914580 NR Description: P0455H0310.25
  misc_feature (1)..(238): NCBI GI NO: 37530900 NR Description: hypothetical protein
  misc_feature (1)..(206): NCBI GI NO: 34914940 NR Description: B1096D03.37
  misc_feature (1)..(191): NCBI GI NO: 34393352 NR Description: hypothetical protein
  misc_feature (1)..(248): NCBI GI NO: 37531214 NR Description: unknown protein
  misc_feature (1)..(216): NCBI GI NO: 37530944 NR Description: hypothetical protein
  misc_feature (1)..(189): NCBI GI NO: 34393354 NR Description: hypothetical protein
MPIRRGSDRGHAAAVRGLDAFLTRVPHEDDVFPGWQIMECRGGCLLLLNWRTKQLAAYNPLTGALDLVPKLPDDICKGHRGKFISGDFFLVVPDDEAPDRRSFRVVSSCHDKYRVRVAVFSSATRKWQILPWSEPVPTQPASGKYWLLSGRQVSGFLCWSHHKNAYKVLLDTATLQFSVIDLPYGLSGQGHLYRTGDTKDGKLCIVAAIDFSLFVWFRTPDAGGIDRWVLRHVLQLEDEVLEATEGSRNELEQLKVFAILDGIVYMTTFETFRDATLPCWYLSFCLETRKLEKLFYVKANGHAHPYFMPWPTALVGNNLSP

SEQ ID NO: 23405 - DNA, 1406 bp, Zea mays subsp. mays
  misc_feature (1)..(1406): Ceres Seq. ID no. 12391368
aaagctaaaacagggcgggggcgggggcgtcgcttcgtggggacagccctcgtgatcgatccgcccgtgggatctcgcgcacgccaggattggagagctgcggcctccctccgccccaaccagccatgggttcccgcgttgattgcggcgcttagacgcggaggaggagagagacacggggaggggggaggccgaggcctaggaggcgtagcgctgtgcagggcgcgagcgcgttcgttcggcatggaacagaacgccggctcgttcctcgccgtgcgtcgcctctccggtggcgccatccaccaccatcgtcaccactcttccccggctgaggtcgtgggcgtgtccactgcgtggctcggtaaggggctttcatgcgtctgcgcgcagaggagggagagcgacgtgcgcctgtccttcgatttgagtcccattcaggaagagtgcttgaataggttgcagaaccggatagaggtgcagtatgatggttcaaatctggagcatcagaaagcactggaagccctttggcgttcttcttttcctggaactgaacttctagggttagtatcagaccagtggaaggagatgggatggcaagggaaagatccatctacagatttcaggggcggtggttttatatctttggagaatttactgtatttctctaggaactatccaaaatccttccaggagctccttcgtaagcagaatggtgatagagcattgtgggaatatccctttgctgtagctggtgtaaatattacattcatgctgattcagatgcttgaccttcaagcagctaagccaacgtcgttggttggagcggttttcctaaatctactcttagaaaatgatcgagcgttcgacattctttactgcataaccttcaaactgatggatcagaaatggcttgaaatgcacgccagttacatggatttcaatacggttattaaatcaacacggcgccagctcgagagggagctgttgctagaagatatccagagaatcgaggacatgccatcgtacaggtttctcgcctgctagcaattgaacctcctggtcgtaccgaacattgccacaagatagtgcagctccatacactcgaagaagaagctgagaggttggaaccacgtacaccgagcgaagggtgaatctaggttcatggactgtggatgtgttgttgctttgaattgcgctgtcgtgtttacctactccgagtccgacaacagcctcgacgccgagtgccttttcgtttcaacgatgtgctatatcttggggccacggaacggcagatcctagctttctttgtaaacaagaggatgtggaaagttggctgcgtatgctttgtggccatgtgcatggataatcttgctgctcgcctgaaagaaaaaaaggccgatcttaag

SEQ ID NO: 23406 - protein, 347 aa, Zea mays subsp. mays
  peptide (1)..(347): Ceres Seq. ID no. 12391369
  misc_feature (167)..(327): Pfam Name: Pfam Description:  Protein of unknown function, DUF609
  misc_feature (82)..(345): NCBI GI NO: 38345956 NR Description: OSJNBb0038F03.14
  misc_feature (82)..(346): NCBI GI NO: 14140119 NR Description: putative protein [Oryza sativa]
  misc_feature (82)..(345): NCBI GI NO: 18406626 NR Description: expressed protein; protein id: At2g44770
  misc_feature (82)..(346): NCBI GI NO: 18411543 NR Description: putative protein; protein id: At3g60260
  misc_feature (82)..(345): NCBI GI NO: 15810014 NR Description: At2g44770/F16B22.26 [Arabidopsis thaliana]
  misc_feature (82)..(345): NCBI GI NO: 7485547 NR Description: hypothetical protein At2g44770
  misc_feature (82)..(346): NCBI GI NO: 11288393 NR Description: hypothetical protein F27H5
  misc_feature (118)..(346): NCBI GI NO: 18408759 NR Description: hypothetical protein; protein id: At1g67400.1
  misc_feature (112)..(345): NCBI GI NO: 15218859 NR Description: hypothetical protein; protein id: At1g03620.1
  misc_feature (112)..(345): NCBI GI NO: 38344760 NR Description: OSJNBa0068L06.3
KAKTGRGRGRRFVGTALVIDPPVGSRARQDWRAAASLRPNQPWVPALIAALRRGGGERHGEGGGRGLGGVALCRARARSFGMEQNAGSFLAVRRLSGGAIHHHRHHSSPAEVVGVSTAWLGKGLSCVCAQRRESDVRLSFDLSPIQEECLNRLQNRIEVQYDGSNLEHQKALEALWRSSFPGTELLGLVSDQWKEMGWQGKDPSTDFRGGGFISLENLLYFSRNYPKSFQELLRKQNGDRALWEYPFAVAGVNITFMLIQMLDLQAAKPTSLVGAVFLNLLLENDRAFDILYCITFKLMDQKWLEMHASYMDFNTVIKSTRRQLERELLLEDIQRIEDMPSYRFLAC

SEQ ID NO: 23407 - protein, 266 aa, Zea mays subsp. mays
  peptide (1)..(266): Ceres Seq. ID no. 12391370
  misc_feature (86)..(246): Pfam Name: Pfam Description:  Protein of unknown function, DUF609
  misc_feature (1)..(264): NCBI GI NO: 38345956 NR Description: OSJNBb0038F03.14
  misc_feature (1)..(265): NCBI GI NO: 14140119 NR Description: putative protein [Oryza sativa]
  misc_feature (1)..(264): NCBI GI NO: 18406626 NR Description: expressed protein; protein id: At2g44770
  misc_feature (1)..(265): NCBI GI NO: 18411543 NR Description: putative protein; protein id: At3g60260
  misc_feature (1)..(264): NCBI GI NO: 15810014 NR Description: At2g44770/F16B22.26 [Arabidopsis thaliana]
  misc_feature (1)..(264): NCBI GI NO: 7485547 NR Description: hypothetical protein At2g44770
  misc_feature (1)..(265): NCBI GI NO: 11288393 NR Description: hypothetical protein F27H5
  misc_feature (37)..(265): NCBI GI NO: 18408759 NR Description: hypothetical protein; protein id: At1g67400.1
  misc_feature (31)..(264): NCBI GI NO: 15218859 NR Description: hypothetical protein; protein id: At1g03620.1
  misc_feature (31)..(264): NCBI GI NO: 38344760 NR Description: OSJNBa0068L06.3
MEQNAGSFLAVRRLSGGAIHHHRHHSSPAEVVGVSTAWLGKGLSCVCAQRRESDVRLSFDLSPIQEECLNRLQNRIEVQYDGSNLEHQKALEALWRSSFPGTELLGLVSDQWKEMGWQGKDPSTDFRGGGFISLENLLYFSRNYPKSFQELLRKQNGDRALWEYPFAVAGVNITFMLIQMLDLQAAKPTSLVGAVFLNLLLENDRAFDILYCITFKLMDQKWLEMHASYMDFNTVIKSTRRQLERELLLEDIQRIEDMPSYRFLAC

SEQ ID NO: 23408 - DNA, 1443 bp, Zea mays subsp. mays
  misc_feature (1)..(1443): Ceres Seq. ID no. 12342542
gaccgtatttgttatcggactgggaagcagcggcggtacaaagtgtgggagagaaaggagaagagacttgatgtcctcgcagtttgtccaatagatctcctcgccgcctcacccgtctcctcctccgcagcttccccgcgatcccgaccatggagggcgacggtaccaaccttgatgcggcgatagagtcgctcctgaatgtcgagaagcagatgaggctggccggagatgtcgccggcactcggaaggccgtcatcgacatcgtcgagctctgctacaaggccggcgcgtggaagacgctaaacgaccagatcgttctcctatctaagaggagaggccagcttaagcaggctattactgctatggttcagaaagcaatggagtacattaatttgacaccaggcattgacacaagcatcgagctaataaaaacactgagcagtgtctctgctggcaaaatctatgttgagatagagagagcaagattgatcaaaaggcttgcaaaaattaaagaggagcagggacagatttacgaggctgctgatttgatgcaagaagttgctgttgaaacatttggctctatggcaaagacggagaaaattgctttcattcttgagcaggtccggctatgcctggatcggcaagattttgtcagagcacaaattttatccaggaaaatcagtactagagtatttcacgcaaatccatcaaaggaaaaaaagaaaccaaaggaaggtgacagtattgttcaggatgctcctgcagatattccttcccttctagaattgaagcgcgtctactacgaactgatgattcgttattactctcacaacaatgattacttggaaatctgccgttgttacaaggctatttatgatattccagcaataaaagaggatccaacaaagtggataccgattcttaggaagatctgttggtacttggtgctagcacctcatgatcctatgcaatcaagccttctcaatgctacactagaggataaaaacctttcagaaatcccaaatttcaggttattactgaagcagctggtcaccatggaggtgatacagtggacaagtctgtgggaattcttcaaggaggaatatgagaaggagaaggatcttgggggagctttgggtgccaaagcttcagaagatttgaggctgaggattatcgaacatgtattggttactttgtgtttggtctagttattttgctctatgcttgtccattgaatctgatctcttgctctcttcagaatatcttggttgtatccaagtactatgcaagggttaccctcaagaggcttgccgatcttctttgcctgactttgcaggtttgtttgttttttcacctttgcatgatattgtatttcctttgtgatgccaaccgtggcatcttgtgtttaaacccactacatgacaatcacctgaattgttaggc

SEQ ID NO: 23409 - protein, 352 aa, Zea mays subsp. mays
  peptide (1)..(352): Ceres Seq. ID no. 12342543
  misc_feature (291)..(347): Pfam Name: Pfam Description:  PCI domain
  misc_feature (1)..(347): NCBI GI NO: 27573351 NR Description: putative proteasome regulatory non-ATPase subunit
  misc_feature (3)..(347): NCBI GI NO: 15242545 NR Description: 26S proteasome regulatory subunit
  misc_feature (1)..(347): NCBI GI NO: 10177207 NR Description: proteasome regulatory subunit-like
  misc_feature (1)..(347): NCBI GI NO: 30698065 NR Description: 26S proteasome regulatory subunit (RPN5), putative
  misc_feature (176)..(347): NCBI GI NO: 17298157 NR Description: 26S proteasome regulatory particle non-ATPase subunit5
  misc_feature (1)..(190): NCBI GI NO: 27924244 NR Description: Similar to proteasome
  misc_feature (217)..(344): NCBI GI NO: 27924244 NR Description: Similar to proteasome
  misc_feature (1)..(201): NCBI GI NO: 4506221 NR Description: proteasome 26S non-ATPase subunit 12 isoform 1
  misc_feature (212)..(344): NCBI GI NO: 4506221 NR Description: proteasome 26S non-ATPase subunit 12 isoform 1
  misc_feature (1)..(201): NCBI GI NO: 34874104 NR Description: similar to proteasome 26S non-ATPase subunit 12
MEGDGTNLDAAIESLLNVEKQMRLAGDVAGTRKAVIDIVELCYKAGAWKTLNDQIVLLSKRRGQLKQAITAMVQKAMEYINLTPGIDTSIELIKTLSSVSAGKIYVEIERARLIKRLAKIKEEQGQIYEAADLMQEVAVETFGSMAKTEKIAFILEQVRLCLDRQDFVRAQILSRKISTRVFHANPSKEKKKPKEGDSIVQDAPADIPSLLELKRVYYELMIRYYSHNNDYLEICRCYKAIYDIPAIKEDPTKWIPILRKICWYLVLAPHDPMQSSLLNATLEDKNLSEIPNFRLLLKQLVTMEVIQWTSLWEFFKEEYEKEKDLGGALGAKASEDLRLRIIEHVLVTLCLV

SEQ ID NO: 23410 - protein, 331 aa, Zea mays subsp. mays
  peptide (1)..(331): Ceres Seq. ID no. 12342544
  misc_feature (270)..(326): Pfam Name: Pfam Description:  PCI domain
  misc_feature (1)..(326): NCBI GI NO: 27573351 NR Description: putative proteasome regulatory non-ATPase subunit
  misc_feature (1)..(326): NCBI GI NO: 15242545 NR Description: 26S proteasome regulatory subunit
  misc_feature (1)..(326): NCBI GI NO: 10177207 NR Description: proteasome regulatory subunit-like
  misc_feature (1)..(326): NCBI GI NO: 30698065 NR Description: 26S proteasome regulatory subunit (RPN5), putative
  misc_feature (155)..(326): NCBI GI NO: 17298157 NR Description: 26S proteasome regulatory particle non-ATPase subunit5
  misc_feature (1)..(169): NCBI GI NO: 27924244 NR Description: Similar to proteasome
  misc_feature (196)..(323): NCBI GI NO: 27924244 NR Description: Similar to proteasome
  misc_feature (1)..(180): NCBI GI NO: 4506221 NR Description: proteasome 26S non-ATPase subunit 12 isoform 1
  misc_feature (191)..(323): NCBI GI NO: 4506221 NR Description: proteasome 26S non-ATPase subunit 12 isoform 1
  misc_feature (1)..(180): NCBI GI NO: 34874104 NR Description: similar to proteasome 26S non-ATPase subunit 12
MRLAGDVAGTRKAVIDIVELCYKAGAWKTLNDQIVLLSKRRGQLKQAITAMVQKAMEYINLTPGIDTSIELIKTLSSVSAGKIYVEIERARLIKRLAKIKEEQGQIYEAADLMQEVAVETFGSMAKTEKIAFILEQVRLCLDRQDFVRAQILSRKISTRVFHANPSKEKKKPKEGDSIVQDAPADIPSLLELKRVYYELMIRYYSHNNDYLEICRCYKAIYDIPAIKEDPTKWIPILRKICWYLVLAPHDPMQSSLLNATLEDKNLSEIPNFRLLLKQLVTMEVIQWTSLWEFFKEEYEKEKDLGGALGAKASEDLRLRIIEHVLVTLCLV

SEQ ID NO: 23411 - protein, 281 aa, Zea mays subsp. mays
  peptide (1)..(281): Ceres Seq. ID no. 12342545
  misc_feature (220)..(276): Pfam Name: Pfam Description:  PCI domain
  misc_feature (1)..(276): NCBI GI NO: 27573351 NR Description: putative proteasome regulatory non-ATPase subunit
  misc_feature (1)..(276): NCBI GI NO: 15242545 NR Description: 26S proteasome regulatory subunit
  misc_feature (1)..(276): NCBI GI NO: 10177207 NR Description: proteasome regulatory subunit-like
  misc_feature (1)..(276): NCBI GI NO: 30698065 NR Description: 26S proteasome regulatory subunit (RPN5), putative
  misc_feature (105)..(276): NCBI GI NO: 17298157 NR Description: 26S proteasome regulatory particle non-ATPase subunit5
  misc_feature (1)..(119): NCBI GI NO: 27924244 NR Description: Similar to proteasome
  misc_feature (146)..(273): NCBI GI NO: 27924244 NR Description: Similar to proteasome
  misc_feature (1)..(130): NCBI GI NO: 4506221 NR Description: proteasome 26S non-ATPase subunit 12 isoform 1
  misc_feature (141)..(273): NCBI GI NO: 4506221 NR Description: proteasome 26S non-ATPase subunit 12 isoform 1
  misc_feature (1)..(130): NCBI GI NO: 34874104 NR Description: similar to proteasome 26S non-ATPase subunit 12
MVQKAMEYINLTPGIDTSIELIKTLSSVSAGKIYVEIERARLIKRLAKIKEEQGQIYEAADLMQEVAVETFGSMAKTEKIAFILEQVRLCLDRQDFVRAQILSRKISTRVFHANPSKEKKKPKEGDSIVQDAPADIPSLLELKRVYYELMIRYYSHNNDYLEICRCYKAIYDIPAIKEDPTKWIPILRKICWYLVLAPHDPMQSSLLNATLEDKNLSEIPNFRLLLKQLVTMEVIQWTSLWEFFKEEYEKEKDLGGALGAKASEDLRLRIIEHVLVTLCLV

SEQ ID NO: 23412 - DNA, 1495 bp, Zea mays subsp. mays
  misc_feature (1)..(1495): Ceres Seq. ID no. 12355866
atgtgggcacgtttcctcttcttcgttctctcccggtctcccccatcccaatcgtgcgtgttcgtcactcctcagctccgaccttcacggggcccacggggcccgacgctcggcggctttactcagtgcaccatggccttctcttcgtcactgccgccgttcttcccaccttctggaaccttccgagcccatcccgctaggaggctgcgggccgatgcacccgggagattcgtggcgtcctgcttgccccctcccgacgtcgtggtgacgcgcgagcagggaaagaacgccaggctcatctccgcgctggaaaagcataatgtacaccctctggaacttcctcttattaagcatgttgaaggccctgatacagataggctttcagatgtcctacgtaatgacaagttcgactggattattgtaacctctcctgaggcagctgcagtgttccttcagggatggaaggttgctggaagtcctaaggtgcgagtagctgttgttggagaaggaactgcaagggtttttcatgaagtatcagaatctgatgatcaatctctagagcttgcattttcaccttccaaagctttgggtagagtcttggcttcagagcttccaagaagcaacgggaactcatgtaaagtattgtaccctgcatctgcaaaggctggccatgaaattgaggatgtgctatcagaacgaggatttgacgtgacccgactgaatacatatacaactgttcctgtagaagatgtcgacccactgacattaaaccttgctatatcagctccagttgttgcggtagcttctccttctgcactgagggcatggctaaatcttatctcaaaatctgataactggaacaactccgtcgcctgcatcggtgagaccactgcatctgcagcgaagaaacagggcctgaagagcatatattacccaacgacccctggacttgaggggtgggtcgagagcattctcgaggcgctgagagtccacaggacagcatcaaaagaggccccaaaacgttgaaaacgggcggatggcggagcttcttgcttggcgttggtagccgtccgcagtgtcgaagaaattctttgcttctttgacgacaattgccccccgttgagggaggtggtggtgtcaagccatggctttccagtggcccagtttgtaatggattcttgggccgaaaggcccatctctacatgtcttggctcgcaaggcgattgcatcagtccatccatccatttcatggagggttttagcagtgccgtctctgtttcgctaatcggtgatggcagccagccttgttgtactttgtgggtttgttgacgcagccggtcggattcttcttattgccggattggttgcgtaacgctaggtggttctgaatatcggcgacggcgaggctgtggaatctccgccctccaccgaagattccctgtcgtcgtttctgaatttaattaacaacatggcatgatgaccaatcaaagctcgc

SEQ ID NO: 23413 - protein, 341 aa, Zea mays subsp. mays
  peptide (1)..(341): Ceres Seq. ID no. 12355867
  misc_feature (94)..(323): Pfam Name: Pfam Description:  Uroporphyrinogen-III synthase HemD
  misc_feature (48)..(340): NCBI GI NO: 18401160 NR Description: expressed protein; protein id: At2g26540
  misc_feature (48)..(340): NCBI GI NO: 18694346 NR Description: uroporphyrinogen III synthase
  misc_feature (48)..(340): NCBI GI NO: 21592861 NR Description: uroporphyrinogen III synthase
  misc_feature (150)..(340): NCBI GI NO: 22045244 NR Description: unknown protein [Arabidopsis thaliana]
  misc_feature (246)..(340): NCBI GI NO: 7487883 NR Description: hypothetical protein At2g26540
  misc_feature (87)..(329): NCBI GI NO: 15805812 NR Description: uroporphyrinogen-III synthase, putative
  misc_feature (180)..(251): NCBI GI NO: 7487883 NR Description: hypothetical protein At2g26540
MWARFLFFVLSRSPPSQSCVFVTPQLRPSRGPRGPTLGGFTQCTMAFSSSLPPFFPPSGTFRAHPARRLRADAPGRFVASCLPPPDVVVTREQGKNARLISALEKHNVHPLELPLIKHVEGPDTDRLSDVLRNDKFDWIIVTSPEAAAVFLQGWKVAGSPKVRVAVVGEGTARVFHEVSESDDQSLELAFSPSKALGRVLASELPRSNGNSCKVLYPASAKAGHEIEDVLSERGFDVTRLNTYTTVPVEDVDPLTLNLAISAPVVAVASPSALRAWLNLISKSDNWNNSVACIGETTASAAKKQGLKSIYYPTTPGLEGWVESILEALRVHRTASKEAPKR

SEQ ID NO: 23414 - protein, 297 aa, Zea mays subsp. mays
  peptide (1)..(297): Ceres Seq. ID no. 12355868
  misc_feature (50)..(279): Pfam Name: Pfam Description:  Uroporphyrinogen-III synthase HemD
  misc_feature (4)..(296): NCBI GI NO: 18401160 NR Description: expressed protein; protein id: At2g26540
  misc_feature (4)..(296): NCBI GI NO: 18694346 NR Description: uroporphyrinogen III synthase
  misc_feature (4)..(296): NCBI GI NO: 21592861 NR Description: uroporphyrinogen III synthase
  misc_feature (106)..(296): NCBI GI NO: 22045244 NR Description: unknown protein [Arabidopsis thaliana]
  misc_feature (202)..(296): NCBI GI NO: 7487883 NR Description: hypothetical protein At2g26540
  misc_feature (43)..(285): NCBI GI NO: 15805812 NR Description: uroporphyrinogen-III synthase, putative
  misc_feature (136)..(207): NCBI GI NO: 7487883 NR Description: hypothetical protein At2g26540
MAFSSSLPPFFPPSGTFRAHPARRLRADAPGRFVASCLPPPDVVVTREQGKNARLISALEKHNVHPLELPLIKHVEGPDTDRLSDVLRNDKFDWIIVTSPEAAAVFLQGWKVAGSPKVRVAVVGEGTARVFHEVSESDDQSLELAFSPSKALGRVLASELPRSNGNSCKVLYPASAKAGHEIEDVLSERGFDVTRLNTYTTVPVEDVDPLTLNLAISAPVVAVASPSALRAWLNLISKSDNWNNSVACIGETTASAAKKQGLKSIYYPTTPGLEGWVESILEALRVHRTASKEAPKR

SEQ ID NO: 23415 - DNA, 1323 bp, Zea mays subsp. mays
  misc_feature (1)..(1323): Ceres Seq. ID no. 12369036
attcattgggggcatttgctacaccaccacacccacaccccatcccagcacacaacaagcagcctggtttacggtagctgctagcaaaacaatggagaaccctgctccgagcatcgtagtggccatcgccgcacccgtggcggctgagttcgtgaaactcaccttccgtgccctgtatatgcgccgggctggtcctggcagcagggagatgactgtgccgggaaggccatccgaccagctgggcaggagagtcgtcactgacagccccgtgtacgacggccgtggcgccgacgcccgcctcgtggctcgcatacagggagtcacggtcctggtcggtaacgcagacgccttgttcaccatggtgttcgaaaccgacaggctaaagggctccacgctcgtcatcaacggaatggtcacggatgggtcagacgaatgggcgatctacggcggaaccggggtgttcgccatggccaccggtgtcatgaagagaagaaaccttgccggcggtagcaacgacgggaactctgacgagcttgccctggaagttttctgcccggtgtttggcgcatcacagcaaccaattagcaagcagcaggagtccatctcctccgtcaccaagatcggactatggggcggacagggagggtcggcacaggacatcacggcagagcagccaccacggcgtctgcacagcatcaccgtccgcgctggcgttgccgtcgactccatcgagttcacctacaccgacgacgctgggcagaggcgcactgctgggcggtggggtggacttggcggcaatgttcgaacgatcgaccttggcgacgcagaggatgtcagggaagtctcgggaacatacggcgcatttgaaggtgccattacgctgacctcgctcaggctcgtcaccagcagcagaacctggggcccctggggggtcgagaacgggacgcgtttctccatcacggcgcccaacggcagcagcatcgcgggattctatgcgcgggcgggaaccaggctcgtcgacgctatcggtgtttacatacgtccagtggtgccaggcaggcctcggtgaacaagcgagccgagctcgctcgtattacgagctgtaggattatggttcggcttgacttgatgtaggctacctgctacatcatgctcgattcactatcctttaattcggtcatcgtcgtcgtcttgtctcgtgtcaaataaagctctcttgtgcctatatacggctctcatggttgtgccgtgtctctatatgttagtgtttatgtatatgtggagatcaaataatggccttgcaataatgatcaaagactcgct

SEQ ID NO: 23416 - protein, 355 aa, Zea mays subsp. mays
  peptide (1)..(355): Ceres Seq. ID no. 12369037
  misc_feature (215)..(347): Pfam Name: Pfam Description:  Jacalin-like lectin domain
  misc_feature (45)..(347): NCBI GI NO: 9313027 NR Description: beta-glucosidase aggregating factor precursor
  misc_feature (45)..(349): NCBI GI NO: 7489383 NR Description: jacalin homolog - barley
  misc_feature (45)..(349): NCBI GI NO: 7489385 NR Description: jakalin homolog - barley
  misc_feature (45)..(335): NCBI GI NO: 7489384 NR Description: jacalin homolog - barley
  misc_feature (24)..(350): NCBI GI NO: 7489661 NR Description: benzothiadiazole-induced protein
  misc_feature (45)..(345): NCBI GI NO: 16151819 NR Description: VER2 [Triticum aestivum]
  misc_feature (60)..(349): NCBI GI NO: 21311647 NR Description: hessian fly response gene 1 protein
  misc_feature (201)..(348): NCBI GI NO: 38344523 NR Description: OSJNBa0016N04.16
  misc_feature (203)..(348): NCBI GI NO: 34915016 NR Description: putative Mannose-Binding Rice Lectin
  misc_feature (203)..(348): NCBI GI NO: 134190 NR Description: Salt-stress induced protein (Salt protein)
FIGGICYTTTPTPHPSTQQAAWFTVAASKTMENPAPSIVVAIAAPVAAEFVKLTFRALYMRRAGPGSREMTVPGRPSDQLGRRVVTDSPVYDGRGADARLVARIQGVTVLVGNADALFTMVFETDRLKGSTLVINGMVTDGSDEWAIYGGTGVFAMATGVMKRRNLAGGSNDGNSDELALEVFCPVFGASQQPISKQQESISSVTKIGLWGGQGGSAQDITAEQPPRRLHSITVRAGVAVDSIEFTYTDDAGQRRTAGRWGGLGGNVRTIDLGDAEDVREVSGTYGAFEGAITLTSLRLVTSSRTWGPWGVENGTRFSITAPNGSSIAGFYARAGTRLVDAIGVYIRPVVPGRPR

SEQ ID NO: 23417 - protein, 325 aa, Zea mays subsp. mays
  peptide (1)..(325): Ceres Seq. ID no. 12369038
  misc_feature (185)..(317): Pfam Name: Pfam Description:  Jacalin-like lectin domain
  misc_feature (15)..(317): NCBI GI NO: 9313027 NR Description: beta-glucosidase aggregating factor precursor
  misc_feature (15)..(319): NCBI GI NO: 7489383 NR Description: jacalin homolog - barley
  misc_feature (15)..(319): NCBI GI NO: 7489385 NR Description: jakalin homolog - barley
  misc_feature (15)..(305): NCBI GI NO: 7489384 NR Description: jacalin homolog - barley
  misc_feature (1)..(320): NCBI GI NO: 7489661 NR Description: benzothiadiazole-induced protein
  misc_feature (15)..(315): NCBI GI NO: 16151819 NR Description: VER2 [Triticum aestivum]
  misc_feature (30)..(319): NCBI GI NO: 21311647 NR Description: hessian fly response gene 1 protein
  misc_feature (171)..(318): NCBI GI NO: 38344523 NR Description: OSJNBa0016N04.16
  misc_feature (173)..(318): NCBI GI NO: 34915016 NR Description: putative Mannose-Binding Rice Lectin
  misc_feature (173)..(318): NCBI GI NO: 134190 NR Description: Salt-stress induced protein (Salt protein)
MENPAPSIVVAIAAPVAAEFVKLTFRALYMRRAGPGSREMTVPGRPSDQLGRRVVTDSPVYDGRGADARLVARIQGVTVLVGNADALFTMVFETDRLKGSTLVINGMVTDGSDEWAIYGGTGVFAMATGVMKRRNLAGGSNDGNSDELALEVFCPVFGASQQPISKQQESISSVTKIGLWGGQGGSAQDITAEQPPRRLHSITVRAGVAVDSIEFTYTDDAGQRRTAGRWGGLGGNVRTIDLGDAEDVREVSGTYGAFEGAITLTSLRLVTSSRTWGPWGVENGTRFSITAPNGSSIAGFYARAGTRLVDAIGVYIRPVVPGRPR

SEQ ID NO: 23418 - protein, 296 aa, Zea mays subsp. mays
  peptide (1)..(296): Ceres Seq. ID no. 12369039
  misc_feature (156)..(288): Pfam Name: Pfam Description:  Jacalin-like lectin domain
  misc_feature (1)..(288): NCBI GI NO: 9313027 NR Description: beta-glucosidase aggregating factor precursor
  misc_feature (1)..(290): NCBI GI NO: 7489383 NR Description: jacalin homolog - barley
  misc_feature (1)..(290): NCBI GI NO: 7489385 NR Description: jakalin homolog - barley
  misc_feature (1)..(276): NCBI GI NO: 7489384 NR Description: jacalin homolog - barley
  misc_feature (1)..(291): NCBI GI NO: 7489661 NR Description: benzothiadiazole-induced protein
  misc_feature (1)..(286): NCBI GI NO: 16151819 NR Description: VER2 [Triticum aestivum]
  misc_feature (1)..(290): NCBI GI NO: 21311647 NR Description: hessian fly response gene 1 protein
  misc_feature (142)..(289): NCBI GI NO: 38344523 NR Description: OSJNBa0016N04.16
  misc_feature (144)..(289): NCBI GI NO: 34915016 NR Description: putative Mannose-Binding Rice Lectin
  misc_feature (144)..(289): NCBI GI NO: 134190 NR Description: Salt-stress induced protein (Salt protein)
MRRAGPGSREMTVPGRPSDQLGRRVVTDSPVYDGRGADARLVARIQGVTVLVGNADALFTMVFETDRLKGSTLVINGMVTDGSDEWAIYGGTGVFAMATGVMKRRNLAGGSNDGNSDELALEVFCPVFGASQQPISKQQESISSVTKIGLWGGQGGSAQDITAEQPPRRLHSITVRAGVAVDSIEFTYTDDAGQRRTAGRWGGLGGNVRTIDLGDAEDVREVSGTYGAFEGAITLTSLRLVTSSRTWGPWGVENGTRFSITAPNGSSIAGFYARAGTRLVDAIGVYIRPVVPGRPR

SEQ ID NO: 23419 - DNA, 1413 bp, Zea mays subsp. mays
  misc_feature (1)..(1413): Ceres Seq. ID no. 12405846
atcgaaaaatcggcgtcgccatctccggagtgccacgcctaggagctattctctctagtactgcggcgacttcactccaagcctcccccttcagcgatcagcacacatcacgtaaagcgcaaccaaatgatttccaccaccgtcgctgctcaccccgccaccgtcacagcgctgcggcgaatgtacccgcttcgccctcgccagccactctgtgctccaatcttcacggcggcgacgaggcagtgcatggctacggcgaagccctcggtcacaaacgcgctcgctaacctatccgttgagagcgcccccgcggcgcttcccaagctttcgttcccgatactggtgaatagttgcactgggaaaatggggaaggctgttgctgaagcagctgtctcggctggtcttcagttagttcctgtatcattcagtgccattgaggtccctgatcgaaagattgaaatatgtgatagagaaatttttattcatgacccatctgaaagtgaaaaaattctgcctaccattgttaaagaatacccaaatgtcatagttgtagattacactgtgcctgatgctgttaatgcaaatgctgaactctattgcaaatttggtttgccatttgtaatgggcacaactggtggaaataggcaactcttgcacaaaactgtgcatgatgcgaatatctacgctgtgatatcccctcagatggggaagcaggttgttgcttttcttgctgccatggaaattatgtcagagcaatttcctggtgcattttcaggttacaagctggaggtcatggagtctcatcaagcaacaaaattggacatttctgggactgccaaggctgttatctcttgttttcagaagttgggtgtatcgtttgacatgaatgaggtaaagcaagttagggatcctgaggagcaggtaacgttagtgggtgtcccagaagaacatctcgggggccatgccttccacatgtaccatctcacttcgcctgatgggacagtttcgtttgagttccagcacaatgtatgtggccgttcaatatacgcagaaggaactgttgatgcagctatgtttctctacacaaagattcaatcgggtgcgagcaagaaattgtatgacatgattgatgtcttgagagaagggaacatgagatgaggtccatgttggcgtcagatgagctttcatgtaccaatttgcaagctcaattccaccgtgaattaggttacttttacaatgtacccttcccaatttaccagttaactcactttcagttttgaattggctgcttcaatgatggaaggtactccgttccagagtgtatgcaattttagtttctctaggtatattgattttggcgttttgctatacacctatatgcaatctatagattgtagtaaaaaaaatgtattc

SEQ ID NO: 23420 - protein, 343 aa, Zea mays subsp. mays
  peptide (1)..(343): Ceres Seq. ID no. 12405847
  misc_feature (196)..(338): Pfam Name: Pfam Description:  Dihydrodipicolinate reductase, C-terminus
  misc_feature (58)..(343): NCBI GI NO: 18411368 NR Description: putative protein; protein id: At3g59890
  misc_feature (47)..(343): NCBI GI NO: 18406430 NR Description: expressed protein; protein id: At2g44040
  misc_feature (47)..(322): NCBI GI NO: 7486478 NR Description: hypothetical protein At2g44040
  misc_feature (58)..(321): NCBI GI NO: 11357603 NR Description: hypothetical protein F24G16
  misc_feature (72)..(337): NCBI GI NO: 23052186 NR Description: hypothetical protein [Methanosarcina barkeri]
MISTTVAAHPATVTALRRMYPLRPRQPLCAPIFTAATRQCMATAKPSVTNALANLSVESAPAALPKLSFPILVNSCTGKMGKAVAEAAVSAGLQLVPVSFSAIEVPDRKIEICDREIFIHDPSESEKILPTIVKEYPNVIVVDYTVPDAVNANAELYCKFGLPFVMGTTGGNRQLLHKTVHDANIYAVISPQMGKQVVAFLAAMEIMSEQFPGAFSGYKLEVMESHQATKLDISGTAKAVISCFQKLGVSFDMNEVKQVRDPEEQVTLVGVPEEHLGGHAFHMYHLTSPDGTVSFEFQHNVCGRSIYAEGTVDAAMFLYTKIQSGASKKLYDMIDVLREGNMR

SEQ ID NO: 23421 - protein, 325 aa, Zea mays subsp. mays
  peptide (1)..(325): Ceres Seq. ID no. 12405848
  misc_feature (178)..(320): Pfam Name: Pfam Description:  Dihydrodipicolinate reductase, C-terminus
  misc_feature (40)..(325): NCBI GI NO: 18411368 NR Description: putative protein; protein id: At3g59890
  misc_feature (29)..(325): NCBI GI NO: 18406430 NR Description: expressed protein; protein id: At2g44040
  misc_feature (29)..(304): NCBI GI NO: 7486478 NR Description: hypothetical protein At2g44040
  misc_feature (40)..(303): NCBI GI NO: 11357603 NR Description: hypothetical protein F24G16
  misc_feature (54)..(319): NCBI GI NO: 23052186 NR Description: hypothetical protein [Methanosarcina barkeri]
MYPLRPRQPLCAPIFTAATRQCMATAKPSVTNALANLSVESAPAALPKLSFPILVNSCTGKMGKAVAEAAVSAGLQLVPVSFSAIEVPDRKIEICDREIFIHDPSESEKILPTIVKEYPNVIVVDYTVPDAVNANAELYCKFGLPFVMGTTGGNRQLLHKTVHDANIYAVISPQMGKQVVAFLAAMEIMSEQFPGAFSGYKLEVMESHQATKLDISGTAKAVISCFQKLGVSFDMNEVKQVRDPEEQVTLVGVPEEHLGGHAFHMYHLTSPDGTVSFEFQHNVCGRSIYAEGTVDAAMFLYTKIQSGASKKLYDMIDVLREGNMR

SEQ ID NO: 23422 - protein, 303 aa, Zea mays subsp. mays
  peptide (1)..(303): Ceres Seq. ID no. 12405849
  misc_feature (156)..(298): Pfam Name: Pfam Description:  Dihydrodipicolinate reductase, C-terminus
  misc_feature (18)..(303): NCBI GI NO: 18411368 NR Description: putative protein; protein id: At3g59890
  misc_feature (7)..(303): NCBI GI NO: 18406430 NR Description: expressed protein; protein id: At2g44040
  misc_feature (7)..(282): NCBI GI NO: 7486478 NR Description: hypothetical protein At2g44040
  misc_feature (18)..(281): NCBI GI NO: 11357603 NR Description: hypothetical protein F24G16
  misc_feature (32)..(297): NCBI GI NO: 23052186 NR Description: hypothetical protein [Methanosarcina barkeri]
MATAKPSVTNALANLSVESAPAALPKLSFPILVNSCTGKMGKAVAEAAVSAGLQLVPVSFSAIEVPDRKIEICDREIFIHDPSESEKILPTIVKEYPNVIVVDYTVPDAVNANAELYCKFGLPFVMGTTGGNRQLLHKTVHDANIYAVISPQMGKQVVAFLAAMEIMSEQFPGAFSGYKLEVMESHQATKLDISGTAKAVISCFQKLGVSFDMNEVKQVRDPEEQVTLVGVPEEHLGGHAFHMYHLTSPDGTVSFEFQHNVCGRSIYAEGTVDAAMFLYTKIQSGASKKLYDMIDVLREGNMR

SEQ ID NO: 23423 - DNA, 1243 bp, Zea mays subsp. mays
  misc_feature (1)..(1243): Ceres Seq. ID no. 12348925
aaaccacccgaccccacatggccacatccgcgatgcccacgccgtgagcccgtgaggcgcgccgctggagccgccgcagccgttactatgacctcgccggcccccacctcctggttctccggcctctcgcgctcctcctccaccatggccggcggcgtcgcctcggcctcggcctccgcctccgcctccggccccgcctccgcgttcctccccgacgcgcccaagtccgtaatcggcgccggctccggaggaggcaagcggaatcatctctgcggggcgctgttcaagtacggccccaaatctgcgcaggtagcattcaggactggggattttaaccatcaggtgatcttcattggtggcctcacagatgggcttttagctactgattacttggaaccattgtcacttgcattggaggttgagaaatggtccttggtacagccattgctttcttcatcatacactggatatggaatttccagcttacagcaagatgcgttagaactagagcaactcatcagttacctaataaataaggaaaattctgaaggagtaatattgcttggtcatagtactggatgccaggatattgtgcattatatgcgcacaaactttgcctgttcgaaagcggtttctggggtcatcttgcaggccccagtaagtgacagggagtatagagcaactcttccggaaacagctgaaatgatagacctggcagccaaattgattagcgagggccgtggaatggatttgatgcctagaaaagcaaactcagatgctcctattactgcctacaggtaccactccctttgttcatatatgggtgatgatgacatgttcagttcagatctaagtgaagatcagctgaggcagagacttggtcatgtcaaccacacagtgccaggttattttttcaatgggggatgaatatgtgcctgaatatgttgataagagggctctagtagacaggctatgtagggcactgggaggtgcagagaaagtcgagatagaatggggaaaccatgctctgtccaacagagtgcaagaagcagttgtggccattgtagattttgtcaagagggaggggcccaaaggctgggatgacccatggagctagatacagcagttataatctcatttgtaactagtttgtgcttttcctcttctctcttttctccaattgtaacttctttcttttgcattattattggtccatttttcaatagtgatatgctatttttcc

SEQ ID NO: 23424 - protein, 308 aa, Zea mays subsp. mays
  peptide (1)..(308): Ceres Seq. ID no. 12348926
  misc_feature (30)..(308): NCBI GI NO: 34393295 NR Description: unknown protein
  misc_feature (17)..(308): NCBI GI NO: 15239639 NR Description: putative protein; protein id: At5g19050
  misc_feature (30)..(279): NCBI GI NO: 34900046 NR Description: contains EST C72879
  misc_feature (115)..(296): NCBI GI NO: 19114904 NR Description: hypothetical protein; sequence orphan
  misc_feature (143)..(297): NCBI GI NO: 32403674 NR Description: hypothetical protein [Neurospora crassa]
  misc_feature (92)..(201): NCBI GI NO: 40741836 NR Description: hypothetical protein AN4948.2
  misc_feature (113)..(201): NCBI GI NO: 40739421 NR Description: hypothetical protein AN6793.2
  misc_feature (275)..(298): NCBI GI NO: 40739421 NR Description: hypothetical protein AN6793.2
  misc_feature (87)..(293): NCBI GI NO: 19173345 NR Description: hypothetical protein [Encephalitozoon cuniculi]
  misc_feature (113)..(201): NCBI GI NO: 40739433 NR Description: hypothetical protein AN6239.2
KPPDPTWPHPRCPRREPVRRAAGAAAAVTMTSPAPTSWFSGLSRSSSTMAGGVASASASASASGPASAFLPDAPKSVIGAGSGGGKRNHLCGALFKYGPKSAQVAFRTGDFNHQVIFIGGLTDGLLATDYLEPLSLALEVEKWSLVQPLLSSSYTGYGISSLQQDALELEQLISYLINKENSEGVILLGHSTGCQDIVHYMRTNFACSKAVSGVILQAPVSDREYRATLPETAEMIDLAAKLISEGRGMDLMPRKANSDAPITAYRYHSLCSYMGDDDMFSSDLSEDQLRQRLGHVNHTVPGYFFNGG

SEQ ID NO: 23425 - protein, 279 aa, Zea mays subsp. mays
  peptide (1)..(279): Ceres Seq. ID no. 12348927
  misc_feature (1)..(279): NCBI GI NO: 34393295 NR Description: unknown protein
  misc_feature (1)..(279): NCBI GI NO: 15239639 NR Description: putative protein; protein id: At5g19050
  misc_feature (1)..(250): NCBI GI NO: 34900046 NR Description: contains EST C72879
  misc_feature (86)..(267): NCBI GI NO: 19114904 NR Description: hypothetical protein; sequence orphan
  misc_feature (114)..(268): NCBI GI NO: 32403674 NR Description: hypothetical protein [Neurospora crassa]
  misc_feature (63)..(172): NCBI GI NO: 40741836 NR Description: hypothetical protein AN4948.2
  misc_feature (84)..(172): NCBI GI NO: 40739421 NR Description: hypothetical protein AN6793.2
  misc_feature (246)..(269): NCBI GI NO: 40739421 NR Description: hypothetical protein AN6793.2
  misc_feature (58)..(264): NCBI GI NO: 19173345 NR Description: hypothetical protein [Encephalitozoon cuniculi]
  misc_feature (84)..(172): NCBI GI NO: 40739433 NR Description: hypothetical protein AN6239.2
MTSPAPTSWFSGLSRSSSTMAGGVASASASASASGPASAFLPDAPKSVIGAGSGGGKRNHLCGALFKYGPKSAQVAFRTGDFNHQVIFIGGLTDGLLATDYLEPLSLALEVEKWSLVQPLLSSSYTGYGISSLQQDALELEQLISYLINKENSEGVILLGHSTGCQDIVHYMRTNFACSKAVSGVILQAPVSDREYRATLPETAEMIDLAAKLISEGRGMDLMPRKANSDAPITAYRYHSLCSYMGDDDMFSSDLSEDQLRQRLGHVNHTVPGYFFNGG

SEQ ID NO: 23426 - protein, 260 aa, Zea mays subsp. mays
  peptide (1)..(260): Ceres Seq. ID no. 12348928
  misc_feature (1)..(260): NCBI GI NO: 34393295 NR Description: unknown protein
  misc_feature (1)..(260): NCBI GI NO: 15239639 NR Description: putative protein; protein id: At5g19050
  misc_feature (1)..(231): NCBI GI NO: 34900046 NR Description: contains EST C72879
  misc_feature (67)..(248): NCBI GI NO: 19114904 NR Description: hypothetical protein; sequence orphan
  misc_feature (95)..(249): NCBI GI NO: 32403674 NR Description: hypothetical protein [Neurospora crassa]
  misc_feature (44)..(153): NCBI GI NO: 40741836 NR Description: hypothetical protein AN4948.2
  misc_feature (65)..(153): NCBI GI NO: 40739421 NR Description: hypothetical protein AN6793.2
  misc_feature (227)..(250): NCBI GI NO: 40739421 NR Description: hypothetical protein AN6793.2
  misc_feature (39)..(245): NCBI GI NO: 19173345 NR Description: hypothetical protein [Encephalitozoon cuniculi]
  misc_feature (65)..(153): NCBI GI NO: 40739433 NR Description: hypothetical protein AN6239.2
MAGGVASASASASASGPASAFLPDAPKSVIGAGSGGGKRNHLCGALFKYGPKSAQVAFRTGDFNHQVIFIGGLTDGLLATDYLEPLSLALEVEKWSLVQPLLSSSYTGYGISSLQQDALELEQLISYLINKENSEGVILLGHSTGCQDIVHYMRTNFACSKAVSGVILQAPVSDREYRATLPETAEMIDLAAKLISEGRGMDLMPRKANSDAPITAYRYHSLCSYMGDDDMFSSDLSEDQLRQRLGHVNHTVPGYFFNGG

SEQ ID NO: 23427 - DNA, 1431 bp, Zea mays subsp. mays
  misc_feature (1)..(1431): Ceres Seq. ID no. 13498943
cccaaatcgacctgggctggacccagccgcgccccgtctgcctcctgcttctctctccgcttccgcttcctgcgcctccaggctccacttctccgctcggcagtctgcactggaaggacagcatgtcggcctcggcgtcgtcaccggcggcggcggcgggcgatgagaagcaggaggcggcgcccgtcaggcgctgcaagggcgtcaacgacctcgacaaggtcgttctccgcgaggtccggggcagctccgcagaggtgtacttgtatggtgggcatgtgacatcatggaaagatgagcatggagatgaattactttttgttagcaataaggctattttcaagcctccaaaagctatacgtggaggaataccaatatgctttccgcagttctccaactttgggaatctggaaccacatggatttgcaaggaataggacatggagtgttgatgatgatcctccgccatttccagtgccaacctccaatagcgcttatattgacttgatcctcaaacctactgaagatgatttgaagatctggcctcatagttttgaataccgcctgagggttgcacttagtcctggtggtgatttgatgctaacttcacgtataagaaacactaatgcagacgggaagccattctctttcacttttgcataccacacatacttcaagatttctgatatcagtgaggtgcgagtagaaggattggaaactctggattacctagacaacttacaagatagagctcgttccactgaacaaggcgatgcaattgtttttgaatccgaactggacagaatatatctgggcacaccatcgaaaattgccattattgatcatgagaagaaaagaacatttgttgtgaggaaaggaggccttcctgatgctgttgtttggaatccctgggataaaaaagcaaaggctatgtcagattttggggatgatgaatataaacgaatggtatgtgtggaggcggctgctattgaaaagactgtcactctgaagcctggtgaagagtggactggaaagttggaactttctgctgtgccatctagctattacagtggtcagctagaccctgaccgtgtgattcaggattccactgtcccggaggactccatcagctagtccttattctatttttgcaggtagagcattgtatcattatgcataagagatgctggcaacaagggctgtccacatgtttcttccattctgttcaaatcttcggtgtttttttattccgaatgcatatccgaaccaaggaatgtgaaattggtttccgctttttgaggatctatgtagcataatggataagtcggtgtttcgtaccctatttagggatgcttgaagcaagaaacatcttcatgggttgtaaaataaaagaaaaattctctttattatatttgatcaattcttttgcctc

SEQ ID NO: 23428 - protein, 376 aa, Zea mays subsp. mays
  peptide (1)..(376): Ceres Seq. ID no. 13498944
  misc_feature (72)..(348): Pfam Name: Pfam Description:  Aldose 1-epimerase
  misc_feature (40)..(376): NCBI GI NO: 19387263 NR Description: putative apospory-associated protein C
  misc_feature (43)..(366): NCBI GI NO: 38344152 NR Description: OSJNBa0041A02.19
  misc_feature (66)..(366): NCBI GI NO: 15242099 NR Description: aldose 1-epimerase family [Arabidopsis thaliana]
  misc_feature (43)..(366): NCBI GI NO: 40253263 NR Description: putative Aldose 1-epimerase
  misc_feature (41)..(365): NCBI GI NO: 2501555 NR Description: POSSIBLE APOSPORY-ASSOCIATED PROTEIN C
  misc_feature (50)..(360): NCBI GI NO: 15233165 NR Description: aldose 1-epimerase family [Arabidopsis thaliana]
  misc_feature (69)..(365): NCBI GI NO: 18395868 NR Description: aldose 1-epimerase family [Arabidopsis thaliana]
  misc_feature (69)..(365): NCBI GI NO: 16612258 NR Description: AT3g01590/F4P13_13 [Arabidopsis thaliana]
  misc_feature (48)..(353): NCBI GI NO: 15236591 NR Description: aldose 1-epimerase family [Arabidopsis thaliana]
  misc_feature (68)..(365): NCBI GI NO: 18417396 NR Description: aldose 1-epimerase family [Arabidopsis thaliana]
QIDLGWTQPRPVCLLLLSPLPLPAPPGSTSPLGSLHWKDSMSASASSPAAAAGDEKQEAAPVRRCKGVNDLDKVVLREVRGSSAEVYLYGGHVTSWKDEHGDELLFVSNKAIFKPPKAIRGGIPICFPQFSNFGNLEPHGFARNRTWSVDDDPPPFPVPTSNSAYIDLILKPTEDDLKIWPHSFEYRLRVALSPGGDLMLTSRIRNTNADGKPFSFTFAYHTYFKISDISEVRVEGLETLDYLDNLQDRARSTEQGDAIVFESELDRIYLGTPSKIAIIDHEKKRTFVVRKGGLPDAVVWNPWDKKAKAMSDFGDDEYKRMVCVEAAAIEKTVTLKPGEEWTGKLELSAVPSSYYSGQLDPDRVIQDSTVPEDSIS

SEQ ID NO: 23429 - protein, 336 aa, Zea mays subsp. mays
  peptide (1)..(336): Ceres Seq. ID no. 13498945
  misc_feature (32)..(308): Pfam Name: Pfam Description:  Aldose 1-epimerase
  misc_feature (1)..(336): NCBI GI NO: 19387263 NR Description: putative apospory-associated protein C
  misc_feature (3)..(326): NCBI GI NO: 38344152 NR Description: OSJNBa0041A02.19
  misc_feature (26)..(326): NCBI GI NO: 15242099 NR Description: aldose 1-epimerase family [Arabidopsis thaliana]
  misc_feature (3)..(326): NCBI GI NO: 40253263 NR Description: putative Aldose 1-epimerase
  misc_feature (1)..(325): NCBI GI NO: 2501555 NR Description: POSSIBLE APOSPORY-ASSOCIATED PROTEIN C
  misc_feature (10)..(320): NCBI GI NO: 15233165 NR Description: aldose 1-epimerase family [Arabidopsis thaliana]
  misc_feature (29)..(325): NCBI GI NO: 18395868 NR Description: aldose 1-epimerase family [Arabidopsis thaliana]
  misc_feature (29)..(325): NCBI GI NO: 16612258 NR Description: AT3g01590/F4P13_13 [Arabidopsis thaliana]
  misc_feature (8)..(313): NCBI GI NO: 15236591 NR Description: aldose 1-epimerase family [Arabidopsis thaliana]
  misc_feature (28)..(325): NCBI GI NO: 18417396 NR Description: aldose 1-epimerase family [Arabidopsis thaliana]
MSASASSPAAAAGDEKQEAAPVRRCKGVNDLDKVVLREVRGSSAEVYLYGGHVTSWKDEHGDELLFVSNKAIFKPPKAIRGGIPICFPQFSNFGNLEPHGFARNRTWSVDDDPPPFPVPTSNSAYIDLILKPTEDDLKIWPHSFEYRLRVALSPGGDLMLTSRIRNTNADGKPFSFTFAYHTYFKISDISEVRVEGLETLDYLDNLQDRARSTEQGDAIVFESELDRIYLGTPSKIAIIDHEKKRTFVVRKGGLPDAVVWNPWDKKAKAMSDFGDDEYKRMVCVEAAAIEKTVTLKPGEEWTGKLELSAVPSSYYSGQLDPDRVIQDSTVPEDSIS

SEQ ID NO: 23430 - DNA, 1673 bp, Zea mays subsp. mays
  misc_feature (1)..(1673): Ceres Seq. ID no. 12387134
attcagaagcagtgaagtgagagaggtaaaacaagctgagactctaacttcaaaggaagatacacacacaaaggacagtgagaaggaggccaagaagcttgctcgcaaggcgctagggaggaagaagacaaccacgcactattgctgttgcttgtgcttagtgtgtgctcgtggctagaagcagacaagcagctgcgggagcataagggcggcatggcttcttgcggtagcttctactttgttcccatgctcctgctgatgctcctgctcgcttctcccgccactgctgcactggtgacatcctcccagcctggcggcaatgccactgctgcaaggccgaggccggggatggagcagctcaagcgcaagaggatcagggctctgctcaccaagcttaacaagcctgctctcaagactatccagagctcggatggcgacatcatagactgtgttccctctcacctccagcccgcatttgaccacccaaagctcaggggcgaaaagattctggatccgccggagaggcccaagaaccgcaacttcacctttggcggcagcggcagaagcagggtcggcgaggtggtggtgcaggcgtggcacgccaccggcgaggcgtgtccagaggggaccgtgccgatacggcggacgacggagaaggatctgctcagggctagctccctcaggaggtacggcaggaagccagcgcgccggggtgttcgccgtgattccacaagcagcggccatgagcatgcagttgggtatgtaaactcagaacagtactatggggccaaggccagtgttaatgtgtggtcgccaaggataggtgacccatctgagttcagcctgtctcagatctgggtcctctctggctccttcggcaatgatctcaacaccatcgaagctggatggcaggtaagcccagagctatacggagacagtaacccaagattcttcacctactggacaactgacgcgtaccaagaaaccgggtgctacaaccacaattgccgcggattcgtgcagacgacgaacaagattgcaattggggcggctatcaccccggagtcggtgtacaatggcaggcagttcgacatcactctcatgctatggaaggacccaaagcaggggcactggtggctggagctgggcccgggcctcgtagtcgggtactggccgtcgcacctcttcagccacctggctcgccacgccaacatggtgcagttcggcggcgaggtcgtcaacacccggccgtcggggtcgcataccgcgacgcagatgggcagcggccacttccccagagagggcttcgaccgcgccgcctacttccggaacctgcaggtggtggactgggacaacaacctcatcccggcggccaacctgaaactcctcgccgaccatcctggatgctacgatatccagggaggcactaacagctactggggaagctacttctactacggaggacccgggaggaacgccaaatgtccctgagatcaattcggaccggatgtctctttcttgttcgatgttcttttttcgttgccctttctaggatttggtaggtcttatacgtctttaacgaaagaatgcatccacggttgagacttgggaggaatttgtaaatttggcaagtacctgttatatttaatatccctatggctcatattttattt

SEQ ID NO: 23431 - protein, 425 aa, Zea mays subsp. mays
  peptide (1)..(425): Ceres Seq. ID no. 12387135
  misc_feature (189)..(384): Pfam Name: Pfam Description:  Arabidopsis proteins of unknown function
  misc_feature (2)..(425): NCBI GI NO: 21389708 NR Description: putative carboxyl-terminal proteinase
  misc_feature (15)..(425): NCBI GI NO: 15240622 NR Description: putative protein; protein id: At5g50150
  misc_feature (13)..(425): NCBI GI NO: 28416687 NR Description: At1g70550 [Arabidopsis thaliana]
  misc_feature (179)..(425): NCBI GI NO: 15528706 NR Description: P0583G08.7
  misc_feature (12)..(178): NCBI GI NO: 15528706 NR Description: P0583G08.7
  misc_feature (2)..(424): NCBI GI NO: 34913794 NR Description: OSJNBa0026J14.25
  misc_feature (12)..(425): NCBI GI NO: 15220207 NR Description: putative carboxyl-terminal peptidase
  misc_feature (1)..(425): NCBI GI NO: 25345695 NR Description: protein F26F24.22
  misc_feature (132)..(425): NCBI GI NO: 6573746 NR Description: F20B24.18 [Arabidopsis thaliana]
  misc_feature (12)..(99): NCBI GI NO: 6573746 NR Description: F20B24.18 [Arabidopsis thaliana]
MASCGSFYFVPMLLLMLLLASPATAALVTSSQPGGNATAARPRPGMEQLKRKRIRALLTKLNKPALKTIQSSDGDIIDCVPSHLQPAFDHPKLRGEKILDPPERPKNRNFTFGGSGRSRVGEVVVQAWHATGEACPEGTVPIRRTTEKDLLRASSLRRYGRKPARRGVRRDSTSSGHEHAVGYVNSEQYYGAKASVNVWSPRIGDPSEFSLSQIWVLSGSFGNDLNTIEAGWQVSPELYGDSNPRFFTYWTTDAYQETGCYNHNCRGFVQTTNKIAIGAAITPESVYNGRQFDITLMLWKDPKQGHWWLELGPGLVVGYWPSHLFSHLARHANMVQFGGEVVNTRPSGSHTATQMGSGHFPREGFDRAAYFRNLQVVDWDNNLIPAANLKLLADHPGCYDIQGGTNSYWGSYFYYGGPGRNAKCP

SEQ ID NO: 23432 - protein, 414 aa, Zea mays subsp. mays
  peptide (1)..(414): Ceres Seq. ID no. 12387136
  misc_feature (178)..(373): Pfam Name: Pfam Description:  Arabidopsis proteins of unknown function
  misc_feature (1)..(414): NCBI GI NO: 21389708 NR Description: putative carboxyl-terminal proteinase
  misc_feature (4)..(414): NCBI GI NO: 15240622 NR Description: putative protein; protein id: At5g50150
  misc_feature (2)..(414): NCBI GI NO: 28416687 NR Description: At1g70550 [Arabidopsis thaliana]
  misc_feature (168)..(414): NCBI GI NO: 15528706 NR Description: P0583G08.7
  misc_feature (1)..(167): NCBI GI NO: 15528706 NR Description: P0583G08.7
  misc_feature (1)..(413): NCBI GI NO: 34913794 NR Description: OSJNBa0026J14.25
  misc_feature (1)..(414): NCBI GI NO: 15220207 NR Description: putative carboxyl-terminal peptidase
  misc_feature (1)..(414): NCBI GI NO: 25345695 NR Description: protein F26F24.22
  misc_feature (121)..(414): NCBI GI NO: 6573746 NR Description: F20B24.18 [Arabidopsis thaliana]
  misc_feature (1)..(88): NCBI GI NO: 6573746 NR Description: F20B24.18 [Arabidopsis thaliana]
MLLLMLLLASPATAALVTSSQPGGNATAARPRPGMEQLKRKRIRALLTKLNKPALKTIQSSDGDIIDCVPSHLQPAFDHPKLRGEKILDPPERPKNRNFTFGGSGRSRVGEVVVQAWHATGEACPEGTVPIRRTTEKDLLRASSLRRYGRKPARRGVRRDSTSSGHEHAVGYVNSEQYYGAKASVNVWSPRIGDPSEFSLSQIWVLSGSFGNDLNTIEAGWQVSPELYGDSNPRFFTYWTTDAYQETGCYNHNCRGFVQTTNKIAIGAAITPESVYNGRQFDITLMLWKDPKQGHWWLELGPGLVVGYWPSHLFSHLARHANMVQFGGEVVNTRPSGSHTATQMGSGHFPREGFDRAAYFRNLQVVDWDNNLIPAANLKLLADHPGCYDIQGGTNSYWGSYFYYGGPGRNAKCP

SEQ ID NO: 23433 - protein, 410 aa, Zea mays subsp. mays
  peptide (1)..(410): Ceres Seq. ID no. 12387137
  misc_feature (174)..(369): Pfam Name: Pfam Description:  Arabidopsis proteins of unknown function
  misc_feature (1)..(410): NCBI GI NO: 21389708 NR Description: putative carboxyl-terminal proteinase
  misc_feature (1)..(410): NCBI GI NO: 15240622 NR Description: putative protein; protein id: At5g50150
  misc_feature (1)..(410): NCBI GI NO: 28416687 NR Description: At1g70550 [Arabidopsis thaliana]
  misc_feature (164)..(410): NCBI GI NO: 15528706 NR Description: P0583G08.7
  misc_feature (1)..(163): NCBI GI NO: 15528706 NR Description: P0583G08.7
  misc_feature (1)..(409): NCBI GI NO: 34913794 NR Description: OSJNBa0026J14.25
  misc_feature (1)..(410): NCBI GI NO: 15220207 NR Description: putative carboxyl-terminal peptidase
  misc_feature (1)..(410): NCBI GI NO: 25345695 NR Description: protein F26F24.22
  misc_feature (117)..(410): NCBI GI NO: 6573746 NR Description: F20B24.18 [Arabidopsis thaliana]
  misc_feature (1)..(84): NCBI GI NO: 6573746 NR Description: F20B24.18 [Arabidopsis thaliana]
MLLLASPATAALVTSSQPGGNATAARPRPGMEQLKRKRIRALLTKLNKPALKTIQSSDGDIIDCVPSHLQPAFDHPKLRGEKILDPPERPKNRNFTFGGSGRSRVGEVVVQAWHATGEACPEGTVPIRRTTEKDLLRASSLRRYGRKPARRGVRRDSTSSGHEHAVGYVNSEQYYGAKASVNVWSPRIGDPSEFSLSQIWVLSGSFGNDLNTIEAGWQVSPELYGDSNPRFFTYWTTDAYQETGCYNHNCRGFVQTTNKIAIGAAITPESVYNGRQFDITLMLWKDPKQGHWWLELGPGLVVGYWPSHLFSHLARHANMVQFGGEVVNTRPSGSHTATQMGSGHFPREGFDRAAYFRNLQVVDWDNNLIPAANLKLLADHPGCYDIQGGTNSYWGSYFYYGGPGRNAKCP

SEQ ID NO: 23434 - DNA, 997 bp, Zea mays subsp. mays
  misc_feature (1)..(997): Ceres Seq. ID no. 13498415
  misc_feature (612)..(612): n is a, c, t, g, unknown, or other
  misc_feature (446)..(446): n is a, c, t, g, unknown, or other
  misc_feature (680)..(680): n is a, c, t, g, unknown, or other
  misc_feature (489)..(489): n is a, c, t, g, unknown, or other
  misc_feature (943)..(943): n is a, c, t, g, unknown, or other
  misc_feature (941)..(941): n is a, c, t, g, unknown, or other
  misc_feature (635)..(635): n is a, c, t, g, unknown, or other
  misc_feature (885)..(885): n is a, c, t, g, unknown, or other
  misc_feature (979)..(979): n is a, c, t, g, unknown, or other
  misc_feature (732)..(732): n is a, c, t, g, unknown, or other
  misc_feature (809)..(809): n is a, c, t, g, unknown, or other
  misc_feature (540)..(540): n is a, c, t, g, unknown, or other
  misc_feature (714)..(714): n is a, c, t, g, unknown, or other
  misc_feature (938)..(938): n is a, c, t, g, unknown, or other
  misc_feature (624)..(624): n is a, c, t, g, unknown, or other
  misc_feature (815)..(815): n is a, c, t, g, unknown, or other
  misc_feature (735)..(735): n is a, c, t, g, unknown, or other
aaagataaagttaggctcggcaccgggggctcatccgcaagcctgtggacgcgagtgagtgaacaccagccgtattgtcccgaccccgaccgatcctcgcctgctgcagccatggcgacctccgcggcgctctctaccgccgccaatcccacccagctctgccggtcccgcgcttcgctgggcaagccggtgaaggggcttggcctgagcatgggccgcgagcgcgcccagcggagcattgtgtgccaggcggcgagcagcatctccgccgaccgcgtccccgacatggagaagcggaagctgatgaacctcctcctcctcggcgccatctcgttgcccaccgtcggcatggtcgtcccctacggcgccttcttcgtccctgccggctccgggaacgccggcggcgggacctacgcgaaggacaagctgggcaacgacatcacggnggaggcgtggctcaacacgcacggtcccaacgaccgcacgctngcgcaggggctcaagggtgaccccacgtacctggtggtggagcaggacaanacgctggccacctacgggatcaacgccgtgtgcactcacctcggctgcgtcgtgccgtggaacggcgccganaacaagttcatntgcccatgccncggatcccagtacaacaaccagggcaaggtggtccgtggaccggngcctctgtcgctggccctggttcacgccgacgtngacgacggcaaggtcctnttngtcccgtgggtggagaccgacttcaggaccggcgaggacccgtggtggaaggcatgaggatgatccgaaaccancggtgntcagtgctcacacatgagacctacgtatgcctccgttccttgtgatgaggaaatatgcttgcgttcgttntccgtgggcgttgttcctacaaattcacttgctttctgtctctctctctatanacncnctgtataaaacaagaacagctgtttatcatctcttnttatataaccttttgaac

SEQ ID NO: 23435 - protein, 263 aa, Zea mays subsp. mays
  peptide (1)..(263): Ceres Seq. ID no. 13498416
  misc_feature (147)..(239): Pfam Name: Pfam Description:  Rieske [2Fe-2S] domain
  misc_feature (41)..(261): NCBI GI NO: 3885886 NR Description: Rieske Fe-S precursor protein [Oryza sativa]
  misc_feature (32)..(261): NCBI GI NO: 2921504 NR Description: cytochrome B6-F complex iron-sulfur subunitprecursor
  misc_feature (43)..(261): NCBI GI NO: 401247 NR Description: Cytochrome B6-F complex iron-sulfur subunit 1
  misc_feature (43)..(261): NCBI GI NO: 19999 NR Description: Rieske Fe/S protein of cytochrome b6/f complex
  misc_feature (43)..(261): NCBI GI NO: 401249 NR Description: Cytochrome B6-F complex iron-sulfur subunit 2
  misc_feature (45)..(261): NCBI GI NO: 9843639 NR Description: Rieske FeS protein [Arabidopsis thaliana]
  misc_feature (45)..(261): NCBI GI NO: 15236275 NR Description: Rieske FeS protein
  misc_feature (62)..(261): NCBI GI NO: 30679426 NR Description: Rieske FeS protein
  misc_feature (36)..(263): NCBI GI NO: 136712 NR Description: Cytochrome B6-F complex iron-sulfur subunit
  misc_feature (40)..(261): NCBI GI NO: 136707 NR Description: Cytochrome B6-F complex iron-sulfur subunit
  misc_feature (149)..(149): Xaa is any aa, unknown or other
  misc_feature (163)..(163): Xaa is any aa, unknown or other
  misc_feature (180)..(180): Xaa is any aa, unknown or other
  misc_feature (204)..(204): Xaa is any aa, unknown or other
  misc_feature (208)..(208): Xaa is any aa, unknown or other
  misc_feature (212)..(212): Xaa is any aa, unknown or other
  misc_feature (227)..(227): Xaa is any aa, unknown or other
  misc_feature (238)..(238): Xaa is any aa, unknown or other
  misc_feature (244)..(244): Xaa is any aa, unknown or other
  misc_feature (245)..(245): Xaa is any aa, unknown or other
KDKVRLGTGGSSASLWTRVSEHQPYCPDPDRSSPAAAMATSAALSTAANPTQLCRSRASLGKPVKGLGLSMGRERAQRSIVCQAASSISADRVPDMEKRKLMNLLLLGAISLPTVGMVVPYGAFFVPAGSGNAGGGTYAKDKLGNDITXEAWLNTHGPNDRTXAQGLKGDPTYLVVEQDXTLATYGINAVCTHLGCVVPWNGAXNKFXCPCXGSQYNNQGKVVRGPXPLSLALVHADXDDGKVXXVPWVETDFRTGEDPWWKA

SEQ ID NO: 23436 - protein, 226 aa, Zea mays subsp. mays
  peptide (1)..(226): Ceres Seq. ID no. 13498417
  misc_feature (110)..(202): Pfam Name: Pfam Description:  Rieske [2Fe-2S] domain
  misc_feature (4)..(224): NCBI GI NO: 3885886 NR Description: Rieske Fe-S precursor protein [Oryza sativa]
  misc_feature (1)..(224): NCBI GI NO: 2921504 NR Description: cytochrome B6-F complex iron-sulfur subunitprecursor
  misc_feature (6)..(224): NCBI GI NO: 401247 NR Description: Cytochrome B6-F complex iron-sulfur subunit 1
  misc_feature (6)..(224): NCBI GI NO: 19999 NR Description: Rieske Fe/S protein of cytochrome b6/f complex
  misc_feature (6)..(224): NCBI GI NO: 401249 NR Description: Cytochrome B6-F complex iron-sulfur subunit 2
  misc_feature (8)..(224): NCBI GI NO: 9843639 NR Description: Rieske FeS protein [Arabidopsis thaliana]
  misc_feature (8)..(224): NCBI GI NO: 15236275 NR Description: Rieske FeS protein
  misc_feature (25)..(224): NCBI GI NO: 30679426 NR Description: Rieske FeS protein
  misc_feature (1)..(226): NCBI GI NO: 136712 NR Description: Cytochrome B6-F complex iron-sulfur subunit
  misc_feature (3)..(224): NCBI GI NO: 136707 NR Description: Cytochrome B6-F complex iron-sulfur subunit
  misc_feature (112)..(112): Xaa is any aa, unknown or other
  misc_feature (126)..(126): Xaa is any aa, unknown or other
  misc_feature (143)..(143): Xaa is any aa, unknown or other
  misc_feature (167)..(167): Xaa is any aa, unknown or other
  misc_feature (171)..(171): Xaa is any aa, unknown or other
  misc_feature (175)..(175): Xaa is any aa, unknown or other
  misc_feature (190)..(190): Xaa is any aa, unknown or other
  misc_feature (201)..(201): Xaa is any aa, unknown or other
  misc_feature (207)..(207): Xaa is any aa, unknown or other
  misc_feature (208)..(208): Xaa is any aa, unknown or other
MATSAALSTAANPTQLCRSRASLGKPVKGLGLSMGRERAQRSIVCQAASSISADRVPDMEKRKLMNLLLLGAISLPTVGMVVPYGAFFVPAGSGNAGGGTYAKDKLGNDITXEAWLNTHGPNDRTXAQGLKGDPTYLVVEQDXTLATYGINAVCTHLGCVVPWNGAXNKFXCPCXGSQYNNQGKVVRGPXPLSLALVHADXDDGKVXXVPWVETDFRTGEDPWWKA

SEQ ID NO: 23437 - protein, 193 aa, Zea mays subsp. mays
  peptide (1)..(193): Ceres Seq. ID no. 13498418
  misc_feature (77)..(169): Pfam Name: Pfam Description:  Rieske [2Fe-2S] domain
  misc_feature (1)..(191): NCBI GI NO: 3885886 NR Description: Rieske Fe-S precursor protein [Oryza sativa]
  misc_feature (1)..(191): NCBI GI NO: 2921504 NR Description: cytochrome B6-F complex iron-sulfur subunitprecursor
  misc_feature (1)..(191): NCBI GI NO: 401247 NR Description: Cytochrome B6-F complex iron-sulfur subunit 1
  misc_feature (1)..(191): NCBI GI NO: 19999 NR Description: Rieske Fe/S protein of cytochrome b6/f complex
  misc_feature (1)..(191): NCBI GI NO: 401249 NR Description: Cytochrome B6-F complex iron-sulfur subunit 2
  misc_feature (1)..(191): NCBI GI NO: 9843639 NR Description: Rieske FeS protein [Arabidopsis thaliana]
  misc_feature (1)..(191): NCBI GI NO: 15236275 NR Description: Rieske FeS protein
  misc_feature (1)..(191): NCBI GI NO: 30679426 NR Description: Rieske FeS protein
  misc_feature (1)..(193): NCBI GI NO: 136712 NR Description: Cytochrome B6-F complex iron-sulfur subunit
  misc_feature (1)..(191): NCBI GI NO: 136707 NR Description: Cytochrome B6-F complex iron-sulfur subunit
  misc_feature (79)..(79): Xaa is any aa, unknown or other
  misc_feature (93)..(93): Xaa is any aa, unknown or other
  misc_feature (110)..(110): Xaa is any aa, unknown or other
  misc_feature (134)..(134): Xaa is any aa, unknown or other
  misc_feature (138)..(138): Xaa is any aa, unknown or other
  misc_feature (142)..(142): Xaa is any aa, unknown or other
  misc_feature (157)..(157): Xaa is any aa, unknown or other
  misc_feature (168)..(168): Xaa is any aa, unknown or other
  misc_feature (174)..(174): Xaa is any aa, unknown or other
  misc_feature (175)..(175): Xaa is any aa, unknown or other
MGRERAQRSIVCQAASSISADRVPDMEKRKLMNLLLLGAISLPTVGMVVPYGAFFVPAGSGNAGGGTYAKDKLGNDITXEAWLNTHGPNDRTXAQGLKGDPTYLVVEQDXTLATYGINAVCTHLGCVVPWNGAXNKFXCPCXGSQYNNQGKVVRGPXPLSLALVHADXDDGKVXXVPWVETDFRTGEDPWWKA

SEQ ID NO: 23438 - DNA, 1141 bp, Zea mays subsp. mays
  misc_feature (1)..(1141): Ceres Seq. ID no. 12349900
ctgatcctctccgccatttctgtgcgcatctggagctgttgttctaaacccccaaaccctccgtcctaacctctgcgccaccggcgtcaccaccgccggagccgcagccatgaacgccttcaggttcctcggggacatgacccacctcttctcggtcctcgtcctcctcctcaagatctacgccaccaagtcctgctcaggggtgtcgaggaagacgcaggagctgtacatgttggtgttcgtggcgaggtacctggacctcttcacggattatgtctcgctctacaactcggtgatgaaggtggtgttcatcaccagctcggcggccatcgtgtggtgcatgcgccgccacccgcaggtacgaaggacgtacgacaaggagcaggacaccttccgccacacggtgctcgtcgccgccgcattcctgctcgcgctgatattccacgagcggttcaccttccgtgagatatgctgggcattttcaatctatttggaggcagtggctattctcccacaattagtgttgctccagagaagcagaaatgtggataacttaactggacaatatgttttcttccttggggcctaccgtgcgttttacattctaaactggatttatcgttatttcacggagggtcatcgcagcagatggatcccttggcttgctggtttggtgcaaacagctctgtatgcagatttcttttactattatttcttaagttggaagaacaatgtgaagctcgagttgcctgcttgagcatgcttcgttttgccagaaagcgtgcaagctacgtgactcaagttttatagaatttagttgattatatgggcatggagagacttggtaatgacgtgagcagttgcagttgatgccaaacccttgatcttgtctgcgaaaattggcatttgtgtttcccatggccaagacgatacgattccaaagctaacagatgctgctgcacagaagtaggctagttcctttttgtacctcaatacttttgatatggaaaatcatatacagttcagttggtctgtttaacattcgatttcacttgctccaaacgaaaaatgcgatccaatgttcgtgcgatttctgtgtaaaactgttacacttttgactgtcctcaacaatccatttttt

SEQ ID NO: 23439 - protein, 215 aa, Zea mays subsp. mays
  peptide (1)..(215): Ceres Seq. ID no. 12349901
  misc_feature (1)..(205): Pfam Name: Pfam Description:  ER lumen protein retaining receptor
  misc_feature (1)..(215): NCBI GI NO: 18397049 NR Description: ER lumen protein retaining receptor
  misc_feature (1)..(215): NCBI GI NO: 6685428 NR Description: ER lumen protein retaining receptor
  misc_feature (1)..(214): NCBI GI NO: 21743051 NR Description: OSJNBa0083D01.1
  misc_feature (1)..(215): NCBI GI NO: 21592401 NR Description: ER lumen retaining receptor
  misc_feature (1)..(215): NCBI GI NO: 18404390 NR Description: ER lumen retaining receptor
  misc_feature (1)..(215): NCBI GI NO: 9293986 NR Description: ER lumen protein-retaining receptor-like protein
  misc_feature (1)..(215): NCBI GI NO: 14285310 NR Description: ERD2 protein [Scherffelia dubia]
  misc_feature (1)..(214): NCBI GI NO: 22656361 NR Description: endoplasmic reticulum retention receptor
  misc_feature (1)..(215): NCBI GI NO: 17137442 NR Description: KDEL receptor CG5183-PA [Drosophila melanogaster]
  misc_feature (1)..(215): NCBI GI NO: 5803048 NR Description: KDEL receptor 1
MNAFRFLGDMTHLFSVLVLLLKIYATKSCSGVSRKTQELYMLVFVARYLDLFTDYVSLYNSVMKVVFITSSAAIVWCMRRHPQVRRTYDKEQDTFRHTVLVAAAFLLALIFHERFTFREICWAFSIYLEAVAILPQLVLLQRSRNVDNLTGQYVFFLGAYRAFYILNWIYRYFTEGHRSRWIPWLAGLVQTALYADFFYYYFLSWKNNVKLELPA

SEQ ID NO: 23440 - protein, 206 aa, Zea mays subsp. mays
  peptide (1)..(206): Ceres Seq. ID no. 12349902
  misc_feature (1)..(196): Pfam Name: Pfam Description:  ER lumen protein retaining receptor
  misc_feature (1)..(206): NCBI GI NO: 18397049 NR Description: ER lumen protein retaining receptor
  misc_feature (1)..(206): NCBI GI NO: 6685428 NR Description: ER lumen protein retaining receptor
  misc_feature (1)..(205): NCBI GI NO: 21743051 NR Description: OSJNBa0083D01.1
  misc_feature (1)..(206): NCBI GI NO: 21592401 NR Description: ER lumen retaining receptor
  misc_feature (1)..(206): NCBI GI NO: 18404390 NR Description: ER lumen retaining receptor
  misc_feature (1)..(206): NCBI GI NO: 9293986 NR Description: ER lumen protein-retaining receptor-like protein
  misc_feature (1)..(206): NCBI GI NO: 14285310 NR Description: ERD2 protein [Scherffelia dubia]
  misc_feature (1)..(205): NCBI GI NO: 22656361 NR Description: endoplasmic reticulum retention receptor
  misc_feature (1)..(206): NCBI GI NO: 17137442 NR Description: KDEL receptor CG5183-PA [Drosophila melanogaster]
  misc_feature (1)..(206): NCBI GI NO: 5803048 NR Description: KDEL receptor 1
MTHLFSVLVLLLKIYATKSCSGVSRKTQELYMLVFVARYLDLFTDYVSLYNSVMKVVFITSSAAIVWCMRRHPQVRRTYDKEQDTFRHTVLVAAAFLLALIFHERFTFREICWAFSIYLEAVAILPQLVLLQRSRNVDNLTGQYVFFLGAYRAFYILNWIYRYFTEGHRSRWIPWLAGLVQTALYADFFYYYFLSWKNNVKLELPA

SEQ ID NO: 23441 - protein, 175 aa, Zea mays subsp. mays
  peptide (1)..(175): Ceres Seq. ID no. 12349903
  misc_feature (1)..(165): Pfam Name: Pfam Description:  ER lumen protein retaining receptor
  misc_feature (1)..(175): NCBI GI NO: 18397049 NR Description: ER lumen protein retaining receptor
  misc_feature (1)..(175): NCBI GI NO: 6685428 NR Description: ER lumen protein retaining receptor
  misc_feature (1)..(174): NCBI GI NO: 21743051 NR Description: OSJNBa0083D01.1
  misc_feature (1)..(175): NCBI GI NO: 21592401 NR Description: ER lumen retaining receptor
  misc_feature (1)..(175): NCBI GI NO: 18404390 NR Description: ER lumen retaining receptor
  misc_feature (1)..(175): NCBI GI NO: 9293986 NR Description: ER lumen protein-retaining receptor-like protein
  misc_feature (1)..(175): NCBI GI NO: 14285310 NR Description: ERD2 protein [Scherffelia dubia]
  misc_feature (1)..(174): NCBI GI NO: 22656361 NR Description: endoplasmic reticulum retention receptor
  misc_feature (1)..(175): NCBI GI NO: 17137442 NR Description: KDEL receptor CG5183-PA [Drosophila melanogaster]
  misc_feature (1)..(175): NCBI GI NO: 5803048 NR Description: KDEL receptor 1
MLVFVARYLDLFTDYVSLYNSVMKVVFITSSAAIVWCMRRHPQVRRTYDKEQDTFRHTVLVAAAFLLALIFHERFTFREICWAFSIYLEAVAILPQLVLLQRSRNVDNLTGQYVFFLGAYRAFYILNWIYRYFTEGHRSRWIPWLAGLVQTALYADFFYYYFLSWKNNVKLELPA

SEQ ID NO: 23442 - DNA, 1157 bp, Zea mays subsp. mays
  misc_feature (1)..(1157): Ceres Seq. ID no. 12373468
aaaaatttcgagtttttttaaatacactataaccgagagcctgaaaatgggaacaaactagcaactgaagcgtaccaacaaaaaacgcccgattcgcctcgcaaaatcgccgccgccatcgcctactccaccagacgccgatagttccgccttcctttcctgctgcgcgcctgtcgccatggtgaagcggtggcttcggcctcgaggccaaccccgacgtcatgaaccagttcatgtggggactgggggtccccgaggacgtggggttctgcgacgtgtacggcctcgatgacgagttgctcgccatggtgccccagccggtgctcgcggtcctacttctctacccccaggaccggagcaaggagtcccaagcttcagctacctcgtcggtggagaccaaggagcccagcaagaacgtatatttcacaaagcaaactgttgggaatgcctgtggccacagttggtattattcatgcactggggaatgctacttccagaatcaagttaggtgaggggtcatattttgatagattttataaacgaactgctgacatggatcctatccagcgtgctgcatttcttgaggaggacgaggaaatggagaatgctcattccattgccgctactgctggtgacacagaggccaaggacggtgtaattgaacattacatttgtttctcttgtgtcgatggagagctttatgagcttgatggggggacatcacagccaataccccatgggccttccactcctgataccttgttgcaggatgctgcagaagttataaaagcaagaatcgccatgtattcgcagtcaaacaacttcaatgtcatggctctttcaggcaaagcgatatagcattatagcactttcagtcataggcacttgatatcccacatttgctttgcagctgccttagcccaacactgcagcatgttctattgttttcttgccttcgttttattatttaaacacgttaaaacaagataaataaaagcgtggctacagaaaagttcccgttggtagtatcacttactctgtagaagagctaatgtgccgtttcgttcacgaaatgtgacgtaaatgataatagtaatgattcacgttcgaataccggtggtaaaagtttaaataagtcggtatctatttctagtgtt

SEQ ID NO: 23443 - protein, 189 aa, Zea mays subsp. mays
  peptide (1)..(189): Ceres Seq. ID no. 12373469
  misc_feature (51)..(185): NCBI GI NO: 38346164 NR Description: OSJNBa0079A21.11
  misc_feature (42)..(185): NCBI GI NO: 14140139 NR Description: putative protein [Oryza sativa]
  misc_feature (51)..(185): NCBI GI NO: 15236549 NR Description: carboxyl-terminal proteinase like protein
  misc_feature (51)..(129): NCBI GI NO: 7488069 NR Description: probable carboxyl-terminal proteinase - Arabidopsisthaliana
  misc_feature (57)..(185): NCBI GI NO: 5174741 NR Description: ubiquitin carboxyl-terminal esterase L3
  misc_feature (57)..(185): NCBI GI NO: 17380334 NR Description: Ubiquitin carboxyl-terminal hydrolase isozyme L3
  misc_feature (54)..(185): NCBI GI NO: 5805326 NR Description: ubiquitin carboxyl-terminal hydrolase-6
  misc_feature (57)..(185): NCBI GI NO: 7522621 NR Description: ubiquitin carboxy-terminal hydrolase-6 (EC 3
  misc_feature (57)..(185): NCBI GI NO: 7710106 NR Description: ubiquitin carboxyl-terminal esterase L3
  misc_feature (57)..(185): NCBI GI NO: 27705170 NR Description: similar to ubiqutin carboxyl-terminal hydrolase l3
MTSCSPWCPSRCSRSYFSTPRTGARSPKLQLPRRWRPRSPARTYISQSKLLGMPVATVGIIHALGNATSRIKLGEGSYFDRFYKRTADMDPIQRAAFLEEDEEMENAHSIAATAGDTEAKDGVIEHYICFSCVDGELYELDGGTSQPIPHGPSTPDTLLQDAAEVIKARIAMYSQSNNFNVMALSGKAI

SEQ ID NO: 23444 - protein, 137 aa, Zea mays subsp. mays
  peptide (1)..(137): Ceres Seq. ID no. 12373470
  misc_feature (1)..(133): NCBI GI NO: 38346164 NR Description: OSJNBa0079A21.11
  misc_feature (1)..(133): NCBI GI NO: 14140139 NR Description: putative protein [Oryza sativa]
  misc_feature (1)..(133): NCBI GI NO: 15236549 NR Description: carboxyl-terminal proteinase like protein
  misc_feature (1)..(77): NCBI GI NO: 7488069 NR Description: probable carboxyl-terminal proteinase - Arabidopsisthaliana
  misc_feature (5)..(133): NCBI GI NO: 5174741 NR Description: ubiquitin carboxyl-terminal esterase L3
  misc_feature (5)..(133): NCBI GI NO: 17380334 NR Description: Ubiquitin carboxyl-terminal hydrolase isozyme L3
  misc_feature (2)..(133): NCBI GI NO: 5805326 NR Description: ubiquitin carboxyl-terminal hydrolase-6
  misc_feature (5)..(133): NCBI GI NO: 7522621 NR Description: ubiquitin carboxy-terminal hydrolase-6 (EC 3
  misc_feature (5)..(133): NCBI GI NO: 7710106 NR Description: ubiquitin carboxyl-terminal esterase L3
  misc_feature (5)..(133): NCBI GI NO: 27705170 NR Description: similar to ubiqutin carboxyl-terminal hydrolase l3
MPVATVGIIHALGNATSRIKLGEGSYFDRFYKRTADMDPIQRAAFLEEDEEMENAHSIAATAGDTEAKDGVIEHYICFSCVDGELYELDGGTSQPIPHGPSTPDTLLQDAAEVIKARIAMYSQSNNFNVMALSGKAI

SEQ ID NO: 23445 - protein, 101 aa, Zea mays subsp. mays
  peptide (1)..(101): Ceres Seq. ID no. 12373471
  misc_feature (1)..(97): NCBI GI NO: 38346164 NR Description: OSJNBa0079A21.11
  misc_feature (1)..(97): NCBI GI NO: 14140139 NR Description: putative protein [Oryza sativa]
  misc_feature (1)..(97): NCBI GI NO: 15236549 NR Description: carboxyl-terminal proteinase like protein
  misc_feature (1)..(41): NCBI GI NO: 7488069 NR Description: probable carboxyl-terminal proteinase - Arabidopsisthaliana
  misc_feature (1)..(97): NCBI GI NO: 5174741 NR Description: ubiquitin carboxyl-terminal esterase L3
  misc_feature (1)..(97): NCBI GI NO: 17380334 NR Description: Ubiquitin carboxyl-terminal hydrolase isozyme L3
  misc_feature (1)..(97): NCBI GI NO: 5805326 NR Description: ubiquitin carboxyl-terminal hydrolase-6
  misc_feature (1)..(97): NCBI GI NO: 7522621 NR Description: ubiquitin carboxy-terminal hydrolase-6 (EC 3
  misc_feature (1)..(97): NCBI GI NO: 7710106 NR Description: ubiquitin carboxyl-terminal esterase L3
  misc_feature (1)..(97): NCBI GI NO: 27705170 NR Description: similar to ubiqutin carboxyl-terminal hydrolase l3
MDPIQRAAFLEEDEEMENAHSIAATAGDTEAKDGVIEHYICFSCVDGELYELDGGTSQPIPHGPSTPDTLLQDAAEVIKARIAMYSQSNNFNVMALSGKAI

SEQ ID NO: 23446 - DNA, 1886 bp, Zea mays subsp. mays
  misc_feature (1)..(1886): Ceres Seq. ID no. 12369040
gcacgagaccattacctagaacatcctaatcgaaaaaaaccgatcgagcctcgacgagcgagcagaggactcatcctaggtagctaagctgtccgacagcacagcagaccgatacgatacgacgatgatgagtagcaccggcggcgagagcaagctggagagcccgctgctgggcctgcccgcgccgggctcgtcggccggcagcgggcacagccacggcgaggcggtgagcgggcagctggagagcatcctcagcgacgcctccctgccgtggaggcagcggatgctgtcagcgtccatggttgagatgcggctgctcgtgcgcctggccgcgcccgccgtgctcgtctacatgatcaactacctcatgtccatgtccacgcagatcttctcgggacacctcggcacgctcgagctcgccgccgcgtcgctcggcaacaccggcatccaggtcttcgcctatggcctcatgctgggcatggggagcgcggtggagacgctgtgcgggcaggcgtacggcgcgcacaagtacgacatgctgggcatctacttgcagcgctccaccatcctgctgatggccacgggggtgcctctgaccgtgctctacgccttctcccgccccatcctggtcctcctcggggagtcccccgagatcgcctccgccgccgccgtcttcgtgtacggcctcatcccgcagatcttcgcgtacgccgccaacttccccatccagaagttcatgcaggcgcagagcatcatggcccccagtgcgtacatctccgccgccacgctggccgtgcacctcgccctcagctacctcgtcgtgtaccagttcgggctgggcctcctcggcgcgtcgctcatgctcagcgtcagctggtgggtcatcgtcgccgcgcagttcgcctacatcgccaccagccagcggtgccgcctcacctggacgggcttctcgtgggaggccttctcggggctccccggcttcctcaagctgtccctcgcctccgccgtcatgctctgcctcgagacctggtacttccagatactcgtgctcatcgcgggactcctcaaggaccccgagcttgccttggcctcactctctgtctgcatgtcaattacagggtgggtgttcatgatatcagttgggttcaatgcagcagccagcgtaagagtgagcaacgagcttggcgccggcaacccaaagtccgcggcgttctctgtggtggtagtgacgctgctctccttcgtcctgtcggtcataatctccgtcgtcatcctgctgtgccgggactacatcagctacatcttcaccgagggcgacgacgtgtcgcgggcggtcgcccagctcagcccgctgctggcggtcaccctcatcctcaacggcatccagcccgtcctctctggggtagctgtggggtgtggatggcaagcgttggtcgcatacgtcaatgtcggctgctactacatcgtcggcatcccccttgggtgcctcctgggattctacttcgacctaggagcagcgggtatctggagcggtatgatcgggggcaccctgatgcagaccatgatcctggtgtgggttacattcaggacgaactggaacaaggaggttgaagaagcgcagaaaagactgaacaaatgggaagacagtaaagcgcctgtccagtgagcccaagaactaaataaggcttctctgttgccaaaccaagaacgagagacgtgggaaattgatgcaattcaccctgatgcagattcggaaattgatgcaaggttgcaattcagtgtcctgaaatgtctacgaggagaggagaggagaggagatgagatggctggaattttaaatactactcttgcatcacgcaattcaattctgtgttccgttattatat

SEQ ID NO: 23447 - protein, 513 aa, Zea mays subsp. mays
  peptide (1)..(513): Ceres Seq. ID no. 12369041
  misc_feature (13)..(512): NCBI GI NO: 15233127 NR Description: integral membrane protein, putative
  misc_feature (13)..(512): NCBI GI NO: 20466556 NR Description: integral membrane protein, putative
  misc_feature (38)..(508): NCBI GI NO: 15221073 NR Description: unknown protein; protein id: At1g11670.1
  misc_feature (38)..(508): NCBI GI NO: 22655139 NR Description: unknown protein [Arabidopsis thaliana]
  misc_feature (35)..(512): NCBI GI NO: 18407368 NR Description: expressed protein; protein id: At1g61890
  misc_feature (35)..(512): NCBI GI NO: 15081773 NR Description: At1g61890/F8K4_9 [Arabidopsis thaliana]
  misc_feature (39)..(513): NCBI GI NO: 18415793 NR Description: putative protein; protein id: At4g21910.1
  misc_feature (39)..(513): NCBI GI NO: 21553843 NR Description: unknown [Arabidopsis thaliana]
  misc_feature (39)..(474): NCBI GI NO: 7487826 NR Description: hypothetical protein T8O5
  misc_feature (82)..(504): NCBI GI NO: 15234633 NR Description: putative protein; protein id: At4g21900.1
MMSSTGGESKLESPLLGLPAPGSSAGSGHSHGEAVSGQLESILSDASLPWRQRMLSASMVEMRLLVRLAAPAVLVYMINYLMSMSTQIFSGHLGTLELAAASLGNTGIQVFAYGLMLGMGSAVETLCGQAYGAHKYDMLGIYLQRSTILLMATGVPLTVLYAFSRPILVLLGESPEIASAAAVFVYGLIPQIFAYAANFPIQKFMQAQSIMAPSAYISAATLAVHLALSYLVVYQFGLGLLGASLMLSVSWWVIVAAQFAYIATSQRCRLTWTGFSWEAFSGLPGFLKLSLASAVMLCLETWYFQILVLIAGLLKDPELALASLSVCMSITGWVFMISVGFNAAASVRVSNELGAGNPKSAAFSVVVVTLLSFVLSVIISVVILLCRDYISYIFTEGDDVSRAVAQLSPLLAVTLILNGIQPVLSGVAVGCGWQALVAYVNVGCYYIVGIPLGCLLGFYFDLGAAGIWSGMIGGTLMQTMILVWVTFRTNWNKEVEEAQKRLNKWEDSKAPVQ

SEQ ID NO: 23448 - protein, 512 aa, Zea mays subsp. mays
  peptide (1)..(512): Ceres Seq. ID no. 12369042
  misc_feature (12)..(511): NCBI GI NO: 15233127 NR Description: integral membrane protein, putative
  misc_feature (12)..(511): NCBI GI NO: 20466556 NR Description: integral membrane protein, putative
  misc_feature (37)..(507): NCBI GI NO: 15221073 NR Description: unknown protein; protein id: At1g11670.1
  misc_feature (37)..(507): NCBI GI NO: 22655139 NR Description: unknown protein [Arabidopsis thaliana]
  misc_feature (34)..(511): NCBI GI NO: 18407368 NR Description: expressed protein; protein id: At1g61890
  misc_feature (34)..(511): NCBI GI NO: 15081773 NR Description: At1g61890/F8K4_9 [Arabidopsis thaliana]
  misc_feature (38)..(512): NCBI GI NO: 18415793 NR Description: putative protein; protein id: At4g21910.1
  misc_feature (38)..(512): NCBI GI NO: 21553843 NR Description: unknown [Arabidopsis thaliana]
  misc_feature (38)..(473): NCBI GI NO: 7487826 NR Description: hypothetical protein T8O5
  misc_feature (81)..(503): NCBI GI NO: 15234633 NR Description: putative protein; protein id: At4g21900.1
MSSTGGESKLESPLLGLPAPGSSAGSGHSHGEAVSGQLESILSDASLPWRQRMLSASMVEMRLLVRLAAPAVLVYMINYLMSMSTQIFSGHLGTLELAAASLGNTGIQVFAYGLMLGMGSAVETLCGQAYGAHKYDMLGIYLQRSTILLMATGVPLTVLYAFSRPILVLLGESPEIASAAAVFVYGLIPQIFAYAANFPIQKFMQAQSIMAPSAYISAATLAVHLALSYLVVYQFGLGLLGASLMLSVSWWVIVAAQFAYIATSQRCRLTWTGFSWEAFSGLPGFLKLSLASAVMLCLETWYFQILVLIAGLLKDPELALASLSVCMSITGWVFMISVGFNAAASVRVSNELGAGNPKSAAFSVVVVTLLSFVLSVIISVVILLCRDYISYIFTEGDDVSRAVAQLSPLLAVTLILNGIQPVLSGVAVGCGWQALVAYVNVGCYYIVGIPLGCLLGFYFDLGAAGIWSGMIGGTLMQTMILVWVTFRTNWNKEVEEAQKRLNKWEDSKAPVQ

SEQ ID NO: 23449 - protein, 460 aa, Zea mays subsp. mays
  peptide (1)..(460): Ceres Seq. ID no. 12369043
  misc_feature (1)..(459): NCBI GI NO: 15233127 NR Description: integral membrane protein, putative
  misc_feature (1)..(459): NCBI GI NO: 20466556 NR Description: integral membrane protein, putative
  misc_feature (1)..(455): NCBI GI NO: 15221073 NR Description: unknown protein; protein id: At1g11670.1
  misc_feature (1)..(455): NCBI GI NO: 22655139 NR Description: unknown protein [Arabidopsis thaliana]
  misc_feature (1)..(459): NCBI GI NO: 18407368 NR Description: expressed protein; protein id: At1g61890
  misc_feature (1)..(459): NCBI GI NO: 15081773 NR Description: At1g61890/F8K4_9 [Arabidopsis thaliana]
  misc_feature (1)..(460): NCBI GI NO: 18415793 NR Description: putative protein; protein id: At4g21910.1
  misc_feature (1)..(460): NCBI GI NO: 21553843 NR Description: unknown [Arabidopsis thaliana]
  misc_feature (1)..(421): NCBI GI NO: 7487826 NR Description: hypothetical protein T8O5
  misc_feature (29)..(451): NCBI GI NO: 15234633 NR Description: putative protein; protein id: At4g21900.1
MLSASMVEMRLLVRLAAPAVLVYMINYLMSMSTQIFSGHLGTLELAAASLGNTGIQVFAYGLMLGMGSAVETLCGQAYGAHKYDMLGIYLQRSTILLMATGVPLTVLYAFSRPILVLLGESPEIASAAAVFVYGLIPQIFAYAANFPIQKFMQAQSIMAPSAYISAATLAVHLALSYLVVYQFGLGLLGASLMLSVSWWVIVAAQFAYIATSQRCRLTWTGFSWEAFSGLPGFLKLSLASAVMLCLETWYFQILVLIAGLLKDPELALASLSVCMSITGWVFMISVGFNAAASVRVSNELGAGNPKSAAFSVVVVTLLSFVLSVIISVVILLCRDYISYIFTEGDDVSRAVAQLSPLLAVTLILNGIQPVLSGVAVGCGWQALVAYVNVGCYYIVGIPLGCLLGFYFDLGAAGIWSGMIGGTLMQTMILVWVTFRTNWNKEVEEAQKRLNKWEDSKAPVQ

SEQ ID NO: 23450 - DNA, 1588 bp, Zea mays subsp. mays
  misc_feature (1)..(1588): Ceres Seq. ID no. 12411029
accaaaaggggtttcggcatggatggatagcacacagcgagcgagcgagagcggtgagcccggccaccagcgccggaggccgtcgtcgtcttactagccgacgctcgacttgggcatgaattgctagccgcgcgggtgagagattgctaggtagccagctaggtacggtgtggggagttgaatcggaggtctgccgctcgaggcggcggcggcagaaggccggtaggatgaagaagctccactggctggtgcggttcctgttcgggccggtgccggtctacttctcggcgctggccatcctcatcgtgctcaccaacgcgcagtacttcgggctggtgggcgtcggcgtggcgccgcgcaccgcgaagctggcctcctcggcgcccgtggtcagcgtcatgaagtactgcgacatcttccgcggcgagtgggtgccggacgcggaggcgccctactacaaccacaagacgtgccacatgatccaggagcaccagaactgcctcaagtacggccgccccgacctgggcttcctcaagtggcggtggcggccctccggatgcgagctgccgcgcttcgacccgctgcagttcctgcagttcgcccgcgggaagtcgctggccttcgtcggggactcgctggcgcggaaccacatgcagtcgctgctctgcctcctgtcccaggtggcgtatcccaaggacctgtcggcgaacccgtcggaccagaacaaggtgtaccactaccgggcgtacaacttcaccatcagcatgttctggtcgccgttcctggtgcgcgcccgggagcccgaccacgacggccccgcgcacacgggccactggagcctctacctggacgagcccgacgacaagtgggtgtcccagatgccccgcttcgactacgtgctggtgtcggcggccaactggttctcccgcccctccctcttctacgagcggcggcgcctcgtcgggtgcagcttctgcagccgccagtacggcgtgcccgacctgacgctctactactcgcagcgccgcgcgtggcgcgtggcgctgcgcgccatcaacgacctggagcgcctgcgagggcgcgtcatcgtgcgcatgctctccccgatgtcgcacttcgagaacgggacctgggaccacggcggcgactgcaggcgcacgcagccgctgcgggcgaaccagaccgccatggagggccgcgacctgcacttctacaccgcgcagatggaggagttccgcgccgcggagaaggccgccgccgagaaggggcggcgcctgatgctcatggacgccacggcggcgatgctgatgcggcccgacggccaccccagccgctacgggcactggcccaacgagaaggtgcagctctacaacgactgcatccactggtgcctcccgggacccatcgacatctggaacgacatgctcttccagatgctcctcgcctagcagcaagcagcaaagattaaaaaaaaaactcagcaattcggtcgccggtaaccgtgcacagattggccttcttttttttgccttgtttcgtttttttaaaaaaagaagaaaatggtgcaattttgacaagcaaggattcg

SEQ ID NO: 23451 - protein, 406 aa, Zea mays subsp. mays
  peptide (1)..(406): Ceres Seq. ID no. 12411030
  misc_feature (232)..(404): Pfam Name: Pfam Description:  Arabidopsis proteins of unknown function
  misc_feature (3)..(405): NCBI GI NO: 34911880 NR Description: OSJNBb0032K15.17
  misc_feature (9)..(404): NCBI GI NO: 34911888 NR Description: OSJNBb0032K15.21
  misc_feature (20)..(405): NCBI GI NO: 34898638 NR Description: contains ESTsAU089699
  misc_feature (54)..(404): NCBI GI NO: 15237213 NR Description: putative protein; protein id: At5g15900.1
  misc_feature (61)..(404): NCBI GI NO: 15237211 NR Description: putative protein; protein id: At5g15890.1
  misc_feature (1)..(404): NCBI GI NO: 15232914 NR Description: hypothetical protein; protein id: At3g28150
  misc_feature (56)..(405): NCBI GI NO: 30678135 NR Description: expressed protein [Arabidopsis thaliana]
  misc_feature (17)..(405): NCBI GI NO: 15234058 NR Description: hypothetical protein; protein id: At4g01080.1
  misc_feature (17)..(405): NCBI GI NO: 28393189 NR Description: unknown protein [Arabidopsis thaliana]
  misc_feature (71)..(405): NCBI GI NO: 25518737 NR Description: hypothetical protein F6F3.23
MKKLHWLVRFLFGPVPVYFSALAILIVLTNAQYFGLVGVGVAPRTAKLASSAPVVSVMKYCDIFRGEWVPDAEAPYYNHKTCHMIQEHQNCLKYGRPDLGFLKWRWRPSGCELPRFDPLQFLQFARGKSLAFVGDSLARNHMQSLLCLLSQVAYPKDLSANPSDQNKVYHYRAYNFTISMFWSPFLVRAREPDHDGPAHTGHWSLYLDEPDDKWVSQMPRFDYVLVSAANWFSRPSLFYERRRLVGCSFCSRQYGVPDLTLYYSQRRAWRVALRAINDLERLRGRVIVRMLSPMSHFENGTWDHGGDCRRTQPLRANQTAMEGRDLHFYTAQMEEFRAAEKAAAEKGRRLMLMDATAAMLMRPDGHPSRYGHWPNEKVQLYNDCIHWCLPGPIDIWNDMLFQMLLA

SEQ ID NO: 23452 - protein, 349 aa, Zea mays subsp. mays
  peptide (1)..(349): Ceres Seq. ID no. 12411031
  misc_feature (175)..(347): Pfam Name: Pfam Description:  Arabidopsis proteins of unknown function
  misc_feature (1)..(348): NCBI GI NO: 34911880 NR Description: OSJNBb0032K15.17
  misc_feature (1)..(347): NCBI GI NO: 34911888 NR Description: OSJNBb0032K15.21
  misc_feature (1)..(348): NCBI GI NO: 34898638 NR Description: contains ESTsAU089699
  misc_feature (1)..(347): NCBI GI NO: 15237213 NR Description: putative protein; protein id: At5g15900.1
  misc_feature (4)..(347): NCBI GI NO: 15237211 NR Description: putative protein; protein id: At5g15890.1
  misc_feature (1)..(347): NCBI GI NO: 15232914 NR Description: hypothetical protein; protein id: At3g28150
  misc_feature (1)..(348): NCBI GI NO: 30678135 NR Description: expressed protein [Arabidopsis thaliana]
  misc_feature (1)..(348): NCBI GI NO: 15234058 NR Description: hypothetical protein; protein id: At4g01080.1
  misc_feature (1)..(348): NCBI GI NO: 28393189 NR Description: unknown protein [Arabidopsis thaliana]
  misc_feature (14)..(348): NCBI GI NO: 25518737 NR Description: hypothetical protein F6F3.23
MKYCDIFRGEWVPDAEAPYYNHKTCHMIQEHQNCLKYGRPDLGFLKWRWRPSGCELPRFDPLQFLQFARGKSLAFVGDSLARNHMQSLLCLLSQVAYPKDLSANPSDQNKVYHYRAYNFTISMFWSPFLVRAREPDHDGPAHTGHWSLYLDEPDDKWVSQMPRFDYVLVSAANWFSRPSLFYERRRLVGCSFCSRQYGVPDLTLYYSQRRAWRVALRAINDLERLRGRVIVRMLSPMSHFENGTWDHGGDCRRTQPLRANQTAMEGRDLHFYTAQMEEFRAAEKAAAEKGRRLMLMDATAAMLMRPDGHPSRYGHWPNEKVQLYNDCIHWCLPGPIDIWNDMLFQMLLA

SEQ ID NO: 23453 - protein, 323 aa, Zea mays subsp. mays
  peptide (1)..(323): Ceres Seq. ID no. 12411032
  misc_feature (149)..(321): Pfam Name: Pfam Description:  Arabidopsis proteins of unknown function
  misc_feature (1)..(322): NCBI GI NO: 34911880 NR Description: OSJNBb0032K15.17
  misc_feature (1)..(321): NCBI GI NO: 34911888 NR Description: OSJNBb0032K15.21
  misc_feature (1)..(322): NCBI GI NO: 34898638 NR Description: contains ESTsAU089699
  misc_feature (1)..(321): NCBI GI NO: 15237213 NR Description: putative protein; protein id: At5g15900.1
  misc_feature (1)..(321): NCBI GI NO: 15237211 NR Description: putative protein; protein id: At5g15890.1
  misc_feature (1)..(321): NCBI GI NO: 15232914 NR Description: hypothetical protein; protein id: At3g28150
  misc_feature (1)..(322): NCBI GI NO: 30678135 NR Description: expressed protein [Arabidopsis thaliana]
  misc_feature (1)..(322): NCBI GI NO: 15234058 NR Description: hypothetical protein; protein id: At4g01080.1
  misc_feature (1)..(322): NCBI GI NO: 28393189 NR Description: unknown protein [Arabidopsis thaliana]
  misc_feature (1)..(322): NCBI GI NO: 25518737 NR Description: hypothetical protein F6F3.23
MIQEHQNCLKYGRPDLGFLKWRWRPSGCELPRFDPLQFLQFARGKSLAFVGDSLARNHMQSLLCLLSQVAYPKDLSANPSDQNKVYHYRAYNFTISMFWSPFLVRAREPDHDGPAHTGHWSLYLDEPDDKWVSQMPRFDYVLVSAANWFSRPSLFYERRRLVGCSFCSRQYGVPDLTLYYSQRRAWRVALRAINDLERLRGRVIVRMLSPMSHFENGTWDHGGDCRRTQPLRANQTAMEGRDLHFYTAQMEEFRAAEKAAAEKGRRLMLMDATAAMLMRPDGHPSRYGHWPNEKVQLYNDCIHWCLPGPIDIWNDMLFQMLLA

SEQ ID NO: 23454 - DNA, 1576 bp, Zea mays subsp. mays
  misc_feature (1)..(1576): Ceres Seq. ID no. 12351922
agatacccgttcatccctcgctctcgctgccacttctcccgttcggcctctttttccttccaccaatggaagctctcacagcccgctcctccgtactctcgccgccggggattgccggagacacctcgccctcccttcccctgcccctccgccgagcctccgccgcgtttcttgggcctcgcaggagcccctccgccctcgccatctccacgcgctggctgcgcgctccgcctcgacgcggcggccgcctgctcgcgggggaaggggaagaagtgccccccgaccccgccgatgacgcggctggccgggcggaagattttctagtactcgagaataatgtaactctacgccaaagcaatgacatggataccattaaacatgatgatgctggcacttctggaattggtgggagtaacactggtggctctaggactggcctattcagaacacctatttcaggtggtgtgcacagtgcaactgctgttcatgatttaccaccaccagctttggctgttcgcaacctcatggaacaggcaaggtttgctcatctgtgcactgtaatgtctcggatgcatcaccgccgtgagggatacccattcggttccctagtagattttgcacctgacccatttggccacccgatcttctcattatccccactagctatccacacaagaaatttgttggcagacccaagatgcacccttgttgtacaggttcctggatggagtgggctatcaaatgcacgagtaactatctttggcgatgtcattccgttgcccactgaacaacaggaatgggctcatcagcagtatgtttcaaagcaccagcagtgggcatcccaacagtggggtaacttttactattacagaatgcacacaataagtgacatatatttcattggaggttttggtactgttgcttgggtagatgtgaacgaatatgaggctctgcaacctgacaagattgctatggatggaggggaacaaaatctgaaggaactcaacgcaatgttctcaaagcctctgaaagagcttttgtcaactgatgaaggagaggtagacgatgttgctcttatttcaatggacagcaaaggtatcgatatccgtgtccgacaaggtgcacagttcaacatccagagggtgccctttgaggtggatcacagcgtcgaaacactagatgaagccacggaagctctcaggaggataatcagcaagtctaggtggcacacaaagagctcagtcataggacgcccttgaaagctgaagctggaggctctatagaacagtttgtacagtgcggcagcagtctctactacggtatgtgccaataaggggaactccgttccagagtttcgtctactgccaagggcctcgtgtttgtgggtgggttgaataaacacgcaatttgagatgatgctgttttgaccatgaatttagattgaacgcacatcggcaaaaggatttaatgtgaagttgtcgatgggttgaaaaagatgtgaccatctctgacctgcttcattcttgaggaattgaggataaagcacatttgaacatgcgcatgccattttgttttt

SEQ ID NO: 23455 - protein, 418 aa, Zea mays subsp. mays
  peptide (1)..(418): Ceres Seq. ID no. 12351923
  misc_feature (118)..(409): NCBI GI NO: 15217955 NR Description: unknown protein; protein id: At1g51560
  misc_feature (118)..(409): NCBI GI NO: 18377805 NR Description: unknown protein [Arabidopsis thaliana]
  misc_feature (129)..(403): NCBI GI NO: 34905136 NR Description: P0700D12.12
  misc_feature (140)..(405): NCBI GI NO: 15232479 NR Description: unknown protein; protein id: At3g21140
  misc_feature (140)..(405): NCBI GI NO: 11994274 NR Description: gb|AAF00629
  misc_feature (183)..(383): NCBI GI NO: 18396698 NR Description: auxin-regulated protein; protein id: At3g03890
  misc_feature (183)..(383): NCBI GI NO: 30678976 NR Description: auxin-regulated protein [Arabidopsis thaliana]
  misc_feature (183)..(323): NCBI GI NO: 6006853 NR Description: unknown protein [Arabidopsis thaliana]
  misc_feature (163)..(393): NCBI GI NO: 22962352 NR Description: hypothetical protein [Rhodopseudomonas palustris]
  misc_feature (166)..(383): NCBI GI NO: 34393557 NR Description: putative root border cell-specific protein
IPVHPSLSLPLLPFGLFFLPPMEALTARSSVLSPPGIAGDTSPSLPLPLRRASAAFLGPRRSPSALAISTRWLRAPPRRGGRLLAGEGEEVPPDPADDAAGRAEDFLVLENNVTLRQSNDMDTIKHDDAGTSGIGGSNTGGSRTGLFRTPISGGVHSATAVHDLPPPALAVRNLMEQARFAHLCTVMSRMHHRREGYPFGSLVDFAPDPFGHPIFSLSPLAIHTRNLLADPRCTLVVQVPGWSGLSNARVTIFGDVIPLPTEQQEWAHQQYVSKHQQWASQQWGNFYYYRMHTISDIYFIGGFGTVAWVDVNEYEALQPDKIAMDGGEQNLKELNAMFSKPLKELLSTDEGEVDDVALISMDSKGIDIRVRQGAQFNIQRVPFEVDHSVETLDEATEALRRIISKSRWHTKSSVIGRP

SEQ ID NO: 23456 - protein, 397 aa, Zea mays subsp. mays
  peptide (1)..(397): Ceres Seq. ID no. 12351924
  misc_feature (97)..(388): NCBI GI NO: 15217955 NR Description: unknown protein; protein id: At1g51560
  misc_feature (97)..(388): NCBI GI NO: 18377805 NR Description: unknown protein [Arabidopsis thaliana]
  misc_feature (108)..(382): NCBI GI NO: 34905136 NR Description: P0700D12.12
  misc_feature (119)..(384): NCBI GI NO: 15232479 NR Description: unknown protein; protein id: At3g21140
  misc_feature (119)..(384): NCBI GI NO: 11994274 NR Description: gb|AAF00629
  misc_feature (162)..(362): NCBI GI NO: 18396698 NR Description: auxin-regulated protein; protein id: At3g03890
  misc_feature (162)..(362): NCBI GI NO: 30678976 NR Description: auxin-regulated protein [Arabidopsis thaliana]
  misc_feature (162)..(302): NCBI GI NO: 6006853 NR Description: unknown protein [Arabidopsis thaliana]
  misc_feature (142)..(372): NCBI GI NO: 22962352 NR Description: hypothetical protein [Rhodopseudomonas palustris]
  misc_feature (145)..(362): NCBI GI NO: 34393557 NR Description: putative root border cell-specific protein
MEALTARSSVLSPPGIAGDTSPSLPLPLRRASAAFLGPRRSPSALAISTRWLRAPPRRGGRLLAGEGEEVPPDPADDAAGRAEDFLVLENNVTLRQSNDMDTIKHDDAGTSGIGGSNTGGSRTGLFRTPISGGVHSATAVHDLPPPALAVRNLMEQARFAHLCTVMSRMHHRREGYPFGSLVDFAPDPFGHPIFSLSPLAIHTRNLLADPRCTLVVQVPGWSGLSNARVTIFGDVIPLPTEQQEWAHQQYVSKHQQWASQQWGNFYYYRMHTISDIYFIGGFGTVAWVDVNEYEALQPDKIAMDGGEQNLKELNAMFSKPLKELLSTDEGEVDDVALISMDSKGIDIRVRQGAQFNIQRVPFEVDHSVETLDEATEALRRIISKSRWHTKSSVIGRP

SEQ ID NO: 23457 - protein, 298 aa, Zea mays subsp. mays
  peptide (1)..(298): Ceres Seq. ID no. 12351925
  misc_feature (1)..(289): NCBI GI NO: 15217955 NR Description: unknown protein; protein id: At1g51560
  misc_feature (1)..(289): NCBI GI NO: 18377805 NR Description: unknown protein [Arabidopsis thaliana]
  misc_feature (9)..(283): NCBI GI NO: 34905136 NR Description: P0700D12.12
  misc_feature (20)..(285): NCBI GI NO: 15232479 NR Description: unknown protein; protein id: At3g21140
  misc_feature (20)..(285): NCBI GI NO: 11994274 NR Description: gb|AAF00629
  misc_feature (63)..(263): NCBI GI NO: 18396698 NR Description: auxin-regulated protein; protein id: At3g03890
  misc_feature (63)..(263): NCBI GI NO: 30678976 NR Description: auxin-regulated protein [Arabidopsis thaliana]
  misc_feature (63)..(203): NCBI GI NO: 6006853 NR Description: unknown protein [Arabidopsis thaliana]
  misc_feature (43)..(273): NCBI GI NO: 22962352 NR Description: hypothetical protein [Rhodopseudomonas palustris]
  misc_feature (46)..(263): NCBI GI NO: 34393557 NR Description: putative root border cell-specific protein
MDTIKHDDAGTSGIGGSNTGGSRTGLFRTPISGGVHSATAVHDLPPPALAVRNLMEQARFAHLCTVMSRMHHRREGYPFGSLVDFAPDPFGHPIFSLSPLAIHTRNLLADPRCTLVVQVPGWSGLSNARVTIFGDVIPLPTEQQEWAHQQYVSKHQQWASQQWGNFYYYRMHTISDIYFIGGFGTVAWVDVNEYEALQPDKIAMDGGEQNLKELNAMFSKPLKELLSTDEGEVDDVALISMDSKGIDIRVRQGAQFNIQRVPFEVDHSVETLDEATEALRRIISKSRWHTKSSVIGRP

SEQ ID NO: 23458 - DNA, 1388 bp, Zea mays subsp. mays
  misc_feature (1)..(1388): Ceres Seq. ID no. 12588453
aacgcctcacgccatgcgactcgtcacggcctcggcgtgccgcctgcgtgcccggtgcccgtgcggccgtgacgaacgacactgacgagcaaagcaaagccaacggagccgagcgagacgacgagaccgcgattgctagctagctagttcgggcagcgagcggggtgagacggctatggcgtgctgctccgccgtcctgcaccatccgctgggcttctcactcaccccgtgctccgcctcccgagccccaccgcgcatccagcgcgtgggcgtggcaactccctcggccgcctccgcccgccctctttctcgcgccaggatctcaccgcgctgcacctactccggtggcgccagcgctgcccctggtcctggggagctacccgcggcggcgctccgacgggtccttgagatgccgggtgcgcaccaggcgcccgcctgctacgacgcgctgagcgcacgcctcgtcgagcgcgccgagttcagggcctgcttcacgagcggtttctcaatctctgccgcacggcttggattaccagatgttggtctcatctcgtacggggaaatgatcgatcaggggcgtctgatgactgaagcagtttcaatccctgtgatcggtgatgcggataatggttacggaaactgtatgaatgttaagaggacagtgaaaggatttattaatgctggttttgctggaattattcttgaagatcaggtgtcaccaaaggcatgtggacacacacaaggaaggaaggttgtctcaagggaggaagcaattatgcacataaaagctgctgttgatgccaggaatgagagtggctctgatattgttattgtggcaaggacagattctcgtcaagctgtgtctcttaatgaagcattatggagagtacgggcctttgctgatgctggagcagatgttctattcattgatgccctcgcctcaagggaagaaatgaaggcattttgcgctatcgcgcctggagttccaaaaatggccaacatgttagaaggtggtggtaaaactcctatactgagccctgttgaactggaagaaataggttataaaatcatagcctatccattatctctaattggtgtatcgatgcgtgcaatggagtttatggaggtgggctgcattggacaagctcgcatctggaaattgctgggtgtcttgaaccttttgggtgacagaaagttatctcatgtacaaaatgtttacacagcccagttgctaccaattgctgatttgtgtacttcttgggctttaccacttgcacggttcagaaacctgcactatgtaaggggatgttgatggcaattgacctcattttgtaaatgatcctcgtttatcttggattcatttttagtgttcagtttggcagttgacc

SEQ ID NO: 23459 - protein, 378 aa, Zea mays subsp. mays
  peptide (1)..(378): Ceres Seq. ID no. 12588454
  misc_feature (70)..(308): Pfam Name: Pfam Description:  Isocitrate lyase family
  misc_feature (1)..(314): NCBI GI NO: 32490267 NR Description: OSJNBb0116K07.9
  misc_feature (66)..(314): NCBI GI NO: 38347227 NR Description: OSJNBa0044M19.9
  misc_feature (1)..(314): NCBI GI NO: 30689278 NR Description: carboxyphosphonoenolpyruvate mutase -related
  misc_feature (1)..(314): NCBI GI NO: 30689282 NR Description: carboxyphosphonoenolpyruvate mutase -related
  misc_feature (1)..(314): NCBI GI NO: 25408843 NR Description: probable carboxyphosphonoenolpyruvate mutase
  misc_feature (73)..(313): NCBI GI NO: 23043034 NR Description: hypothetical protein
  misc_feature (73)..(309): NCBI GI NO: 17229355 NR Description: carboxyphosphonoenolpyruvate phosphonomutase
  misc_feature (71)..(305): NCBI GI NO: 33599708 NR Description: carboxyvinyl-carboxyphosphonate phosphorylmutase
  misc_feature (86)..(314): NCBI GI NO: 40747280 NR Description: hypothetical protein AN9369.2
  misc_feature (66)..(313): NCBI GI NO: 40739091 NR Description: hypothetical protein AN6882.2
MACCSAVLHHPLGFSLTPCSASRAPPRIQRVGVATPSAASARPLSRARISPRCTYSGGASAAPGPGELPAAALRRVLEMPGAHQAPACYDALSARLVERAEFRACFTSGFSISAARLGLPDVGLISYGEMIDQGRLMTEAVSIPVIGDADNGYGNCMNVKRTVKGFINAGFAGIILEDQVSPKACGHTQGRKVVSREEAIMHIKAAVDARNESGSDIVIVARTDSRQAVSLNEALWRVRAFADAGADVLFIDALASREEMKAFCAIAPGVPKMANMLEGGGKTPILSPVELEEIGYKIIAYPLSLIGVSMRAMEFMEVGCIGQARIWKLLGVLNLLGDRKLSHVQNVYTAQLLPIADLCTSWALPLARFRNLHYVRGC

SEQ ID NO: 23460 - protein, 300 aa, Zea mays subsp. mays
  peptide (1)..(300): Ceres Seq. ID no. 12588455
  misc_feature (1)..(230): Pfam Name: Pfam Description:  Isocitrate lyase family
  misc_feature (1)..(236): NCBI GI NO: 32490267 NR Description: OSJNBb0116K07.9
  misc_feature (1)..(236): NCBI GI NO: 38347227 NR Description: OSJNBa0044M19.9
  misc_feature (1)..(236): NCBI GI NO: 30689278 NR Description: carboxyphosphonoenolpyruvate mutase -related
  misc_feature (1)..(236): NCBI GI NO: 30689282 NR Description: carboxyphosphonoenolpyruvate mutase -related
  misc_feature (1)..(236): NCBI GI NO: 25408843 NR Description: probable carboxyphosphonoenolpyruvate mutase
  misc_feature (1)..(235): NCBI GI NO: 23043034 NR Description: hypothetical protein
  misc_feature (1)..(231): NCBI GI NO: 17229355 NR Description: carboxyphosphonoenolpyruvate phosphonomutase
  misc_feature (1)..(227): NCBI GI NO: 33599708 NR Description: carboxyvinyl-carboxyphosphonate phosphorylmutase
  misc_feature (8)..(236): NCBI GI NO: 40747280 NR Description: hypothetical protein AN9369.2
  misc_feature (1)..(235): NCBI GI NO: 40739091 NR Description: hypothetical protein AN6882.2
MPGAHQAPACYDALSARLVERAEFRACFTSGFSISAARLGLPDVGLISYGEMIDQGRLMTEAVSIPVIGDADNGYGNCMNVKRTVKGFINAGFAGIILEDQVSPKACGHTQGRKVVSREEAIMHIKAAVDARNESGSDIVIVARTDSRQAVSLNEALWRVRAFADAGADVLFIDALASREEMKAFCAIAPGVPKMANMLEGGGKTPILSPVELEEIGYKIIAYPLSLIGVSMRAMEFMEVGCIGQARIWKLLGVLNLLGDRKLSHVQNVYTAQLLPIADLCTSWALPLARFRNLHYVRGC

SEQ ID NO: 23461 - protein, 249 aa, Zea mays subsp. mays
  peptide (1)..(249): Ceres Seq. ID no. 12588456
  misc_feature (1)..(179): Pfam Name: Pfam Description:  Isocitrate lyase family
  misc_feature (1)..(185): NCBI GI NO: 32490267 NR Description: OSJNBb0116K07.9
  misc_feature (1)..(185): NCBI GI NO: 38347227 NR Description: OSJNBa0044M19.9
  misc_feature (1)..(185): NCBI GI NO: 30689278 NR Description: carboxyphosphonoenolpyruvate mutase -related
  misc_feature (1)..(185): NCBI GI NO: 30689282 NR Description: carboxyphosphonoenolpyruvate mutase -related
  misc_feature (1)..(185): NCBI GI NO: 25408843 NR Description: probable carboxyphosphonoenolpyruvate mutase
  misc_feature (1)..(184): NCBI GI NO: 23043034 NR Description: hypothetical protein
  misc_feature (1)..(180): NCBI GI NO: 17229355 NR Description: carboxyphosphonoenolpyruvate phosphonomutase
  misc_feature (1)..(176): NCBI GI NO: 33599708 NR Description: carboxyvinyl-carboxyphosphonate phosphorylmutase
  misc_feature (1)..(185): NCBI GI NO: 40747280 NR Description: hypothetical protein AN9369.2
  misc_feature (1)..(184): NCBI GI NO: 40739091 NR Description: hypothetical protein AN6882.2
MIDQGRLMTEAVSIPVIGDADNGYGNCMNVKRTVKGFINAGFAGIILEDQVSPKACGHTQGRKVVSREEAIMHIKAAVDARNESGSDIVIVARTDSRQAVSLNEALWRVRAFADAGADVLFIDALASREEMKAFCAIAPGVPKMANMLEGGGKTPILSPVELEEIGYKIIAYPLSLIGVSMRAMEFMEVGCIGQARIWKLLGVLNLLGDRKLSHVQNVYTAQLLPIADLCTSWALPLARFRNLHYVRGC

SEQ ID NO: 23462 - DNA, 1139 bp, Zea mays subsp. mays
  misc_feature (1)..(1139): Ceres Seq. ID no. 12341467
atatatagaatcttttaaaatgcaagggtgtcatactcgcagtcgcacagacaagtagataatcgctcgagccatcgagggccagcctgtgctgttggaagcgtggatgcggccgggctcagccgttgatcgttgcgcggtggccgtgagtcgtgtgactcgtgaccaaccaaaccgttcagctcccccatgacgtgtgcgtgacctcactctcagccagagatccacaaccggtgaaccgccgcgaatcctcggcctcgcatccgccggtggccgccgggggcgtggagcaccaacttttcacctgctgtgagacccccactcacctccacggaagcacacacccgaagaagaagagaaggcgagaaccatggcgccacctgccgtgtccatctcgcccatctgctgcgtcccataccccgcctccggcccccgtcgcgctcgcacgcccccctcctccctcagaaggttccccagattcgcagcccggaggagtagcgggggcggcgggggcacgcgcccggagcccaaaccagatgacaacgagagcaaagccgtcctcgacgccttcttcctcgggaaggccttcgcagaggcgctcacggagcgggtcgagtcggtggtgggcgaggtgttcagcgtcgtcgggcagtggcaggccgagcagcagaagcaagtgcaggatttccaggaggaagtagttcaaagagcccaaaaggctaaggagaaagctgcaactgaagtcagtgatgataagggggcgaagtctctaagggaaccttcagcaacaattgtggcgactacaactacgtcatctcccccagctactcccacacagacagaatagttgtagacttcttggtggcagtgaagagttgttgctgcaagttgatgcagttctttgtgcagccaaaaagtctgtagttggctttcacatgatatatgtcgatggatagtatatctgctagtgaaacatccagcatttctagtgacaaacccagcatctcaattataaaaaaaaactaatttacatttttttcatatgaatggaagtactttttgcatctagtgcgttctggtatatgtgtaatatatgttatatgccattcttaagaaatgcagcttcaaaaaccttgggt

SEQ ID NO: 23463 - protein, 158 aa, Zea mays subsp. mays
  peptide (1)..(158): Ceres Seq. ID no. 12341468
  misc_feature (57)..(155): NCBI GI NO: 15235625 NR Description: putative protein; protein id: At4g13200
  misc_feature (57)..(155): NCBI GI NO: 21553912 NR Description: unknown [Arabidopsis thaliana]
  misc_feature (60)..(144): NCBI GI NO: 17232006 NR Description: hypothetical protein [Nostoc sp. PCC 7120]
MAPPAVSISPICCVPYPASGPRRARTPPSSLRRFPRFAARRSSGGGGGTRPEPKPDDNESKAVLDAFFLGKAFAEALTERVESVVGEVFSVVGQWQAEQQKQVQDFQEEVVQRAQKAKEKAATEVSDDKGAKSLREPSATIVATTTTSSPPATPTQTE

SEQ ID NO: 23464 - DNA, 1399 bp, Zea mays subsp. mays
  misc_feature (1)..(1399): Ceres Seq. ID no. 12411002
atcactagaacgttttccttattcgtccctctcaattgggcggatagtttcatcctccgcgggacaaggcccctcacgatcccttctcatcctcgtcctcagatccgcctccttcaccccactggtcggcgagcagcaaaatccattcaccccactggccggcgagcagcaaactccattcaccccactagcaggcgagcagcaaactggagatctcgtcctcacgagcgctttggtaattggtcgtatagtccctcatcatcggaatggtggggtcacttatctttcactcacctaatgtggatccgaaggcagagaatcctaatgagatggttacagctggtgtgctttcaagccttcagaatttcctacgcaagtgcctcatagctatcctctcatatggcccaatgccgaagcacattgcatttattatggatggcaatcgtcgatatgctaaattcagaagcatgcaagaaggagctggtcacaggatgggtttctctacccttattgcaagtctgatgtactgctatgaaatgggtgtgaagtacatcactgtctacgcattcagcatcgacaattttaaaagggacccaagtgaggtggaatccttgatgcagttaatggaggaaaaaatcaacgaactcttagagaaccaaagtgtaatcaacaagattaactgtaagatcaacttttggggtaacttggacttgttatatgagccggtgcggttggcggctgagaagctgatggcgagcacagctgggaacacagggctggtcttttctatctgcatgccatacaactcgacttctgagattgtcaatgctgtcagtcaagtctgtgcggaaaggatggaaatgtttcagagcgaacatattggcgaatgcaatggtcatgctgcaaataacggtgtgcgatcagagatttcagtggcggatttggatcgccacatgtatagtgccgaatgcccagatcctgatattgtcatccggacttcgggcgagactcgattgagcaatttcctcctttggcagacaacgtttagtcacttgcagaatccagatcctctgtggcccgagttctcttttaggcaccttgtttgggctatcttgcagtatcagagagtttaccctgctctggagcataacagaaagttggctaagaagcagttgtgattccatgttatttgcaaggaggtatcatgaagggctattaacatcaaacttttccttctcaatttcccggtaatgggaaatgcaaagaacatactagcatataacattatgaatagatcaccatgtaacttaagtgtgattgctaccataaccatgtaacttatttgagctcgtacaaatgctgtgattcctaaatatatatatatagagtgcccggggtg

SEQ ID NO: 23465 - protein, 303 aa, Zea mays subsp. mays
  peptide (1)..(303): Ceres Seq. ID no. 12411003
  misc_feature (55)..(293): Pfam Name: Pfam Description:  Putative undecaprenyl diphosphate synthase
  misc_feature (1)..(303): NCBI GI NO: 34898408 NR Description: ESTs C72761
  misc_feature (27)..(297): NCBI GI NO: 23491567 NR Description: cis-prenyltransferase [Periploca sepium]
  misc_feature (27)..(297): NCBI GI NO: 18398467 NR Description: undecaprenyl pyrophosphate synthetase
  misc_feature (27)..(297): NCBI GI NO: 20336659 NR Description: hypothetical protein [Arabidopsis thaliana]
  misc_feature (46)..(297): NCBI GI NO: 25314045 NR Description: hypothetical protein At2g17570
  misc_feature (27)..(300): NCBI GI NO: 16751461 NR Description: cis-prenyltransferase [Hevea brasiliensis]
  misc_feature (27)..(300): NCBI GI NO: 22213587 NR Description: cis-prenyltransferase 2 [Hevea brasiliensis]
  misc_feature (27)..(300): NCBI GI NO: 16751459 NR Description: cis-prenyltransferase [Hevea brasiliensis]
  misc_feature (27)..(300): NCBI GI NO: 22213585 NR Description: cis-prenyltransferase 1 [Hevea brasiliensis]
  misc_feature (27)..(300): NCBI GI NO: 20563022 NR Description: cis-prenyltransferase2 [Hevea brasiliensis]
MVGSLIFHSPNVDPKAENPNEMVTAGVLSSLQNFLRKCLIAILSYGPMPKHIAFIMDGNRRYAKFRSMQEGAGHRMGFSTLIASLMYCYEMGVKYITVYAFSIDNFKRDPSEVESLMQLMEEKINELLENQSVINKINCKINFWGNLDLLYEPVRLAAEKLMASTAGNTGLVFSICMPYNSTSEIVNAVSQVCAERMEMFQSEHIGECNGHAANNGVRSEISVADLDRHMYSAECPDPDIVIRTSGETRLSNFLLWQTTFSHLQNPDPLWPEFSFRHLVWAILQYQRVYPALEHNRKLAKKQL

SEQ ID NO: 23466 - protein, 282 aa, Zea mays subsp. mays
  peptide (1)..(282): Ceres Seq. ID no. 12411004
  misc_feature (34)..(272): Pfam Name: Pfam Description:  Putative undecaprenyl diphosphate synthase
  misc_feature (1)..(282): NCBI GI NO: 34898408 NR Description: ESTs C72761
  misc_feature (6)..(276): NCBI GI NO: 23491567 NR Description: cis-prenyltransferase [Periploca sepium]
  misc_feature (6)..(276): NCBI GI NO: 18398467 NR Description: undecaprenyl pyrophosphate synthetase
  misc_feature (6)..(276): NCBI GI NO: 20336659 NR Description: hypothetical protein [Arabidopsis thaliana]
  misc_feature (25)..(276): NCBI GI NO: 25314045 NR Description: hypothetical protein At2g17570
  misc_feature (6)..(279): NCBI GI NO: 16751461 NR Description: cis-prenyltransferase [Hevea brasiliensis]
  misc_feature (6)..(279): NCBI GI NO: 22213587 NR Description: cis-prenyltransferase 2 [Hevea brasiliensis]
  misc_feature (6)..(279): NCBI GI NO: 16751459 NR Description: cis-prenyltransferase [Hevea brasiliensis]
  misc_feature (6)..(279): NCBI GI NO: 22213585 NR Description: cis-prenyltransferase 1 [Hevea brasiliensis]
  misc_feature (6)..(279): NCBI GI NO: 20563022 NR Description: cis-prenyltransferase2 [Hevea brasiliensis]
MVTAGVLSSLQNFLRKCLIAILSYGPMPKHIAFIMDGNRRYAKFRSMQEGAGHRMGFSTLIASLMYCYEMGVKYITVYAFSIDNFKRDPSEVESLMQLMEEKINELLENQSVINKINCKINFWGNLDLLYEPVRLAAEKLMASTAGNTGLVFSICMPYNSTSEIVNAVSQVCAERMEMFQSEHIGECNGHAANNGVRSEISVADLDRHMYSAECPDPDIVIRTSGETRLSNFLLWQTTFSHLQNPDPLWPEFSFRHLVWAILQYQRVYPALEHNRKLAKKQL

SEQ ID NO: 23467 - protein, 256 aa, Zea mays subsp. mays
  peptide (1)..(256): Ceres Seq. ID no. 12411005
  misc_feature (8)..(246): Pfam Name: Pfam Description:  Putative undecaprenyl diphosphate synthase
  misc_feature (1)..(256): NCBI GI NO: 34898408 NR Description: ESTs C72761
  misc_feature (1)..(250): NCBI GI NO: 23491567 NR Description: cis-prenyltransferase [Periploca sepium]
  misc_feature (1)..(250): NCBI GI NO: 18398467 NR Description: undecaprenyl pyrophosphate synthetase
  misc_feature (1)..(250): NCBI GI NO: 20336659 NR Description: hypothetical protein [Arabidopsis thaliana]
  misc_feature (1)..(250): NCBI GI NO: 25314045 NR Description: hypothetical protein At2g17570
  misc_feature (1)..(253): NCBI GI NO: 16751461 NR Description: cis-prenyltransferase [Hevea brasiliensis]
  misc_feature (1)..(253): NCBI GI NO: 22213587 NR Description: cis-prenyltransferase 2 [Hevea brasiliensis]
  misc_feature (1)..(253): NCBI GI NO: 16751459 NR Description: cis-prenyltransferase [Hevea brasiliensis]
  misc_feature (1)..(253): NCBI GI NO: 22213585 NR Description: cis-prenyltransferase 1 [Hevea brasiliensis]
  misc_feature (1)..(253): NCBI GI NO: 20563022 NR Description: cis-prenyltransferase2 [Hevea brasiliensis]
MPKHIAFIMDGNRRYAKFRSMQEGAGHRMGFSTLIASLMYCYEMGVKYITVYAFSIDNFKRDPSEVESLMQLMEEKINELLENQSVINKINCKINFWGNLDLLYEPVRLAAEKLMASTAGNTGLVFSICMPYNSTSEIVNAVSQVCAERMEMFQSEHIGECNGHAANNGVRSEISVADLDRHMYSAECPDPDIVIRTSGETRLSNFLLWQTTFSHLQNPDPLWPEFSFRHLVWAILQYQRVYPALEHNRKLAKKQL

SEQ ID NO: 23468 - DNA, 1269 bp, Zea mays subsp. mays
  misc_feature (1)..(1269): Ceres Seq. ID no. 12374235
gacggccacagagagaaacgttgagacagggagagagagagagagagcgagctccacgcctccacgctccactacaccagccaggcagcagcccccaacgactggctcgccgctcgcgagaacccgagtctatttctgcacgcgcttccaggttttagctgcagcggcatcagggcagggagagagcgatagttctgttctactgcaggaagagcagggagcaagatggggtccggatctttcctcaaggtgctggccaataacttcgatgtccttgccgggccactcatatcacttgcttatcctctatatgcttctgttagagctatagagacaaaaaatcctgtagatgatcagcagtggctcacttactgggtgttgtactcatttatcactttgtttgagctaacttttgctccaattatcgagtggcttccattttggtcgtatgcaaagctgttctttaactgctggttggtcttgccttggttcaatggtgctgcctatgtttacgaccattttgtgcggccaatgtttgtgaaccgccaaatagtgaacatatggtatattccaagaaatgagaagctaggtaaatctgatgatgttctgtcagctgcagagagatatattgaacaaaacggaccagaagcatttgagaagctcatcagcaagtctacgaagtcttcgaagtcaaggaacacaaagcggttgaacttggaggatggagaggctgaaaatcgagctaaagccgagagagaatcgtggggcgaaaatcccttctacgacaaaaactacagatactaaaccagttcaaaatccactcagcagtttgaagatgaccttgctcacgagcctcatgcaagctttagttgcgtcggaccgaagacgacattcccatatttctgactctgaatattgtaccttgttacatccactgctactacataatgatgagttctagagcaattgtggactgtgtaaatggaggtagatgctagcgttaatcgtttatgtgctttttggatggtgtccttatcacccgttttactacatctttagcaaggagcgagccttgattttcagtttggctttcgtatttttgtaattgaatgctacttttagataactgaaatatgagggagttcgagcttctaggaagaaacttaacatgtgctattgcatcgagtgccaacaacgttatcatcgtcacaatttttgtacagggctcttctacaataacttgagtaacccgttcatttcggctggttt

SEQ ID NO: 23469 - protein, 192 aa, Zea mays subsp. mays
  peptide (1)..(192): Ceres Seq. ID no. 12374236
  misc_feature (7)..(104): Pfam Name: Pfam Description:  TB2/DP1, HVA22 family
  misc_feature (2)..(155): NCBI GI NO: 15221266 NR Description: AtHVA22a; protein id: At1g74520
  misc_feature (1)..(163): NCBI GI NO: 15222421 NR Description: AtHVA22c; protein id: At1g69700
  misc_feature (2)..(155): NCBI GI NO: 4884934 NR Description: AtHVA22b [Arabidopsis thaliana]
  misc_feature (2)..(155): NCBI GI NO: 15241840 NR Description: AtHVA22b-like protein; protein id: At5g62490
  misc_feature (32)..(155): NCBI GI NO: 34910810 NR Description: P0042A10.34
  misc_feature (17)..(104): NCBI GI NO: 18423191 NR Description: putative protein; protein id: At5g50720
  misc_feature (10)..(101): NCBI GI NO: 1076715 NR Description: abscisic acid-induced protein HVA22 - barley
  misc_feature (18)..(104): NCBI GI NO: 18416458 NR Description: abscisic acid-induced - like protein
  misc_feature (10)..(101): NCBI GI NO: 33342176 NR Description: hypothetical protein [Triticum aestivum]
  misc_feature (24)..(104): NCBI GI NO: 8777395 NR Description: gene_id:MFB16
MGSGSFLKVLANNFDVLAGPLISLAYPLYASVRAIETKNPVDDQQWLTYWVLYSFITLFELTFAPIIEWLPFWSYAKLFFNCWLVLPWFNGAAYVYDHFVRPMFVNRQIVNIWYIPRNEKLGKSDDVLSAAERYIEQNGPEAFEKLISKSTKSSKSRNTKRLNLEDGEAENRAKAERESWGENPFYDKNYRY

SEQ ID NO: 23470 - protein, 109 aa, Zea mays subsp. mays
  peptide (1)..(109): Ceres Seq. ID no. 12374237
TATERNVETGRERERASSTPPRSTTPARQQPPTTGSPLARTRVYFCTRFQVLAAAASGQGESDSSVLLQEEQGARWGPDLSSRCWPITSMSLPGHSYHLLILYMLLLEL

SEQ ID NO: 23471 - DNA, 1231 bp, Zea mays subsp. mays
  misc_feature (1)..(1231): Ceres Seq. ID no. 12410989
attggtttcgccaaaaacctcaccggctccattcgaccattccatcctttccttatcccctcccacttcgtctcccttcctggcttcctttcttcgccatggcaaccatgtccctccgctccctcgccatggccatggccgacaccgcgctcccgcccgcccacaagctcctccccacagtttccctcccgctcctctcctcgtccacccgcgccgcgccgctcctcctcttcgccaggcgccgcctgccgctcgcgcccctcgttacctcctccgacgccgttgaggccaagtcggcagacgaggaggaggagaaggccggagagcccgtcgacatggaagctggggagtttgaggaggtgctagcctcaggcggcgagggtgaggggcagtacgctgcggtggagccgccagaggaggccaaggtctacgttgggaaccttccctacgacgtcgacagcgagggactcgcgcagatcttcgaccaggccggcgtcgtcgaggtcgccgaggttatctacaacagagaaactggccagagccgtgggtttggctttgttaccatgagcactgttgaggaagctgacaaagccattgagatgttcaaccgctatgatattagcgggaggcttctgaatgtaaacagggcatcttctaggggcactcgcatggaaagacctcagagacaatttgcaccagctttcagagcttatgttggcaacttgccatggcaagttgatgactctaggctggtgcagttgttcagcgagcatggagaagttgttgatgctaaggttgtctacgacagagaaactgggcgctcacgaggattcggttttgtatcaatggtgtcaaaggaggaactcaatgatgctatttcggccctagatggacaggaattggacggccgccctcttcgagtgaatgttgcagcagagcggccacagaggggcttttgatgcggttgtatgagagagatgactgcttgtttgtaatgagcatggagacacagagacacaatggactgaatggaggagcaatggtacaaattagcggaagcggatgctgtcacaagttgctagatctttctcccttagcttcttgacatttggttcttgccacagctttttgatgcttctcttggcagctggacttaatgttttgctattcttgtcgacatcacgagttgaattgtcaaactagtctcttatgttctatgctgatatgcctt

SEQ ID NO: 23472 - protein, 318 aa, Zea mays subsp. mays
  peptide (1)..(318): Ceres Seq. ID no. 12410990
  misc_feature (142)..(213): Pfam Name: a.k.a. RRM, RBD, or RNP domain Pfam Description: RNA recognition motif.
  misc_feature (33)..(318): NCBI GI NO: 7446359 NR Description: nucleic acid-binding protein - barley
  misc_feature (32)..(318): NCBI GI NO: 7446356 NR Description: Ps16 protein - wheat
  misc_feature (32)..(318): NCBI GI NO: 7446358 NR Description: cp31AHv protein - barley
  misc_feature (102)..(318): NCBI GI NO: 100903 NR Description: nucleic acid-binding protein - maize
  misc_feature (91)..(316): NCBI GI NO: 19032260 NR Description: RNA-binding protein precursor [Persea americana]
  misc_feature (29)..(316): NCBI GI NO: 133248 NR Description: 31 kDa ribonucleoprotein, chloroplast precursor
  misc_feature (33)..(316): NCBI GI NO: 133246 NR Description: 28 kDa ribonucleoprotein, chloroplast precursor
  misc_feature (60)..(318): NCBI GI NO: 681908 NR Description: cp31 [Arabidopsis thaliana]
  misc_feature (60)..(318): NCBI GI NO: 1076305 NR Description: RNA-binding protein cp31 precursor
  misc_feature (47)..(318): NCBI GI NO: 629557 NR Description: RNA-binding protein RNP-D precursor
WFRQKPHRLHSTIPSFPYPLPLRLPSWLPFFAMATMSLRSLAMAMADTALPPAHKLLPTVSLPLLSSSTRAAPLLLFARRRLPLAPLVTSSDAVEAKSADEEEEKAGEPVDMEAGEFEEVLASGGEGEGQYAAVEPPEEAKVYVGNLPYDVDSEGLAQIFDQAGVVEVAEVIYNRETGQSRGFGFVTMSTVEEADKAIEMFNRYDISGRLLNVNRASSRGTRMERPQRQFAPAFRAYVGNLPWQVDDSRLVQLFSEHGEVVDAKVVYDRETGRSRGFGFVSMVSKEELNDAISALDGQELDGRPLRVNVAAERPQRGF

SEQ ID NO: 23473 - protein, 286 aa, Zea mays subsp. mays
  peptide (1)..(286): Ceres Seq. ID no. 12410991
  misc_feature (110)..(181): Pfam Name: a.k.a. RRM, RBD, or RNP domain Pfam Description: RNA recognition motif.
  misc_feature (1)..(286): NCBI GI NO: 7446359 NR Description: nucleic acid-binding protein - barley
  misc_feature (1)..(286): NCBI GI NO: 7446356 NR Description: Ps16 protein - wheat
  misc_feature (1)..(286): NCBI GI NO: 7446358 NR Description: cp31AHv protein - barley
  misc_feature (70)..(286): NCBI GI NO: 100903 NR Description: nucleic acid-binding protein - maize
  misc_feature (59)..(284): NCBI GI NO: 19032260 NR Description: RNA-binding protein precursor [Persea americana]
  misc_feature (1)..(284): NCBI GI NO: 133248 NR Description: 31 kDa ribonucleoprotein, chloroplast precursor
  misc_feature (1)..(284): NCBI GI NO: 133246 NR Description: 28 kDa ribonucleoprotein, chloroplast precursor
  misc_feature (28)..(286): NCBI GI NO: 681908 NR Description: cp31 [Arabidopsis thaliana]
  misc_feature (28)..(286): NCBI GI NO: 1076305 NR Description: RNA-binding protein cp31 precursor
  misc_feature (15)..(286): NCBI GI NO: 629557 NR Description: RNA-binding protein RNP-D precursor
MATMSLRSLAMAMADTALPPAHKLLPTVSLPLLSSSTRAAPLLLFARRRLPLAPLVTSSDAVEAKSADEEEEKAGEPVDMEAGEFEEVLASGGEGEGQYAAVEPPEEAKVYVGNLPYDVDSEGLAQIFDQAGVVEVAEVIYNRETGQSRGFGFVTMSTVEEADKAIEMFNRYDISGRLLNVNRASSRGTRMERPQRQFAPAFRAYVGNLPWQVDDSRLVQLFSEHGEVVDAKVVYDRETGRSRGFGFVSMVSKEELNDAISALDGQELDGRPLRVNVAAERPQRGF

SEQ ID NO: 23474 - protein, 283 aa, Zea mays subsp. mays
  peptide (1)..(283): Ceres Seq. ID no. 12410992
  misc_feature (107)..(178): Pfam Name: a.k.a. RRM, RBD, or RNP domain Pfam Description: RNA recognition motif.
  misc_feature (1)..(283): NCBI GI NO: 7446359 NR Description: nucleic acid-binding protein - barley
  misc_feature (1)..(283): NCBI GI NO: 7446356 NR Description: Ps16 protein - wheat
  misc_feature (1)..(283): NCBI GI NO: 7446358 NR Description: cp31AHv protein - barley
  misc_feature (67)..(283): NCBI GI NO: 100903 NR Description: nucleic acid-binding protein - maize
  misc_feature (56)..(281): NCBI GI NO: 19032260 NR Description: RNA-binding protein precursor [Persea americana]
  misc_feature (1)..(281): NCBI GI NO: 133248 NR Description: 31 kDa ribonucleoprotein, chloroplast precursor
  misc_feature (1)..(281): NCBI GI NO: 133246 NR Description: 28 kDa ribonucleoprotein, chloroplast precursor
  misc_feature (25)..(283): NCBI GI NO: 681908 NR Description: cp31 [Arabidopsis thaliana]
  misc_feature (25)..(283): NCBI GI NO: 1076305 NR Description: RNA-binding protein cp31 precursor
  misc_feature (12)..(283): NCBI GI NO: 629557 NR Description: RNA-binding protein RNP-D precursor
MSLRSLAMAMADTALPPAHKLLPTVSLPLLSSSTRAAPLLLFARRRLPLAPLVTSSDAVEAKSADEEEEKAGEPVDMEAGEFEEVLASGGEGEGQYAAVEPPEEAKVYVGNLPYDVDSEGLAQIFDQAGVVEVAEVIYNRETGQSRGFGFVTMSTVEEADKAIEMFNRYDISGRLLNVNRASSRGTRMERPQRQFAPAFRAYVGNLPWQVDDSRLVQLFSEHGEVVDAKVVYDRETGRSRGFGFVSMVSKEELNDAISALDGQELDGRPLRVNVAAERPQRGF

SEQ ID NO: 23475 - DNA, 1341 bp, Zea mays subsp. mays
  misc_feature (1)..(1341): Ceres Seq. ID no. 12405842
acccgaaattccaaacccacttcgtcaagcaacaacaccggctaaaaattaaaggaggcagcgcgtagcagttggtcgccaccgtcacgtacacacgctcacgttggaggctggactccgcccccgtgctgctcttcgccttgcctttctccgccggagaccccgccgcctcagctgccacaggaggaggaggcaaccatggcggggaggtacgaccgcaatccgttcgaggaggatgacgtcaacccctttgcgggaggaagtgtacctcctgcttctaattctcggatgtcagcacttcctcatgaaccagctggcttctacaatgatcgtggtgcaacagtggacatacctcttgattcaacgaaggacctaagtaaaaaggagaaagaactgcaggcaaaggaagctgagctaaacaaacgggaaagggagctgaaaagaaaggaggaagctgcagccagagctggtattgtcattgaagataagaattggccaccctttatgcccattattcatcatgacatttcgaacgagataccaattcacctgcaaaggatgcagtacctggcgttttcttcactattgggattgacagcttgcctcttttggaacatcattgcaactacagcagcatggattaaatcagaaggtgtcatgatctggttgctagcaatcatctacttcatctctggtgtccctggggcctatgtgctttggtatcgcccgctttacaatgcgatgaggactgaaagtgctttgaagtttgggtggtttttcttgttttaccttctccatatcttattctgtgtctggtcagctgtggctcctccatttccattcaaaggaaaatccttggctgggattttgccggctattgatatcataggcaggagtgctattgtggggatattttacttcattggatttggaatgttctgccttgaatcactgctcagcatcgttgtcattcagcaagtatacatgtacttccgtggaagtggaaaagctgcagagatgaagcgagaggcggcccgtgggtgctatgaggaatgccttttgatagagcgacctaggcgactggaagagacacggtgtgacaatgggtaactacgttatgtacatatgctgttcgtctctgagattacttatactagcttatagccttcttgccttcatgcaatgtataccacctaccaccggagcttgatctcttacctaggttcagatgtgcttataggtaactagttttttttatacatttcctacatgatttgtactcttaactcgcgagacaattgttgttgttctttggatctcgagtgattctttgcacggccc

SEQ ID NO: 23476 - protein, 303 aa, Zea mays subsp. mays
  peptide (1)..(303): Ceres Seq. ID no. 12405843
  misc_feature (95)..(269): Pfam Name: Pfam Description:  SCAMP family
  misc_feature (1)..(281): NCBI GI NO: 7109232 NR Description: secretory carrier membrane protein [Oryza sativa]
  misc_feature (1)..(281): NCBI GI NO: 15219893 NR Description: secretory carrier membrane protein
  misc_feature (22)..(281): NCBI GI NO: 34899754 NR Description: putative secretory carrier membrane protein
  misc_feature (1)..(281): NCBI GI NO: 15220305 NR Description: secretory carrier membrane protein, putative
  misc_feature (4)..(280): NCBI GI NO: 15226410 NR Description: putative secretory carrier-associated membraneprotein
  misc_feature (1)..(281): NCBI GI NO: 3941289 NR Description: similarity to SCAMP37 [Pisum sativum]
  misc_feature (4)..(280): NCBI GI NO: 18379111 NR Description: expressed protein; protein id: At1g03550
  misc_feature (1)..(281): NCBI GI NO: 25402653 NR Description: hypothetical protein
  misc_feature (1)..(268): NCBI GI NO: 15222550 NR Description: secretory carrier membrane protein, putative
  misc_feature (5)..(268): NCBI GI NO: 38347080 NR Description: OSJNBa0006A01.21
MAGRYDRNPFEEDDVNPFAGGSVPPASNSRMSALPHEPAGFYNDRGATVDIPLDSTKDLSKKEKELQAKEAELNKRERELKRKEEAAARAGIVIEDKNWPPFMPIIHHDISNEIPIHLQRMQYLAFSSLLGLTACLFWNIIATTAAWIKSEGVMIWLLAIIYFISGVPGAYVLWYRPLYNAMRTESALKFGWFFLFYLLHILFCVWSAVAPPFPFKGKSLAGILPAIDIIGRSAIVGIFYFIGFGMFCLESLLSIVVIQQVYMYFRGSGKAAEMKREAARGCYEECLLIERPRRLEETRCDNG

SEQ ID NO: 23477 - protein, 273 aa, Zea mays subsp. mays
  peptide (1)..(273): Ceres Seq. ID no. 12405844
  misc_feature (65)..(239): Pfam Name: Pfam Description:  SCAMP family
  misc_feature (1)..(251): NCBI GI NO: 7109232 NR Description: secretory carrier membrane protein [Oryza sativa]
  misc_feature (1)..(251): NCBI GI NO: 15219893 NR Description: secretory carrier membrane protein
  misc_feature (1)..(251): NCBI GI NO: 34899754 NR Description: putative secretory carrier membrane protein
  misc_feature (1)..(251): NCBI GI NO: 15220305 NR Description: secretory carrier membrane protein, putative
  misc_feature (1)..(250): NCBI GI NO: 15226410 NR Description: putative secretory carrier-associated membraneprotein
  misc_feature (1)..(251): NCBI GI NO: 3941289 NR Description: similarity to SCAMP37 [Pisum sativum]
  misc_feature (1)..(250): NCBI GI NO: 18379111 NR Description: expressed protein; protein id: At1g03550
  misc_feature (1)..(251): NCBI GI NO: 25402653 NR Description: hypothetical protein
  misc_feature (1)..(238): NCBI GI NO: 15222550 NR Description: secretory carrier membrane protein, putative
  misc_feature (1)..(238): NCBI GI NO: 38347080 NR Description: OSJNBa0006A01.21
MSALPHEPAGFYNDRGATVDIPLDSTKDLSKKEKELQAKEAELNKRERELKRKEEAAARAGIVIEDKNWPPFMPIIHHDISNEIPIHLQRMQYLAFSSLLGLTACLFWNIIATTAAWIKSEGVMIWLLAIIYFISGVPGAYVLWYRPLYNAMRTESALKFGWFFLFYLLHILFCVWSAVAPPFPFKGKSLAGILPAIDIIGRSAIVGIFYFIGFGMFCLESLLSIVVIQQVYMYFRGSGKAAEMKREAARGCYEECLLIERPRRLEETRCDNG

SEQ ID NO: 23478 - protein, 201 aa, Zea mays subsp. mays
  peptide (1)..(201): Ceres Seq. ID no. 12405845
  misc_feature (1)..(167): Pfam Name: Pfam Description:  SCAMP family
  misc_feature (1)..(179): NCBI GI NO: 7109232 NR Description: secretory carrier membrane protein [Oryza sativa]
  misc_feature (1)..(179): NCBI GI NO: 15219893 NR Description: secretory carrier membrane protein
  misc_feature (1)..(179): NCBI GI NO: 34899754 NR Description: putative secretory carrier membrane protein
  misc_feature (1)..(179): NCBI GI NO: 15220305 NR Description: secretory carrier membrane protein, putative
  misc_feature (1)..(178): NCBI GI NO: 15226410 NR Description: putative secretory carrier-associated membraneprotein
  misc_feature (1)..(179): NCBI GI NO: 3941289 NR Description: similarity to SCAMP37 [Pisum sativum]
  misc_feature (1)..(178): NCBI GI NO: 18379111 NR Description: expressed protein; protein id: At1g03550
  misc_feature (1)..(179): NCBI GI NO: 25402653 NR Description: hypothetical protein
  misc_feature (1)..(166): NCBI GI NO: 15222550 NR Description: secretory carrier membrane protein, putative
  misc_feature (1)..(166): NCBI GI NO: 38347080 NR Description: OSJNBa0006A01.21
MPIIHHDISNEIPIHLQRMQYLAFSSLLGLTACLFWNIIATTAAWIKSEGVMIWLLAIIYFISGVPGAYVLWYRPLYNAMRTESALKFGWFFLFYLLHILFCVWSAVAPPFPFKGKSLAGILPAIDIIGRSAIVGIFYFIGFGMFCLESLLSIVVIQQVYMYFRGSGKAAEMKREAARGCYEECLLIERPRRLEETRCDNG

SEQ ID NO: 23479 - DNA, 1380 bp, Zea mays subsp. mays
  misc_feature (1)..(1380): Ceres Seq. ID no. 12412233
atcaaaggcgtaaactcggcgtagacggagactgcagacgcccggaccacaggaacaccgaagtaccgaacactaccggccacacgctcgagaataggcggcggtgcaggtcctcctccatctctgtcgtgggttcaacttcactgtgaatacgctgacgctacgagaagtcatcacggaaggggtctcgaagcaaggtgcaaagactcacctgccgtctctgatgggctttgctggctgggtatccatgctgctcttcctcctggtcgccggtgctgtagcaaatgaccagatcttcaccacttcaggtgtgccatttgggcggagttcgcgtgagccaagttaccgcgtcgaattccatcctgttgattcaccattccatccagagaatggtcaagaatcggtaccaatggctagtcatgatgggaaacgttataaatgctttctaccagttgaagaaactaaaaccatgaagtcaatgcttccgcaaaatgcaactaatgttataatagaaagtgaaaggagaattaagccaaaggagccagatgagttacttgaggttctcaaggaccagtgcttctacaggcatgaaggttggtggtcgtatgaattctgttatcatgggaaaatcagacaggtccatgtagacgacgataaggttatccaagaatttgttctaggcgaattcgatgacgacgcgactgctgcataccatgaaaatatcacttctgagttagttgacgatgaccatcatgtgaaagatatatctcagaggtatcatgttcacttgtatacaaatgggactgtatgcgatctcacagatattccgcgggagacagaggttagatttgtctgctcggagcctactgtactgattagttcagtcaaggagatctcttcctgcagatatgttgtaacgattcaaagtcccatgctttgcaaaaacccgttattccaggaagaaaaacgaaccctctccatccactgcaatgagttgcctgctagagcggaatccagcgcggaggatgactcgcttccaaaagaagctcagatttccatcatccccgatcaggatgagctacatgatttcccagcctatgctacttgatttgcctccaataattatgtttgatgtagaaaaaaaaacaccattttggaggcgcaggggcaacttagcaacactatgtattaactatctcgtagatactacagcagaggctccttgtaaagcaggttgagacgatcattctgcagttcttattatataggatgattacgaaggtaacatgtttgggacagtaacatttgcttgaaatgtatatagtctacaacaagaataatgccagcattcttgaaatgtaggtgtgcgagcacttttac

SEQ ID NO: 23480 - protein, 294 aa, Zea mays subsp. mays
  peptide (1)..(294): Ceres Seq. ID no. 12412234
  misc_feature (9)..(282): NCBI GI NO: 18421420 NR Description: putative protein; protein id: At5g35080
  misc_feature (9)..(282): NCBI GI NO: 21592392 NR Description: unknown [Arabidopsis thaliana]
  misc_feature (47)..(258): NCBI GI NO: 28850402 NR Description: similar to Arabidopsis thaliana (Mouse-ear cress)
  misc_feature (7)..(245): NCBI GI NO: 12653521 NR Description: Similar to amplified in osteosarcoma
  misc_feature (7)..(245): NCBI GI NO: 5803109 NR Description: amplified in osteosarcoma [Homo sapiens]
  misc_feature (164)..(242): NCBI GI NO: 7487985 NR Description: hypothetical protein F7N22
  misc_feature (41)..(255): NCBI GI NO: 21483540 NR Description: RE67845p [Drosophila melanogaster]
  misc_feature (63)..(147): NCBI GI NO: 7487985 NR Description: hypothetical protein F7N22
  misc_feature (41)..(255): NCBI GI NO: 24583799 NR Description: CG6766-PA [Drosophila melanogaster]
  misc_feature (7)..(245): NCBI GI NO: 29243990 NR Description: hypothetical protein 1300007E20 [Mus musculus]
MGFAGWVSMLLFLLVAGAVANDQIFTTSGVPFGRSSREPSYRVEFHPVDSPFHPENGQESVPMASHDGKRYKCFLPVEETKTMKSMLPQNATNVIIESERRIKPKEPDELLEVLKDQCFYRHEGWWSYEFCYHGKIRQVHVDDDKVIQEFVLGEFDDDATAAYHENITSELVDDDHHVKDISQRYHVHLYTNGTVCDLTDIPRETEVRFVCSEPTVLISSVKEISSCRYVVTIQSPMLCKNPLFQEEKRTLSIHCNELPARAESSAEDDSLPKEAQISIIPDQDELHDFPAYAT

SEQ ID NO: 23481 - protein, 286 aa, Zea mays subsp. mays
  peptide (1)..(286): Ceres Seq. ID no. 12412235
  misc_feature (1)..(274): NCBI GI NO: 18421420 NR Description: putative protein; protein id: At5g35080
  misc_feature (1)..(274): NCBI GI NO: 21592392 NR Description: unknown [Arabidopsis thaliana]
  misc_feature (39)..(250): NCBI GI NO: 28850402 NR Description: similar to Arabidopsis thaliana (Mouse-ear cress)
  misc_feature (1)..(237): NCBI GI NO: 12653521 NR Description: Similar to amplified in osteosarcoma
  misc_feature (1)..(237): NCBI GI NO: 5803109 NR Description: amplified in osteosarcoma [Homo sapiens]
  misc_feature (156)..(234): NCBI GI NO: 7487985 NR Description: hypothetical protein F7N22
  misc_feature (33)..(247): NCBI GI NO: 21483540 NR Description: RE67845p [Drosophila melanogaster]
  misc_feature (55)..(139): NCBI GI NO: 7487985 NR Description: hypothetical protein F7N22
  misc_feature (33)..(247): NCBI GI NO: 24583799 NR Description: CG6766-PA [Drosophila melanogaster]
  misc_feature (1)..(237): NCBI GI NO: 29243990 NR Description: hypothetical protein 1300007E20 [Mus musculus]
MLLFLLVAGAVANDQIFTTSGVPFGRSSREPSYRVEFHPVDSPFHPENGQESVPMASHDGKRYKCFLPVEETKTMKSMLPQNATNVIIESERRIKPKEPDELLEVLKDQCFYRHEGWWSYEFCYHGKIRQVHVDDDKVIQEFVLGEFDDDATAAYHENITSELVDDDHHVKDISQRYHVHLYTNGTVCDLTDIPRETEVRFVCSEPTVLISSVKEISSCRYVVTIQSPMLCKNPLFQEEKRTLSIHCNELPARAESSAEDDSLPKEAQISIIPDQDELHDFPAYAT

SEQ ID NO: 23482 - protein, 232 aa, Zea mays subsp. mays
  peptide (1)..(232): Ceres Seq. ID no. 12412236
  misc_feature (1)..(220): NCBI GI NO: 18421420 NR Description: putative protein; protein id: At5g35080
  misc_feature (1)..(220): NCBI GI NO: 21592392 NR Description: unknown [Arabidopsis thaliana]
  misc_feature (1)..(196): NCBI GI NO: 28850402 NR Description: similar to Arabidopsis thaliana (Mouse-ear cress)
  misc_feature (1)..(183): NCBI GI NO: 12653521 NR Description: Similar to amplified in osteosarcoma
  misc_feature (1)..(183): NCBI GI NO: 5803109 NR Description: amplified in osteosarcoma [Homo sapiens]
  misc_feature (102)..(180): NCBI GI NO: 7487985 NR Description: hypothetical protein F7N22
  misc_feature (1)..(193): NCBI GI NO: 21483540 NR Description: RE67845p [Drosophila melanogaster]
  misc_feature (1)..(85): NCBI GI NO: 7487985 NR Description: hypothetical protein F7N22
  misc_feature (1)..(193): NCBI GI NO: 24583799 NR Description: CG6766-PA [Drosophila melanogaster]
  misc_feature (1)..(183): NCBI GI NO: 29243990 NR Description: hypothetical protein 1300007E20 [Mus musculus]
MASHDGKRYKCFLPVEETKTMKSMLPQNATNVIIESERRIKPKEPDELLEVLKDQCFYRHEGWWSYEFCYHGKIRQVHVDDDKVIQEFVLGEFDDDATAAYHENITSELVDDDHHVKDISQRYHVHLYTNGTVCDLTDIPRETEVRFVCSEPTVLISSVKEISSCRYVVTIQSPMLCKNPLFQEEKRTLSIHCNELPARAESSAEDDSLPKEAQISIIPDQDELHDFPAYAT

SEQ ID NO: 23483 - DNA, 1574 bp, Zea mays subsp. mays
  misc_feature (1)..(1574): Ceres Seq. ID no. 12348933
aaaatagcaaatttctccacacggacacagcagcgagagaagagagtccactgtccaccccaccagaaaaacgcattccgcagacgcgcggcgagggagtaggaggggacggcgggtgccgaggcccgcaggcacggggaagctacctgcttgcgtagccgggcgggctcgcgctgtgctgtcgctccatgtcggtcgccggcgagagcggcggggatccggcggcggcacgccgccggtgggatctctccaacaagggccccgacagcactccaatgttgaaagaggctgtggaaatgtctacagatgaagaatcggatggcgttgttatatgccatccgaatggtaacactgatggatgtgacgaagccattagtggcagtcatgatgatgatagcccagaaggccaggaaactagttccatcaaggaccctgatgtagaaggtgacacacaggaagacaagtgtgtaaatcaagattcactgaagttgattgatcaagagacgtctgctccccccaagtccccagcgaagtccgcgactgcgagttctggaccagagaagcctaaacgtgttgtcacccaaccattgtctctttctactcaacgaaggtcatctggagtaaatggtggtgtgaccaatccatcacccaataaggataaatctggtgataaaagtagcatctctccagcaagcatgacaaagaagtgtacgccgttggcacctaggaagactttgcagcctgagcaagcatttcaccctctggaagaggactcttgttctgtgacttcctcgactacaacatcatcaagagctggcagaactaagacaactgttcctgttgccccatcatttgtgtgtgctaaccgtgctgacaagaggaaggagttctacacaaaattagaggagaaacataaagctttggaagcagagaaggacgaggctgaggccaggaaaaaggaagagcaagacgttgctataaagcaactaaggaagtcattggtgattagagcgaaacccatgccaagcttctatcaagaaggccccccaccaaaggctgaacttaagaaggtgcctcctactcgtgccaaatcaccaaagtttacaagctcaaggagaaagagctgcaatgacacaccacagacacccgagggaaaaaacaccaacgcaacatctaccacccggccacatcgtcacagcatcggggcttctaaagatgccagcagagtacagtgctcgccgaagagcggcgtggcgaccaaaactagatctgtcaagcctgagctgaaggccctctgaagcgcatgcgtagcattcaagtgctgcgattgtctctgtacaaacagaatcgcctgactcttagccgtttccatttgcatgcattttttttgttttgttttgttctatacccagcatctccaccaaaaagaaggctgtagggccaatgacgttgttcgcgctgctggaccttgtctccattttcgtcttgtactcgttaagaactctgttgctgctgggaccatgtgacattcattccatgtaaattacctggggatcccggtagggagctcgact

SEQ ID NO: 23484 - protein, 369 aa, Zea mays subsp. mays
  peptide (1)..(369): Ceres Seq. ID no. 12348934
  misc_feature (1)..(364): NCBI GI NO: 34897180 NR Description: unknown protein
  misc_feature (103)..(367): NCBI GI NO: 34393229 NR Description: putative seed specific protein
  misc_feature (35)..(347): NCBI GI NO: 9294199 NR Description: gb|AAF04893
  misc_feature (35)..(347): NCBI GI NO: 15228950 NR Description: unknown protein; protein id: At3g23090.1
  misc_feature (50)..(353): NCBI GI NO: 21553401 NR Description: unknown [Arabidopsis thaliana]
  misc_feature (50)..(353): NCBI GI NO: 18404945 NR Description: expressed protein; protein id: At1g54460
  misc_feature (122)..(369): NCBI GI NO: 32395575 NR Description: seed specific protein Bn15D14A [Brassica napus]
  misc_feature (115)..(343): NCBI GI NO: 30679219 NR Description: expressed protein [Arabidopsis thaliana]
  misc_feature (115)..(343): NCBI GI NO: 6175167 NR Description: unknown protein [Arabidopsis thaliana]
  misc_feature (115)..(343): NCBI GI NO: 18396961 NR Description: expressed protein; protein id: At3g04630
MSVAGESGGDPAAARRRWDLSNKGPDSTPMLKEAVEMSTDEESDGVVICHPNGNTDGCDEAISGSHDDDSPEGQETSSIKDPDVEGDTQEDKCVNQDSLKLIDQETSAPPKSPAKSATASSGPEKPKRVVTQPLSLSTQRRSSGVNGGVTNPSPNKDKSGDKSSISPASMTKKCTPLAPRKTLQPEQAFHPLEEDSCSVTSSTTTSSRAGRTKTTVPVAPSFVCANRADKRKEFYTKLEEKHKALEAEKDEAEARKKEEQDVAIKQLRKSLVIRAKPMPSFYQEGPPPKAELKKVPPTRAKSPKFTSSRRKSCNDTPQTPEGKNTNATSTTRPHRHSIGASKDASRVQCSPKSGVATKTRSVKPELKAL

SEQ ID NO: 23485 - protein, 340 aa, Zea mays subsp. mays
  peptide (1)..(340): Ceres Seq. ID no. 12348935
  misc_feature (1)..(335): NCBI GI NO: 34897180 NR Description: unknown protein
  misc_feature (74)..(338): NCBI GI NO: 34393229 NR Description: putative seed specific protein
  misc_feature (6)..(318): NCBI GI NO: 9294199 NR Description: gb|AAF04893
  misc_feature (6)..(318): NCBI GI NO: 15228950 NR Description: unknown protein; protein id: At3g23090.1
  misc_feature (21)..(324): NCBI GI NO: 21553401 NR Description: unknown [Arabidopsis thaliana]
  misc_feature (21)..(324): NCBI GI NO: 18404945 NR Description: expressed protein; protein id: At1g54460
  misc_feature (93)..(340): NCBI GI NO: 32395575 NR Description: seed specific protein Bn15D14A [Brassica napus]
  misc_feature (86)..(314): NCBI GI NO: 30679219 NR Description: expressed protein [Arabidopsis thaliana]
  misc_feature (86)..(314): NCBI GI NO: 6175167 NR Description: unknown protein [Arabidopsis thaliana]
  misc_feature (86)..(314): NCBI GI NO: 18396961 NR Description: expressed protein; protein id: At3g04630
MLKEAVEMSTDEESDGVVICHPNGNTDGCDEAISGSHDDDSPEGQETSSIKDPDVEGDTQEDKCVNQDSLKLIDQETSAPPKSPAKSATASSGPEKPKRVVTQPLSLSTQRRSSGVNGGVTNPSPNKDKSGDKSSISPASMTKKCTPLAPRKTLQPEQAFHPLEEDSCSVTSSTTTSSRAGRTKTTVPVAPSFVCANRADKRKEFYTKLEEKHKALEAEKDEAEARKKEEQDVAIKQLRKSLVIRAKPMPSFYQEGPPPKAELKKVPPTRAKSPKFTSSRRKSCNDTPQTPEGKNTNATSTTRPHRHSIGASKDASRVQCSPKSGVATKTRSVKPELKAL

SEQ ID NO: 23486 - protein, 333 aa, Zea mays subsp. mays
  peptide (1)..(333): Ceres Seq. ID no. 12348936
  misc_feature (1)..(328): NCBI GI NO: 34897180 NR Description: unknown protein
  misc_feature (67)..(331): NCBI GI NO: 34393229 NR Description: putative seed specific protein
  misc_feature (1)..(311): NCBI GI NO: 9294199 NR Description: gb|AAF04893
  misc_feature (1)..(311): NCBI GI NO: 15228950 NR Description: unknown protein; protein id: At3g23090.1
  misc_feature (14)..(317): NCBI GI NO: 21553401 NR Description: unknown [Arabidopsis thaliana]
  misc_feature (14)..(317): NCBI GI NO: 18404945 NR Description: expressed protein; protein id: At1g54460
  misc_feature (86)..(333): NCBI GI NO: 32395575 NR Description: seed specific protein Bn15D14A [Brassica napus]
  misc_feature (79)..(307): NCBI GI NO: 30679219 NR Description: expressed protein [Arabidopsis thaliana]
  misc_feature (79)..(307): NCBI GI NO: 6175167 NR Description: unknown protein [Arabidopsis thaliana]
  misc_feature (79)..(307): NCBI GI NO: 18396961 NR Description: expressed protein; protein id: At3g04630
MSTDEESDGVVICHPNGNTDGCDEAISGSHDDDSPEGQETSSIKDPDVEGDTQEDKCVNQDSLKLIDQETSAPPKSPAKSATASSGPEKPKRVVTQPLSLSTQRRSSGVNGGVTNPSPNKDKSGDKSSISPASMTKKCTPLAPRKTLQPEQAFHPLEEDSCSVTSSTTTSSRAGRTKTTVPVAPSFVCANRADKRKEFYTKLEEKHKALEAEKDEAEARKKEEQDVAIKQLRKSLVIRAKPMPSFYQEGPPPKAELKKVPPTRAKSPKFTSSRRKSCNDTPQTPEGKNTNATSTTRPHRHSIGASKDASRVQCSPKSGVATKTRSVKPELKAL

SEQ ID NO: 23487 - DNA, 1625 bp, Zea mays subsp. mays
  misc_feature (1)..(1625): Ceres Seq. ID no. 13494770
  misc_feature (1610)..(1610): n is a, c, t, g, unknown, or other
atccccagctccgtttccgtctccggcaccaggaccagtgccacgccaaccaccgctacctgctccacgccaaacgccagttgctttgcagctactcgtgcagccgtgctcgccgcacacgattggcgccagtctttagttcaccggcaaagcttccgcgagcgcgcgggtgtaccacgtgacggactacggcgcggacccgaccggcgccgccgacgccacggcggcgatcagcaaggccatagctgacgcgttccgcccgcccaccaacgccaccatgaccggcggcatccccgacctcggcggcgccgaggtgcacctcgacggcggcacgtacctcatcaaggggcccctcacgctgccggcatccggcggcggcaacttcaagatccacagcgggtcgctgcgcgcgtccgacgacttcccgacggaccggtacctgatcgagctgtcggcggccaagagcagccggagctacgactacgagtacgccacgctgcgggacctgatgctggactgcagctaccgcggcggcggcgtggcggtggtggactcgctccgcgtcgccgtcgacaactgctacgtggcgcacttcgcgtccgacggcgtcgcggtgcgcggcggccacgagacgctcatccgcaacacctacctcggccagcacatgacggccgggggcgacccgggggagcgcggcttcacgggcacggccatccgcctcgacggcaacgacaactccgtgtccggacgtcgtcatcttctccgcggccacggggatcatggtcaccgcgccggccaactccatctccggcgtgcactgctacaacaaggccacgggcttcggcggcaccggcatccacctcaagatcccgggcctcacgcaggcgtggatcagcaactgctacatggactacaccagcatcgtcgccgaggaccccgtgctgctccacgtctccggatccttcttcctcggcgacgccaacgtcgtcctcaaggccgtcagcggcgtcgccaggggcgtccaggtcgtcggcaacatcttcagcggcagggacaagggcgtcgacatcgtgcagctggacggcgccttcgccaccgtggaccaggtgtacgtgcagcagaactccgccacggggatgaccgtcaggtccacctccgcgcgcgcatcgctccagggcaacgggacctcctggacgctcgacttctcgccggtgctgctgttcccggaccgcatcggccacgtgcagtactcgctcgtcgccggcgacgagttcccgggccacacgctccggaacgtgtccgggaaccaggtcgtggtcgccaccgacaaggccgtctcggccacggtccacgtcttggtggaccagaacagcgactgagataagataagagacactcgagagtgcctgcgtgcacgcagtatgcgtgctgctgcctgctcgcgcggctgctgcggagcaaggcgttattccttcgtttctttcttcttctcggaaatttcagccattcatgtcgtcgggaagatgacaattgtttgatgcgacaaaatgctccagaatgtatcattcttttgctgtatgaaatgaaatgattcagaagctccatcaatntgcgtaccaaggcat

SEQ ID NO: 23488 - protein, 368 aa, Zea mays subsp. mays
  peptide (1)..(368): Ceres Seq. ID no. 13494771
  misc_feature (1)..(156): NCBI GI NO: 38347355 NR Description: OSJNBa0070C17.16
  misc_feature (1)..(156): NCBI GI NO: 15235269 NR Description: expressed protein [Arabidopsis thaliana]
  misc_feature (6)..(156): NCBI GI NO: 7485728 NR Description: hypothetical protein F18F4
  misc_feature (6)..(156): NCBI GI NO: 18415427 NR Description: expressed protein [Arabidopsis thaliana]
  misc_feature (1)..(159): NCBI GI NO: 7485728 NR Description: hypothetical protein F18F4
  misc_feature (1)..(159): NCBI GI NO: 18415427 NR Description: expressed protein [Arabidopsis thaliana]
MTGGIPDLGGAEVHLDGGTYLIKGPLTLPASGGGNFKIHSGSLRASDDFPTDRYLIELSAAKSSRSYDYEYATLRDLMLDCSYRGGGVAVVDSLRVAVDNCYVAHFASDGVAVRGGHETLIRNTYLGQHMTAGGDPGERGFTGTAIRLDGNDNSVSGRRHLLRGHGDHGHRAGQLHLRRALLQQGHGLRRHRHPPQDPGPHAGVDQQLLHGLHQHRRRGPRAAPRLRILLPRRRQRRPQGRQRRRQGRPGRRQHLQRQGQGRRHRAAGRRLRHRGPGVRAAELRHGDDRQVHLRARIAPGQRDLLDARLLAGAAVPGPHRPRAVLARRRRRVPGPHAPERVREPGRGRHRQGRLGHGPRLGGPEQRLR

SEQ ID NO: 23489 - protein, 291 aa, Zea mays subsp. mays
  peptide (1)..(291): Ceres Seq. ID no. 13494772
  misc_feature (1)..(79): NCBI GI NO: 38347355 NR Description: OSJNBa0070C17.16
  misc_feature (1)..(79): NCBI GI NO: 15235269 NR Description: expressed protein [Arabidopsis thaliana]
  misc_feature (1)..(79): NCBI GI NO: 7485728 NR Description: hypothetical protein F18F4
  misc_feature (1)..(79): NCBI GI NO: 18415427 NR Description: expressed protein [Arabidopsis thaliana]
  misc_feature (1)..(82): NCBI GI NO: 7485728 NR Description: hypothetical protein F18F4
  misc_feature (1)..(82): NCBI GI NO: 18415427 NR Description: expressed protein [Arabidopsis thaliana]
MLDCSYRGGGVAVVDSLRVAVDNCYVAHFASDGVAVRGGHETLIRNTYLGQHMTAGGDPGERGFTGTAIRLDGNDNSVSGRRHLLRGHGDHGHRAGQLHLRRALLQQGHGLRRHRHPPQDPGPHAGVDQQLLHGLHQHRRRGPRAAPRLRILLPRRRQRRPQGRQRRRQGRPGRRQHLQRQGQGRRHRAAGRRLRHRGPGVRAAELRHGDDRQVHLRARIAPGQRDLLDARLLAGAAVPGPHRPRAVLARRRRRVPGPHAPERVREPGRGRHRQGRLGHGPRLGGPEQRLR

SEQ ID NO: 23490 - protein, 239 aa, Zea mays subsp. mays
  peptide (1)..(239): Ceres Seq. ID no. 13494773
  misc_feature (1)..(27): NCBI GI NO: 38347355 NR Description: OSJNBa0070C17.16
  misc_feature (1)..(27): NCBI GI NO: 15235269 NR Description: expressed protein [Arabidopsis thaliana]
  misc_feature (1)..(27): NCBI GI NO: 7485728 NR Description: hypothetical protein F18F4
  misc_feature (1)..(27): NCBI GI NO: 18415427 NR Description: expressed protein [Arabidopsis thaliana]
  misc_feature (1)..(30): NCBI GI NO: 7485728 NR Description: hypothetical protein F18F4
  misc_feature (1)..(30): NCBI GI NO: 18415427 NR Description: expressed protein [Arabidopsis thaliana]
MTAGGDPGERGFTGTAIRLDGNDNSVSGRRHLLRGHGDHGHRAGQLHLRRALLQQGHGLRRHRHPPQDPGPHAGVDQQLLHGLHQHRRRGPRAAPRLRILLPRRRQRRPQGRQRRRQGRPGRRQHLQRQGQGRRHRAAGRRLRHRGPGVRAAELRHGDDRQVHLRARIAPGQRDLLDARLLAGAAVPGPHRPRAVLARRRRRVPGPHAPERVREPGRGRHRQGRLGHGPRLGGPEQRLR

SEQ ID NO: 23491 - DNA, 1329 bp, Zea mays subsp. mays
  misc_feature (1)..(1329): Ceres Seq. ID no. 12342558
aaaatgtgcagcccacctccaatcccgtagaagatagtgctgccctgccgaatgccgcccacctccaatcccgtagaagacaaagagagagggagagaactggacggcggcggcggcggagacgacgatgcagtggtacttggtggccgcgctcctcaccatcctcaccagctcccagggaatattgaccaccctttcccagagcaatggcaaatacaattatgattatgccacaattccttttttagctgagctcttcaagttatctgtctcaggcttcttcctctggaaggaatgccattcttcatctccaccaaggatgacaaaggaatggaggagcgtgcgactatatgttgttccttcagttatatacctcatccacaacaatgtccagtttgcgacattgacctatgttgacccatctacctatcagataatgggaaacttgaaaattgtcacgactgggattttgtttaggcttgtcctaaaaaggaagttgtccaatatacaatggatggcaattgttttattggctgttggtacaactacaagccaggttaaaggatgtggagattcaccatgtgattctcttttctcagcaccattggagggttacttgcttggaatactttctgcttgtctttcagctctagctggtgtgtacacagaatatttgatgaagaagaataatgatagtttgtactggcaaaatgtacaattatatacgtaggtttggagttatctttaacatgggctggctaatttatggcgattttaaagctggatttgagctaggtccatggtggcagcgcctttttaatggttattcgatcacaacatggatggtagtgttcaatttaggatctactggtcttctagtatcatggttgatgaaatattctgacaatatagtcaaggtgtactcaacttcaatggcaatgcttttaacgatggttttatctatatatcttttcagtgtgaaagctacaattcagctcttcttgggcattatcatttgtataatttccctgcagatgtattttatgcctgtgcacatgcttattgagttgccacaaactttgcctgtaacatcaaagtaggttcatggcattgttagctaacccattgatcagctgagggtagggcactgttgattgagtggttaattgactatctgcagcccagctctatttgagtcatatatttggagatttatggttgtaatctcaacagctatggatatagacagctaggttagtttcatgttgcaggaaaggtgaatcaactgtcaagtgagcatgtaatgccaatacaaatggattgaaagtt

SEQ ID NO: 23492 - protein, 200 aa, Zea mays subsp. mays
  peptide (1)..(200): Ceres Seq. ID no. 12342559
  misc_feature (59)..(200): Pfam Name: Pfam Description:  Nucleotide-sugar transporter
  misc_feature (3)..(200): NCBI GI NO: 18422134 NR Description: CMP-sialic acid transporter-like protein
  misc_feature (17)..(200): NCBI GI NO: 10177360 NR Description: CMP-sialic acid transporter-like protein
  misc_feature (1)..(199): NCBI GI NO: 34393556 NR Description: putative CMP-sialic acid transporter
  misc_feature (12)..(199): NCBI GI NO: 26450627 NR Description: unknown protein [Arabidopsis thaliana]
  misc_feature (12)..(199): NCBI GI NO: 18411150 NR Description: transporter-like protein; protein id: At3g59360
  misc_feature (2)..(200): NCBI GI NO: 18087849 NR Description: hypothetical protein MGC2541
  misc_feature (69)..(198): NCBI GI NO: 22204205 NR Description: SI:bZ30I22
  misc_feature (1)..(200): NCBI GI NO: 17556923 NR Description: Solute carrier family 35 member (39.9 kD)
  misc_feature (12)..(199): NCBI GI NO: 38345234 NR Description: OSJNBa0084K20.12
  misc_feature (4)..(144): NCBI GI NO: 24581845 NR Description: CG14040-PA [Drosophila melanogaster]
MQWYLVAALLTILTSSQGILTTLSQSNGKYNYDYATIPFLAELFKLSVSGFFLWKECHSSSPPRMTKEWRSVRLYVVPSVIYLIHNNVQFATLTYVDPSTYQIMGNLKIVTTGILFRLVLKRKLSNIQWMAIVLLAVGTTTSQVKGCGDSPCDSLFSAPLEGYLLGILSACLSALAGVYTEYLMKKNNDSLYWQNVQLYT

SEQ ID NO: 23493 - protein, 136 aa, Zea mays subsp. mays
  peptide (1)..(136): Ceres Seq. ID no. 12342560
  misc_feature (15)..(108): Pfam Name: Pfam Description:  Nucleotide-sugar transporter
  misc_feature (15)..(136): NCBI GI NO: 18422134 NR Description: CMP-sialic acid transporter-like protein
  misc_feature (15)..(136): NCBI GI NO: 10177360 NR Description: CMP-sialic acid transporter-like protein
  misc_feature (15)..(117): NCBI GI NO: 34393556 NR Description: putative CMP-sialic acid transporter
  misc_feature (11)..(121): NCBI GI NO: 26450627 NR Description: unknown protein [Arabidopsis thaliana]
  misc_feature (11)..(121): NCBI GI NO: 18411150 NR Description: transporter-like protein; protein id: At3g59360
  misc_feature (11)..(118): NCBI GI NO: 18087849 NR Description: hypothetical protein MGC2541
  misc_feature (35)..(120): NCBI GI NO: 22204205 NR Description: SI:bZ30I22
  misc_feature (11)..(121): NCBI GI NO: 38345234 NR Description: OSJNBa0084K20.12
  misc_feature (43)..(117): NCBI GI NO: 17556923 NR Description: Solute carrier family 35 member (39.9 kD)
  misc_feature (52)..(135): NCBI GI NO: 24581845 NR Description: CG14040-PA [Drosophila melanogaster]
MIVCTGKMYNYIRRFGVIFNMGWLIYGDFKAGFELGPWWQRLFNGYSITTWMVVFNLGSTGLLVSWLMKYSDNIVKVYSTSMAMLLTMVLSIYLFSVKATIQLFLGIIICIISLQMYFMPVHMLIELPQTLPVTSK

SEQ ID NO: 23494 - protein, 136 aa, Zea mays subsp. mays
  peptide (1)..(136): Ceres Seq. ID no. 12342561
  misc_feature (1)..(136): Pfam Name: Pfam Description:  Nucleotide-sugar transporter
  misc_feature (1)..(136): NCBI GI NO: 18422134 NR Description: CMP-sialic acid transporter-like protein
  misc_feature (1)..(136): NCBI GI NO: 10177360 NR Description: CMP-sialic acid transporter-like protein
  misc_feature (1)..(135): NCBI GI NO: 34393556 NR Description: putative CMP-sialic acid transporter
  misc_feature (1)..(135): NCBI GI NO: 26450627 NR Description: unknown protein [Arabidopsis thaliana]
  misc_feature (1)..(135): NCBI GI NO: 18411150 NR Description: transporter-like protein; protein id: At3g59360
  misc_feature (1)..(136): NCBI GI NO: 18087849 NR Description: hypothetical protein MGC2541
  misc_feature (5)..(134): NCBI GI NO: 22204205 NR Description: SI:bZ30I22
  misc_feature (1)..(136): NCBI GI NO: 17556923 NR Description: Solute carrier family 35 member (39.9 kD)
  misc_feature (1)..(135): NCBI GI NO: 38345234 NR Description: OSJNBa0084K20.12
  misc_feature (1)..(80): NCBI GI NO: 24581845 NR Description: CG14040-PA [Drosophila melanogaster]
MTKEWRSVRLYVVPSVIYLIHNNVQFATLTYVDPSTYQIMGNLKIVTTGILFRLVLKRKLSNIQWMAIVLLAVGTTTSQVKGCGDSPCDSLFSAPLEGYLLGILSACLSALAGVYTEYLMKKNNDSLYWQNVQLYT

SEQ ID NO: 23495 - DNA, 1614 bp, Zea mays subsp. mays
  misc_feature (1)..(1614): Ceres Seq. ID no. 12410981
  misc_feature (607)..(607): n is a, c, t, g, unknown, or other
  misc_feature (609)..(609): n is a, c, t, g, unknown, or other
  misc_feature (608)..(608): n is a, c, t, g, unknown, or other
aaactgcctcattcattcgagctgtggcgaatcggaggcaatggcgtggccgcgtgggggtcagcaaggcagccgcggcggcagcagcgtccacctcgcgcacggcggcgcttctctgttcccaggcgctgcgaggtgacacaacaggagtctggcgacagccctctggcaagaaggaacggctcgctctcgactccgatgcgtgggagacaagcgctgcgacggtggatccggcgacccacgggcgtgggagacgaagacgagcggttataaacgtccctcaatgacaaggactcgtcatctgctccactgccactgcccttatcatcattcatcagcggcctgcctgcacgagattccgagggacagggagatccatggccgcgtcagaccaaccgccgcagccagagaagcccccgctgccgtggcgcgcgaggctgcttgtgggcgccgcctccgcgctgcacgccgcctcgctccgccgcgacggcaccgtcaaccgcttcctgctctccctcttcgaccgcgccgcgccgcccaccccgacggcccccctcggcggcgtggcatccacggaccacgccgtctccgaccacctgcgcgcccnnntcttcgtcccggagatccccggcggcggcaacgagctcccggtggtcgtgtacttccacggcggcggcttcgtcttccactccgcggcgtcggcgcagtacgacgcgctgtgccgccgcctggcgtcggccatcccggccgtcatcgcctccgtcgactaccgcctcgcgcccgagcaccgcttcccggctccctacgacgacggcgaggcagccctccggtgggccctagccggcgcggcaggcgcgctgccgtatccccccgccgccgtcttcgtggccggggacagcgccggcggcaacgtcgcccaccacgtcgccgcgcgcctccccgacgccgtcgcgggcctcctcgccgtgcagcctttcttcagcggcgaggcgccgacggggtcggagatgcggctccgcgacgccccgttcgggagccccgagcggctggcgtggctgtggcgcgcgttcctgccgcccggcgccacgcgggaccacgaggccgccaacgtgcccgccgcgatcaggcgcgacgcgggcgcgggcgcggaccggtggcgggcgttcccgcccacgctggtgtgcgtcggcgggtgggacgtgcatcaggacaggcagagggcgtacgcggacgcgctccgcgccgtgtgctccgaggaggtcaccgtggcggagtacccggacgccatccacgccttctacgtgttggacgacctcgcggacagcaagaagtttctgggtgacgtcgcggagttcgtgaaccggcatgcacaacagcggaggaaacccgcactaggccatgccaaggactagtgttatccgcttgcaaggatggcaagaaatcataggactggataagcttccttttgtggaaaatggaggcagcgactgatagattaagctggcagtgtttgtcactccctctatcatattgttagttaccagctggtttagattgattgttagatcactctgccatgtattcctttcgtttctatgtattaaatctactttt

SEQ ID NO: 23496 - protein, 352 aa, Zea mays subsp. mays
  peptide (1)..(352): Ceres Seq. ID no. 12410982
  misc_feature (1)..(119): Pfam Name: Pfam Description:  Cupin
  misc_feature (16)..(352): NCBI GI NO: 29247944 NR Description: GLP_26_54603_52153 [Giardia lamblia ATCC 50803]
  misc_feature (34)..(352): NCBI GI NO: 29247944 NR Description: GLP_26_54603_52153 [Giardia lamblia ATCC 50803]
  misc_feature (55)..(352): NCBI GI NO: 23104258 NR Description: hypothetical protein [Azotobacter vinelandii]
  misc_feature (108)..(108): Xaa is any aa, unknown or other
  misc_feature (109)..(109): Xaa is any aa, unknown or other
MTRTRHLLHCHCPYHHSSAACLHEIPRDREIHGRVRPTAAAREAPAAVAREAACGRRLRAARRLAPPRRHRQPLPALPLRPRRAAHPDGPPRRRGIHGPRRLRPPARXXLRPGDPRRRQRAPGGRVLPRRRLRLPLRGVGAVRRAVPPPGVGHPGRHRLRRLPPRARAPLPGSLRRRRGSPPVGPSRRGRRAAVSPRRRLRGRGQRRRQRRPPRRRAPPRRRRGPPRRAAFLQRRGADGVGDAAPRRPVREPRAAGVAVARVPAARRHAGPRGRQRARRDQARRGRGRGPVAGVPAHAGVRRRVGRASGQAEGVRGRAPRRVLRGGHRGGVPGRHPRLLRVGRPRGQQEVSG

SEQ ID NO: 23497 - protein, 344 aa, Zea mays subsp. mays
  peptide (1)..(344): Ceres Seq. ID no. 12410983
  misc_feature (79)..(135): Pfam Name: Pfam Description:  Carboxylesterase
  misc_feature (3)..(331): NCBI GI NO: 34904770 NR Description: similar to carboxylesterase
  misc_feature (1)..(334): NCBI GI NO: 34904760 NR Description: similar to carboxylesterase
  misc_feature (1)..(332): NCBI GI NO: 34393714 NR Description: putative esterase
  misc_feature (1)..(332): NCBI GI NO: 34904774 NR Description: similar to carboxylesterase
  misc_feature (15)..(327): NCBI GI NO: 34904772 NR Description: similar to carboxylesterase
  misc_feature (1)..(328): NCBI GI NO: 15237783 NR Description: putative protein; protein id: At5g23530
  misc_feature (1)..(328): NCBI GI NO: 21618039 NR Description: unknown [Arabidopsis thaliana]
  misc_feature (1)..(332): NCBI GI NO: 15240483 NR Description: putative protein; protein id: At5g27320
  misc_feature (2)..(334): NCBI GI NO: 34904758 NR Description: hypothetical protein~predicted by GeneMark
  misc_feature (34)..(339): NCBI GI NO: 15229371 NR Description: putative protein; protein id: At3g63010.1
  misc_feature (77)..(77): Xaa is any aa, unknown or other
  misc_feature (78)..(78): Xaa is any aa, unknown or other
MAASDQPPQPEKPPLPWRARLLVGAASALHAASLRRDGTVNRFLLSLFDRAAPPTPTAPLGGVASTDHAVSDHLRAXXFVPEIPGGGNELPVVVYFHGGGFVFHSAASAQYDALCRRLASAIPAVIASVDYRLAPEHRFPAPYDDGEAALRWALAGAAGALPYPPAAVFVAGDSAGGNVAHHVAARLPDAVAGLLAVQPFFSGEAPTGSEMRLRDAPFGSPERLAWLWRAFLPPGATRDHEAANVPAAIRRDAGAGADRWRAFPPTLVCVGGWDVHQDRQRAYADALRAVCSEEVTVAEYPDAIHAFYVLDDLADSKKFLGDVAEFVNRHAQQRRKPALGHAKD

SEQ ID NO: 23498 - DNA, 1315 bp, Zea mays subsp. mays
  misc_feature (1)..(1315): Ceres Seq. ID no. 12351926
aggacagaaccctgagccggaacaaaatggcggcgctcataaaccctatataccgccgactcgccgccttcgcctgccgccggatctctgcaccggcggtagagaagcccgtgctgcccctcgtgtatcaccggaacttgcagcaaagacacaattccagtttggtggatgcgagtggaggattcagcgagatgcttgcctctacacggaggtgctatgtatttggaggcaaaggtggtgtggggaaaacaagcatggcgggcgtcgcttgctgtgaagtttgccaaccatggtgaaccaacagctattgtttcgacggaaccatctccgtcactcggtgatttatttgaacaagacatgggtgttggcggcaaaactgtacgcatcactggatttgactctctttttgcagttgaggctggtcagttcaagataaagggagaacctgaagatcttggatcttttatcaacaatttacttggaaagatggggcttggaacacattctgatattatgtctatgattagagagatgctggatggaatgccccctggacttgaagaagcgcttgtactatcaaaggtgataaaatctattgacgtgcaagaggccgatatacttcggcgtttagtgctggatgctccatccactggacatacacttaagcttctgtcagcttctgattggattgaaatgttccttactttgagcattaagggcataaaagtggcttcgtccatgccatcgtttaatatgtatcttgaggacgtgcaattcatctctgccaggctagaggaactaaggcagcaggttcgcagagtgcgtgagattttgtttgatccacaatcaacagaattcatcgtcgtgacaattccaacgatgatggcagttactgagtcatcaaggtttcacgagtcattaaagaaggatggtgcacacacaagaaggctcgtcataaatcaggtgttgccaccgtctgcgtcggactgcagattctgtgctgcaaaacggagggaagaagcacgtgccttccgtgcgatactggaggaccgagaactcggcggcctgaagctgatccaggctccgctccttgatatggaggtgaaaggcgtccctgcactccgattcctcagcgattcagtgtggaagtagcgagaaacactaggtcaaataaaagattaatctctgtcggtctgttcggattctttcatttggttggagctagaatctagttcatgaatttggcctagaatctggcattcgaccacgttctatcactcttctcaagtatagatctgtgtcaaattcagagggc

SEQ ID NO: 23499 - protein, 327 aa, Zea mays subsp. mays
  peptide (1)..(327): Ceres Seq. ID no. 12351927
  misc_feature (26)..(327): Pfam Name: Pfam Description:  Anion-transporting ATPase
  misc_feature (26)..(327): NCBI GI NO: 30681260 NR Description: ATPase -related [Arabidopsis thaliana]
  misc_feature (26)..(327): NCBI GI NO: 9759337 NR Description: arsenite translocating ATPase-like protein
  misc_feature (26)..(327): NCBI GI NO: 30697424 NR Description: ATPase - like protein [Arabidopsis thaliana]
  misc_feature (26)..(327): NCBI GI NO: 6056208 NR Description: putative ATPase [Arabidopsis thaliana]
  misc_feature (26)..(300): NCBI GI NO: 5824321 NR Description: ATPase [Solanum tuberosum]
  misc_feature (26)..(319): NCBI GI NO: 15669329 NR Description: arsenical pump-driving ATPase (arsA)
  misc_feature (26)..(326): NCBI GI NO: 15679508 NR Description: arsenical pump-driving ATPase
  misc_feature (26)..(322): NCBI GI NO: 31214034 NR Description: ENSANGP00000018739 [Anopheles gambiae]
  misc_feature (26)..(318): NCBI GI NO: 15614358 NR Description: arsenical pump-driving ATPase
  misc_feature (26)..(326): NCBI GI NO: 20095116 NR Description: Arsenite transporting ATPase
MRVEDSARCLPLHGGAMYLEAKVVWGKQAWRASLAVKFANHGEPTAIVSTEPSPSLGDLFEQDMGVGGKTVRITGFDSLFAVEAGQFKIKGEPEDLGSFINNLLGKMGLGTHSDIMSMIREMLDGMPPGLEEALVLSKVIKSIDVQEADILRRLVLDAPSTGHTLKLLSASDWIEMFLTLSIKGIKVASSMPSFNMYLEDVQFISARLEELRQQVRRVREILFDPQSTEFIVVTIPTMMAVTESSRFHESLKKDGAHTRRLVINQVLPPSASDCRFCAAKRREEARAFRAILEDRELGGLKLIQAPLLDMEVKGVPALRFLSDSVWK

SEQ ID NO: 23500 - protein, 311 aa, Zea mays subsp. mays
  peptide (1)..(311): Ceres Seq. ID no. 12351928
  misc_feature (10)..(311): Pfam Name: Pfam Description:  Anion-transporting ATPase
  misc_feature (10)..(311): NCBI GI NO: 30681260 NR Description: ATPase -related [Arabidopsis thaliana]
  misc_feature (10)..(311): NCBI GI NO: 9759337 NR Description: arsenite translocating ATPase-like protein
  misc_feature (10)..(311): NCBI GI NO: 30697424 NR Description: ATPase - like protein [Arabidopsis thaliana]
  misc_feature (10)..(311): NCBI GI NO: 6056208 NR Description: putative ATPase [Arabidopsis thaliana]
  misc_feature (10)..(284): NCBI GI NO: 5824321 NR Description: ATPase [Solanum tuberosum]
  misc_feature (10)..(303): NCBI GI NO: 15669329 NR Description: arsenical pump-driving ATPase (arsA)
  misc_feature (10)..(310): NCBI GI NO: 15679508 NR Description: arsenical pump-driving ATPase
  misc_feature (10)..(306): NCBI GI NO: 31214034 NR Description: ENSANGP00000018739 [Anopheles gambiae]
  misc_feature (10)..(302): NCBI GI NO: 15614358 NR Description: arsenical pump-driving ATPase
  misc_feature (10)..(310): NCBI GI NO: 20095116 NR Description: Arsenite transporting ATPase
MYLEAKVVWGKQAWRASLAVKFANHGEPTAIVSTEPSPSLGDLFEQDMGVGGKTVRITGFDSLFAVEAGQFKIKGEPEDLGSFINNLLGKMGLGTHSDIMSMIREMLDGMPPGLEEALVLSKVIKSIDVQEADILRRLVLDAPSTGHTLKLLSASDWIEMFLTLSIKGIKVASSMPSFNMYLEDVQFISARLEELRQQVRRVREILFDPQSTEFIVVTIPTMMAVTESSRFHESLKKDGAHTRRLVINQVLPPSASDCRFCAAKRREEARAFRAILEDRELGGLKLIQAPLLDMEVKGVPALRFLSDSVWK

SEQ ID NO: 23501 - protein, 264 aa, Zea mays subsp. mays
  peptide (1)..(264): Ceres Seq. ID no. 12351929
  misc_feature (1)..(264): Pfam Name: Pfam Description:  Anion-transporting ATPase
  misc_feature (1)..(264): NCBI GI NO: 30681260 NR Description: ATPase -related [Arabidopsis thaliana]
  misc_feature (1)..(264): NCBI GI NO: 9759337 NR Description: arsenite translocating ATPase-like protein
  misc_feature (1)..(264): NCBI GI NO: 30697424 NR Description: ATPase - like protein [Arabidopsis thaliana]
  misc_feature (1)..(264): NCBI GI NO: 6056208 NR Description: putative ATPase [Arabidopsis thaliana]
  misc_feature (1)..(237): NCBI GI NO: 5824321 NR Description: ATPase [Solanum tuberosum]
  misc_feature (1)..(256): NCBI GI NO: 15669329 NR Description: arsenical pump-driving ATPase (arsA)
  misc_feature (1)..(263): NCBI GI NO: 15679508 NR Description: arsenical pump-driving ATPase
  misc_feature (1)..(259): NCBI GI NO: 31214034 NR Description: ENSANGP00000018739 [Anopheles gambiae]
  misc_feature (1)..(255): NCBI GI NO: 15614358 NR Description: arsenical pump-driving ATPase
  misc_feature (1)..(263): NCBI GI NO: 20095116 NR Description: Arsenite transporting ATPase
MGVGGKTVRITGFDSLFAVEAGQFKIKGEPEDLGSFINNLLGKMGLGTHSDIMSMIREMLDGMPPGLEEALVLSKVIKSIDVQEADILRRLVLDAPSTGHTLKLLSASDWIEMFLTLSIKGIKVASSMPSFNMYLEDVQFISARLEELRQQVRRVREILFDPQSTEFIVVTIPTMMAVTESSRFHESLKKDGAHTRRLVINQVLPPSASDCRFCAAKRREEARAFRAILEDRELGGLKLIQAPLLDMEVKGVPALRFLSDSVWK

SEQ ID NO: 23502 - DNA, 1522 bp, Zea mays subsp. mays
  misc_feature (1)..(1522): Ceres Seq. ID no. 12358133
aatcccgccgtgcttcccgtcttcaccaaatccttcgccacgatggcgcgcctgctcatccccctccccttcgccgccgcctctgcctcatcgctccacctcgccgtctcccgccttcctctcgccgcggtctccgccgcgcgtcgcgagtgtctctttgggggaagggtggtaggaggagtggtgagggcgcccgcgaggctttctaagcgcgggttgtgcgccggcgcagaggctggcgactcggccgtcacggtggaggccatggaatgggtcaagaaggacaggaggcgcctgctccacgtcgtctaccgcgtcggggacctcgacaagacgatcaagttctacacggagtgccctgggcatgaaactgttgaggaagagggacattcccgaggagaggtacaccaatgcctttctggggtacgggcctgaggattcacattttgttgtggagctcacttacaattatggtgtggagagctataacatcgggactggttttggccactttggaattgctgttgaggatgttgcaaaaacagtggaacttattaaagcaaaaggaggaacagtcacaagggagccaggtcctgtcaaaggtgggaaatcagtaattgcctttattgaggatcctgatggttacaagtttgagcttagagaaagagggcctactcccgagcctttgtgccaggtaatgcttcgagtgggagatcttgatcgtgctataaatttctatgagaaggcatttggcatggaacttcttcgcaagcgagacaattctgagtacaaggcggtatttgatggtgtcaacccttcattgagcaccattcagaggcttttcttggatgaggtggagtgctggtgtatggctggtgcgaagcagctcgagagtctcggacttctggctgcatttgctaggtatacgattgcgatgatgggatatggtccagaagacaaaaatgctgtattggagttgacctacaactatggggtgaaggaatatgataagggaaatgcttatgcacagattgctattagtactgatgatgtctacaaaactgcggaagcaattagagtaaatggtggacaaattactcgtgaacctggcccattacctggcatcaccaccaagataactgcatgcacagatccagatggctggaaaacagtgtttgtcgataacatagattttctgaaggagttggaagaatgagctttgctagagatctcaacttggtacatcaagctccatacggttgcaccccgtgagttccatgcatgacctgcaaaatctttgtaaagccacagcctcaaactgaggattgtagataggtcgtccaatctacggcatcatcgcaattgatagttgatagagcattagattttccttgcagatctatatagatgcgcaaccgtttttgtattatgcattttaatgcataagttcaatggaaatgattcatgggtaagaaaatcgtcttctttcaagcggcaatataagggctggtttggtgacttg

SEQ ID NO: 23503 - protein, 283 aa, Zea mays subsp. mays
  peptide (1)..(283): Ceres Seq. ID no. 12358134
  misc_feature (1)..(98): Pfam Name: Pfam Description:  Glyoxalase/Bleomycin resistance protein/Dioxygenasesuperfamily
  misc_feature (1)..(143): NCBI GI NO: 15220397 NR Description: glyoxalase I, putative
  misc_feature (186)..(282): NCBI GI NO: 15220397 NR Description: glyoxalase I, putative
  misc_feature (1)..(143): NCBI GI NO: 21537360 NR Description: glyoxalase I, putative [Arabidopsis thaliana]
  misc_feature (186)..(282): NCBI GI NO: 21537360 NR Description: glyoxalase I, putative [Arabidopsis thaliana]
  misc_feature (1)..(143): NCBI GI NO: 25350143 NR Description: protein F1N21.10 [imported] - Arabidopsis thaliana
  misc_feature (186)..(282): NCBI GI NO: 25350143 NR Description: protein F1N21.10 [imported] - Arabidopsis thaliana
  misc_feature (1)..(143): NCBI GI NO: 7619802 NR Description: putative glyoxalase I [Triticum aestivum]
  misc_feature (186)..(282): NCBI GI NO: 7619802 NR Description: putative glyoxalase I [Triticum aestivum]
  misc_feature (1)..(143): NCBI GI NO: 11281993 NR Description: lactoylglutathione lyase (EC 4.4.1.5)
  misc_feature (186)..(282): NCBI GI NO: 11281993 NR Description: lactoylglutathione lyase (EC 4.4.1.5)
MKLLRKRDIPEERYTNAFLGYGPEDSHFVVELTYNYGVESYNIGTGFGHFGIAVEDVAKTVELIKAKGGTVTREPGPVKGGKSVIAFIEDPDGYKFELRERGPTPEPLCQVMLRVGDLDRAINFYEKAFGMELLRKRDNSEYKAVFDGVNPSLSTIQRLFLDEVECWCMAGAKQLESLGLLAAFARYTIAMMGYGPEDKNAVLELTYNYGVKEYDKGNAYAQIAISTDDVYKTAEAIRVNGGQITREPGPLPGITTKITACTDPDGWKTVFVDNIDFLKELEE

SEQ ID NO: 23504 - protein, 172 aa, Zea mays subsp. mays
  peptide (1)..(172): Ceres Seq. ID no. 12358135
  misc_feature (75)..(157): Pfam Name: Pfam Description:  Glyoxalase/Bleomycin resistance protein/Dioxygenasesuperfamily
  misc_feature (1)..(32): NCBI GI NO: 15220397 NR Description: glyoxalase I, putative
  misc_feature (75)..(171): NCBI GI NO: 15220397 NR Description: glyoxalase I, putative
  misc_feature (1)..(32): NCBI GI NO: 21537360 NR Description: glyoxalase I, putative [Arabidopsis thaliana]
  misc_feature (75)..(171): NCBI GI NO: 21537360 NR Description: glyoxalase I, putative [Arabidopsis thaliana]
  misc_feature (1)..(32): NCBI GI NO: 25350143 NR Description: protein F1N21.10 [imported] - Arabidopsis thaliana
  misc_feature (75)..(171): NCBI GI NO: 25350143 NR Description: protein F1N21.10 [imported] - Arabidopsis thaliana
  misc_feature (1)..(32): NCBI GI NO: 7619802 NR Description: putative glyoxalase I [Triticum aestivum]
  misc_feature (75)..(171): NCBI GI NO: 7619802 NR Description: putative glyoxalase I [Triticum aestivum]
  misc_feature (1)..(32): NCBI GI NO: 11281993 NR Description: lactoylglutathione lyase (EC 4.4.1.5)
  misc_feature (75)..(171): NCBI GI NO: 11281993 NR Description: lactoylglutathione lyase (EC 4.4.1.5)
MLRVGDLDRAINFYEKAFGMELLRKRDNSEYKAVFDGVNPSLSTIQRLFLDEVECWCMAGAKQLESLGLLAAFARYTIAMMGYGPEDKNAVLELTYNYGVKEYDKGNAYAQIAISTDDVYKTAEAIRVNGGQITREPGPLPGITTKITACTDPDGWKTVFVDNIDFLKELEE

SEQ ID NO: 23505 - protein, 153 aa, Zea mays subsp. mays
  peptide (1)..(153): Ceres Seq. ID no. 12358136
  misc_feature (56)..(138): Pfam Name: Pfam Description:  Glyoxalase/Bleomycin resistance protein/Dioxygenasesuperfamily
  misc_feature (1)..(13): NCBI GI NO: 15220397 NR Description: glyoxalase I, putative
  misc_feature (56)..(152): NCBI GI NO: 15220397 NR Description: glyoxalase I, putative
  misc_feature (1)..(13): NCBI GI NO: 21537360 NR Description: glyoxalase I, putative [Arabidopsis thaliana]
  misc_feature (56)..(152): NCBI GI NO: 21537360 NR Description: glyoxalase I, putative [Arabidopsis thaliana]
  misc_feature (1)..(13): NCBI GI NO: 25350143 NR Description: protein F1N21.10 [imported] - Arabidopsis thaliana
  misc_feature (56)..(152): NCBI GI NO: 25350143 NR Description: protein F1N21.10 [imported] - Arabidopsis thaliana
  misc_feature (1)..(13): NCBI GI NO: 7619802 NR Description: putative glyoxalase I [Triticum aestivum]
  misc_feature (56)..(152): NCBI GI NO: 7619802 NR Description: putative glyoxalase I [Triticum aestivum]
  misc_feature (1)..(13): NCBI GI NO: 11281993 NR Description: lactoylglutathione lyase (EC 4.4.1.5)
  misc_feature (56)..(152): NCBI GI NO: 11281993 NR Description: lactoylglutathione lyase (EC 4.4.1.5)
MELLRKRDNSEYKAVFDGVNPSLSTIQRLFLDEVECWCMAGAKQLESLGLLAAFARYTIAMMGYGPEDKNAVLELTYNYGVKEYDKGNAYAQIAISTDDVYKTAEAIRVNGGQITREPGPLPGITTKITACTDPDGWKTVFVDNIDFLKELEE

SEQ ID NO: 23506 - DNA, 688 bp, Zea mays subsp. mays
  misc_feature (1)..(688): Ceres Seq. ID no. 12342668
atgtcggtacagccgagaaccgggaccggtgattttcccctcccccttgtcttgctgcttccaattgacccgtcaattgctcaggcgatagtggctgcagtgcatttctgggatggggctgctcttccttgagcggctcgagggggagggcgtgttcaggtgccggcgctgccgcgtggacgccgcctccaaggacgccatcatctccagggacttctacggccgcagcggccgcgcctacctcttcgaccacgttgtgaacatatgcctaggccctaatgaggatcggtatcttgtaaccgggctccatactgtgaatgacatctactgtagctgctgccaacagattcttggctggagatatgagaaagcctacgagcaaagccagaaatacaaggaagggaagtacatcctcgagagagctagaatggtgaaggatgggtgacgatcatttggatgctcttacttctaacaccccagaagcgcaatcttcttgaactctggaaagattcagaactatccctcaatttgcatgcctcagaacatttgacacctaattggcatcccagttagctaggaagatcactggttgcagattctttgatttgtagaatattactgactctgaatacccttagcttgttagtaatggtaacatttggtgaaatattgatgattaggtgaattg

SEQ ID NO: 23507 - protein, 110 aa, Zea mays subsp. mays
  peptide (1)..(110): Ceres Seq. ID no. 12342669
  misc_feature (1)..(109): Pfam Name: Pfam Description:  Yippee putative zinc-binding protein
  misc_feature (1)..(109): NCBI GI NO: 37533560 NR Description: hypothetical protein
  misc_feature (1)..(110): NCBI GI NO: 34393694 NR Description: Yippee-like protein
  misc_feature (1)..(109): NCBI GI NO: 15238881 NR Description: zinc-binding protein-like; protein id: At5g53940
  misc_feature (15)..(109): NCBI GI NO: 31201993 NR Description: ENSANGP00000019801 [Anopheles gambiae]
  misc_feature (11)..(109): NCBI GI NO: 15234265 NR Description: putative protein; protein id: At4g27740.1
  misc_feature (15)..(109): NCBI GI NO: 18858031 NR Description: CG15309-PA [Drosophila melanogaster]
  misc_feature (15)..(109): NCBI GI NO: 9558721 NR Description: yippee-like 1 [Homo sapiens]
  misc_feature (15)..(109): NCBI GI NO: 17865319 NR Description: yippee-like 1; peptidylprolyl isomerase
  misc_feature (15)..(109): NCBI GI NO: 20840809 NR Description: similar to hypothetical protein FLJ30213
  misc_feature (15)..(109): NCBI GI NO: 40255199 NR Description: hypothetical protein MGC10500 [Homo sapiens]
MGLLFLERLEGEGVFRCRRCRVDAASKDAIISRDFYGRSGRAYLFDHVVNICLGPNEDRYLVTGLHTVNDIYCSCCQQILGWRYEKAYEQSQKYKEGKYILERARMVKDG

SEQ ID NO: 23508 - DNA, 1183 bp, Zea mays subsp. mays
  misc_feature (1)..(1183): Ceres Seq. ID no. 13499096
atcctccaacgactcacctcccacccactcacccaccccatggcgaccaacccctccaacggcgccggcgccgacgtccctgcagccccggcggcggtgcggctctcggttgcggcgcaggcggccgcgatccagccctcgtccccgcgcttcttcttctcctcgcttgccgggaccaacccggcctccccgcaccgtcgcatcgccatcgccgttgatctctccgacgagtccgccttcgcagtcaagtgggccgtgcagaactacgtccgccccggggacgccgtcgtgctgctccacgtgcgccccacctccgtcctctacggcgccgactggggttccatcccggtctccgtcgctgacgaggacgacgctgccgaggacgccgccgccgccgccgagggcgatccctcggaggaggagctgcagaagaaacgggaggaggactacgacgccttcacctccaccaaggcgcaggacctcgcgcaaccgctggtcgacgcccagatccccttcaagatccacgtcgtcaaggaccacgacatgaaggagcgcctctgcctcgaggctgagcgccttggcctctccgccatgatcatggggagccgcggtttcggggcctcccggaaaggcagcaaggggcggcttgggagtgttagtgattactgcgtacaccactgtgtatgccctgttgtggttgttcgctaccctgatgatgctgcagatgccggtggagatgcatcaggggtgacagatgagttgcacactgtaccagaggacgaacctgtttatcacgatgcacctgaggtgcagaaagaaaactgaggcaacggccacatgcagctgaagaacgaaggaaaacacgaggcttatagtgaggcaatcctgtgtatctggaagatgggaccggatgtttatctttgcttctatatatcaactgcgtatcatgatcagctgtctgcttcccgttgagtttcatatcggcgtcgtagatcatctgagttttttgttggtttgcttgtgagatgtagagtactcttcccgtgggtcgaaggtgtcttgcagatgcttgagctttatgttgtcgaacggtagttatctacacggtatcatctgctctgttaagcctgtttagtgtttactgtattggatactcgttaatagagaaccgctacttttcagt

SEQ ID NO: 23509 - protein, 274 aa, Zea mays subsp. mays
  peptide (1)..(274): Ceres Seq. ID no. 13499097
  misc_feature (64)..(235): Pfam Name: Pfam Description:  Universal stress protein family
  misc_feature (14)..(272): NCBI GI NO: 34910112 NR Description: B1100D10.31
  misc_feature (2)..(274): NCBI GI NO: 28971968 NR Description: OSJNBb0041B22.10
  misc_feature (2)..(273): NCBI GI NO: 33146953 NR Description: CHP-rich zinc finger protein-like
  misc_feature (59)..(271): NCBI GI NO: 25402657 NR Description: protein T23J18.3 [imported] - Arabidopsis thaliana
  misc_feature (59)..(271): NCBI GI NO: 30682187 NR Description: expressed protein [Arabidopsis thaliana]
  misc_feature (46)..(239): NCBI GI NO: 7486798 NR Description: hypothetical protein M4I22
  misc_feature (46)..(239): NCBI GI NO: 18416966 NR Description: expressed protein [Arabidopsis thaliana]
  misc_feature (54)..(239): NCBI GI NO: 8885586 NR Description: gene_id:F24B18
  misc_feature (54)..(239): NCBI GI NO: 18423628 NR Description: expressed protein [Arabidopsis thaliana]
  misc_feature (156)..(261): NCBI GI NO: 15232490 NR Description: CHP-rich zinc finger protein, putative
ILQRLTSHPLTHPMATNPSNGAGADVPAAPAAVRLSVAAQAAAIQPSSPRFFFSSLAGTNPASPHRRIAIAVDLSDESAFAVKWAVQNYVRPGDAVVLLHVRPTSVLYGADWGSIPVSVADEDDAAEDAAAAAEGDPSEEELQKKREEDYDAFTSTKAQDLAQPLVDAQIPFKIHVVKDHDMKERLCLEAERLGLSAMIMGSRGFGASRKGSKGRLGSVSDYCVHHCVCPVVVVRYPDDAADAGGDASGVTDELHTVPEDEPVYHDAPEVQKEN

SEQ ID NO: 23510 - protein, 261 aa, Zea mays subsp. mays
  peptide (1)..(261): Ceres Seq. ID no. 13499098
  misc_feature (51)..(222): Pfam Name: Pfam Description:  Universal stress protein family
  misc_feature (1)..(259): NCBI GI NO: 34910112 NR Description: B1100D10.31
  misc_feature (1)..(261): NCBI GI NO: 28971968 NR Description: OSJNBb0041B22.10
  misc_feature (1)..(260): NCBI GI NO: 33146953 NR Description: CHP-rich zinc finger protein-like
  misc_feature (46)..(258): NCBI GI NO: 25402657 NR Description: protein T23J18.3 [imported] - Arabidopsis thaliana
  misc_feature (46)..(258): NCBI GI NO: 30682187 NR Description: expressed protein [Arabidopsis thaliana]
  misc_feature (33)..(226): NCBI GI NO: 7486798 NR Description: hypothetical protein M4I22
  misc_feature (33)..(226): NCBI GI NO: 18416966 NR Description: expressed protein [Arabidopsis thaliana]
  misc_feature (41)..(226): NCBI GI NO: 8885586 NR Description: gene_id:F24B18
  misc_feature (41)..(226): NCBI GI NO: 18423628 NR Description: expressed protein [Arabidopsis thaliana]
  misc_feature (143)..(248): NCBI GI NO: 15232490 NR Description: CHP-rich zinc finger protein, putative
MATNPSNGAGADVPAAPAAVRLSVAAQAAAIQPSSPRFFFSSLAGTNPASPHRRIAIAVDLSDESAFAVKWAVQNYVRPGDAVVLLHVRPTSVLYGADWGSIPVSVADEDDAAEDAAAAAEGDPSEEELQKKREEDYDAFTSTKAQDLAQPLVDAQIPFKIHVVKDHDMKERLCLEAERLGLSAMIMGSRGFGASRKGSKGRLGSVSDYCVHHCVCPVVVVRYPDDAADAGGDASGVTDELHTVPEDEPVYHDAPEVQKEN

SEQ ID NO: 23511 - protein, 181 aa, Zea mays subsp. mays
  peptide (1)..(181): Ceres Seq. ID no. 13499099
  misc_feature (2)..(181): Pfam Name: Pfam Description:  Formin Homology 2 Domain
  misc_feature (6)..(181): NCBI GI NO: 188864 NR Description: mucin
  misc_feature (6)..(172): NCBI GI NO: 9630030 NR Description: unknown
  misc_feature (1)..(181): NCBI GI NO: 188864 NR Description: mucin
  misc_feature (6)..(181): NCBI GI NO: 15230108 NR Description: protein kinase -related [Arabidopsis thaliana]
  misc_feature (5)..(181): NCBI GI NO: 228937 NR Description: Hyp-rich glycoprotein
  misc_feature (6)..(181): NCBI GI NO: 188864 NR Description: mucin
  misc_feature (6)..(181): NCBI GI NO: 186396 NR Description: mucin
  misc_feature (6)..(181): NCBI GI NO: 23017082 NR Description: hypothetical protein [Thermobifida fusca]
  misc_feature (1)..(176): NCBI GI NO: 81286 NR Description: extensin - Volvox carteri (fragment)
  misc_feature (6)..(181): NCBI GI NO: 186396 NR Description: mucin
SSNDSPPTHSPTPWRPTPPTAPAPTSLQPRRRCGSRLRRRRPRSSPRPRASSSPRLPGPTRPPRTVASPSPLISPTSPPSQSSGPCRTTSAPGTPSCCSTCAPPPSSTAPTGVPSRSPSLTRTTLPRTPPPPPRAIPRRRSCRRNGRRTTTPSPPPRRRTSRNRWSTPRSPSRSTSSRTTT

SEQ ID NO: 23512 - DNA, 659 bp, Zea mays subsp. mays
  misc_feature (1)..(659): Ceres Seq. ID no. 12345880
gtcaaagaggggagaggagcagatgaaggcggggaggaagaacctgcggcgggcgtgcgacgaaggcgccgccgtcacgctcgccgagggcgagagcatcatgcaggtcctcacgctgcgtggctccaacgtcatcgaggtgattgacggcgagggcatcaagtccctggccttgttccctgccaagttccagaagagcttctggatcaagaacgcggaagggatcaagctctggaatcagggagcaagattgcgtgtgttgtctcgcaagtcctctaccacgaacaagttcgggctctggagaagtccggtaattggccagctattttcaactcaactccgaatgaagcttcagaagcgggaacacaagcgcaaattgctgccaagattgacgagttgccagattctgatgaagacgacaatcttccaccagttgaagcaaacaccaacaggaatagaccatatgaactgtattatgactcagacagtggcggttctgattcttaaactagtttagttgccattcatgttgtaatgcgcgcctgctgtgctttcttgttcattcacgttgatggtttttttttctttgaagataaagattgtctgcgctgccaaagatatatttgtgatatgaatggaatggctggacctggagctat

SEQ ID NO: 23513 - protein, 171 aa, Zea mays subsp. mays
  peptide (1)..(171): Ceres Seq. ID no. 12345881
  misc_feature (8)..(71): NCBI GI NO: 34902168 NR Description: Hypothetical protein
  misc_feature (8)..(81): NCBI GI NO: 15226743 NR Description: putative translation initiation factor
  misc_feature (25)..(73): NCBI GI NO: 32766657 NR Description: Unknown (protein for MGC:63631) [Danio rerio]
  misc_feature (22)..(73): NCBI GI NO: 31377656 NR Description: hypothetical protein MGC11102 [Homo sapiens]
  misc_feature (22)..(73): NCBI GI NO: 13477313 NR Description: MGC11102 protein [Homo sapiens]
  misc_feature (22)..(73): NCBI GI NO: 20884771 NR Description: RIKEN cDNA 2010003J03 [Mus musculus]
  misc_feature (22)..(73): NCBI GI NO: 12842024 NR Description: unnamed protein product [Mus musculus]
  misc_feature (22)..(73): NCBI GI NO: 34861445 NR Description: similar to 2010003J03Rik protein
SKRGEEQMKAGRKNLRRACDEGAAVTLAEGESIMQVLTLRGSNVIEVIDGEGIKSLALFPAKFQKSFWIKNAEGIKLWNQGARLRVLSRKSSTTNKFGLWRSPVIGQLFSTQLRMKLQKREHKRKLLPRLTSCQILMKTTIFHQLKQTPTGIDHMNCIMTQTVAVLILKLV

SEQ ID NO: 23514 - protein, 164 aa, Zea mays subsp. mays
  peptide (1)..(164): Ceres Seq. ID no. 12345882
  misc_feature (1)..(64): NCBI GI NO: 34902168 NR Description: Hypothetical protein
  misc_feature (1)..(74): NCBI GI NO: 15226743 NR Description: putative translation initiation factor
  misc_feature (18)..(66): NCBI GI NO: 32766657 NR Description: Unknown (protein for MGC:63631) [Danio rerio]
  misc_feature (15)..(66): NCBI GI NO: 31377656 NR Description: hypothetical protein MGC11102 [Homo sapiens]
  misc_feature (15)..(66): NCBI GI NO: 13477313 NR Description: MGC11102 protein [Homo sapiens]
  misc_feature (15)..(66): NCBI GI NO: 20884771 NR Description: RIKEN cDNA 2010003J03 [Mus musculus]
  misc_feature (15)..(66): NCBI GI NO: 12842024 NR Description: unnamed protein product [Mus musculus]
  misc_feature (15)..(66): NCBI GI NO: 34861445 NR Description: similar to 2010003J03Rik protein
MKAGRKNLRRACDEGAAVTLAEGESIMQVLTLRGSNVIEVIDGEGIKSLALFPAKFQKSFWIKNAEGIKLWNQGARLRVLSRKSSTTNKFGLWRSPVIGQLFSTQLRMKLQKREHKRKLLPRLTSCQILMKTTIFHQLKQTPTGIDHMNCIMTQTVAVLILKLV

SEQ ID NO: 23515 - protein, 138 aa, Zea mays subsp. mays
  peptide (1)..(138): Ceres Seq. ID no. 12345883
  misc_feature (1)..(38): NCBI GI NO: 34902168 NR Description: Hypothetical protein
  misc_feature (1)..(48): NCBI GI NO: 15226743 NR Description: putative translation initiation factor
  misc_feature (1)..(40): NCBI GI NO: 32766657 NR Description: Unknown (protein for MGC:63631) [Danio rerio]
  misc_feature (1)..(40): NCBI GI NO: 31377656 NR Description: hypothetical protein MGC11102 [Homo sapiens]
  misc_feature (1)..(40): NCBI GI NO: 13477313 NR Description: MGC11102 protein [Homo sapiens]
  misc_feature (1)..(40): NCBI GI NO: 20884771 NR Description: RIKEN cDNA 2010003J03 [Mus musculus]
  misc_feature (1)..(40): NCBI GI NO: 12842024 NR Description: unnamed protein product [Mus musculus]
  misc_feature (1)..(40): NCBI GI NO: 34861445 NR Description: similar to 2010003J03Rik protein
MQVLTLRGSNVIEVIDGEGIKSLALFPAKFQKSFWIKNAEGIKLWNQGARLRVLSRKSSTTNKFGLWRSPVIGQLFSTQLRMKLQKREHKRKLLPRLTSCQILMKTTIFHQLKQTPTGIDHMNCIMTQTVAVLILKLV

SEQ ID NO: 23516 - DNA, 1374 bp, Zea mays subsp. mays
  misc_feature (1)..(1374): Ceres Seq. ID no. 12351930
agcatctccaacaaacaccagacgtcgtatagcggcagtccagtccacctcctccgaagccgacggtcgccgccggccatcgccgcggaggatatggcgtccctccgtgtggtgtcggtgctagtgttggtggcaatggcggcgagcgcgggcggcgtcgcggcgcggcctctggtaggggtaggcggggcgtgggagaacagggcgccgctgcagacgtcgcgccccttcaacatcgcgcaccggggctccaacggggagctccccgaggagacggcggcggcctacgcggcgcgccatcgacgagggcgcggacttcatcgaggcggacatcgaggccaccaaggacggccacctcgtctgcttccacgacaccacgctcgacggtaccaccgacgtcgcccaccacccggagttcgccggccgccggcgcaccctcgaggtgcagtgggccaacgtcaccggatacttcgtcactgatttcacgctggcggagctcaagacgctgcgggcgaagcagcgatgggacttccgtgacaagtcccacaacggcgtctcgccgatcatcacgttcgacgagttcatcgacgtcgcgctgaacgccaagaggggtcgggatctacccggagatgaagaaccctgtgttcatgaacaagcacgtgcagtgggctgacgggaagaagtacgaggacaagttcatcgcgacgctgaagaagtacggctacggcggcaagtacatgtcgccggcgtggcgcgccaggccggtcttcgtccagtctttcgcgccgacgtcgctggtccgcgcggccggcctcacggactcgccgctcgtcttcctcgtcgacgacgtgaccgtgcggaccgaggacaccaaccagccgtacgacgatatcacctccggcgagcacctggactacatgaacaggtacgtggtgggcatcgggccctggaaggacacggtggtgccgccgaccaaggacaaccggctggccacgccgtcggacctcgtcgcaatggcgcacgcgaggggactgcaggtgcacccctacacgtaccgcaacgagaacaagttcctgcacttcgacttccggcaggacccctacgccgagtacgactactggatcaacgacgtcggcatcgatggcctcttcaccgacttcccggcgagcctccgccggttccaggagtggaccgccaagaacaaagactgattgtgattggcaactcggtcttggtagctagcttctttgattcagtcattcagatcgtagctctggagatgttttcagggtagagacaattctttggtgttccttgttttaaatagccatatattttcttgattggatcagtaacagttaacagttcttacct

SEQ ID NO: 23517 - protein, 193 aa, Zea mays subsp. mays
  peptide (1)..(193): Ceres Seq. ID no. 12351931
  misc_feature (1)..(192): NCBI GI NO: 34394918 NR Description: putative glycerophosphoryl diesterphosphodiesterase
  misc_feature (1)..(186): NCBI GI NO: 15241502 NR Description: glycerophosphodiester phosphodiesterase
  misc_feature (1)..(193): NCBI GI NO: 34909788 NR Description: putative glycerophosphoryl diesterphosphodiesterase
  misc_feature (1)..(193): NCBI GI NO: 15221164 NR Description: putative glycerophosphodiester phosphodiesterase
  misc_feature (1)..(179): NCBI GI NO: 16127502 NR Description: glycerophosphoryl diester phosphodiesterase
  misc_feature (1)..(178): NCBI GI NO: 32141147 NR Description: putative glycerophosphoryl diesterphosphodiesterase
  misc_feature (1)..(178): NCBI GI NO: 23126501 NR Description: hypothetical protein [Nostoc punctiforme]
  misc_feature (1)..(176): NCBI GI NO: 29833326 NR Description: putative glycerophosphoryl diesterphosphodiesterase
  misc_feature (16)..(176): NCBI GI NO: 23019457 NR Description: hypothetical protein [Thermobifida fusca]
  misc_feature (1)..(186): NCBI GI NO: 15595544 NR Description: glycerophosphoryl diester phosphodiesterase
MKNPVFMNKHVQWADGKKYEDKFIATLKKYGYGGKYMSPAWRARPVFVQSFAPTSLVRAAGLTDSPLVFLVDDVTVRTEDTNQPYDDITSGEHLDYMNRYVVGIGPWKDTVVPPTKDNRLATPSDLVAMAHARGLQVHPYTYRNENKFLHFDFRQDPYAEYDYWINDVGIDGLFTDFPASLRRFQEWTAKNKD

SEQ ID NO: 23518 - protein, 187 aa, Zea mays subsp. mays
  peptide (1)..(187): Ceres Seq. ID no. 12351932
  misc_feature (1)..(186): NCBI GI NO: 34394918 NR Description: putative glycerophosphoryl diesterphosphodiesterase
  misc_feature (1)..(180): NCBI GI NO: 15241502 NR Description: glycerophosphodiester phosphodiesterase
  misc_feature (1)..(187): NCBI GI NO: 34909788 NR Description: putative glycerophosphoryl diesterphosphodiesterase
  misc_feature (1)..(187): NCBI GI NO: 15221164 NR Description: putative glycerophosphodiester phosphodiesterase
  misc_feature (1)..(173): NCBI GI NO: 16127502 NR Description: glycerophosphoryl diester phosphodiesterase
  misc_feature (1)..(172): NCBI GI NO: 32141147 NR Description: putative glycerophosphoryl diesterphosphodiesterase
  misc_feature (1)..(172): NCBI GI NO: 23126501 NR Description: hypothetical protein [Nostoc punctiforme]
  misc_feature (1)..(170): NCBI GI NO: 29833326 NR Description: putative glycerophosphoryl diesterphosphodiesterase
  misc_feature (10)..(170): NCBI GI NO: 23019457 NR Description: hypothetical protein [Thermobifida fusca]
  misc_feature (1)..(180): NCBI GI NO: 15595544 NR Description: glycerophosphoryl diester phosphodiesterase
MNKHVQWADGKKYEDKFIATLKKYGYGGKYMSPAWRARPVFVQSFAPTSLVRAAGLTDSPLVFLVDDVTVRTEDTNQPYDDITSGEHLDYMNRYVVGIGPWKDTVVPPTKDNRLATPSDLVAMAHARGLQVHPYTYRNENKFLHFDFRQDPYAEYDYWINDVGIDGLFTDFPASLRRFQEWTAKNKD

SEQ ID NO: 23519 - protein, 159 aa, Zea mays subsp. mays
  peptide (1)..(159): Ceres Seq. ID no. 12351933
  misc_feature (40)..(96): NCBI GI NO: 15241502 NR Description: glycerophosphodiester phosphodiesterase
  misc_feature (57)..(96): NCBI GI NO: 34909788 NR Description: putative glycerophosphoryl diesterphosphodiesterase
  misc_feature (32)..(96): NCBI GI NO: 15221164 NR Description: putative glycerophosphodiester phosphodiesterase
  misc_feature (69)..(103): NCBI GI NO: 16127502 NR Description: glycerophosphoryl diester phosphodiesterase
SISNKHQTSYSGSPVHLLRSRRSPPAIAAEDMASLRVVSVLVLVAMAASAGGVAARPLVGVGGAWENRAPLQTSRPFNIAHRGSNGELPEETAAAYAARHRRGRGLHRGGHRGHQGRPPRLLPRHHARRYHRRRPPPGVRRPPAHPRGAVGQRHRILRH

SEQ ID NO: 23520 - DNA, 1330 bp, Zea mays subsp. mays
  misc_feature (1)..(1330): Ceres Seq. ID no. 12368522
ctccccctccgcctcttgctctctctcgcctctggttggcagagctctcttgaagcctcgagactcgtctcgccgctgctccctcagctctgccgctgcgtgcctgcgttagctgttgcattgcagcgcagccccgcgagccttgagctgctagctcgcccttcaccacagtccccagacatggagttcgaagaccgctgccacaaggtccaggagcccaagttcgactgcctgctcttcgacctcgacgacaccctgtacccgctgagcgccgggatcgcaggccatgtcaagaagaacattgaagattacatggttgagaagctgggtattgacgagaccaagatcgagaacctgggcaatctgctgtacaagaactacggcaccacgatggctggcctcagggccatcggctacagcttcgattacgatgagtaccacgccttcgtccatggaaggctgccgtacgacaacatcaagcctgaccccattctcaagcacattctcaagaacctgcgcatccgcaaactcatattcaccaacggtgacatggtccacgccgtgagagccctcaagaggctgggcctggaggactgcttcgaggggatcatctgcttcgagaccctgaacccgccctgcccgccgcagggagaccaggagcccgagatcttcgacatcgccgaccacttcgcccgctccggcaccgccgacgagctgcccaagacccccgtgctgtgcaagcccaacgtggacgccatggaggaggcgctcaggatcgccaacgtcaacccgcacaaggcgatcttcttcgacgacagcgtacgcaacatccaggccgggaagcagattggcctccacacggtgctggtgggcaaatcgcagcgggtgaaaggcgcggaccacgcgctggagagcatccacaacatcagggaagcgctgccggagctgtgggaggaggccgagaaggcggaggacgtgctctaccccgaacgcgttgcgatggagacctcggtcaccgcgtaaaacccctgaatgcctccggtgcaccgtcagccgaactttctcgacatctccaggaccgcatcaacgatcacatgtcactcgctccccgagccagggccggtgatgatctcgcgctggaactgaatccaccagcaatgggcgggccgaggatcgatttccgacagcaggaggggtgcagcatgtaaagggggaacagatgagatcatgtttgggttggtcccccgttgtatatgtagttatgtatcagccagtcctttgtttgtaaattaccagtatttagaagtaataagaaaatgggggtttacgt

SEQ ID NO: 23521 - protein, 340 aa, Zea mays subsp. mays
  peptide (1)..(340): Ceres Seq. ID no. 12368523
  misc_feature (75)..(293): Pfam Name: Pfam Description:  haloacid dehalogenase-like hydrolase
  misc_feature (61)..(211): NCBI GI NO: 7406669 NR Description: putative ripening-related protein [Vitis vinifera]
  misc_feature (222)..(340): NCBI GI NO: 7406669 NR Description: putative ripening-related protein [Vitis vinifera]
  misc_feature (61)..(340): NCBI GI NO: 15241720 NR Description: putative protein; protein id: At5g02230
  misc_feature (61)..(340): NCBI GI NO: 21593165 NR Description: unknown [Arabidopsis thaliana]
  misc_feature (61)..(336): NCBI GI NO: 30697234 NR Description: haloacid dehalogenase-like hydrolase family
  misc_feature (61)..(336): NCBI GI NO: 30697236 NR Description: haloacid dehalogenase-like hydrolase family
  misc_feature (61)..(336): NCBI GI NO: 21618155 NR Description: putative ripening-related protein-like
  misc_feature (58)..(340): NCBI GI NO: 8885554 NR Description: ripening-related protein-like; hydrolase-like
  misc_feature (73)..(340): NCBI GI NO: 15238429 NR Description: putative ripening-related protein - like
  misc_feature (70)..(340): NCBI GI NO: 40714684 NR Description: expressed protein
LPLRLLLSLASGWQSSLEASRLVSPLLPQLCRCVPALAVALQRSPASLELLARPSPQSPDMEFEDRCHKVQEPKFDCLLFDLDDTLYPLSAGIAGHVKKNIEDYMVEKLGIDETKIENLGNLLYKNYGTTMAGLRAIGYSFDYDEYHAFVHGRLPYDNIKPDPILKHILKNLRIRKLIFTNGDMVHAVRALKRLGLEDCFEGIICFETLNPPCPPQGDQEPEIFDIADHFARSGTADELPKTPVLCKPNVDAMEEALRIANVNPHKAIFFDDSVRNIQAGKQIGLHTVLVGKSQRVKGADHALESIHNIREALPELWEEAEKAEDVLYPERVAMETSVTA

SEQ ID NO: 23522 - protein, 280 aa, Zea mays subsp. mays
  peptide (1)..(280): Ceres Seq. ID no. 12368524
  misc_feature (15)..(233): Pfam Name: Pfam Description:  haloacid dehalogenase-like hydrolase
  misc_feature (1)..(151): NCBI GI NO: 7406669 NR Description: putative ripening-related protein [Vitis vinifera]
  misc_feature (162)..(280): NCBI GI NO: 7406669 NR Description: putative ripening-related protein [Vitis vinifera]
  misc_feature (1)..(280): NCBI GI NO: 15241720 NR Description: putative protein; protein id: At5g02230
  misc_feature (1)..(280): NCBI GI NO: 21593165 NR Description: unknown [Arabidopsis thaliana]
  misc_feature (1)..(276): NCBI GI NO: 30697234 NR Description: haloacid dehalogenase-like hydrolase family
  misc_feature (1)..(276): NCBI GI NO: 30697236 NR Description: haloacid dehalogenase-like hydrolase family
  misc_feature (1)..(276): NCBI GI NO: 21618155 NR Description: putative ripening-related protein-like
  misc_feature (1)..(280): NCBI GI NO: 8885554 NR Description: ripening-related protein-like; hydrolase-like
  misc_feature (13)..(280): NCBI GI NO: 15238429 NR Description: putative ripening-related protein - like
  misc_feature (10)..(280): NCBI GI NO: 40714684 NR Description: expressed protein
MEFEDRCHKVQEPKFDCLLFDLDDTLYPLSAGIAGHVKKNIEDYMVEKLGIDETKIENLGNLLYKNYGTTMAGLRAIGYSFDYDEYHAFVHGRLPYDNIKPDPILKHILKNLRIRKLIFTNGDMVHAVRALKRLGLEDCFEGIICFETLNPPCPPQGDQEPEIFDIADHFARSGTADELPKTPVLCKPNVDAMEEALRIANVNPHKAIFFDDSVRNIQAGKQIGLHTVLVGKSQRVKGADHALESIHNIREALPELWEEAEKAEDVLYPERVAMETSVTA

SEQ ID NO: 23523 - protein, 236 aa, Zea mays subsp. mays
  peptide (1)..(236): Ceres Seq. ID no. 12368525
  misc_feature (1)..(189): Pfam Name: Pfam Description:  haloacid dehalogenase-like hydrolase
  misc_feature (1)..(107): NCBI GI NO: 7406669 NR Description: putative ripening-related protein [Vitis vinifera]
  misc_feature (118)..(236): NCBI GI NO: 7406669 NR Description: putative ripening-related protein [Vitis vinifera]
  misc_feature (1)..(236): NCBI GI NO: 15241720 NR Description: putative protein; protein id: At5g02230
  misc_feature (1)..(236): NCBI GI NO: 21593165 NR Description: unknown [Arabidopsis thaliana]
  misc_feature (1)..(232): NCBI GI NO: 30697234 NR Description: haloacid dehalogenase-like hydrolase family
  misc_feature (1)..(232): NCBI GI NO: 30697236 NR Description: haloacid dehalogenase-like hydrolase family
  misc_feature (1)..(232): NCBI GI NO: 21618155 NR Description: putative ripening-related protein-like
  misc_feature (1)..(236): NCBI GI NO: 8885554 NR Description: ripening-related protein-like; hydrolase-like
  misc_feature (1)..(236): NCBI GI NO: 15238429 NR Description: putative ripening-related protein - like
  misc_feature (1)..(236): NCBI GI NO: 40714684 NR Description: expressed protein
MVEKLGIDETKIENLGNLLYKNYGTTMAGLRAIGYSFDYDEYHAFVHGRLPYDNIKPDPILKHILKNLRIRKLIFTNGDMVHAVRALKRLGLEDCFEGIICFETLNPPCPPQGDQEPEIFDIADHFARSGTADELPKTPVLCKPNVDAMEEALRIANVNPHKAIFFDDSVRNIQAGKQIGLHTVLVGKSQRVKGADHALESIHNIREALPELWEEAEKAEDVLYPERVAMETSVTA

SEQ ID NO: 23524 - DNA, 1440 bp, Zea mays subsp. mays
  misc_feature (1)..(1440): Ceres Seq. ID no. 12391399
  misc_feature (26)..(26): n is a, c, t, g, unknown, or other
gcacgagaccattacctagaacatcntaatcgaaaagcgccgctgttcgcaacccaagcagtagccgagccaacgaaggcgtgcgagcggaggcaatcatacatggacggcagccgcaagagggtggacgcggaagacgtcaaaggggattccaccggcgggaagcgattgcgagcatcggagtcatttcaaagtggcgtaggaagcaaagtgaagctatgcaccaattttttcagtacttatggttgtccctttggtgagggctgccattttgtccattacttccctggtgactaccgggccgtttcagaaatgaccaacctgggtggcgcaacaatcgcacctcctggaggaatgatgatggatgggccacctacacccatcgtgaagactcgcttgtgcaacaagtacaacactgcagagggatgcaaatggggggacagatgccactttgcacatggtgaaagtgagcttggcaagtctatgatggacaactatatgccaccccccatcggaccaccaccaaccggttattttgcacctccacctatggcacctccacctatggcgcctccacccatggcacctccacctatggcacctctacctatggcgcctccacccatggcacctccacctatggcgcctccacccatggcacctccacctatggcgcctctacctatggcgcctccacctatggcacctccacctatggcacctccacccatggcgcctccacccatggcacctctacctatggcgcctccacccatggcacctccacctatggccaaccctggtttggccactccagctagcttcggcgcttatgccacggccaagatcagtgtcgatgcgtcccttgcaggtggcatcattgggaagggtggagctaacataaagcaaatatcttccgtcacaggggccaaggtggtcattcaggaggaccgccatgaatcagacaccagctttgaaaaacattgagttttgagggcacctttgatcagatcaggaacgctagtgctatggtcatcgagctgattgttagcatcagtggcataggaagcaacttcaagaccaagatgtgtgagaacttcgcaaaagggtcatgctcttatggcggcaaatgcccactttgcccatggtgagagtgagctgcgcaagcctgccgctgcttgagatccatgccctgtttcttacctcatagtcattagtcaatgtaactcaaaacttggcctctgatgatggatttgttggcttctttaggtctacgctaatgaattgctggcttcaggcctactactaaatttgctgacttctttagtccttcgctgttggccaactaaatctgttttctgcgtttgttcttgaatgttctcctatgatctaatcctctatttaggttcaaccagagaagtgttgatgctgatgatttgc

SEQ ID NO: 23525 - protein, 328 aa, Zea mays subsp. mays
  peptide (1)..(328): Ceres Seq. ID no. 12391400
  misc_feature (168)..(271): Pfam Name: Pfam Description:  Formin Homology 2 Domain
  misc_feature (37)..(192): NCBI GI NO: 5441893 NR Description: ESTs C99174
  misc_feature (35)..(108): NCBI GI NO: 15240145 NR Description: KH domain/zinc finger protein
  misc_feature (266)..(326): NCBI GI NO: 15240145 NR Description: KH domain/zinc finger protein
  misc_feature (35)..(109): NCBI GI NO: 18399496 NR Description: KH domain/zinc finger protein
  misc_feature (273)..(328): NCBI GI NO: 18399496 NR Description: KH domain/zinc finger protein
  misc_feature (35)..(108): NCBI GI NO: 21555233 NR Description: unknown [Arabidopsis thaliana]
  misc_feature (266)..(326): NCBI GI NO: 21555233 NR Description: unknown [Arabidopsis thaliana]
  misc_feature (273)..(328): NCBI GI NO: 9294110 NR Description: contains similarity to unknownprotein~dbj|BAA82391
  misc_feature (55)..(109): NCBI GI NO: 9294110 NR Description: contains similarity to unknownprotein~dbj|BAA82391
  misc_feature (110)..(161): NCBI GI NO: 18399496 NR Description: KH domain/zinc finger protein
  misc_feature (9)..(9): Xaa is any aa, unknown or other
ARDHYLEHXNRKAPLFATQAVAEPTKACERRQSYMDGSRKRVDAEDVKGDSTGGKRLRASESFQSGVGSKVKLCTNFFSTYGCPFGEGCHFVHYFPGDYRAVSEMTNLGGATIAPPGGMMMDGPPTPIVKTRLCNKYNTAEGCKWGDRCHFAHGESELGKSMMDNYMPPPIGPPPTGYFAPPPMAPPPMAPPPMAPPPMAPLPMAPPPMAPPPMAPPPMAPPPMAPLPMAPPPMAPPPMAPPPMAPPPMAPLPMAPPPMAPPPMANPGLATPASFGAYATAKISVDASLAGGIIGKGGANIKQISSVTGAKVVIQEDRHESDTSFEKH

SEQ ID NO: 23526 - protein, 294 aa, Zea mays subsp. mays
  peptide (1)..(294): Ceres Seq. ID no. 12391401
  misc_feature (134)..(237): Pfam Name: Pfam Description:  Formin Homology 2 Domain
  misc_feature (3)..(158): NCBI GI NO: 5441893 NR Description: ESTs C99174
  misc_feature (1)..(74): NCBI GI NO: 15240145 NR Description: KH domain/zinc finger protein
  misc_feature (232)..(292): NCBI GI NO: 15240145 NR Description: KH domain/zinc finger protein
  misc_feature (1)..(75): NCBI GI NO: 18399496 NR Description: KH domain/zinc finger protein
  misc_feature (239)..(294): NCBI GI NO: 18399496 NR Description: KH domain/zinc finger protein
  misc_feature (1)..(74): NCBI GI NO: 21555233 NR Description: unknown [Arabidopsis thaliana]
  misc_feature (232)..(292): NCBI GI NO: 21555233 NR Description: unknown [Arabidopsis thaliana]
  misc_feature (239)..(294): NCBI GI NO: 9294110 NR Description: contains similarity to unknownprotein~dbj|BAA82391
  misc_feature (21)..(75): NCBI GI NO: 9294110 NR Description: contains similarity to unknownprotein~dbj|BAA82391
  misc_feature (76)..(127): NCBI GI NO: 18399496 NR Description: KH domain/zinc finger protein
MDGSRKRVDAEDVKGDSTGGKRLRASESFQSGVGSKVKLCTNFFSTYGCPFGEGCHFVHYFPGDYRAVSEMTNLGGATIAPPGGMMMDGPPTPIVKTRLCNKYNTAEGCKWGDRCHFAHGESELGKSMMDNYMPPPIGPPPTGYFAPPPMAPPPMAPPPMAPPPMAPLPMAPPPMAPPPMAPPPMAPPPMAPLPMAPPPMAPPPMAPPPMAPPPMAPLPMAPPPMAPPPMANPGLATPASFGAYATAKISVDASLAGGIIGKGGANIKQISSVTGAKVVIQEDRHESDTSFEKH

SEQ ID NO: 23527 - protein, 224 aa, Zea mays subsp. mays
  peptide (1)..(224): Ceres Seq. ID no. 12391402
  misc_feature (64)..(167): Pfam Name: Pfam Description:  Formin Homology 2 Domain
  misc_feature (1)..(88): NCBI GI NO: 5441893 NR Description: ESTs C99174
  misc_feature (162)..(222): NCBI GI NO: 15240145 NR Description: KH domain/zinc finger protein
  misc_feature (169)..(224): NCBI GI NO: 18399496 NR Description: KH domain/zinc finger protein
  misc_feature (162)..(222): NCBI GI NO: 21555233 NR Description: unknown [Arabidopsis thaliana]
  misc_feature (169)..(224): NCBI GI NO: 9294110 NR Description: contains similarity to unknownprotein~dbj|BAA82391
  misc_feature (6)..(57): NCBI GI NO: 18399496 NR Description: KH domain/zinc finger protein
  misc_feature (64)..(169): NCBI GI NO: 7441828 NR Description: extensin-like cell wall protein
  misc_feature (64)..(169): NCBI GI NO: 7441829 NR Description: proline-rich cell wall protein - upland cotton
  misc_feature (64)..(170): NCBI GI NO: 6523547 NR Description: hydroxyproline-rich glycoprotein DZ-HRGP
  misc_feature (6)..(57): NCBI GI NO: 9294110 NR Description: contains similarity to unknownprotein~dbj|BAA82391
MTNLGGATIAPPGGMMMDGPPTPIVKTRLCNKYNTAEGCKWGDRCHFAHGESELGKSMMDNYMPPPIGPPPTGYFAPPPMAPPPMAPPPMAPPPMAPLPMAPPPMAPPPMAPPPMAPPPMAPLPMAPPPMAPPPMAPPPMAPPPMAPLPMAPPPMAPPPMANPGLATPASFGAYATAKISVDASLAGGIIGKGGANIKQISSVTGAKVVIQEDRHESDTSFEKH

SEQ ID NO: 23528 - DNA, 1306 bp, Zea mays subsp. mays
  misc_feature (1)..(1306): Ceres Seq. ID no. 12351938
caagcattcgcatagcccgcgccgcaagtattcgcggtcgcacaggctggtccagtccaacaccggcctccctgtttcgatgctggccacaagctcgcccggccgcccggggtgaggatgactgccactcccaccgggctcctccggctccacatctgccgtcgaccaaacccgccctgctaaatactcgctccatacagttctcctcgcaattaacacctccgttagcacgagctgcagggagggagttgggaggagaaacagagctaccggggcgatgggcaccgtgctcgattcgcacttcctggcgctcaccgccatcgttactgtggggtaccagctgctgttcttcatcatcacagctctcctccggttcgataaggtcaccgatttcgcaggcagtacaaattttatcataatcgccatcctaacattagctttgaagggagcatggcatttccgtcagattgtgctgacagtgcttgtcaccatttggggtcttcgtctaggattatttttattgatgaggattttgcaatggggtgaagaccgaaggtttgacaaaatgcgtgataatttggggaaattggcagttttttggattttccaggctgtgtgggtttggtctgtcagcttgcccgtcactgttgtgaatgcaagtgacagaaacccctcgattgaagccagggatataatcggctggataatatggttggtcgggatatgtgtagaagcaacagctgatcagcagaagcttgtgttaaaaaattctccaagtaacaggggaaagtggtgcgacgccggtctttggaagtactctcgccacccgaactactttggggagatattcctttggtggggagtatttgtagcatcgaccccagttatctcagatgccgaatggcttgtgattcttggacctatattcctgactcttctgcttcttttcgttagtggaatcccactcctcgagtcatctgctgataagcgctatggacgattggaggaataccgtgcatacaagaacactacaaggttgccttcctccttgagctcccgctctacaatcctgggccgggaggtgatccaatcagttgagtggtgcttgcaaactgttctgctgcccttcagtgatgaacttgtatagaatatccctgcagtatgtttacgttttttgtttttgttttggtttgacagaactagaatgagcccattgatgggtcagcctgatgtttatgttgctattgtgtgcgtggcagttattccaccttcgattccaaggggttacagtggagtttggcccctg

SEQ ID NO: 23529 - protein, 289 aa, Zea mays subsp. mays
  peptide (1)..(289): Ceres Seq. ID no. 12351939
  misc_feature (1)..(252): NCBI GI NO: 13937298 NR Description: unknown protein [Oryza sativa]
  misc_feature (1)..(284): NCBI GI NO: 15221003 NR Description: hypothetical protein; protein id: At1g18180.1
  misc_feature (1)..(289): NCBI GI NO: 25402844 NR Description: protein T10O22.15
  misc_feature (1)..(252): NCBI GI NO: 18410409 NR Description: expressed protein; protein id: At1g73650
  misc_feature (1)..(252): NCBI GI NO: 30698953 NR Description: expressed protein [Arabidopsis thaliana]
  misc_feature (1)..(252): NCBI GI NO: 21537359 NR Description: unknown [Arabidopsis thaliana]
  misc_feature (82)..(289): NCBI GI NO: 9719732 NR Description: T10F20.18 [Arabidopsis thaliana]
  misc_feature (1)..(64): NCBI GI NO: 9719732 NR Description: T10F20.18 [Arabidopsis thaliana]
  misc_feature (1)..(232): NCBI GI NO: 25406281 NR Description: unknown protein F25P22.7
  misc_feature (4)..(252): NCBI GI NO: 21355723 NR Description: CG6282-PA [Drosophila melanogaster]
MGTVLDSHFLALTAIVTVGYQLLFFIITALLRFDKVTDFAGSTNFIIIAILTLALKGAWHFRQIVLTVLVTIWGLRLGLFLLMRILQWGEDRRFDKMRDNLGKLAVFWIFQAVWVWSVSLPVTVVNASDRNPSIEARDIIGWIIWLVGICVEATADQQKLVLKNSPSNRGKWCDAGLWKYSRHPNYFGEIFLWWGVFVASTPVISDAEWLVILGPIFLTLLLLFVSGIPLLESSADKRYGRLEEYRAYKNTTRLPSSLSSRSTILGREVIQSVEWCLQTVLLPFSDELV

SEQ ID NO: 23530 - protein, 207 aa, Zea mays subsp. mays
  peptide (1)..(207): Ceres Seq. ID no. 12351940
  misc_feature (1)..(170): NCBI GI NO: 13937298 NR Description: unknown protein [Oryza sativa]
  misc_feature (1)..(202): NCBI GI NO: 15221003 NR Description: hypothetical protein; protein id: At1g18180.1
  misc_feature (1)..(207): NCBI GI NO: 25402844 NR Description: protein T10O22.15
  misc_feature (1)..(170): NCBI GI NO: 18410409 NR Description: expressed protein; protein id: At1g73650
  misc_feature (1)..(170): NCBI GI NO: 30698953 NR Description: expressed protein [Arabidopsis thaliana]
  misc_feature (1)..(170): NCBI GI NO: 21537359 NR Description: unknown [Arabidopsis thaliana]
  misc_feature (1)..(207): NCBI GI NO: 9719732 NR Description: T10F20.18 [Arabidopsis thaliana]
  misc_feature (1)..(150): NCBI GI NO: 25406281 NR Description: unknown protein F25P22.7
  misc_feature (1)..(170): NCBI GI NO: 21355723 NR Description: CG6282-PA [Drosophila melanogaster]
  misc_feature (1)..(170): NCBI GI NO: 39997421 NR Description: membrane protein, putative
MRILQWGEDRRFDKMRDNLGKLAVFWIFQAVWVWSVSLPVTVVNASDRNPSIEARDIIGWIIWLVGICVEATADQQKLVLKNSPSNRGKWCDAGLWKYSRHPNYFGEIFLWWGVFVASTPVISDAEWLVILGPIFLTLLLLFVSGIPLLESSADKRYGRLEEYRAYKNTTRLPSSLSSRSTILGREVIQSVEWCLQTVLLPFSDELV

SEQ ID NO: 23531 - protein, 193 aa, Zea mays subsp. mays
  peptide (1)..(193): Ceres Seq. ID no. 12351941
  misc_feature (1)..(156): NCBI GI NO: 13937298 NR Description: unknown protein [Oryza sativa]
  misc_feature (1)..(188): NCBI GI NO: 15221003 NR Description: hypothetical protein; protein id: At1g18180.1
  misc_feature (1)..(193): NCBI GI NO: 25402844 NR Description: protein T10O22.15
  misc_feature (1)..(156): NCBI GI NO: 18410409 NR Description: expressed protein; protein id: At1g73650
  misc_feature (1)..(156): NCBI GI NO: 30698953 NR Description: expressed protein [Arabidopsis thaliana]
  misc_feature (1)..(156): NCBI GI NO: 21537359 NR Description: unknown [Arabidopsis thaliana]
  misc_feature (1)..(193): NCBI GI NO: 9719732 NR Description: T10F20.18 [Arabidopsis thaliana]
  misc_feature (1)..(136): NCBI GI NO: 25406281 NR Description: unknown protein F25P22.7
  misc_feature (1)..(156): NCBI GI NO: 21355723 NR Description: CG6282-PA [Drosophila melanogaster]
  misc_feature (1)..(156): NCBI GI NO: 39997421 NR Description: membrane protein, putative
MRDNLGKLAVFWIFQAVWVWSVSLPVTVVNASDRNPSIEARDIIGWIIWLVGICVEATADQQKLVLKNSPSNRGKWCDAGLWKYSRHPNYFGEIFLWWGVFVASTPVISDAEWLVILGPIFLTLLLLFVSGIPLLESSADKRYGRLEEYRAYKNTTRLPSSLSSRSTILGREVIQSVEWCLQTVLLPFSDELV

SEQ ID NO: 23532 - DNA, 1396 bp, Zea mays subsp. mays
  misc_feature (1)..(1396): Ceres Seq. ID no. 12414291
ctccgtccccatctcgcgaagctagcgggaataacaagcaacgatacctacgacgacctacccccctttccctgctctctccttccaactcttgtttctgcaacgccagggcgcaaccatgggtcagcagcagcaagggccggcggccaggcggatggccacgctcgcctcccacctgcgccatccctccgtctctcaccctcagatggaagatgttcccctcttgaggggatccaattgccgtgcaaaaggtgcggcgccaggcttcaaagtcgcgatcttgggtgcagcaggtgggattgggcagccacttgcgctattgatgaagatgaaccctcttgtttcggtgctccatctatacgatgtcgtcaacgcacctggtgtcacagccgacatcagccacatgaacactggtgctgtggtacgtggcttcttgggccagccacagttggaaaatgccctggctggaatggatcttgtaataattcctgctggtgtccctcggaaacctgggatgacaagggatgatttgttcaacataaatgctggaatagtccgtaccctgtgtgaaggaattgcaaaatgctgccctaatgcaattgtgaatgtgatcagtaatcctgtcaactctaccgtcccaattgctgctgaagttttcaagaaagctggaacttatgaccctaagcggcttttaggtgtgaccacacttgacgtagtgagagcaaatacgtttgtgggagaggttcttggacttgaccccagagaggtaaatgttccagtcattggtgggcatgcaggaattacgatactaccactcctttcacaggtgaatccttcctgctcattcacctcggaagaggttaaatacctcacttctcgcatacagaatggtgggacagaagtagtcgaggctaaagctggagcaggatcagcaactctttcaatggcctatgcagctgccaaatttgcagatgcttgcctgagaggattgcgtggtgatgctgggataatagagtgctcttatgtggcttctcaggtcacagagttgcctttctttgcatccaaagtgcggctagggcgatgtggcattgaggagatcctaccacttggaccattaaatgagttcgagagatctggtctggagaaggcaaagaaagagctggcggagagtatccagaagggcgtctctttcatcaagtgaggccggcgacggccagcccaacatagaaatagatgtggcgtgtttctgcttcttgagaactcatcttgttatctctctgtaagactgagtgcatgacacgaataatccacgtacacggctgtactaaaaagatgatgaatctgtggtggctaaaaaaagggaaatagaaaagtctggtaataaaagttgtttctg

SEQ ID NO: 23533 - protein, 360 aa, Zea mays subsp. mays
  peptide (1)..(360): Ceres Seq. ID no. 12414292
  misc_feature (195)..(359): Pfam Name: Pfam Description:  lactate/malate dehydrogenase
  misc_feature (9)..(359): NCBI GI NO: 3183079 NR Description: MALATE DEHYDROGENASE, GLYOXYSOMAL PRECURSOR
  misc_feature (11)..(360): NCBI GI NO: 126894 NR Description: MALATE DEHYDROGENASE, GLYOXYSOMAL PRECURSOR
  misc_feature (11)..(360): NCBI GI NO: 1170897 NR Description: MALATE DEHYDROGENASE, GLYOXYSOMAL PRECURSOR
  misc_feature (9)..(360): NCBI GI NO: 169977 NR Description: malate dehydrogenase
  misc_feature (9)..(360): NCBI GI NO: 1346501 NR Description: MALATE DEHYDROGENASE, GLYOXYSOMAL PRECURSOR
  misc_feature (5)..(359): NCBI GI NO: 34915204 NR Description: putative  glyoxysomal malate dehydrogenase
  misc_feature (11)..(360): NCBI GI NO: 15227752 NR Description: putative glyoxysomal malate dehydrogenaseprecursor
  misc_feature (6)..(360): NCBI GI NO: 11133654 NR Description: Malate dehydrogenase 2, glyoxysomal precursor
  misc_feature (6)..(360): NCBI GI NO: 12644436 NR Description: Malate dehydrogenase 1, glyoxysomal precursor
  misc_feature (6)..(360): NCBI GI NO: 15242466 NR Description: microbody NAD-dependent malate dehydrogenase
MGQQQQGPAARRMATLASHLRHPSVSHPQMEDVPLLRGSNCRAKGAAPGFKVAILGAAGGIGQPLALLMKMNPLVSVLHLYDVVNAPGVTADISHMNTGAVVRGFLGQPQLENALAGMDLVIIPAGVPRKPGMTRDDLFNINAGIVRTLCEGIAKCCPNAIVNVISNPVNSTVPIAAEVFKKAGTYDPKRLLGVTTLDVVRANTFVGEVLGLDPREVNVPVIGGHAGITILPLLSQVNPSCSFTSEEVKYLTSRIQNGGTEVVEAKAGAGSATLSMAYAAAKFADACLRGLRGDAGIIECSYVASQVTELPFFASKVRLGRCGIEEILPLGPLNEFERSGLEKAKKELAESIQKGVSFIK

SEQ ID NO: 23534 - protein, 348 aa, Zea mays subsp. mays
  peptide (1)..(348): Ceres Seq. ID no. 12414293
  misc_feature (183)..(347): Pfam Name: Pfam Description:  lactate/malate dehydrogenase
  misc_feature (1)..(347): NCBI GI NO: 3183079 NR Description: MALATE DEHYDROGENASE, GLYOXYSOMAL PRECURSOR
  misc_feature (1)..(348): NCBI GI NO: 126894 NR Description: MALATE DEHYDROGENASE, GLYOXYSOMAL PRECURSOR
  misc_feature (1)..(348): NCBI GI NO: 1170897 NR Description: MALATE DEHYDROGENASE, GLYOXYSOMAL PRECURSOR
  misc_feature (1)..(348): NCBI GI NO: 169977 NR Description: malate dehydrogenase
  misc_feature (1)..(348): NCBI GI NO: 1346501 NR Description: MALATE DEHYDROGENASE, GLYOXYSOMAL PRECURSOR
  misc_feature (1)..(347): NCBI GI NO: 34915204 NR Description: putative  glyoxysomal malate dehydrogenase
  misc_feature (1)..(348): NCBI GI NO: 15227752 NR Description: putative glyoxysomal malate dehydrogenaseprecursor
  misc_feature (1)..(348): NCBI GI NO: 11133654 NR Description: Malate dehydrogenase 2, glyoxysomal precursor
  misc_feature (1)..(348): NCBI GI NO: 12644436 NR Description: Malate dehydrogenase 1, glyoxysomal precursor
  misc_feature (1)..(348): NCBI GI NO: 15242466 NR Description: microbody NAD-dependent malate dehydrogenase
MATLASHLRHPSVSHPQMEDVPLLRGSNCRAKGAAPGFKVAILGAAGGIGQPLALLMKMNPLVSVLHLYDVVNAPGVTADISHMNTGAVVRGFLGQPQLENALAGMDLVIIPAGVPRKPGMTRDDLFNINAGIVRTLCEGIAKCCPNAIVNVISNPVNSTVPIAAEVFKKAGTYDPKRLLGVTTLDVVRANTFVGEVLGLDPREVNVPVIGGHAGITILPLLSQVNPSCSFTSEEVKYLTSRIQNGGTEVVEAKAGAGSATLSMAYAAAKFADACLRGLRGDAGIIECSYVASQVTELPFFASKVRLGRCGIEEILPLGPLNEFERSGLEKAKKELAESIQKGVSFIK

SEQ ID NO: 23535 - protein, 331 aa, Zea mays subsp. mays
  peptide (1)..(331): Ceres Seq. ID no. 12414294
  misc_feature (166)..(330): Pfam Name: Pfam Description:  lactate/malate dehydrogenase
  misc_feature (1)..(330): NCBI GI NO: 3183079 NR Description: MALATE DEHYDROGENASE, GLYOXYSOMAL PRECURSOR
  misc_feature (1)..(331): NCBI GI NO: 126894 NR Description: MALATE DEHYDROGENASE, GLYOXYSOMAL PRECURSOR
  misc_feature (1)..(331): NCBI GI NO: 1170897 NR Description: MALATE DEHYDROGENASE, GLYOXYSOMAL PRECURSOR
  misc_feature (1)..(331): NCBI GI NO: 169977 NR Description: malate dehydrogenase
  misc_feature (1)..(331): NCBI GI NO: 1346501 NR Description: MALATE DEHYDROGENASE, GLYOXYSOMAL PRECURSOR
  misc_feature (1)..(330): NCBI GI NO: 34915204 NR Description: putative  glyoxysomal malate dehydrogenase
  misc_feature (1)..(331): NCBI GI NO: 15227752 NR Description: putative glyoxysomal malate dehydrogenaseprecursor
  misc_feature (1)..(331): NCBI GI NO: 11133654 NR Description: Malate dehydrogenase 2, glyoxysomal precursor
  misc_feature (1)..(331): NCBI GI NO: 12644436 NR Description: Malate dehydrogenase 1, glyoxysomal precursor
  misc_feature (1)..(331): NCBI GI NO: 15242466 NR Description: microbody NAD-dependent malate dehydrogenase
MEDVPLLRGSNCRAKGAAPGFKVAILGAAGGIGQPLALLMKMNPLVSVLHLYDVVNAPGVTADISHMNTGAVVRGFLGQPQLENALAGMDLVIIPAGVPRKPGMTRDDLFNINAGIVRTLCEGIAKCCPNAIVNVISNPVNSTVPIAAEVFKKAGTYDPKRLLGVTTLDVVRANTFVGEVLGLDPREVNVPVIGGHAGITILPLLSQVNPSCSFTSEEVKYLTSRIQNGGTEVVEAKAGAGSATLSMAYAAAKFADACLRGLRGDAGIIECSYVASQVTELPFFASKVRLGRCGIEEILPLGPLNEFERSGLEKAKKELAESIQKGVSFIK

SEQ ID NO: 23536 - DNA, 1453 bp, Zea mays subsp. mays
  misc_feature (1)..(1453): Ceres Seq. ID no. 12355877
ctcttttccgccctccacccctcgcgagctctccacccctccacacgaccgccgcccatggtggccgcgccaccaccgccgccgcagtttgccaagcacttcgctgctgggccgcccccgccgccccaagctggtgctgggcgccgcacgccgaccccgccctcgtctggatccggcgggaacgggtgcgaagaaaataaaaccatttgggtcggtgacctccagtactggatggatgaaaactacctacataactgcttcgggcccagcggcgaggtggttacaataaaagttatccgcaataggcaaacaggacagtcagaggggtatggatttgttgagttcttttctcatgcatcagcagagaaagctcttcagaattttactggtcatgtgatgccaaacactgaccggccatttaaattgaactgggcatcgtatagcatgggtgaaaagcgatctgaagtggcttctgatcactcgatatttgttggcgatctagctgctgatgtcactgatgaaatgctgctggagcttttctccagcaagtaccgctcggtgaaaggagctaaagttattattgatgcaaacacaggccgttccaggggctatggatttgtcaggtttggagacgacaacgacaaatctcatgccatgtctgaaatgaatggtgtatattgctctacgaggccaattcgtataggacctgcgactcccagaagatcttcaggtgattctggctcctcgactcctggtcattcagatggtgattcttctaacagaacggtatatgttggtgggcttgaccccaatgtcagtgaagatgaactgagaaaagcctttgccaaatatgatcttgcctctgtgaaaattcctctaggaaagcaatgtggctttgttcaatttgttagcagaactgatgctgaagaagcactacaaggattaaatggatcactcattggaaagcaggcagttcgcctttcatgggtccgcagcccatcgcataagcagtctaggggtgactccgtcaacaggaggaacaacatgtactatggcacaccattctacggcggatatggctatgcctccccggtgccacacccaaacatgtacgctgcagcgtatggcacgtacccgctatatggcaaccagcagctagtgagctagagagctcccctccgacgtgtcccctctgacgggaaacaaaggttttggtccggtgagcatagtagcgtcaggtgagaaggtgcctttataaggctgtcctaagaagtgggcgagatatgttgttgcatcgttatcgttatggtgcctgtaactgttgtgtgtgccgtgtgcgtccggaagaattggatggaatggaactcgtggcttgttgtagtacatcagagagtcatgttattctttcaagaaattttgacttggtaataaattaaactattgtttgtgcgtc

SEQ ID NO: 23537 - protein, 388 aa, Zea mays subsp. mays
  peptide (1)..(388): Ceres Seq. ID no. 12355878
  misc_feature (162)..(234): Pfam Name: a.k.a. RRM, RBD, or RNP domain Pfam Description: RNA recognition motif.
  misc_feature (19)..(381): NCBI GI NO: 15594035 NR Description: nucleic acid binding protein [Nicotiana tabacum]
  misc_feature (48)..(260): NCBI GI NO: 9663769 NR Description: RNA Binding Protein 47 [Nicotiana plumbaginifolia]
  misc_feature (246)..(388): NCBI GI NO: 9663769 NR Description: RNA Binding Protein 47 [Nicotiana plumbaginifolia]
  misc_feature (48)..(260): NCBI GI NO: 7489196 NR Description: RNA binding protein homolog - common tobacco
  misc_feature (246)..(388): NCBI GI NO: 7489196 NR Description: RNA binding protein homolog - common tobacco
  misc_feature (17)..(385): NCBI GI NO: 34896988 NR Description: putative RNA binding protein [Oryza sativa]
  misc_feature (48)..(260): NCBI GI NO: 7489112 NR Description: DNA binding protein ACBF - common tobacco
  misc_feature (246)..(388): NCBI GI NO: 7489112 NR Description: DNA binding protein ACBF - common tobacco
  misc_feature (13)..(388): NCBI GI NO: 15220241 NR Description: RNA binding protein 47
  misc_feature (14)..(388): NCBI GI NO: 15220233 NR Description: RNA binding protein 47
LFSALHPSRALHPSTRPPPMVAAPPPPPQFAKHFAAGPPPPPQAGAGRRTPTPPSSGSGGNGCEENKTIWVGDLQYWMDENYLHNCFGPSGEVVTIKVIRNRQTGQSEGYGFVEFFSHASAEKALQNFTGHVMPNTDRPFKLNWASYSMGEKRSEVASDHSIFVGDLAADVTDEMLLELFSSKYRSVKGAKVIIDANTGRSRGYGFVRFGDDNDKSHAMSEMNGVYCSTRPIRIGPATPRRSSGDSGSSTPGHSDGDSSNRTVYVGGLDPNVSEDELRKAFAKYDLASVKIPLGKQCGFVQFVSRTDAEEALQGLNGSLIGKQAVRLSWVRSPSHKQSRGDSVNRRNNMYYGTPFYGGYGYASPVPHPNMYAAAYGTYPLYGNQQLVS

SEQ ID NO: 23538 - protein, 369 aa, Zea mays subsp. mays
  peptide (1)..(369): Ceres Seq. ID no. 12355879
  misc_feature (143)..(215): Pfam Name: a.k.a. RRM, RBD, or RNP domain Pfam Description: RNA recognition motif.
  misc_feature (1)..(362): NCBI GI NO: 15594035 NR Description: nucleic acid binding protein [Nicotiana tabacum]
  misc_feature (29)..(241): NCBI GI NO: 9663769 NR Description: RNA Binding Protein 47 [Nicotiana plumbaginifolia]
  misc_feature (227)..(369): NCBI GI NO: 9663769 NR Description: RNA Binding Protein 47 [Nicotiana plumbaginifolia]
  misc_feature (29)..(241): NCBI GI NO: 7489196 NR Description: RNA binding protein homolog - common tobacco
  misc_feature (227)..(369): NCBI GI NO: 7489196 NR Description: RNA binding protein homolog - common tobacco
  misc_feature (1)..(366): NCBI GI NO: 34896988 NR Description: putative RNA binding protein [Oryza sativa]
  misc_feature (29)..(241): NCBI GI NO: 7489112 NR Description: DNA binding protein ACBF - common tobacco
  misc_feature (227)..(369): NCBI GI NO: 7489112 NR Description: DNA binding protein ACBF - common tobacco
  misc_feature (1)..(369): NCBI GI NO: 15220241 NR Description: RNA binding protein 47
  misc_feature (1)..(369): NCBI GI NO: 15220233 NR Description: RNA binding protein 47
MVAAPPPPPQFAKHFAAGPPPPPQAGAGRRTPTPPSSGSGGNGCEENKTIWVGDLQYWMDENYLHNCFGPSGEVVTIKVIRNRQTGQSEGYGFVEFFSHASAEKALQNFTGHVMPNTDRPFKLNWASYSMGEKRSEVASDHSIFVGDLAADVTDEMLLELFSSKYRSVKGAKVIIDANTGRSRGYGFVRFGDDNDKSHAMSEMNGVYCSTRPIRIGPATPRRSSGDSGSSTPGHSDGDSSNRTVYVGGLDPNVSEDELRKAFAKYDLASVKIPLGKQCGFVQFVSRTDAEEALQGLNGSLIGKQAVRLSWVRSPSHKQSRGDSVNRRNNMYYGTPFYGGYGYASPVPHPNMYAAAYGTYPLYGNQQLVS

SEQ ID NO: 23539 - protein, 311 aa, Zea mays subsp. mays
  peptide (1)..(311): Ceres Seq. ID no. 12355880
  misc_feature (85)..(157): Pfam Name: a.k.a. RRM, RBD, or RNP domain Pfam Description: RNA recognition motif.
  misc_feature (1)..(304): NCBI GI NO: 15594035 NR Description: nucleic acid binding protein [Nicotiana tabacum]
  misc_feature (1)..(183): NCBI GI NO: 9663769 NR Description: RNA Binding Protein 47 [Nicotiana plumbaginifolia]
  misc_feature (169)..(311): NCBI GI NO: 9663769 NR Description: RNA Binding Protein 47 [Nicotiana plumbaginifolia]
  misc_feature (1)..(183): NCBI GI NO: 7489196 NR Description: RNA binding protein homolog - common tobacco
  misc_feature (169)..(311): NCBI GI NO: 7489196 NR Description: RNA binding protein homolog - common tobacco
  misc_feature (1)..(308): NCBI GI NO: 34896988 NR Description: putative RNA binding protein [Oryza sativa]
  misc_feature (1)..(183): NCBI GI NO: 7489112 NR Description: DNA binding protein ACBF - common tobacco
  misc_feature (169)..(311): NCBI GI NO: 7489112 NR Description: DNA binding protein ACBF - common tobacco
  misc_feature (1)..(311): NCBI GI NO: 15220241 NR Description: RNA binding protein 47
  misc_feature (1)..(311): NCBI GI NO: 15220233 NR Description: RNA binding protein 47
MDENYLHNCFGPSGEVVTIKVIRNRQTGQSEGYGFVEFFSHASAEKALQNFTGHVMPNTDRPFKLNWASYSMGEKRSEVASDHSIFVGDLAADVTDEMLLELFSSKYRSVKGAKVIIDANTGRSRGYGFVRFGDDNDKSHAMSEMNGVYCSTRPIRIGPATPRRSSGDSGSSTPGHSDGDSSNRTVYVGGLDPNVSEDELRKAFAKYDLASVKIPLGKQCGFVQFVSRTDAEEALQGLNGSLIGKQAVRLSWVRSPSHKQSRGDSVNRRNNMYYGTPFYGGYGYASPVPHPNMYAAAYGTYPLYGNQQLVS

SEQ ID NO: 23540 - DNA, 1959 bp, Zea mays subsp. mays
  misc_feature (1)..(1959): Ceres Seq. ID no. 12373566
aaataataatcacattgtcctcgtcgtcctatcctccttcgcctgctcgctagtcgctagccgctccccccaacaaacaaccctaatccgtgaccgtggacacgccgcaagctccatcgcgcgaatagattggggggattcaatagaggctacgcggggattggtcgcgctcgagatctcagcaccctcgcgcctgaaatctttctattgttgtcgtggttcaggtgatgagatcttggggagcgcgactcgctcggtcctgagatgctggcgggctacggcggcggtggccgcagcgtccatctctcctcccacaaggacctcctcctcggccgctgcggccggagcttcctcttcggcaacacgtggtttctcctctccacttacccggcgcgcctcctgcacaccacggaccgtcgcgctccctccgctttcgtcgccgccatcaaccgggtcccctgcgtgcggtcgcactgcacggggcagggcctgctgcagagaggcagcattgtcatggctgcctgcggctatgttcttaggcgaactgagctgggtgctgccaagcgccagcagccggataaggacccatctggcggaacacgcgcctcccgtattgcagccatggggtcactgggcagtgctgcgcggccagaggtgtctttcaggtacagggggctggagcattgtaagaagattggtgcaagcttgaaatgccgtgagccatgggggaatagtgcgttctggacaaatgccactgggccgggttggaagttgagctttacagttgagccatggactaaggactttagtacggcgtgtgcagcgccgtattctgctggagccacagaggatcaattgccgctcaatgagaagatgaatagctccactgttggaatgtccccagtttctgaaaaattgaagttgctctctggttcatgttacttgcctcaccctgctaaggaggcaactggtggtgaggatgcacatttcattagcattgatgagcatgtgataggcgtagcagatggtgttggtggttgggcagatctcggtgtcgatgctggactatatgctaaggagctaatgagaaattcaatgagcgctatcaaagatgagccagaagggaccattgatccaaccagagttttggaaaaggcttatattagtacgaaagcaagggggtcatctaccgcgtgtatcatcactcttaaagatcagggtatccatgctgtaaatcttggggatagtggtttcgtagtagtccgagatggccgcactgttctcaggtcaccctcacagcagcatgatttcaattttacttatcagcttgagagtggaggtggcagtgatcttcctagttccgcacaagtatttcactttccggttgccccgggtgatgttatcgttgctggcacggatggactatttgacaatttatacaacaatgagataagtggtgttattgttgaagctctccgggttggacttgagcctcagattgcagcacaaaaaattgccgccctggctcgacaaagagctacggacaaaaataggcagtcaccttttgcatcagctgctcaagaagctgggtaccggtattatggtgggaagcttgatgacataacagtcgtggtctcatatgtgaaaagcgctggagccccatgatctgagcctttcttttattagatgtaatgtacataaatcattgtcccgaactggcggcgtatgtatgcaccagggcatagaagcttattctcaaggtgtggaatcccctgatcctagaagcaccctgtgctgggttcagtatggttgtgctttagccctggaacatgttagcaaaccattgcaccattttacttgtttgccactgtgagaaatcattttctctaattatctgaactcctgaagccagggtgggtttgtttccccccttggagttggaggataatgaccagctgg

SEQ ID NO: 23541 - protein, 466 aa, Zea mays subsp. mays
  peptide (1)..(466): Ceres Seq. ID no. 12373567
  misc_feature (227)..(428): Pfam Name: Pfam Description:  Protein phosphatase 2C
  misc_feature (205)..(463): NCBI GI NO: 25366932 NR Description: hypothetical protein dl4315c
  misc_feature (205)..(463): NCBI GI NO: 30683717 NR Description: expressed protein [Arabidopsis thaliana]
  misc_feature (178)..(463): NCBI GI NO: 15240071 NR Description: putative protein; protein id: At5g66720.1
  misc_feature (195)..(461): NCBI GI NO: 18418226 NR Description: putative protein; protein id: At4g33500
  misc_feature (195)..(459): NCBI GI NO: 7485658 NR Description: hypothetical protein F17M5
  misc_feature (232)..(463): NCBI GI NO: 37533570 NR Description: putative protein phosphatase 2C
  misc_feature (211)..(463): NCBI GI NO: 18402284 NR Description: expressed protein; protein id: At2g30170
  misc_feature (212)..(466): NCBI GI NO: 34896100 NR Description: B1189A09.35
  misc_feature (237)..(460): NCBI GI NO: 24640366 NR Description: CG15035-PA [Drosophila melanogaster]
  misc_feature (227)..(460): NCBI GI NO: 24655293 NR Description: CG12091-PA [Drosophila melanogaster]
MLAGYGGGGRSVHLSSHKDLLLGRCGRSFLFGNTWFLLSTYPARLLHTTDRRAPSAFVAAINRVPCVRSHCTGQGLLQRGSIVMAACGYVLRRTELGAAKRQQPDKDPSGGTRASRIAAMGSLGSAARPEVSFRYRGLEHCKKIGASLKCREPWGNSAFWTNATGPGWKLSFTVEPWTKDFSTACAAPYSAGATEDQLPLNEKMNSSTVGMSPVSEKLKLLSGSCYLPHPAKEATGGEDAHFISIDEHVIGVADGVGGWADLGVDAGLYAKELMRNSMSAIKDEPEGTIDPTRVLEKAYISTKARGSSTACIITLKDQGIHAVNLGDSGFVVVRDGRTVLRSPSQQHDFNFTYQLESGGGSDLPSSAQVFHFPVAPGDVIVAGTDGLFDNLYNNEISGVIVEALRVGLEPQIAAQKIAALARQRATDKNRQSPFASAAQEAGYRYYGGKLDDITVVVSYVKSAGAP

SEQ ID NO: 23542 - protein, 383 aa, Zea mays subsp. mays
  peptide (1)..(383): Ceres Seq. ID no. 12373568
  misc_feature (144)..(345): Pfam Name: Pfam Description:  Protein phosphatase 2C
  misc_feature (122)..(380): NCBI GI NO: 25366932 NR Description: hypothetical protein dl4315c
  misc_feature (122)..(380): NCBI GI NO: 30683717 NR Description: expressed protein [Arabidopsis thaliana]
  misc_feature (95)..(380): NCBI GI NO: 15240071 NR Description: putative protein; protein id: At5g66720.1
  misc_feature (112)..(378): NCBI GI NO: 18418226 NR Description: putative protein; protein id: At4g33500
  misc_feature (112)..(376): NCBI GI NO: 7485658 NR Description: hypothetical protein F17M5
  misc_feature (149)..(380): NCBI GI NO: 37533570 NR Description: putative protein phosphatase 2C
  misc_feature (128)..(380): NCBI GI NO: 18402284 NR Description: expressed protein; protein id: At2g30170
  misc_feature (129)..(383): NCBI GI NO: 34896100 NR Description: B1189A09.35
  misc_feature (154)..(377): NCBI GI NO: 24640366 NR Description: CG15035-PA [Drosophila melanogaster]
  misc_feature (144)..(377): NCBI GI NO: 24655293 NR Description: CG12091-PA [Drosophila melanogaster]
MAACGYVLRRTELGAAKRQQPDKDPSGGTRASRIAAMGSLGSAARPEVSFRYRGLEHCKKIGASLKCREPWGNSAFWTNATGPGWKLSFTVEPWTKDFSTACAAPYSAGATEDQLPLNEKMNSSTVGMSPVSEKLKLLSGSCYLPHPAKEATGGEDAHFISIDEHVIGVADGVGGWADLGVDAGLYAKELMRNSMSAIKDEPEGTIDPTRVLEKAYISTKARGSSTACIITLKDQGIHAVNLGDSGFVVVRDGRTVLRSPSQQHDFNFTYQLESGGGSDLPSSAQVFHFPVAPGDVIVAGTDGLFDNLYNNEISGVIVEALRVGLEPQIAAQKIAALARQRATDKNRQSPFASAAQEAGYRYYGGKLDDITVVVSYVKSAGAP

SEQ ID NO: 23543 - protein, 347 aa, Zea mays subsp. mays
  peptide (1)..(347): Ceres Seq. ID no. 12373569
  misc_feature (108)..(309): Pfam Name: Pfam Description:  Protein phosphatase 2C
  misc_feature (86)..(344): NCBI GI NO: 25366932 NR Description: hypothetical protein dl4315c
  misc_feature (86)..(344): NCBI GI NO: 30683717 NR Description: expressed protein [Arabidopsis thaliana]
  misc_feature (59)..(344): NCBI GI NO: 15240071 NR Description: putative protein; protein id: At5g66720.1
  misc_feature (76)..(342): NCBI GI NO: 18418226 NR Description: putative protein; protein id: At4g33500
  misc_feature (76)..(340): NCBI GI NO: 7485658 NR Description: hypothetical protein F17M5
  misc_feature (113)..(344): NCBI GI NO: 37533570 NR Description: putative protein phosphatase 2C
  misc_feature (92)..(344): NCBI GI NO: 18402284 NR Description: expressed protein; protein id: At2g30170
  misc_feature (93)..(347): NCBI GI NO: 34896100 NR Description: B1189A09.35
  misc_feature (118)..(341): NCBI GI NO: 24640366 NR Description: CG15035-PA [Drosophila melanogaster]
  misc_feature (108)..(341): NCBI GI NO: 24655293 NR Description: CG12091-PA [Drosophila melanogaster]
MGSLGSAARPEVSFRYRGLEHCKKIGASLKCREPWGNSAFWTNATGPGWKLSFTVEPWTKDFSTACAAPYSAGATEDQLPLNEKMNSSTVGMSPVSEKLKLLSGSCYLPHPAKEATGGEDAHFISIDEHVIGVADGVGGWADLGVDAGLYAKELMRNSMSAIKDEPEGTIDPTRVLEKAYISTKARGSSTACIITLKDQGIHAVNLGDSGFVVVRDGRTVLRSPSQQHDFNFTYQLESGGGSDLPSSAQVFHFPVAPGDVIVAGTDGLFDNLYNNEISGVIVEALRVGLEPQIAAQKIAALARQRATDKNRQSPFASAAQEAGYRYYGGKLDDITVVVSYVKSAGAP

SEQ ID NO: 23544 - DNA, 1692 bp, Zea mays subsp. mays
  misc_feature (1)..(1692): Ceres Seq. ID no. 12410974
atcaacgacagtcgacagttgcagtgcagccggtgagcttagatgacgcgcgtcccctaaaagcaggatctggcataaggctacgtgctggtttacagttacagctcaggcttaccatttctttaaccaattcgcttcttgttctttaaaagttcagagttcaagagttcagtttagagagagagagagggagagtgatttgccgacttgccagttgccgcacaaagctcctctagcacctctgtgtggccgacttgtccccggtatcaccaagtctgcaggcctccccagtcgtcgccggcgagggaacgcgccgcccgtgacgccgcgggttgttggcgccggcgttgaggccacaagcgcgccagcatcaggacctcacaggtgattcaatcctgaaggcatcaactatgttcaattttcaagaaatgtcttgctgttttacgtgtgcgacgggcatggaacgaaataatgaaaacgaaggaggaagcaaggtgaggattttttcctacagtgagatgaggaaagctacgcatgattttagtggagcaaacaagattggcgagggcggtttcggctccgttttcagggggaagcttaaagatggaacgatcgtcgcggtgaaagtcctttctgctaattcaaggcagggtgttcgagagttcgtaaccgaacttacagcaatttcagatatcgtgcatgaaaacctaattacattggttggttgctgtgccgaagggtcccagaggattcttgtgtacaattatctcgagaacaatagtctttcatatacacttctaggttcgggccggagcaacattcggttcaactggagagcccgtgtcaagattgctgtaggcgttgctcgtgggcttgcttatcttcacgatggaattcggccccctataattcatcgagatataaaggcgagcaacattctccttgacaaggacctcaccccaaagatctctgatttcgggctggcaaggctcctccccccaaacgcaactcatgtgagcactagggttgcaggaacaataggatacctggctcctgaatacgctgtgagggggcaagtgacgaagaaatcggatatctatagtttcggcgttttgctactggaaattgttgctggtagatgtaactacaacagtagattgcctcagggagaccagtttctgcttgagaagacatgggcatactacgtgcagggaaagctagagaaggtcatagacgccgaagcaggggaggacctgaacgtcgaggaggcatgccgtttcttgaaggttggcctactatgcgcccaagacgcgatgaagctgcgtccgaacatggccagcgtcgtcctgatgctgataggagagaagggaatctccgtggacaggatcaccaagccagccgtgatcggtgacccgtacctcgaccggaggccaagcaacgcagactctaccacgatgaagtccttcgccacgaccgaagctttaacgtcatcagaggcaaacacggagtggtctctgtgatggggggaaaaaacgtcatcatcgatggagatttgtttttgtggatgctgcagttgccaaacaaataccgcatcgcttctgttgattatgtttgtttgttatttttgtgtgtgtgtatatatacttgaaatggaaccacgggagtgaaacgaggattgaatatgctttaccc

SEQ ID NO: 23545 - protein, 369 aa, Zea mays subsp. mays
  peptide (1)..(369): Ceres Seq. ID no. 12410975
  misc_feature (7)..(369): NCBI GI NO: 38344329 NR Description: OSJNBa0058K23.11
  misc_feature (171)..(344): NCBI GI NO: 5852099 NR Description: zwh22.1 [Oryza sativa (indica cultivar-group)]
  misc_feature (23)..(148): NCBI GI NO: 5852099 NR Description: zwh22.1 [Oryza sativa (indica cultivar-group)]
  misc_feature (61)..(369): NCBI GI NO: 5679843 NR Description: Putitive Ser/Thr protein kinase
  misc_feature (7)..(338): NCBI GI NO: 18394385 NR Description: receptor-like serine/threonine kinase, putative
  misc_feature (29)..(338): NCBI GI NO: 25287648 NR Description: hypothetical protein F19K19.4
  misc_feature (29)..(365): NCBI GI NO: 38344039 NR Description: OSJNBb0017I01.6
  misc_feature (23)..(366): NCBI GI NO: 34901978 NR Description: putative receptor ser/thr protein
  misc_feature (18)..(331): NCBI GI NO: 5923666 NR Description: putative receptor ser/thr protein kinase
  misc_feature (18)..(331): NCBI GI NO: 18398327 NR Description: putative receptor ser/thr protein kinase
MFNFQEMSCCFTCATGMERNNENEGGSKVRIFSYSEMRKATHDFSGANKIGEGGFGSVFRGKLKDGTIVAVKVLSANSRQGVREFVTELTAISDIVHENLITLVGCCAEGSQRILVYNYLENNSLSYTLLGSGRSNIRFNWRARVKIAVGVARGLAYLHDGIRPPIIHRDIKASNILLDKDLTPKISDFGLARLLPPNATHVSTRVAGTIGYLAPEYAVRGQVTKKSDIYSFGVLLLEIVAGRCNYNSRLPQGDQFLLEKTWAYYVQGKLEKVIDAEAGEDLNVEEACRFLKVGLLCAQDAMKLRPNMASVVLMLIGEKGISVDRITKPAVIGDPYLDRRPSNADSTTMKSFATTEALTSSEANTEWSL

SEQ ID NO: 23546 - protein, 363 aa, Zea mays subsp. mays
  peptide (1)..(363): Ceres Seq. ID no. 12410976
  misc_feature (1)..(363): NCBI GI NO: 38344329 NR Description: OSJNBa0058K23.11
  misc_feature (165)..(338): NCBI GI NO: 5852099 NR Description: zwh22.1 [Oryza sativa (indica cultivar-group)]
  misc_feature (17)..(142): NCBI GI NO: 5852099 NR Description: zwh22.1 [Oryza sativa (indica cultivar-group)]
  misc_feature (55)..(363): NCBI GI NO: 5679843 NR Description: Putitive Ser/Thr protein kinase
  misc_feature (1)..(332): NCBI GI NO: 18394385 NR Description: receptor-like serine/threonine kinase, putative
  misc_feature (23)..(332): NCBI GI NO: 25287648 NR Description: hypothetical protein F19K19.4
  misc_feature (23)..(359): NCBI GI NO: 38344039 NR Description: OSJNBb0017I01.6
  misc_feature (17)..(360): NCBI GI NO: 34901978 NR Description: putative receptor ser/thr protein
  misc_feature (12)..(325): NCBI GI NO: 5923666 NR Description: putative receptor ser/thr protein kinase
  misc_feature (12)..(325): NCBI GI NO: 18398327 NR Description: putative receptor ser/thr protein kinase
MSCCFTCATGMERNNENEGGSKVRIFSYSEMRKATHDFSGANKIGEGGFGSVFRGKLKDGTIVAVKVLSANSRQGVREFVTELTAISDIVHENLITLVGCCAEGSQRILVYNYLENNSLSYTLLGSGRSNIRFNWRARVKIAVGVARGLAYLHDGIRPPIIHRDIKASNILLDKDLTPKISDFGLARLLPPNATHVSTRVAGTIGYLAPEYAVRGQVTKKSDIYSFGVLLLEIVAGRCNYNSRLPQGDQFLLEKTWAYYVQGKLEKVIDAEAGEDLNVEEACRFLKVGLLCAQDAMKLRPNMASVVLMLIGEKGISVDRITKPAVIGDPYLDRRPSNADSTTMKSFATTEALTSSEANTEWSL

SEQ ID NO: 23547 - protein, 353 aa, Zea mays subsp. mays
  peptide (1)..(353): Ceres Seq. ID no. 12410977
  misc_feature (1)..(353): NCBI GI NO: 38344329 NR Description: OSJNBa0058K23.11
  misc_feature (155)..(328): NCBI GI NO: 5852099 NR Description: zwh22.1 [Oryza sativa (indica cultivar-group)]
  misc_feature (7)..(132): NCBI GI NO: 5852099 NR Description: zwh22.1 [Oryza sativa (indica cultivar-group)]
  misc_feature (45)..(353): NCBI GI NO: 5679843 NR Description: Putitive Ser/Thr protein kinase
  misc_feature (1)..(322): NCBI GI NO: 18394385 NR Description: receptor-like serine/threonine kinase, putative
  misc_feature (13)..(322): NCBI GI NO: 25287648 NR Description: hypothetical protein F19K19.4
  misc_feature (13)..(349): NCBI GI NO: 38344039 NR Description: OSJNBb0017I01.6
  misc_feature (7)..(350): NCBI GI NO: 34901978 NR Description: putative receptor ser/thr protein
  misc_feature (2)..(315): NCBI GI NO: 5923666 NR Description: putative receptor ser/thr protein kinase
  misc_feature (2)..(315): NCBI GI NO: 18398327 NR Description: putative receptor ser/thr protein kinase
MERNNENEGGSKVRIFSYSEMRKATHDFSGANKIGEGGFGSVFRGKLKDGTIVAVKVLSANSRQGVREFVTELTAISDIVHENLITLVGCCAEGSQRILVYNYLENNSLSYTLLGSGRSNIRFNWRARVKIAVGVARGLAYLHDGIRPPIIHRDIKASNILLDKDLTPKISDFGLARLLPPNATHVSTRVAGTIGYLAPEYAVRGQVTKKSDIYSFGVLLLEIVAGRCNYNSRLPQGDQFLLEKTWAYYVQGKLEKVIDAEAGEDLNVEEACRFLKVGLLCAQDAMKLRPNMASVVLMLIGEKGISVDRITKPAVIGDPYLDRRPSNADSTTMKSFATTEALTSSEANTEWSL

SEQ ID NO: 23548 - DNA, 1533 bp, Zea mays subsp. mays
  misc_feature (1)..(1533): Ceres Seq. ID no. 13494573
aatctcagttgtccttgtcccctcgaacgcgcactgttcaaacaaaccctccactgccctccccactctccccttcaccgcgccgcactcccaagtcccaactcccaacaggcctaaatggcggcggccggaacaattcccggcgccgccgcagccattggcgcttctgtgtcccaacgccaacgtcgcgtcggcgctccttctttcgtagctgcctacgtctccgagggcacccgcctcgtctgccggaggcagctccgtccggctccggtcctcgcttcttccttcatctccctttctcatccagcgaggcggcggttcctctgcgatgctgcggccggagcctcctcaggtcccgctggagaagccaagccccagggatttgcagagagatacccagctcttgtcacaggtttcttcttcttcttgtggtattttctgaatgtaatatttaacatcctcaacaagaagatcttcgactacttcccctatccatattttgtgtcagtgagccatctttttattggagtactatactgccttattggctggagcttcggcatcccaaagcgcgcgccaatcaactcaacacttctgaagcagcttgttccagttgcggtttgccatgccattggccatgtaacaagcactgtgtcatttgctgctgtagctgtgtcatttgcccacactattaaagctctcgagccattcttcaatgcggctgcttcccagtttatccttggacaaccagttccattgacactctggctgtctcttgttccagtggtgattggtgtctcggtagcatccctcactgaactctcatttaattggactggcttcattaatgccatgatctcaaatatttctttcacctaccgaagcatctattctaagaaggctatgactgacatggatagtaccaacttgtatgcatacatatcaataattgctctctttgtctgcatcccccctgcaattattattgaaggacctcaattagtgcagcatggttttaaagatgcaattgccaaagttggattaacaaagttgatttctaatttttttgtggtgggcttattctatcacctttataaccaggttgctacaaacacattggagcgggtagcccctttaacacatgccatcggcaatgtgttgaaacgtgttttcgtcattggcttttccatcatcgcattcggcaacaagatcaccacacagactggaattggcacttccattgctgtttctggtgttgccctctactcatttataaaggctaagattgaggagaaaaagcaaataaagagtgcataaggtgttggctgatgtggatgcggttggtttgtcgctttgatggacctctattctctcggtgaacgaacaaacttgcaagatggataaaatcttgctatctcctagtacatttgattgttattcccagtctggtactgaggtgtgcggttgttgttggctaacttgtttatttgaagcaaatttgagcaatgctcagtggcatggaatttccattcc

SEQ ID NO: 23549 - protein, 399 aa, Zea mays subsp. mays
  peptide (1)..(399): Ceres Seq. ID no. 13494574
  misc_feature (1)..(399): NCBI GI NO: 1352200 NR Description: TRIOSE PHOSPHATE/PHOSPHATE TRANSLOCATOR
  misc_feature (1)..(399): NCBI GI NO: 34904488 NR Description: putative triose phosphate/phosphate translocator
  misc_feature (1)..(399): NCBI GI NO: 13195734 NR Description: triose phosphate translocator [Triticum aestivum]
  misc_feature (1)..(399): NCBI GI NO: 13518113 NR Description: triose phosphate/phosphate translocator
  misc_feature (7)..(398): NCBI GI NO: 9757731 NR Description: phosphate/triose-phosphate translocator precursor
  misc_feature (7)..(399): NCBI GI NO: 21593093 NR Description: phosphate/triose-phosphate translocator precursor
  misc_feature (35)..(398): NCBI GI NO: 117291 NR Description: TRIOSE PHOSPHATE/PHOSPHATE TRANSLOCATOR
  misc_feature (7)..(399): NCBI GI NO: 30694881 NR Description: phosphate/triose-phosphate translocator, putative
  misc_feature (11)..(399): NCBI GI NO: 9295273 NR Description: triose phosphate/phosphate translocator precursor
  misc_feature (35)..(399): NCBI GI NO: 117290 NR Description: TRIOSE PHOSPHATE/PHOSPHATE TRANSLOCATOR
MAAAGTIPGAAAAIGASVSQRQRRVGAPSFVAAYVSEGTRLVCRRQLRPAPVLASSFISLSHPARRRFLCDAAAGASSGPAGEAKPQGFAERYPALVTGFFFFLWYFLNVIFNILNKKIFDYFPYPYFVSVSHLFIGVLYCLIGWSFGIPKRAPINSTLLKQLVPVAVCHAIGHVTSTVSFAAVAVSFAHTIKALEPFFNAAASQFILGQPVPLTLWLSLVPVVIGVSVASLTELSFNWTGFINAMISNISFTYRSIYSKKAMTDMDSTNLYAYISIIALFVCIPPAIIIEGPQLVQHGFKDAIAKVGLTKLISNFFVVGLFYHLYNQVATNTLERVAPLTHAIGNVLKRVFVIGFSIIAFGNKITTQTGIGTSIAVSGVALYSFIKAKIEEKKQIKSA

SEQ ID NO: 23550 - DNA, 1697 bp, Zea mays subsp. mays
  misc_feature (1)..(1697): Ceres Seq. ID no. 12355964
atactgcgcgttgcaagctcccacttcctgaggaacaggaactccatgagatccgcggcatccgccgtcccgttcatctgcacaaaaagaccgtaatccttctttttcctctcctccccatccgcggagtgtaaatcgtctctcgctagcgcgttcagtagaaaccctaaaccccgcctcctcccctcgccggggtaggggctacgggtgtcaacgcccgccatggacgcattccggaagcaactggatgtgctcatgggcgctaaccgcaacggcgacgtcgaggaggtgagccgcaactactacgaccgcgacgtctgccggctcttcctcgccggcctttgcccccacgacctcttccagctcacgaaaatggatcttggtccttgttctaagattcactcgcttcaactgcggaaagattatgaagaagcgaaagcaaagggaacagagaattttgacagagaactcgaggatatgatagaaaggctcattgtggagtgcgacaggaaaattcagagggccctgaaacgacttgcggatgacgatgccaaggctgctattgcgatatccgtctcggaggttactctgacggatgacatactgcagctgtcaaaacagatcaaggaaaaaatggtagaagttgatgcctttgattttgaagggagaactgatgataaaataaaggcccaggaagtagtggaagaactcagaactaaaagagctgatatgcaggctaccctcttgcttgatgcttttaacaaggacagagcttcattaactcagcctgctcaacctcctcaagtgacggcagcgccaccaccagctccacccgatgctcgtactcaagaaatgatcaatgaaaagcttaagaaagctgaagagcttggggaacaaggcatggttgatgaagctcagaaagctttggaagaggcagaagctctgaaaaagctggcgcgacgtccggagccaccttcagacccttctaaatatactgccgctgatgtttggattaccgatcaaaagttgcgcctctgtgatatatgtggagcatttctgagtgtatatgacaatgatcgacgtcttgctgaccattttggagggaaactgcatctaggctacatgctgattcgtgacaaacagaaagaacttcaggagcagagaaacaaaaggaggacaggcaaaactgaagatgataggcgatctagagagcagagcaaggatcgaaacggcccgccgtccagggatagagattcagaaaggagagacagggttgagtctcgagatggaagaagagattatgatagggaacgcgataggcgtcacgatagggaccgtcgccatgaccgcgaccgggatagggattatgaccgctcccgcggatatgactcaaggagaagagagcgttcacgctccagggagcgcagcaggcgccatgagagatactaaatgttactccatggctgacagattttggattgctggcgtctgttctggtttgtgttgtgctttgtgtcttatcttccgaagtttcctgttcctgctcgagaaatccgaaagccaatctgcgttctgcatcatgtcatgtcctagtgtcgtactgtttagttatatgccaagaacatctctttcatcaaatgaatatttggaaacaccaacgcacttgacgctaaatgggaatgaagtgtggagtattt

SEQ ID NO: 23551 - protein, 408 aa, Zea mays subsp. mays
  peptide (1)..(408): Ceres Seq. ID no. 12355965
  misc_feature (1)..(350): Pfam Name: Pfam Description:  LUC7 N_terminus
  misc_feature (1)..(408): NCBI GI NO: 29367401 NR Description: sarcoplasmic reticulum protein-like protein
  misc_feature (1)..(407): NCBI GI NO: 18418301 NR Description: putative protein; protein id: At5g17440
  misc_feature (1)..(408): NCBI GI NO: 30678827 NR Description: expressed protein [Arabidopsis thaliana]
  misc_feature (51)..(408): NCBI GI NO: 21595481 NR Description: unknown [Arabidopsis thaliana]
  misc_feature (73)..(407): NCBI GI NO: 11357938 NR Description: hypothetical protein K3M16_10 - Arabidopsisthaliana
  misc_feature (98)..(408): NCBI GI NO: 6017114 NR Description: unknown protein [Arabidopsis thaliana]
  misc_feature (1)..(387): NCBI GI NO: 24640172 NR Description: CG3198-PA [Drosophila melanogaster]
  misc_feature (170)..(408): NCBI GI NO: 31222227 NR Description: ENSANGP00000018276 [Anopheles gambiae]
  misc_feature (181)..(407): NCBI GI NO: 8346914 NR Description: SR+89 [Homo sapiens]
  misc_feature (181)..(407): NCBI GI NO: 21536228 NR Description: Luc7 homolog (S
MDAFRKQLDVLMGANRNGDVEEVSRNYYDRDVCRLFLAGLCPHDLFQLTKMDLGPCSKIHSLQLRKDYEEAKAKGTENFDRELEDMIERLIVECDRKIQRALKRLADDDAKAAIAISVSEVTLTDDILQLSKQIKEKMVEVDAFDFEGRTDDKIKAQEVVEELRTKRADMQATLLLDAFNKDRASLTQPAQPPQVTAAPPPAPPDARTQEMINEKLKKAEELGEQGMVDEAQKALEEAEALKKLARRPEPPSDPSKYTAADVWITDQKLRLCDICGAFLSVYDNDRRLADHFGGKLHLGYMLIRDKQKELQEQRNKRRTGKTEDDRRSREQSKDRNGPPSRDRDSERRDRVESRDGRRDYDRERDRRHDRDRRHDRDRDRDYDRSRGYDSRRRERSRSRERSRRHERY

SEQ ID NO: 23552 - protein, 397 aa, Zea mays subsp. mays
  peptide (1)..(397): Ceres Seq. ID no. 12355966
  misc_feature (1)..(339): Pfam Name: Pfam Description:  LUC7 N_terminus
  misc_feature (1)..(397): NCBI GI NO: 29367401 NR Description: sarcoplasmic reticulum protein-like protein
  misc_feature (1)..(396): NCBI GI NO: 18418301 NR Description: putative protein; protein id: At5g17440
  misc_feature (1)..(397): NCBI GI NO: 30678827 NR Description: expressed protein [Arabidopsis thaliana]
  misc_feature (40)..(397): NCBI GI NO: 21595481 NR Description: unknown [Arabidopsis thaliana]
  misc_feature (62)..(396): NCBI GI NO: 11357938 NR Description: hypothetical protein K3M16_10 - Arabidopsisthaliana
  misc_feature (87)..(397): NCBI GI NO: 6017114 NR Description: unknown protein [Arabidopsis thaliana]
  misc_feature (1)..(376): NCBI GI NO: 24640172 NR Description: CG3198-PA [Drosophila melanogaster]
  misc_feature (159)..(397): NCBI GI NO: 31222227 NR Description: ENSANGP00000018276 [Anopheles gambiae]
  misc_feature (170)..(396): NCBI GI NO: 8346914 NR Description: SR+89 [Homo sapiens]
  misc_feature (170)..(396): NCBI GI NO: 21706650 NR Description: Similar to Luc7 homolog (S. cerevisiae)-like
MGANRNGDVEEVSRNYYDRDVCRLFLAGLCPHDLFQLTKMDLGPCSKIHSLQLRKDYEEAKAKGTENFDRELEDMIERLIVECDRKIQRALKRLADDDAKAAIAISVSEVTLTDDILQLSKQIKEKMVEVDAFDFEGRTDDKIKAQEVVEELRTKRADMQATLLLDAFNKDRASLTQPAQPPQVTAAPPPAPPDARTQEMINEKLKKAEELGEQGMVDEAQKALEEAEALKKLARRPEPPSDPSKYTAADVWITDQKLRLCDICGAFLSVYDNDRRLADHFGGKLHLGYMLIRDKQKELQEQRNKRRTGKTEDDRRSREQSKDRNGPPSRDRDSERRDRVESRDGRRDYDRERDRRHDRDRRHDRDRDRDYDRSRGYDSRRRERSRSRERSRRHERY

SEQ ID NO: 23553 - protein, 358 aa, Zea mays subsp. mays
  peptide (1)..(358): Ceres Seq. ID no. 12355967
  misc_feature (1)..(300): Pfam Name: Pfam Description:  LUC7 N_terminus
  misc_feature (1)..(358): NCBI GI NO: 29367401 NR Description: sarcoplasmic reticulum protein-like protein
  misc_feature (1)..(357): NCBI GI NO: 18418301 NR Description: putative protein; protein id: At5g17440
  misc_feature (1)..(358): NCBI GI NO: 30678827 NR Description: expressed protein [Arabidopsis thaliana]
  misc_feature (1)..(358): NCBI GI NO: 21595481 NR Description: unknown [Arabidopsis thaliana]
  misc_feature (23)..(357): NCBI GI NO: 11357938 NR Description: hypothetical protein K3M16_10 - Arabidopsisthaliana
  misc_feature (48)..(358): NCBI GI NO: 6017114 NR Description: unknown protein [Arabidopsis thaliana]
  misc_feature (1)..(337): NCBI GI NO: 24640172 NR Description: CG3198-PA [Drosophila melanogaster]
  misc_feature (120)..(358): NCBI GI NO: 31222227 NR Description: ENSANGP00000018276 [Anopheles gambiae]
  misc_feature (131)..(357): NCBI GI NO: 8346914 NR Description: SR+89 [Homo sapiens]
  misc_feature (131)..(357): NCBI GI NO: 8922297 NR Description: LUC7-like; sarcoplasmic reticulum protein LUC7B1
MDLGPCSKIHSLQLRKDYEEAKAKGTENFDRELEDMIERLIVECDRKIQRALKRLADDDAKAAIAISVSEVTLTDDILQLSKQIKEKMVEVDAFDFEGRTDDKIKAQEVVEELRTKRADMQATLLLDAFNKDRASLTQPAQPPQVTAAPPPAPPDARTQEMINEKLKKAEELGEQGMVDEAQKALEEAEALKKLARRPEPPSDPSKYTAADVWITDQKLRLCDICGAFLSVYDNDRRLADHFGGKLHLGYMLIRDKQKELQEQRNKRRTGKTEDDRRSREQSKDRNGPPSRDRDSERRDRVESRDGRRDYDRERDRRHDRDRRHDRDRDRDYDRSRGYDSRRRERSRSRERSRRHERY

SEQ ID NO: 23554 - DNA, 1482 bp, Zea mays subsp. mays
  misc_feature (1)..(1482): Ceres Seq. ID no. 12410966
ggaccgacatgttactttaccctaaacctttgcagtttgcactgccaccgcgaaggcacacagccgccgtatcttttacttgcgctcggcacgcaggcgacggctgcggcgctcaggttggggttctcatcgacggcgtcagcggcttcccctcccgcctctcgtcagtcgcttcgcgccctcgcctccggtcctccgcacactggccggtgaccctgcatagtattatctgattttcctggaggccacattttaaggactgaggttacaatggcagatgccagccctagaacagaaacatcaacagatgatactgacgacaataacgggcttgaaccaggcagaggtggtcttgttgcttctgactccagtgacagatccaaagacaaacatggagatcaaaagacattgcgtcgccttgctcaaaatcgtgaggctgcaaggaagagccgactaaggaagaaggcatatgttcaacagttggagaatagcaggctaaaacttacccaactagagcaagagctgcaaagagctcgtcagcagggcatttttatatctagttcagttgatcagtcacactccatgagtggaaatggggcattggcctttgatatggagtatgcgaggtggttggaagagcacaatcggcaaattagtgaactaagggctggtgtcagtgctcatgcaagtgatactgatcttcgaagtgttgttgataagatcatgtcacactatgatgagatttttaggctcaaaggcaatgcagccaaggcagatgtttttcacgtcttatctggcatgtggaagacaccggcggagaggtgttttttgtggctaggaggtttccgaccatctgaggttttaaagcttctttcgacacaacttgaacctctcaccgaacagcagctgtcagggataagcaaccttcagcaatcttcacagcaggctgaggatgctctttcacaaggaatggaggcccttcagcaatcattggccgaaaccttggctgggtctctttcgtcttctggatcaacaggaaatgtggcaaactacatgggtcaaatggccatggctatgggaaaacttggaacgcttgagaatttccttcgtcagactctacaacagatgcaaaggatcctgaccactagacagtcagctcgggcgctacttgtgataagtgattactcttcacgtctccgtgccctaagctctctctggcttgctcggcccaaggaatagcaagaacatgctatttgactgcaatacttttcacaatttggttttcaatggtcaggagatttgacaaggctgcgacagacttgattcggacatatctgcacatactatgacccaaatggaaggggatgttcatgtagcttaggctgcttagctttgtagttaagtgttgttgatgtattattaccaactgctgtaaaattctcactctgtatgcccctgatttgcagcgaaccattagaatgc

SEQ ID NO: 23555 - protein, 322 aa, Zea mays subsp. mays
  peptide (1)..(322): Ceres Seq. ID no. 12410967
  misc_feature (43)..(104): Pfam Name: Pfam Description:  bZIP transcription factor
  misc_feature (1)..(322): NCBI GI NO: 17025922 NR Description: bZIP transcription factor [Oryza sativa]
  misc_feature (1)..(322): NCBI GI NO: 122772 NR Description: Transcription factor HBP-1b
  misc_feature (1)..(322): NCBI GI NO: 34909110 NR Description: putative transcription factor HBP-1b
  misc_feature (1)..(322): NCBI GI NO: 17025924 NR Description: bZIP transcription factor [Oryza sativa]
  misc_feature (1)..(322): NCBI GI NO: 15148924 NR Description: TGA-type basic leucine zipper protein TGA2.1
  misc_feature (1)..(322): NCBI GI NO: 15148926 NR Description: TGA-type basic leucine zipper protein TGA2.2
  misc_feature (1)..(322): NCBI GI NO: 422029 NR Description: transcription factor OBF3.2 - maize
  misc_feature (1)..(322): NCBI GI NO: 34921538 NR Description: Transcription factor HBP-1b(c1)
  misc_feature (1)..(322): NCBI GI NO: 17025920 NR Description: bZIP transcription factor [Oryza sativa]
  misc_feature (1)..(322): NCBI GI NO: 17025918 NR Description: bZIP transcription factor [Oryza sativa]
MADASPRTETSTDDTDDNNGLEPGRGGLVASDSSDRSKDKHGDQKTLRRLAQNREAARKSRLRKKAYVQQLENSRLKLTQLEQELQRARQQGIFISSSVDQSHSMSGNGALAFDMEYARWLEEHNRQISELRAGVSAHASDTDLRSVVDKIMSHYDEIFRLKGNAAKADVFHVLSGMWKTPAERCFLWLGGFRPSEVLKLLSTQLEPLTEQQLSGISNLQQSSQQAEDALSQGMEALQQSLAETLAGSLSSSGSTGNVANYMGQMAMAMGKLGTLENFLRQTLQQMQRILTTRQSARALLVISDYSSRLRALSSLWLARPKE

SEQ ID NO: 23556 - protein, 218 aa, Zea mays subsp. mays
  peptide (1)..(218): Ceres Seq. ID no. 12410968
  misc_feature (1)..(218): NCBI GI NO: 17025922 NR Description: bZIP transcription factor [Oryza sativa]
  misc_feature (1)..(218): NCBI GI NO: 122772 NR Description: Transcription factor HBP-1b
  misc_feature (1)..(218): NCBI GI NO: 34909110 NR Description: putative transcription factor HBP-1b
  misc_feature (1)..(218): NCBI GI NO: 17025924 NR Description: bZIP transcription factor [Oryza sativa]
  misc_feature (1)..(218): NCBI GI NO: 15148924 NR Description: TGA-type basic leucine zipper protein TGA2.1
  misc_feature (1)..(218): NCBI GI NO: 15148926 NR Description: TGA-type basic leucine zipper protein TGA2.2
  misc_feature (1)..(218): NCBI GI NO: 422029 NR Description: transcription factor OBF3.2 - maize
  misc_feature (1)..(218): NCBI GI NO: 34921538 NR Description: Transcription factor HBP-1b(c1)
  misc_feature (1)..(218): NCBI GI NO: 17025920 NR Description: bZIP transcription factor [Oryza sativa]
  misc_feature (1)..(218): NCBI GI NO: 17025918 NR Description: bZIP transcription factor [Oryza sativa]
MSGNGALAFDMEYARWLEEHNRQISELRAGVSAHASDTDLRSVVDKIMSHYDEIFRLKGNAAKADVFHVLSGMWKTPAERCFLWLGGFRPSEVLKLLSTQLEPLTEQQLSGISNLQQSSQQAEDALSQGMEALQQSLAETLAGSLSSSGSTGNVANYMGQMAMAMGKLGTLENFLRQTLQQMQRILTTRQSARALLVISDYSSRLRALSSLWLARPKE

SEQ ID NO: 23557 - protein, 208 aa, Zea mays subsp. mays
  peptide (1)..(208): Ceres Seq. ID no. 12410969
  misc_feature (1)..(208): NCBI GI NO: 17025922 NR Description: bZIP transcription factor [Oryza sativa]
  misc_feature (1)..(208): NCBI GI NO: 122772 NR Description: Transcription factor HBP-1b
  misc_feature (1)..(208): NCBI GI NO: 34909110 NR Description: putative transcription factor HBP-1b
  misc_feature (1)..(208): NCBI GI NO: 17025924 NR Description: bZIP transcription factor [Oryza sativa]
  misc_feature (1)..(208): NCBI GI NO: 15148924 NR Description: TGA-type basic leucine zipper protein TGA2.1
  misc_feature (1)..(208): NCBI GI NO: 15148926 NR Description: TGA-type basic leucine zipper protein TGA2.2
  misc_feature (1)..(208): NCBI GI NO: 422029 NR Description: transcription factor OBF3.2 - maize
  misc_feature (1)..(208): NCBI GI NO: 34921538 NR Description: Transcription factor HBP-1b(c1)
  misc_feature (1)..(208): NCBI GI NO: 17025920 NR Description: bZIP transcription factor [Oryza sativa]
  misc_feature (1)..(208): NCBI GI NO: 17025918 NR Description: bZIP transcription factor [Oryza sativa]
MEYARWLEEHNRQISELRAGVSAHASDTDLRSVVDKIMSHYDEIFRLKGNAAKADVFHVLSGMWKTPAERCFLWLGGFRPSEVLKLLSTQLEPLTEQQLSGISNLQQSSQQAEDALSQGMEALQQSLAETLAGSLSSSGSTGNVANYMGQMAMAMGKLGTLENFLRQTLQQMQRILTTRQSARALLVISDYSSRLRALSSLWLARPKE

SEQ ID NO: 23558 - DNA, 1761 bp, Zea mays subsp. mays
  misc_feature (1)..(1761): Ceres Seq. ID no. 12345231
accaaatggaccgtgttcttctgagctcccacctgccatctcacgctcttgcaaacacgaggttgcagctgggtcctggtggcctcaacagtataggatttgcagtcataaaaaagggatgcttgaagttaagatgttacgcgatcggcgatgaactcggtggtccagggcgcttaagtaagcattttgtcgagaacagtaatggacctgttttccagggactcgatgcgtctgctggttcttttagaactgtcggtgctgaaatcactcaggacactggagatttctttgtcagtgacgcagagggtgatccagacaaacctaccgatgggttctcctcgatcgaccaggctataggtgctttgcgtgaagggaagtttgttattgctgtagatgatgagaacggcgacaacgaaggcgaccttgtgatggcggccactctagtggaccagaagtcagtcgcattcatgatcaggaatggctctgggattatctcggtaggcatggaggaggaggacctgactagactgatgattccgatgatgtcccctatcacagaaatcgaagatatcacggctgctgcttccacggtgacagtggatgccagggttggcatatctacgggtgtgtcggctgcagacagggcgaagaccatcctcactctagcctcctctgactccaagcccagtgatctgaggagaccaggccacatattccccctcaagtaccggaacgggggcgtgctgaagagagctggccacacggaagcgtcggtggatctggttgcgttggcaggtctccgtcctgtgtccgttctctccaccgtcatggaccccagggacggttcgatggcaggcgtaacggttctccagcagatggctatggagcatgacatacccatcgtttcgattgctgatctcatccggtataggagaaagcgggagaagctggtggagctgattgctgtgtctcgcttgccgacgaaatggggcctcttccgagcctactgctaccagtccaggctcgatggaaccgagcacatcgctgttgtgaagggcgatatcggcgacggcgaagaggtcctggtgagggtgcactcggagtgcctgacgggggacatcctcggctcagcccgctgcgactgcggcaaccagctggagctggcgatgcagctgatcgagaaggccggccgtggcgtgctcgtgtacctccgcggccacgagggccgcggcattggcctgggccagaagctccgcgcctacaacctccaggacgagggccacgacaccgtcgaggccaacgtcgagctcggcctcgccgtggacgcccgcgagtacggcatcggcgcccagatactccgtgacatcggcgtgcgcacgatgcggctgatgaccaacaaccccgccaagttcatcgggctcaagggctacgggctcgccgtggtggggagggtgccggtgatctctcccatcaccaaggagaaccagaagtacctcgagaccaagcgcaccaagatgggccacgtctacggctccgatctcccgggaagcctgccggagttcgccaacccacaagaggcccccacagaacaagacgacgacgataaccaaaactgataaaaaaactatacggtgtcgtttttttaggaaaagataccaatataaccacaaattcttgtattccactgagaacgagtattgcagagtatttatttatcaactgcaaaattattaagtataatagagatacaaacttttatcg

SEQ ID NO: 23559 - protein, 537 aa, Zea mays subsp. mays
  peptide (1)..(537): Ceres Seq. ID no. 12345232
  misc_feature (315)..(486): Pfam Name: Pfam Description:  GTP cyclohydrolase II
  misc_feature (80)..(537): NCBI GI NO: 29367375 NR Description: GTP cyclohydrolase II/3
  misc_feature (63)..(512): NCBI GI NO: 18424277 NR Description: GTP cyclohydrolase II / 3
  misc_feature (74)..(519): NCBI GI NO: 27735197 NR Description: Riboflavin biosynthesis protein ribA
  misc_feature (78)..(513): NCBI GI NO: 7436011 NR Description: GTP cyclohydrolase II (EC 3
  misc_feature (143)..(519): NCBI GI NO: 30697989 NR Description: GTP cyclohydrolase II
  misc_feature (80)..(488): NCBI GI NO: 25290324 NR Description: probable GTP cyclohydrolase
  misc_feature (80)..(488): NCBI GI NO: 30681714 NR Description: GTP cyclohydrolase -related [Arabidopsis thaliana]
  misc_feature (114)..(515): NCBI GI NO: 23018011 NR Description: hypothetical protein [Thermobifida fusca]
  misc_feature (114)..(508): NCBI GI NO: 23053279 NR Description: hypothetical protein [Geobacter metallireducens]
  misc_feature (111)..(508): NCBI GI NO: 22299270 NR Description: ribof lavin biosynthesis protein RibA includes GTPcyclohydrolase II and 3
QMDRVLLSSHLPSHALANTRLQLGPGGLNSIGFAVIKKGCLKLRCYAIGDELGGPGRLSKHFVENSNGPVFQGLDASAGSFRTVGAEITQDTGDFFVSDAEGDPDKPTDGFSSIDQAIGALREGKFVIAVDDENGDNEGDLVMAATLVDQKSVAFMIRNGSGIISVGMEEEDLTRLMIPMMSPITEIEDITAAASTVTVDARVGISTGVSAADRAKTILTLASSDSKPSDLRRPGHIFPLKYRNGGVLKRAGHTEASVDLVALAGLRPVSVLSTVMDPRDGSMAGVTVLQQMAMEHDIPIVSIADLIRYRRKREKLVELIAVSRLPTKWGLFRAYCYQSRLDGTEHIAVVKGDIGDGEEVLVRVHSECLTGDILGSARCDCGNQLELAMQLIEKAGRGVLVYLRGHEGRGIGLGQKLRAYNLQDEGHDTVEANVELGLAVDAREYGIGAQILRDIGVRTMRLMTNNPAKFIGLKGYGLAVVGRVPVISPITKENQKYLETKRTKMGHVYGSDLPGSLPEFANPQEAPTEQDDDDNQN

SEQ ID NO: 23560 - protein, 536 aa, Zea mays subsp. mays
  peptide (1)..(536): Ceres Seq. ID no. 12345233
  misc_feature (314)..(485): Pfam Name: Pfam Description:  GTP cyclohydrolase II
  misc_feature (79)..(536): NCBI GI NO: 29367375 NR Description: GTP cyclohydrolase II/3
  misc_feature (62)..(511): NCBI GI NO: 18424277 NR Description: GTP cyclohydrolase II / 3
  misc_feature (73)..(518): NCBI GI NO: 27735197 NR Description: Riboflavin biosynthesis protein ribA
  misc_feature (77)..(512): NCBI GI NO: 7436011 NR Description: GTP cyclohydrolase II (EC 3
  misc_feature (142)..(518): NCBI GI NO: 30697989 NR Description: GTP cyclohydrolase II
  misc_feature (79)..(487): NCBI GI NO: 25290324 NR Description: probable GTP cyclohydrolase
  misc_feature (79)..(487): NCBI GI NO: 30681714 NR Description: GTP cyclohydrolase -related [Arabidopsis thaliana]
  misc_feature (113)..(514): NCBI GI NO: 23018011 NR Description: hypothetical protein [Thermobifida fusca]
  misc_feature (113)..(507): NCBI GI NO: 23053279 NR Description: hypothetical protein [Geobacter metallireducens]
  misc_feature (110)..(507): NCBI GI NO: 22299270 NR Description: ribof lavin biosynthesis protein RibA includes GTPcyclohydrolase II and 3
MDRVLLSSHLPSHALANTRLQLGPGGLNSIGFAVIKKGCLKLRCYAIGDELGGPGRLSKHFVENSNGPVFQGLDASAGSFRTVGAEITQDTGDFFVSDAEGDPDKPTDGFSSIDQAIGALREGKFVIAVDDENGDNEGDLVMAATLVDQKSVAFMIRNGSGIISVGMEEEDLTRLMIPMMSPITEIEDITAAASTVTVDARVGISTGVSAADRAKTILTLASSDSKPSDLRRPGHIFPLKYRNGGVLKRAGHTEASVDLVALAGLRPVSVLSTVMDPRDGSMAGVTVLQQMAMEHDIPIVSIADLIRYRRKREKLVELIAVSRLPTKWGLFRAYCYQSRLDGTEHIAVVKGDIGDGEEVLVRVHSECLTGDILGSARCDCGNQLELAMQLIEKAGRGVLVYLRGHEGRGIGLGQKLRAYNLQDEGHDTVEANVELGLAVDAREYGIGAQILRDIGVRTMRLMTNNPAKFIGLKGYGLAVVGRVPVISPITKENQKYLETKRTKMGHVYGSDLPGSLPEFANPQEAPTEQDDDDNQN

SEQ ID NO: 23561 - protein, 395 aa, Zea mays subsp. mays
  peptide (1)..(395): Ceres Seq. ID no. 12345234
  misc_feature (173)..(344): Pfam Name: Pfam Description:  GTP cyclohydrolase II
  misc_feature (1)..(395): NCBI GI NO: 29367375 NR Description: GTP cyclohydrolase II/3
  misc_feature (1)..(370): NCBI GI NO: 18424277 NR Description: GTP cyclohydrolase II / 3
  misc_feature (1)..(377): NCBI GI NO: 27735197 NR Description: Riboflavin biosynthesis protein ribA
  misc_feature (1)..(371): NCBI GI NO: 7436011 NR Description: GTP cyclohydrolase II (EC 3
  misc_feature (1)..(377): NCBI GI NO: 30697989 NR Description: GTP cyclohydrolase II
  misc_feature (1)..(346): NCBI GI NO: 25290324 NR Description: probable GTP cyclohydrolase
  misc_feature (1)..(346): NCBI GI NO: 30681714 NR Description: GTP cyclohydrolase -related [Arabidopsis thaliana]
  misc_feature (1)..(373): NCBI GI NO: 23018011 NR Description: hypothetical protein [Thermobifida fusca]
  misc_feature (1)..(366): NCBI GI NO: 23053279 NR Description: hypothetical protein [Geobacter metallireducens]
  misc_feature (1)..(366): NCBI GI NO: 22299270 NR Description: ribof lavin biosynthesis protein RibA includes GTPcyclohydrolase II and 3
MAATLVDQKSVAFMIRNGSGIISVGMEEEDLTRLMIPMMSPITEIEDITAAASTVTVDARVGISTGVSAADRAKTILTLASSDSKPSDLRRPGHIFPLKYRNGGVLKRAGHTEASVDLVALAGLRPVSVLSTVMDPRDGSMAGVTVLQQMAMEHDIPIVSIADLIRYRRKREKLVELIAVSRLPTKWGLFRAYCYQSRLDGTEHIAVVKGDIGDGEEVLVRVHSECLTGDILGSARCDCGNQLELAMQLIEKAGRGVLVYLRGHEGRGIGLGQKLRAYNLQDEGHDTVEANVELGLAVDAREYGIGAQILRDIGVRTMRLMTNNPAKFIGLKGYGLAVVGRVPVISPITKENQKYLETKRTKMGHVYGSDLPGSLPEFANPQEAPTEQDDDDNQN

SEQ ID NO: 23562 - DNA, 1454 bp, Zea mays subsp. mays
  misc_feature (1)..(1454): Ceres Seq. ID no. 12355885
aaaaaattagaaaattctgcgttaattactccaggcttaaggttaagcacctcccaaacacgccctatgagggccctcgtccggatccacctgcccgcggccatctccaccggatccttcctccacacctcctcaaccgccgcctccaagaccctagtaccgaaccccaacctcgtcccgctccggctcgtccgccacttcccggccatggccgccaccgccgcagacgagttcgtgaagggccgcgtcttccccaacggcgtcgccgtcataacgctcgaccgacccaaggccctcaacgccatgaacctcgaaatggatgttagatacaaggcacttcttgatgaatgggaaacaaatccaagtgtcaagtgtattcttgtggaaagcagctcttctcgtgccttctcagcagggatggatattaagggggttgccgtggaaatacaaaaagacaaaaaaaacaccacttgtgcaaaaggtattcacagcagagtactctttaatttgtaagatacatgagtatgcaaaaccttatatatgcttgatggatggagtgacaatgggatttggaattgggctatcagggcatggccgctaccgcattattacagagagaacactcctagccatgcctgaaaatggtattggcctgttcccagacgttggctttgcttacattggtgcaaaagcaccaggagggggtgcagttggagtttaccttgggattactggaaaaaggatatcatcacctgctgatgctatgttcataggccttggtactcactatgtaccttctgcaaatttgggttcactcaaggagtccctgctgagtgctaacttcaccaatgatcctcatagagacgttgagtcagttctgacaggatacaagaaagaaccagagtctgaaccacaactaaaaaagcttttgccatatatcatttcttctttcagtcctgataaatcagtggctgaatctgtggaagagctaaagaaatgtagccgaagtggtgatgctgcagtggcagaatgggccattgaagctttagcaggaattgagaaaggcgctccattttctctttgtttaacacagaagcatttctctcaagttgcatcagcatatgggactagtgaacactatttatctaagctggctggtgttatgaaattggaatatcgcattgccttgaggtcgtcgattagaaacgattttgttgaaggtgtgcgtgctgttttagttgacaaggaccagaatccgaagtggaatccagccactctggaagaagtaaacatggccgaggtggaatcagttttcgagccattaggggccgaggctgagttgagtgtgtgaaatatggcctgccacactcagttttcttatttgtgctgcaataataatgtatacaaaacagaaatgcgatgcccacagaaacaataaatgctgtgtcttcatg

SEQ ID NO: 23563 - protein, 343 aa, Zea mays subsp. mays
  peptide (1)..(343): Ceres Seq. ID no. 12355886
  misc_feature (33)..(159): Pfam Name: Pfam Description:  Enoyl-CoA hydratase/isomerase family
  misc_feature (33)..(340): NCBI GI NO: 15235689 NR Description: 3-hydroxyisobutyryl-coenzyme A hydrolase
  misc_feature (33)..(343): NCBI GI NO: 11994698 NR Description: 3-hydroxyisobutyryl-coenzyme A hydrolase-like
  misc_feature (33)..(343): NCBI GI NO: 15230101 NR Description: 3-hydroxyisobutyryl-coenzyme A hydrolase, putative
  misc_feature (55)..(263): NCBI GI NO: 23013936 NR Description: hypothetical protein
  misc_feature (237)..(336): NCBI GI NO: 23013936 NR Description: hypothetical protein
  misc_feature (59)..(194): NCBI GI NO: 23016278 NR Description: hypothetical protein
  misc_feature (282)..(331): NCBI GI NO: 23016278 NR Description: hypothetical protein
  misc_feature (56)..(343): NCBI GI NO: 15239206 NR Description: 3-hydroxyisobutyryl-coenzyme A hydrolase
  misc_feature (51)..(335): NCBI GI NO: 26990203 NR Description: enoly-coenzyme A hydratase/isomerase family
  misc_feature (43)..(235): NCBI GI NO: 15608211 NR Description: echA9 [Mycobacterium tuberculosis H37Rv]
MLDTRHFLMNGKQIQVSSVFLWKAALLVPSQQGWILRGLPWKYKKTKKTPLVQKVFTAEYSLICKIHEYAKPYICLMDGVTMGFGIGLSGHGRYRIITERTLLAMPENGIGLFPDVGFAYIGAKAPGGGAVGVYLGITGKRISSPADAMFIGLGTHYVPSANLGSLKESLLSANFTNDPHRDVESVLTGYKKEPESEPQLKKLLPYIISSFSPDKSVAESVEELKKCSRSGDAAVAEWAIEALAGIEKGAPFSLCLTQKHFSQVASAYGTSEHYLSKLAGVMKLEYRIALRSSIRNDFVEGVRAVLVDKDQNPKWNPATLEEVNMAEVESVFEPLGAEAELSV

SEQ ID NO: 23564 - protein, 335 aa, Zea mays subsp. mays
  peptide (1)..(335): Ceres Seq. ID no. 12355887
  misc_feature (25)..(151): Pfam Name: Pfam Description:  Enoyl-CoA hydratase/isomerase family
  misc_feature (25)..(332): NCBI GI NO: 15235689 NR Description: 3-hydroxyisobutyryl-coenzyme A hydrolase
  misc_feature (25)..(335): NCBI GI NO: 11994698 NR Description: 3-hydroxyisobutyryl-coenzyme A hydrolase-like
  misc_feature (25)..(335): NCBI GI NO: 15230101 NR Description: 3-hydroxyisobutyryl-coenzyme A hydrolase, putative
  misc_feature (47)..(255): NCBI GI NO: 23013936 NR Description: hypothetical protein
  misc_feature (229)..(328): NCBI GI NO: 23013936 NR Description: hypothetical protein
  misc_feature (51)..(186): NCBI GI NO: 23016278 NR Description: hypothetical protein
  misc_feature (274)..(323): NCBI GI NO: 23016278 NR Description: hypothetical protein
  misc_feature (48)..(335): NCBI GI NO: 15239206 NR Description: 3-hydroxyisobutyryl-coenzyme A hydrolase
  misc_feature (43)..(327): NCBI GI NO: 26990203 NR Description: enoly-coenzyme A hydratase/isomerase family
  misc_feature (35)..(227): NCBI GI NO: 15608211 NR Description: echA9 [Mycobacterium tuberculosis H37Rv]
MNGKQIQVSSVFLWKAALLVPSQQGWILRGLPWKYKKTKKTPLVQKVFTAEYSLICKIHEYAKPYICLMDGVTMGFGIGLSGHGRYRIITERTLLAMPENGIGLFPDVGFAYIGAKAPGGGAVGVYLGITGKRISSPADAMFIGLGTHYVPSANLGSLKESLLSANFTNDPHRDVESVLTGYKKEPESEPQLKKLLPYIISSFSPDKSVAESVEELKKCSRSGDAAVAEWAIEALAGIEKGAPFSLCLTQKHFSQVASAYGTSEHYLSKLAGVMKLEYRIALRSSIRNDFVEGVRAVLVDKDQNPKWNPATLEEVNMAEVESVFEPLGAEAELSV

SEQ ID NO: 23565 - protein, 267 aa, Zea mays subsp. mays
  peptide (1)..(267): Ceres Seq. ID no. 12355888
  misc_feature (1)..(83): Pfam Name: Pfam Description:  Enoyl-CoA hydratase/isomerase family
  misc_feature (1)..(264): NCBI GI NO: 15235689 NR Description: 3-hydroxyisobutyryl-coenzyme A hydrolase
  misc_feature (1)..(267): NCBI GI NO: 11994698 NR Description: 3-hydroxyisobutyryl-coenzyme A hydrolase-like
  misc_feature (1)..(267): NCBI GI NO: 15230101 NR Description: 3-hydroxyisobutyryl-coenzyme A hydrolase, putative
  misc_feature (1)..(187): NCBI GI NO: 23013936 NR Description: hypothetical protein
  misc_feature (161)..(260): NCBI GI NO: 23013936 NR Description: hypothetical protein
  misc_feature (1)..(118): NCBI GI NO: 23016278 NR Description: hypothetical protein
  misc_feature (206)..(255): NCBI GI NO: 23016278 NR Description: hypothetical protein
  misc_feature (1)..(267): NCBI GI NO: 15239206 NR Description: 3-hydroxyisobutyryl-coenzyme A hydrolase
  misc_feature (1)..(259): NCBI GI NO: 26990203 NR Description: enoly-coenzyme A hydratase/isomerase family
  misc_feature (1)..(159): NCBI GI NO: 15608211 NR Description: echA9 [Mycobacterium tuberculosis H37Rv]
MDGVTMGFGIGLSGHGRYRIITERTLLAMPENGIGLFPDVGFAYIGAKAPGGGAVGVYLGITGKRISSPADAMFIGLGTHYVPSANLGSLKESLLSANFTNDPHRDVESVLTGYKKEPESEPQLKKLLPYIISSFSPDKSVAESVEELKKCSRSGDAAVAEWAIEALAGIEKGAPFSLCLTQKHFSQVASAYGTSEHYLSKLAGVMKLEYRIALRSSIRNDFVEGVRAVLVDKDQNPKWNPATLEEVNMAEVESVFEPLGAEAELSV

SEQ ID NO: 23566 - DNA, 1410 bp, Zea mays subsp. mays
  misc_feature (1)..(1410): Ceres Seq. ID no. 12342569
gctcagataatagcgacacctcctttcctctccctcgaggtgtctctcccagaacgcacagcacagtcgcagaacaggaaggcagagagcagcgccgcgatgagaggaggaggagcggggcccactgcggcgttcatgtccgacgagccgcctccagccgacgcggaagaggtggaggagaactccggcgccgaggaggaggacgaggagacggtggtggagcaggacgacgacgagctggagctggggctctgcctcggctccaagcaacagcagcagcagcatccgccgccgtgccggatcctcacggcccgggacctgcagccgaggtccctgtcaccggattcctccgtgtcctcttcctcccccgcggcaggtgcaggtaccgcggcgccaagcaagagggccaaggcggatgcggcgcccaactcgccagggacggtcgcgtctggccacccacagagctttggagtggtgggatggccacccataagaactttcaggatgaacagcctatttaaccaggccaaagagaatgcatcggaggctggcgccaagaagcccatcgtcgaacctgacatcaggaagacaaggaggagagaaagaaaggccggaccgtcggttgggtgaaggtgaacatggaaggagatatcattggaaggaaggtcgatctcaatgcccatcgctcttacaagacccttgcctcagcacttgagctcatgttcatgaagccgtccattggtctttgcacttctagcagttcaaagactctaaagctattagacagctcatcggagtatcagctcacctatgaggacagggacggggactggatgcttgttggagatgttccctgggagatgtttgtaggttcagtgaagaggctcaagatcatgagaacctcagacgccaaaggtctcggtccacgattccaagggtctcacagacccacagcagcttgcacgagaggcaggacgtgaaaccaccgatgtgcgtttggtgctaacaccgctggtgaagcttgaactgtgtttgatatcacgtaacagtaacagcagcccatatcgctggcatagttgtgagattacggggctgtttggtttactgtctaaggcgccacaacatggctaacttttctgtctaagtttagttcttcaattcgaacgactaaacttagacagcttcattgtgtctagtggaaatagtagaagtatttttttttttttgcttcttccctgtggtgccctcgttgaacttttctcatgggctatacgagcatcatcgcccccagctcttctgtccacactgtttttacctgtgaggaatggtcgcccaaagtgttggtttttatccttgtgtttgctatggcagaagtatctgcactgctgtttcatatctgtgttcatatct

SEQ ID NO: 23567 - protein, 209 aa, Zea mays subsp. mays
  peptide (1)..(209): Ceres Seq. ID no. 12342570
  misc_feature (79)..(182): Pfam Name: Pfam Description:  AUX/IAA family
  misc_feature (36)..(182): NCBI GI NO: 20269057 NR Description: aux/IAA protein
  misc_feature (116)..(189): NCBI GI NO: 15219646 NR Description: putative IAA1 protein; protein id: At1g04100
  misc_feature (158)..(188): NCBI GI NO: 20257219 NR Description: auxin-regulated protein [Zinnia elegans]
  misc_feature (143)..(186): NCBI GI NO: 7442237 NR Description: GH1 protein - soybean (fragment)
  misc_feature (125)..(184): NCBI GI NO: 25989504 NR Description: Aux/IAA protein [Solanum tuberosum]
  misc_feature (132)..(179): NCBI GI NO: 6136832 NR Description: CS-IAA2 [Cucumis sativus]
  misc_feature (153)..(188): NCBI GI NO: 20269061 NR Description: aux/IAA protein
  misc_feature (158)..(186): NCBI GI NO: 15227275 NR Description: auxin-regulated protein
  misc_feature (158)..(186): NCBI GI NO: 30681782 NR Description: auxin-responsive protein IAA8
  misc_feature (107)..(188): NCBI GI NO: 29465672 NR Description: Aux/IAA protein [Vitis vinifera]
AQIIATPPFLSLEVSLPERTAQSQNRKAESSAAMRGGGAGPTAAFMSDEPPPADAEEVEENSGAEEEDEETVVEQDDDELELGLCLGSKQQQQQHPPPCRILTARDLQPRSLSPDSSVSSSSPAAGAGTAAPSKRAKADAAPNSPGTVASGHPQSFGVVGWPPIRTFRMNSLFNQAKENASEAGAKKPIVEPDIRKTRRRERKAGPSVG

SEQ ID NO: 23568 - protein, 176 aa, Zea mays subsp. mays
  peptide (1)..(176): Ceres Seq. ID no. 12342571
  misc_feature (46)..(149): Pfam Name: Pfam Description:  AUX/IAA family
  misc_feature (3)..(149): NCBI GI NO: 20269057 NR Description: aux/IAA protein
  misc_feature (83)..(156): NCBI GI NO: 15219646 NR Description: putative IAA1 protein; protein id: At1g04100
  misc_feature (125)..(155): NCBI GI NO: 20257219 NR Description: auxin-regulated protein [Zinnia elegans]
  misc_feature (110)..(153): NCBI GI NO: 7442237 NR Description: GH1 protein - soybean (fragment)
  misc_feature (92)..(151): NCBI GI NO: 25989504 NR Description: Aux/IAA protein [Solanum tuberosum]
  misc_feature (99)..(146): NCBI GI NO: 6136832 NR Description: CS-IAA2 [Cucumis sativus]
  misc_feature (120)..(155): NCBI GI NO: 20269061 NR Description: aux/IAA protein
  misc_feature (125)..(153): NCBI GI NO: 15227275 NR Description: auxin-regulated protein
  misc_feature (125)..(153): NCBI GI NO: 30681782 NR Description: auxin-responsive protein IAA8
  misc_feature (74)..(155): NCBI GI NO: 29465672 NR Description: Aux/IAA protein [Vitis vinifera]
MRGGGAGPTAAFMSDEPPPADAEEVEENSGAEEEDEETVVEQDDDELELGLCLGSKQQQQQHPPPCRILTARDLQPRSLSPDSSVSSSSPAAGAGTAAPSKRAKADAAPNSPGTVASGHPQSFGVVGWPPIRTFRMNSLFNQAKENASEAGAKKPIVEPDIRKTRRRERKAGPSVG

SEQ ID NO: 23569 - protein, 172 aa, Zea mays subsp. mays
  peptide (1)..(172): Ceres Seq. ID no. 12342572
  misc_feature (130)..(172): NCBI GI NO: 15219761 NR Description: putative auxin-induced protein, IAA12
  misc_feature (130)..(172): NCBI GI NO: 21593621 NR Description: putative auxin-induced protein, IAA12
  misc_feature (145)..(172): NCBI GI NO: 17976835 NR Description: putative auxin induced transcription factor Aux/IAA
  misc_feature (152)..(172): NCBI GI NO: 30698145 NR Description: auxin-responsive protein IAA9
  misc_feature (150)..(172): NCBI GI NO: 20269059 NR Description: aux/IAA protein
  misc_feature (152)..(172): NCBI GI NO: 10177324 NR Description: auxin-induced protein IAA9 [Arabidopsis thaliana]
  misc_feature (152)..(172): NCBI GI NO: 21592701 NR Description: auxin-induced protein IAA9 [Arabidopsis thaliana]
  misc_feature (152)..(172): NCBI GI NO: 30698143 NR Description: auxin-responsive protein IAA9
  misc_feature (161)..(172): NCBI GI NO: 11131105 NR Description: Auxin-induced protein 22E
SDNSDTSFPLPRGVSPRTHSTVAEQEGREQRRDERRRSGAHCGVHVRRAASSRRGRGGGELRRRGGGRGDGGGAGRRRAGAGALPRLQATAAAASAAVPDPHGPGPAAEVPVTGFLRVLFLPRGRCRYRGAKQEGQGGCGAQLARDGRVWPPTELWSGGMATHKNFQDEQPI

SEQ ID NO: 23570 - DNA, 1501 bp, Zea mays subsp. mays
  misc_feature (1)..(1501): Ceres Seq. ID no. 12373953
aaaagccttcgcctttttcctctcgtcttcctctctctcccccgctccaaatcccaccctctctctttctctctccacattctccctgctgtgcaccttgcagcagccttggctgtggatcggaaatggcaatcgacgatgaatcgccgctcagagtcaaccccagaggcggcgccatgggaggaggggagcgtgacggcgcggagaaccagcggtggccgccgtggctgaagccgctgctggggacgagcttcttcggccaatgcaagctgcacgcggacgcgcacaagagcgagtgcaacatgtactgcctcgactgcatgaacggcgcgctctgctcccagtgcctcgcctaccaccgcgaccaccacgccatccagatacggaggtcctcctaccacgacgtgatccgggtgtcggagatccagaaggtgctggacatcagcggcgtgcagacctacatcatcaacagcgcgcgcgtggtgttcctgaacgagcggccgcagccgaggcccggcaagggcgtcaccaacacctgcgaggtctgcgagcgcagcctcctcgacaccttccgcttctgctccctcggctgcaagatcgtcaggacctccggcgacttccgcatccggaagaagcacgccatcgtcgcaaagaagaagagggagaagaagcatgcgccgcagcagaagcagcacaggggcgcggcggactcggcggacgacgacgacgacgactcgtccaccagcaccagcggcggcagcgacaagagcagcgtggtgcagagcttcaccccgtcgaccccgccggcgacgaccgccaacagcttccgcgccgggaagcggcgcaagggcgtgccgcaccggtcgccgttcggcagcctcgtggtggagttctagacaaaaaaaaaggcgcgccgcccggtcccgatggacgcccaccaaaaaaaaaaacacagcggtacaccactgtagcatacgcacttcttctacataccatcatctataggcgctgccggatcgaccgggctacatacataagtacatagccagcccaaaaataggagcaagcaataaccagggccccacttgcacgccgcccgcgcttctggacggacgaggacgaggaggccggtgcaatgcggctcgtacggggcacggttacttccacttccatagcagttactgtgctggtaacaacggtttgggtttggtgcctcactgcctctctgaagggaaacgaggttgttatagcagttactcttgtcgtcgtcagcctcagccactactaagttttgcgagtttcacctataggtgtttgctagttttttttaccggtgcttggtatacgcgagtagaatgtacatgtacgtatactgtcagagatggggggaatggtggtaggggggtgtagctcccggtgttcatattcgtgtgttggcttgctgccctgtaataataataaaaataaaaagggataaggatgctgctcctggatggccttc

SEQ ID NO: 23571 - protein, 297 aa, Zea mays subsp. mays
  peptide (1)..(297): Ceres Seq. ID no. 12373954
  misc_feature (72)..(199): Pfam Name: Pfam Description:  Protein of unknown function, DUF597
  misc_feature (60)..(297): NCBI GI NO: 38346725 NR Description: OSJNBa0086O06.23
  misc_feature (66)..(199): NCBI GI NO: 18398555 NR Description: expressed protein; protein id: At1g32700
  misc_feature (241)..(297): NCBI GI NO: 18398555 NR Description: expressed protein; protein id: At1g32700
  misc_feature (69)..(199): NCBI GI NO: 6714272 NR Description: F6N18.8 [Arabidopsis thaliana]
  misc_feature (241)..(297): NCBI GI NO: 6714272 NR Description: F6N18.8 [Arabidopsis thaliana]
  misc_feature (66)..(199): NCBI GI NO: 21554139 NR Description: unknown [Arabidopsis thaliana]
  misc_feature (241)..(297): NCBI GI NO: 21554139 NR Description: unknown [Arabidopsis thaliana]
  misc_feature (42)..(291): NCBI GI NO: 15236696 NR Description: putative protein; protein id: At4g17900.1
  misc_feature (42)..(268): NCBI GI NO: 37537092 NR Description: unknown protein
  misc_feature (56)..(290): NCBI GI NO: 18411153 NR Description: expressed protein; protein id: At1g76590
KPSPFSSRLPLSPPLQIPPSLFLSPHSPCCAPCSSLGCGSEMAIDDESPLRVNPRGGAMGGGERDGAENQRWPPWLKPLLGTSFFGQCKLHADAHKSECNMYCLDCMNGALCSQCLAYHRDHHAIQIRRSSYHDVIRVSEIQKVLDISGVQTYIINSARVVFLNERPQPRPGKGVTNTCEVCERSLLDTFRFCSLGCKIVRTSGDFRIRKKHAIVAKKKREKKHAPQQKQHRGAADSADDDDDDSSTSTSGGSDKSSVVQSFTPSTPPATTANSFRAGKRRKGVPHRSPFGSLVVEF

SEQ ID NO: 23572 - protein, 260 aa, Zea mays subsp. mays
  peptide (1)..(260): Ceres Seq. ID no. 12373955
MQAARGRAQERVQHVLPRLHERRALLPVPRLPPRPPRHPDTEVLLPRRDPGVGDPEGAGHQRRADLHHQQRARGVPERAAAAEARQGRHQHLRGLRAQPPRHLPLLLPRLQDRQDLRRLPHPEEARHRRKEEEGEEACAAAEAAQGRGGLGGRRRRRLVHQHQRRQRQEQRGAELHPVDPAGDDRQQLPRREAAQGRAAPVAVRQPRGGVLDKKKGAPPGPDGRPPKKKTQRYTTVAYALLLHTIIYRRCRIDRATYIST

SEQ ID NO: 23573 - protein, 256 aa, Zea mays subsp. mays
  peptide (1)..(256): Ceres Seq. ID no. 12373956
  misc_feature (31)..(158): Pfam Name: Pfam Description:  Protein of unknown function, DUF597
  misc_feature (19)..(256): NCBI GI NO: 38346725 NR Description: OSJNBa0086O06.23
  misc_feature (25)..(158): NCBI GI NO: 18398555 NR Description: expressed protein; protein id: At1g32700
  misc_feature (200)..(256): NCBI GI NO: 18398555 NR Description: expressed protein; protein id: At1g32700
  misc_feature (28)..(158): NCBI GI NO: 6714272 NR Description: F6N18.8 [Arabidopsis thaliana]
  misc_feature (200)..(256): NCBI GI NO: 6714272 NR Description: F6N18.8 [Arabidopsis thaliana]
  misc_feature (25)..(158): NCBI GI NO: 21554139 NR Description: unknown [Arabidopsis thaliana]
  misc_feature (200)..(256): NCBI GI NO: 21554139 NR Description: unknown [Arabidopsis thaliana]
  misc_feature (1)..(250): NCBI GI NO: 15236696 NR Description: putative protein; protein id: At4g17900.1
  misc_feature (1)..(227): NCBI GI NO: 37537092 NR Description: unknown protein
  misc_feature (15)..(249): NCBI GI NO: 18411153 NR Description: expressed protein; protein id: At1g76590
MAIDDESPLRVNPRGGAMGGGERDGAENQRWPPWLKPLLGTSFFGQCKLHADAHKSECNMYCLDCMNGALCSQCLAYHRDHHAIQIRRSSYHDVIRVSEIQKVLDISGVQTYIINSARVVFLNERPQPRPGKGVTNTCEVCERSLLDTFRFCSLGCKIVRTSGDFRIRKKHAIVAKKKREKKHAPQQKQHRGAADSADDDDDDSSTSTSGGSDKSSVVQSFTPSTPPATTANSFRAGKRRKGVPHRSPFGSLVVEF

SEQ ID NO: 23574 - DNA, 1906 bp, Zea mays subsp. mays
  misc_feature (1)..(1906): Ceres Seq. ID no. 13498491
cccacactccaccacccgcgccgccgcctcctactccgccccggcccctctgatccggaccgagcgccggccatggcgctcgccttcgacgagttcgggcgccccttcatcatcctgcgggagcaggagaagaagacgcgccttagggggctcgacgcgcagaaggccaacatcgcctcggccaaggccgtcgcgcggatcctccgcacgtcgcttggacccaagggcatggacaagatgctccagtcccccgacggcgacgtcatcatcacaaatgatggagcgaccatcctggagcagatggatgttgacaaccagatagcaaagctgatggtggagctgtcccgtagtcaagactatgaaatcggggatggtaccaccggggtggtagtcatggcaggggctcttctcgagcaggccgagaagcttctggagcgtggtattcaccccattagggtggctgaaggctatgagatggcgtcaaaggtagcttttgaccacctagaacatatctccgaaaagtttgagttcagtgcagacaacattgaacccctggtccagacctgcatgacaactctatcctcaaagattgttaaccgttgcaagcgggcgttggcagagattgctgtcaaagcagtacttgcggttgcaagatttggagaggaaggatgttaacttggatctaattaaagtagaaggcaaggttggtgggaagctggaggacactgaacttgtatatggaattattgttgacaaatatatgagccatccacaaatgccaaagagaattgaggatgctaagattgccatcttgacatgcccatttgagcctccgaagccaaagacaaagcataaggttgacattgacactgttgagaaattccagacactgcgtgagcaagagcagaaatactttgatgaaatggttcagaagtgcaaggatgctggtgcaaccctggttatttgccagtggggttttgatgatgaagccaatcatttattgatgcacagaaatctgccagcagttagatgggttggtggtgttgaattggaaattgattgccattgctacaggagggcggattgttccgagattccaagagttgagtcctgaaaagcttggaaaggctggatttagtcagagagaaatcattcggaacaacaaaggaccggatgctttacattgagaagtgtgccaattctagagctgttaaaacccattttcatccgtggtggaaacaaaatgatgattgaggagaccaagcgcagtcttcatgatgctctttgcgtggcaaggaatctgatccggaataactcaattgtgtacggtggcggctcagccgagatatcttgctcaattgctgttgaaactgctgcagataggcacccgggagttgagcagtatgctatcaggtcattcgctgatgcattagatgctgttccactagcgttggccgaaaacagtggtttgtcaccaattgataccttaactgcggtaaaagctcaacaagtcaaggagagcaacccccactgcggcatagactgcaacgacgttggcaccaccgacatgaaagaacagaacgtcttcgagaccctgattggcaagcagcaacagatcttgcttgccacccaggtggtgaagatgatcctgaagatcgacgacgtcatctcaccgtccgagtactgatggaaagaaggaacgggatggctatgctggatatgcgtaggcggcattgctgatgtgttgattggtgtacctccttatccaggcttgctgcctaccactcactccctgtgtgacgttttgccgaaattggtttgtattgtgcacgataatatctggaaatagactctagacagtccttagttatctttttattataaaaaaagtcagtgccttctcgtc

SEQ ID NO: 23575 - protein, 224 aa, Zea mays subsp. mays
  peptide (1)..(224): Ceres Seq. ID no. 13498492
  misc_feature (64)..(217): Pfam Name: Pfam Description:  TCP-1/cpn60 chaperonin family
  misc_feature (25)..(217): NCBI GI NO: 1587206 NR Description: T complex protein
  misc_feature (25)..(217): NCBI GI NO: 730919 NR Description: T-COMPLEX PROTEIN 1, EPSILON SUBUNIT
  misc_feature (25)..(217): NCBI GI NO: 1729864 NR Description: T-COMPLEX PROTEIN 1, EPSILON SUBUNIT
  misc_feature (25)..(217): NCBI GI NO: 15221770 NR Description: T-complex protein 1, epsilon subunit/chaperonin
  misc_feature (27)..(217): NCBI GI NO: 27924333 NR Description: Similar to chaperonin containing TCP1, subunit 5
  misc_feature (27)..(217): NCBI GI NO: 603955 NR Description: KIAA0098 protein [Homo sapiens]
  misc_feature (27)..(217): NCBI GI NO: 12804225 NR Description: Unknown (protein for IMAGE:3543711) [Homo sapiens]
  misc_feature (27)..(217): NCBI GI NO: 24307939 NR Description: chaperonin containing TCP1, subunit 5 (epsilon)
  misc_feature (27)..(217): NCBI GI NO: 6683670 NR Description: CCT
  misc_feature (27)..(217): NCBI GI NO: 6671702 NR Description: chaperonin subunit 5 (epsilon) [Mus musculus]
PTLHHPRRRLLLRPGPSDPDRAPAMALAFDEFGRPFIILREQEKKTRLRGLDAQKANIASAKAVARILRTSLGPKGMDKMLQSPDGDVIITNDGATILEQMDVDNQIAKLMVELSRSQDYEIGDGTTGVVVMAGALLEQAEKLLERGIHPIRVAEGYEMASKVAFDHLEHISEKFEFSADNIEPLVQTCMTTLSSKIVNRCKRALAEIAVKAVLAVARFGEEGC

SEQ ID NO: 23576 - protein, 200 aa, Zea mays subsp. mays
  peptide (1)..(200): Ceres Seq. ID no. 13498493
  misc_feature (40)..(193): Pfam Name: Pfam Description:  TCP-1/cpn60 chaperonin family
  misc_feature (1)..(193): NCBI GI NO: 1587206 NR Description: T complex protein
  misc_feature (1)..(193): NCBI GI NO: 730919 NR Description: T-COMPLEX PROTEIN 1, EPSILON SUBUNIT
  misc_feature (1)..(193): NCBI GI NO: 1729864 NR Description: T-COMPLEX PROTEIN 1, EPSILON SUBUNIT
  misc_feature (1)..(193): NCBI GI NO: 15221770 NR Description: T-complex protein 1, epsilon subunit/chaperonin
  misc_feature (3)..(193): NCBI GI NO: 27924333 NR Description: Similar to chaperonin containing TCP1, subunit 5
  misc_feature (3)..(193): NCBI GI NO: 603955 NR Description: KIAA0098 protein [Homo sapiens]
  misc_feature (3)..(193): NCBI GI NO: 24307939 NR Description: chaperonin containing TCP1, subunit 5 (epsilon)
  misc_feature (3)..(193): NCBI GI NO: 12804225 NR Description: Unknown (protein for IMAGE:3543711) [Homo sapiens]
  misc_feature (3)..(193): NCBI GI NO: 6683670 NR Description: CCT
  misc_feature (3)..(193): NCBI GI NO: 6671702 NR Description: chaperonin subunit 5 (epsilon) [Mus musculus]
MALAFDEFGRPFIILREQEKKTRLRGLDAQKANIASAKAVARILRTSLGPKGMDKMLQSPDGDVIITNDGATILEQMDVDNQIAKLMVELSRSQDYEIGDGTTGVVVMAGALLEQAEKLLERGIHPIRVAEGYEMASKVAFDHLEHISEKFEFSADNIEPLVQTCMTTLSSKIVNRCKRALAEIAVKAVLAVARFGEEGC

SEQ ID NO: 23577 - protein, 148 aa, Zea mays subsp. mays
  peptide (1)..(148): Ceres Seq. ID no. 13498494
  misc_feature (1)..(141): Pfam Name: Pfam Description:  TCP-1/cpn60 chaperonin family
  misc_feature (1)..(141): NCBI GI NO: 1587206 NR Description: T complex protein
  misc_feature (1)..(141): NCBI GI NO: 730919 NR Description: T-COMPLEX PROTEIN 1, EPSILON SUBUNIT
  misc_feature (1)..(141): NCBI GI NO: 1729864 NR Description: T-COMPLEX PROTEIN 1, EPSILON SUBUNIT
  misc_feature (1)..(141): NCBI GI NO: 15221770 NR Description: T-complex protein 1, epsilon subunit/chaperonin
  misc_feature (1)..(141): NCBI GI NO: 27924333 NR Description: Similar to chaperonin containing TCP1, subunit 5
  misc_feature (1)..(141): NCBI GI NO: 603955 NR Description: KIAA0098 protein [Homo sapiens]
  misc_feature (1)..(141): NCBI GI NO: 24307939 NR Description: chaperonin containing TCP1, subunit 5 (epsilon)
  misc_feature (1)..(141): NCBI GI NO: 12804225 NR Description: Unknown (protein for IMAGE:3543711) [Homo sapiens]
  misc_feature (1)..(141): NCBI GI NO: 6683670 NR Description: CCT
  misc_feature (1)..(141): NCBI GI NO: 6671702 NR Description: chaperonin subunit 5 (epsilon) [Mus musculus]
MDKMLQSPDGDVIITNDGATILEQMDVDNQIAKLMVELSRSQDYEIGDGTTGVVVMAGALLEQAEKLLERGIHPIRVAEGYEMASKVAFDHLEHISEKFEFSADNIEPLVQTCMTTLSSKIVNRCKRALAEIAVKAVLAVARFGEEGC

SEQ ID NO: 23578 - DNA, 1510 bp, Zea mays subsp. mays
  misc_feature (1)..(1510): Ceres Seq. ID no. 12387174
gcacgagaccattacctagaacatcctaatcgaaaaaagcgaaagctcaagcaaatacaagctctcagttagaccacactcaaaccagccacggacagcctcaaaatcccgagcaggagctcgctcgtagccccgagaacccgaaagctctgcagcgagatgtctcccgagctgaccggcaagatggccgccaaggccgccgccgccgctgcggcggtgaagcccgcgacgagggcgtacgtgacgttcctggcgggcgacggcgactactggaagggcgtggtgggcctggccaagggcctgcgcaaggtcggctcggcctatcccctggtggtggcccttctgcccgacgtgccggagtcccaccgccgcatcctcgtctcgcagggctgcatcctccgcgagatcgagcccgtgtacccgcctgagaaccagacgcagttcgccatggcgtactacgtcatcaactactccaagctccgcatctgggagttcgtggagtacgagaggatggtgtacctggacgcggacatccaggtgttcgagaacatcgacgagctgttcgagctcgagaaggggtacttctacgcggtgatggactgcttctgcgagaagacgtggagccacaccccgcagtacaggatcggctactgccaacagtgcccggacaaggtggcgtggccgaccaccgagctgggccctccgcccccgctctacttcaacgccggcatgttcgcgcacgagcccagcatggccaccgccaaggcactcctcgacaccctccgcgtcactccgcccacccccttcgcagagcaggacttcctgaacatgttcttcagggaccagtacaggccgatccctaacgtgtacaacctcgtgctcgccatgctctggaggcaccccgagaacgtccagctggagaaggtgaaggtcgtgcactactgcgcggcggggtccaagccgtggaggttcacgggcaaggaggccaacatggacagggaggacatcaagacgctggtgaacaagtggtgggacatctacaacgacgaggcactggacttcaagggcctgcccctctcgcccgccgacgccgacgacgaggtggaggcggtggccaagaagccgctccgcgcggcgctggcggaggccggcacggtcaagtacgtcaccgcgccctcggccgcgtgacaccgtgcttcggcttcccgccggtggccgcgctatggcttttgcgcggtcctcacaagtccgtaaagaagaatctcactataaggcctttgttttgaattttgtttatgaattagggtgtctaattttggatcagttcctttcccttgtgtgtctatttagggtgtgagcttatatatatatagtaccaattcaaggtgcaagcgttcgtcaggaattgggctttatgaatacgcccttcggtcacagctagagtatttgtcctgtaccgagggattatgtgtattttgcttggtgaattaatatataaaatacgaagccg

SEQ ID NO: 23579 - protein, 342 aa, Zea mays subsp. mays
  peptide (1)..(342): Ceres Seq. ID no. 12387175
  misc_feature (5)..(342): NCBI GI NO: 34898096 NR Description: WSI76 protein induced by water stress
  misc_feature (2)..(342): NCBI GI NO: 4588376 NR Description: galactinol synthase [Brassica napus]
  misc_feature (1)..(342): NCBI GI NO: 15226522 NR Description: putative galactinol synthase; protein id:At2g47180
  misc_feature (1)..(342): NCBI GI NO: 15223567 NR Description: water stress-induced protein, putative
  misc_feature (1)..(342): NCBI GI NO: 20340247 NR Description: galactinol synthase-like protein
  misc_feature (10)..(342): NCBI GI NO: 18874402 NR Description: galactinol synthase [Cucumis melo]
  misc_feature (1)..(342): NCBI GI NO: 15219093 NR Description: galactinol synthase, putative
  misc_feature (10)..(342): NCBI GI NO: 29569824 NR Description: galactinol synthase [Cucumis sativus]
  misc_feature (1)..(342): NCBI GI NO: 5541885 NR Description: putative galactinol synthase [Pisum sativum]
  misc_feature (25)..(342): NCBI GI NO: 15217486 NR Description: putative galactinol synthase; protein id:At1g09350
MSPELTGKMAAKAAAAAAAVKPATRAYVTFLAGDGDYWKGVVGLAKGLRKVGSAYPLVVALLPDVPESHRRILVSQGCILREIEPVYPPENQTQFAMAYYVINYSKLRIWEFVEYERMVYLDADIQVFENIDELFELEKGYFYAVMDCFCEKTWSHTPQYRIGYCQQCPDKVAWPTTELGPPPPLYFNAGMFAHEPSMATAKALLDTLRVTPPTPFAEQDFLNMFFRDQYRPIPNVYNLVLAMLWRHPENVQLEKVKVVHYCAAGSKPWRFTGKEANMDREDIKTLVNKWWDIYNDEALDFKGLPLSPADADDEVEAVAKKPLRAALAEAGTVKYVTAPSAA

SEQ ID NO: 23580 - protein, 334 aa, Zea mays subsp. mays
  peptide (1)..(334): Ceres Seq. ID no. 12387176
  misc_feature (1)..(334): NCBI GI NO: 34898096 NR Description: WSI76 protein induced by water stress
  misc_feature (1)..(334): NCBI GI NO: 4588376 NR Description: galactinol synthase [Brassica napus]
  misc_feature (1)..(334): NCBI GI NO: 15226522 NR Description: putative galactinol synthase; protein id:At2g47180
  misc_feature (1)..(334): NCBI GI NO: 15223567 NR Description: water stress-induced protein, putative
  misc_feature (1)..(334): NCBI GI NO: 20340247 NR Description: galactinol synthase-like protein
  misc_feature (2)..(334): NCBI GI NO: 18874402 NR Description: galactinol synthase [Cucumis melo]
  misc_feature (1)..(334): NCBI GI NO: 15219093 NR Description: galactinol synthase, putative
  misc_feature (2)..(334): NCBI GI NO: 29569824 NR Description: galactinol synthase [Cucumis sativus]
  misc_feature (1)..(334): NCBI GI NO: 5541885 NR Description: putative galactinol synthase [Pisum sativum]
  misc_feature (17)..(334): NCBI GI NO: 15217486 NR Description: putative galactinol synthase; protein id:At1g09350
MAAKAAAAAAAVKPATRAYVTFLAGDGDYWKGVVGLAKGLRKVGSAYPLVVALLPDVPESHRRILVSQGCILREIEPVYPPENQTQFAMAYYVINYSKLRIWEFVEYERMVYLDADIQVFENIDELFELEKGYFYAVMDCFCEKTWSHTPQYRIGYCQQCPDKVAWPTTELGPPPPLYFNAGMFAHEPSMATAKALLDTLRVTPPTPFAEQDFLNMFFRDQYRPIPNVYNLVLAMLWRHPENVQLEKVKVVHYCAAGSKPWRFTGKEANMDREDIKTLVNKWWDIYNDEALDFKGLPLSPADADDEVEAVAKKPLRAALAEAGTVKYVTAPSAA

SEQ ID NO: 23581 - protein, 246 aa, Zea mays subsp. mays
  peptide (1)..(246): Ceres Seq. ID no. 12387177
  misc_feature (1)..(246): NCBI GI NO: 34898096 NR Description: WSI76 protein induced by water stress
  misc_feature (1)..(246): NCBI GI NO: 4588376 NR Description: galactinol synthase [Brassica napus]
  misc_feature (1)..(246): NCBI GI NO: 15226522 NR Description: putative galactinol synthase; protein id:At2g47180
  misc_feature (1)..(246): NCBI GI NO: 15223567 NR Description: water stress-induced protein, putative
  misc_feature (1)..(246): NCBI GI NO: 20340247 NR Description: galactinol synthase-like protein
  misc_feature (1)..(246): NCBI GI NO: 18874402 NR Description: galactinol synthase [Cucumis melo]
  misc_feature (1)..(246): NCBI GI NO: 15219093 NR Description: galactinol synthase, putative
  misc_feature (1)..(246): NCBI GI NO: 29569824 NR Description: galactinol synthase [Cucumis sativus]
  misc_feature (1)..(246): NCBI GI NO: 5541885 NR Description: putative galactinol synthase [Pisum sativum]
  misc_feature (1)..(246): NCBI GI NO: 15217486 NR Description: putative galactinol synthase; protein id:At1g09350
MAYYVINYSKLRIWEFVEYERMVYLDADIQVFENIDELFELEKGYFYAVMDCFCEKTWSHTPQYRIGYCQQCPDKVAWPTTELGPPPPLYFNAGMFAHEPSMATAKALLDTLRVTPPTPFAEQDFLNMFFRDQYRPIPNVYNLVLAMLWRHPENVQLEKVKVVHYCAAGSKPWRFTGKEANMDREDIKTLVNKWWDIYNDEALDFKGLPLSPADADDEVEAVAKKPLRAALAEAGTVKYVTAPSAA

SEQ ID NO: 23582 - DNA, 1651 bp, Zea mays subsp. mays
  misc_feature (1)..(1651): Ceres Seq. ID no. 12410958
aataccagcagtggccagtgggggggagactgggatctgcgaacgggagggcgttataattgtcggcgcgcggtagccagtaggcgccgttccgccgccgccgccccctcgcccgacgttactcgccgccagcacaggcgcggaccccgcgcgccactatggcaaggtcatggctgataacttgtaggggaattgctaagaaaataagatatgcaaatcctagcgctaatcgccaaataagccaactgattgcagaagcacggagggaatgcccaaactgcagttatgttattgataacagcgatgttgccatgcagtggcctggggctgcctgctggagtcaagtttgatccttctgaattggagttgcttcaacatttagaacaaaaggttggcctgggagattcaagaccacatgtgctcattgatgaatttattccaactatagacaatgatgagggaatctgctattcgcatcctgaaaatcttcctggtatgaaaacagatggtagcaatgctcatttcttccatagagtttcaaaagcgtatggttatggccagcgcaagcgtcgaaggattatcaactgcagcgatcacactgttcctgatgatcgtgtgagatggcacaagactggaagatccaaagccatatatgacaatggcgttataaaaggttggaagaagataatggtgctgcacaaaactttgcgaagtggtggtaagcgggagagagctaaatgggtaatgcatcagtatcaccttggaaaagaggaagatgaaaaggacggggagcttgtagtatctaaaatcttcttccagttggcaaataagagtatggaaatttctgaaacagaaactgcttgtgaagaacctgaagcacctgcttcagtgattggtccgaaaactccaaagacaatcacaccgcagccacgtcatcctaaaagtagtccatgtgaaactcagcagaatatttccattgtgcaggatcagctactactggacagcgaaggcgagcctaccatgcctattgttagtctggaggatgatgctatgaaccctgcatggtgtgctgtagctgaagaacggcaggttgttggagaggcatctcgggctcagtcgaactcagttgaaactcttctttgtcgtgaagacccaaattccttaaactacgaagcattgcttccctgggactatccgattctgtcccaatgcaggaatgagatgcttgatgggaacctgaatggatatgggttgcctgatcaccataatgtggatcttggaacgcctccagatcttcagcttgctgactttcagtttggttctcaggaaagccttggcagctggctggatcgcatctaggaagataactagtgtgaactgtttgctcgaacagcctgatcgatgggcttctttttgcacaggatatggtaaccggtggtggctattttgggacttacacaacacaaagattgcatgcttgcattagtattgtatttgtgttgcgctgtcaaacatcatctggaaaccaagaacctttcgcccttttctattttctttagaagaaatgaacaacctttaacagctggctactagacttgaagtttagttgtatgtttggcacggttggtgcaaccctgcattgccccgttgt

SEQ ID NO: 23583 - protein, 357 aa, Zea mays subsp. mays
  peptide (1)..(357): Ceres Seq. ID no. 12410959
  misc_feature (15)..(160): Pfam Name: NAM Pfam Description: No apical meristem
  misc_feature (14)..(217): NCBI GI NO: 12320749 NR Description: unknown protein [Arabidopsis thaliana]
  misc_feature (269)..(353): NCBI GI NO: 12320749 NR Description: unknown protein [Arabidopsis thaliana]
  misc_feature (14)..(217): NCBI GI NO: 30689293 NR Description: No apical meristem (NAM) protein family
  misc_feature (269)..(353): NCBI GI NO: 30689293 NR Description: No apical meristem (NAM) protein family
  misc_feature (14)..(215): NCBI GI NO: 15232150 NR Description: hypothetical protein; protein id: At3g01600.1
  misc_feature (14)..(217): NCBI GI NO: 25518116 NR Description: hypothetical protein F2J7.1 - Arabidopsis thaliana
  misc_feature (14)..(243): NCBI GI NO: 15241416 NR Description: putative protein; protein id: At5g14490.1
  misc_feature (9)..(178): NCBI GI NO: 15233497 NR Description: putative protein; protein id: At4g29230.1
  misc_feature (14)..(196): NCBI GI NO: 15235314 NR Description: similar to NAM protein, putative
  misc_feature (3)..(178): NCBI GI NO: 15241889 NR Description: putative protein; protein id: At5g56620.1
MLLITAMLPCSGLGLPAGVKFDPSELELLQHLEQKVGLGDSRPHVLIDEFIPTIDNDEGICYSHPENLPGMKTDGSNAHFFHRVSKAYGYGQRKRRRIINCSDHTVPDDRVRWHKTGRSKAIYDNGVIKGWKKIMVLHKTLRSGGKRERAKWVMHQYHLGKEEDEKDGELVVSKIFFQLANKSMEISETETACEEPEAPASVIGPKTPKTITPQPRHPKSSPCETQQNISIVQDQLLLDSEGEPTMPIVSLEDDAMNPAWCAVAEERQVVGEASRAQSNSVETLLCREDPNSLNYEALLPWDYPILSQCRNEMLDGNLNGYGLPDHHNVDLGTPPDLQLADFQFGSQESLGSWLDRI

SEQ ID NO: 23584 - protein, 351 aa, Zea mays subsp. mays
  peptide (1)..(351): Ceres Seq. ID no. 12410960
  misc_feature (9)..(154): Pfam Name: NAM Pfam Description: No apical meristem
  misc_feature (8)..(211): NCBI GI NO: 12320749 NR Description: unknown protein [Arabidopsis thaliana]
  misc_feature (263)..(347): NCBI GI NO: 12320749 NR Description: unknown protein [Arabidopsis thaliana]
  misc_feature (8)..(211): NCBI GI NO: 30689293 NR Description: No apical meristem (NAM) protein family
  misc_feature (263)..(347): NCBI GI NO: 30689293 NR Description: No apical meristem (NAM) protein family
  misc_feature (8)..(209): NCBI GI NO: 15232150 NR Description: hypothetical protein; protein id: At3g01600.1
  misc_feature (8)..(211): NCBI GI NO: 25518116 NR Description: hypothetical protein F2J7.1 - Arabidopsis thaliana
  misc_feature (8)..(237): NCBI GI NO: 15241416 NR Description: putative protein; protein id: At5g14490.1
  misc_feature (3)..(172): NCBI GI NO: 15233497 NR Description: putative protein; protein id: At4g29230.1
  misc_feature (8)..(190): NCBI GI NO: 15235314 NR Description: similar to NAM protein, putative
  misc_feature (1)..(172): NCBI GI NO: 15241889 NR Description: putative protein; protein id: At5g56620.1
MLPCSGLGLPAGVKFDPSELELLQHLEQKVGLGDSRPHVLIDEFIPTIDNDEGICYSHPENLPGMKTDGSNAHFFHRVSKAYGYGQRKRRRIINCSDHTVPDDRVRWHKTGRSKAIYDNGVIKGWKKIMVLHKTLRSGGKRERAKWVMHQYHLGKEEDEKDGELVVSKIFFQLANKSMEISETETACEEPEAPASVIGPKTPKTITPQPRHPKSSPCETQQNISIVQDQLLLDSEGEPTMPIVSLEDDAMNPAWCAVAEERQVVGEASRAQSNSVETLLCREDPNSLNYEALLPWDYPILSQCRNEMLDGNLNGYGLPDHHNVDLGTPPDLQLADFQFGSQESLGSWLDRI

SEQ ID NO: 23585 - protein, 287 aa, Zea mays subsp. mays
  peptide (1)..(287): Ceres Seq. ID no. 12410961
  misc_feature (1)..(90): Pfam Name: NAM Pfam Description: No apical meristem
  misc_feature (1)..(147): NCBI GI NO: 12320749 NR Description: unknown protein [Arabidopsis thaliana]
  misc_feature (199)..(283): NCBI GI NO: 12320749 NR Description: unknown protein [Arabidopsis thaliana]
  misc_feature (1)..(147): NCBI GI NO: 30689293 NR Description: No apical meristem (NAM) protein family
  misc_feature (199)..(283): NCBI GI NO: 30689293 NR Description: No apical meristem (NAM) protein family
  misc_feature (1)..(145): NCBI GI NO: 15232150 NR Description: hypothetical protein; protein id: At3g01600.1
  misc_feature (1)..(147): NCBI GI NO: 25518116 NR Description: hypothetical protein F2J7.1 - Arabidopsis thaliana
  misc_feature (1)..(173): NCBI GI NO: 15241416 NR Description: putative protein; protein id: At5g14490.1
  misc_feature (1)..(108): NCBI GI NO: 15233497 NR Description: putative protein; protein id: At4g29230.1
  misc_feature (1)..(126): NCBI GI NO: 15235314 NR Description: similar to NAM protein, putative
  misc_feature (1)..(108): NCBI GI NO: 15241889 NR Description: putative protein; protein id: At5g56620.1
MKTDGSNAHFFHRVSKAYGYGQRKRRRIINCSDHTVPDDRVRWHKTGRSKAIYDNGVIKGWKKIMVLHKTLRSGGKRERAKWVMHQYHLGKEEDEKDGELVVSKIFFQLANKSMEISETETACEEPEAPASVIGPKTPKTITPQPRHPKSSPCETQQNISIVQDQLLLDSEGEPTMPIVSLEDDAMNPAWCAVAEERQVVGEASRAQSNSVETLLCREDPNSLNYEALLPWDYPILSQCRNEMLDGNLNGYGLPDHHNVDLGTPPDLQLADFQFGSQESLGSWLDRI

SEQ ID NO: 23586 - DNA, 1558 bp, Zea mays subsp. mays
  misc_feature (1)..(1558): Ceres Seq. ID no. 12351948
aagcttccgcttctctcatggccgacgccaccgccgccctctcagctcggagcaaggtgcaggctttcctggaggctgcgcgcgccggcgacctccaatccctcaagaacctcgtcgcggcgctcgacgaggacggcacgggcgccgcctccgtcgccgccgccgtgcgtgacgccaacaagcgcaccgccctccacttcgcggcgatcggatgtcgcaccgacgtctgtgaattcctcatcggcgagctcggcctccctgtcgacccaaaggacgatgatggcgaaactccgctcatccatgcgacacgccagggccatctggacactgtcaagtatcttctcgaccatggagctgatccttcgctggccaccagcctaggagccacagcgctacaccatgctgcaggcatagggaacacggaactcatgaagcttctcctctccaagggagttgacgtcgagtcagaaagtgatgctggcactccccttgtgtgggctgctggtcatggcaaccaggatgctgtcaaacttctgcttcaacacaatgctaagccaaatactgaaaacgatgatggtgtcacagcattgttatctgctgttgctgcaggttccctcccatgcttggaggtcctaattgaggctggtgcaaacccaaatgtcaaggctggtggagcaaccccattgcatattgctgcagatagtggaaatatagaagtcatcaaatgtttgcttaaagctggagctgacccaaatacctgtgatgatgatgaattgaagccagttcaggttgctgcttggagaaataaccatgaagctgttgaacttcttttaccgttaacatccccaattccaggtgtttcaaactggaacgtagatgggattatagaacacatgctccctaaagagtatgaggaaaagtctcaactgaaggaagcgacatctctgaaatcaggcctaacacaaactattgaggtgtcatctgaagcaaaaaagaggtccttggaagccaaatcaagaggtgatgatgccttcagaagaaaggactaccttgtagcggtggatgcttatacgcaggctacagagttggacccaactgatgcaacagtgctctcaaacagaagcctgtgctggctgcgggcagggcaagctgagcgtgctctggaggacgccaaagcatgccgtgcattgagaccagattgggcgaaagcctgctacagggaaggtgcggcgcatcgtctgttacagaggtttgaggaagccgcaaacgccttctatgagggggtgcaacttgagccagagaacacggagctcgtcaacgcattcagggaggccatcgaagccgggaggaagttccatggcgtcgacacgccaagctcaacacaatgagactttgctgtttggttggataggtagatgatgaggcggatggacatgaacgttgtcttagttggaatttggtgagatgatgaatgagatgatcatgaaatttgaaagagcgaatttgccagatttattttgtgttttgtgattgttttcttaaacttgttttcttgcgc

SEQ ID NO: 23587 - protein, 461 aa, Zea mays subsp. mays
  peptide (1)..(461): Ceres Seq. ID no. 12351949
  misc_feature (401)..(434): Pfam Name: Pfam Description:  TPR Domain
  misc_feature (8)..(453): NCBI GI NO: 15229331 NR Description: ankyrin-like protein; protein id: At3g04710
  misc_feature (8)..(459): NCBI GI NO: 24745936 NR Description: ankyrin-like protein [Solanum tuberosum]
  misc_feature (8)..(459): NCBI GI NO: 34329680 NR Description: unknown [Nicotiana benthamiana]
  misc_feature (23)..(445): NCBI GI NO: 27542768 NR Description: ankyrin-like protein-like protein
  misc_feature (25)..(447): NCBI GI NO: 27542766 NR Description: ankyrin-like protein-like protein
  misc_feature (57)..(452): NCBI GI NO: 34896852 NR Description: putative ankyrin [Oryza sativa]
  misc_feature (22)..(281): NCBI GI NO: 34896858 NR Description: putative ankyrin [Oryza sativa]
  misc_feature (300)..(455): NCBI GI NO: 34896858 NR Description: putative ankyrin [Oryza sativa]
  misc_feature (23)..(297): NCBI GI NO: 13435243 NR Description: putative gag-pol polyprotein [Oryza sativa]
  misc_feature (324)..(437): NCBI GI NO: 13435243 NR Description: putative gag-pol polyprotein [Oryza sativa]
ASASLMADATAALSARSKVQAFLEAARAGDLQSLKNLVAALDEDGTGAASVAAAVRDANKRTALHFAAIGCRTDVCEFLIGELGLPVDPKDDDGETPLIHATRQGHLDTVKYLLDHGADPSLATSLGATALHHAAGIGNTELMKLLLSKGVDVESESDAGTPLVWAAGHGNQDAVKLLLQHNAKPNTENDDGVTALLSAVAAGSLPCLEVLIEAGANPNVKAGGATPLHIAADSGNIEVIKCLLKAGADPNTCDDDELKPVQVAAWRNNHEAVELLLPLTSPIPGVSNWNVDGIIEHMLPKEYEEKSQLKEATSLKSGLTQTIEVSSEAKKRSLEAKSRGDDAFRRKDYLVAVDAYTQATELDPTDATVLSNRSLCWLRAGQAERALEDAKACRALRPDWAKACYREGAAHRLLQRFEEAANAFYEGVQLEPENTELVNAFREAIEAGRKFHGVDTPSSTQ

SEQ ID NO: 23588 - protein, 456 aa, Zea mays subsp. mays
  peptide (1)..(456): Ceres Seq. ID no. 12351950
  misc_feature (396)..(429): Pfam Name: Pfam Description:  TPR Domain
  misc_feature (3)..(448): NCBI GI NO: 15229331 NR Description: ankyrin-like protein; protein id: At3g04710
  misc_feature (3)..(454): NCBI GI NO: 24745936 NR Description: ankyrin-like protein [Solanum tuberosum]
  misc_feature (3)..(454): NCBI GI NO: 34329680 NR Description: unknown [Nicotiana benthamiana]
  misc_feature (18)..(440): NCBI GI NO: 27542768 NR Description: ankyrin-like protein-like protein
  misc_feature (20)..(442): NCBI GI NO: 27542766 NR Description: ankyrin-like protein-like protein
  misc_feature (52)..(447): NCBI GI NO: 34896852 NR Description: putative ankyrin [Oryza sativa]
  misc_feature (17)..(276): NCBI GI NO: 34896858 NR Description: putative ankyrin [Oryza sativa]
  misc_feature (295)..(450): NCBI GI NO: 34896858 NR Description: putative ankyrin [Oryza sativa]
  misc_feature (18)..(292): NCBI GI NO: 13435243 NR Description: putative gag-pol polyprotein [Oryza sativa]
  misc_feature (319)..(432): NCBI GI NO: 13435243 NR Description: putative gag-pol polyprotein [Oryza sativa]
MADATAALSARSKVQAFLEAARAGDLQSLKNLVAALDEDGTGAASVAAAVRDANKRTALHFAAIGCRTDVCEFLIGELGLPVDPKDDDGETPLIHATRQGHLDTVKYLLDHGADPSLATSLGATALHHAAGIGNTELMKLLLSKGVDVESESDAGTPLVWAAGHGNQDAVKLLLQHNAKPNTENDDGVTALLSAVAAGSLPCLEVLIEAGANPNVKAGGATPLHIAADSGNIEVIKCLLKAGADPNTCDDDELKPVQVAAWRNNHEAVELLLPLTSPIPGVSNWNVDGIIEHMLPKEYEEKSQLKEATSLKSGLTQTIEVSSEAKKRSLEAKSRGDDAFRRKDYLVAVDAYTQATELDPTDATVLSNRSLCWLRAGQAERALEDAKACRALRPDWAKACYREGAAHRLLQRFEEAANAFYEGVQLEPENTELVNAFREAIEAGRKFHGVDTPSSTQ

SEQ ID NO: 23589 - protein, 319 aa, Zea mays subsp. mays
  peptide (1)..(319): Ceres Seq. ID no. 12351951
  misc_feature (259)..(292): Pfam Name: Pfam Description:  TPR Domain
  misc_feature (1)..(311): NCBI GI NO: 15229331 NR Description: ankyrin-like protein; protein id: At3g04710
  misc_feature (1)..(317): NCBI GI NO: 24745936 NR Description: ankyrin-like protein [Solanum tuberosum]
  misc_feature (1)..(317): NCBI GI NO: 34329680 NR Description: unknown [Nicotiana benthamiana]
  misc_feature (1)..(303): NCBI GI NO: 27542768 NR Description: ankyrin-like protein-like protein
  misc_feature (1)..(305): NCBI GI NO: 27542766 NR Description: ankyrin-like protein-like protein
  misc_feature (1)..(310): NCBI GI NO: 34896852 NR Description: putative ankyrin [Oryza sativa]
  misc_feature (1)..(139): NCBI GI NO: 34896858 NR Description: putative ankyrin [Oryza sativa]
  misc_feature (158)..(313): NCBI GI NO: 34896858 NR Description: putative ankyrin [Oryza sativa]
  misc_feature (1)..(155): NCBI GI NO: 13435243 NR Description: putative gag-pol polyprotein [Oryza sativa]
  misc_feature (182)..(295): NCBI GI NO: 13435243 NR Description: putative gag-pol polyprotein [Oryza sativa]
MKLLLSKGVDVESESDAGTPLVWAAGHGNQDAVKLLLQHNAKPNTENDDGVTALLSAVAAGSLPCLEVLIEAGANPNVKAGGATPLHIAADSGNIEVIKCLLKAGADPNTCDDDELKPVQVAAWRNNHEAVELLLPLTSPIPGVSNWNVDGIIEHMLPKEYEEKSQLKEATSLKSGLTQTIEVSSEAKKRSLEAKSRGDDAFRRKDYLVAVDAYTQATELDPTDATVLSNRSLCWLRAGQAERALEDAKACRALRPDWAKACYREGAAHRLLQRFEEAANAFYEGVQLEPENTELVNAFREAIEAGRKFHGVDTPSSTQ

SEQ ID NO: 23590 - DNA, 1738 bp, Zea mays subsp. mays
  misc_feature (1)..(1738): Ceres Seq. ID no. 12372961
atccatcaaagtcacagagacgaccagctgaagcgaacacagagctgctcgccgtgtaacgcagcaggcagcagcacccagaggcggcaggacacacacacagcacacgcagatcttcgatcaccaccatgggttctctcggcagcgccgcgcagcagcagccgcagcaaccgcacgccgtgtgcctgccgtacccagcgcagggccacatcaccccgatgctcaacgtggcgaagctgctgcacgcccggggcttccacgtcaccttcgtcaacaccgagtacaaccaggcgcgcctcgtccggacccgcggggcggcggccgtggccggcctcccgggcttccgcttcgccaccatccccgacggcctgccgccgtcggaggacgacgacgtcacgcaggacatcccctcgctgtgcaagtccaccacggagacctgcctcggtcccttccgccgcctgctcgcggacctcagcgacccgcccgtcacctgcgtcgtctccgacgtcgtcatgggcttctccatcgacgccaccaaggagctcggccttccctacgtccagctctggactgccagcaccatcagcttcctcggctaccgccactaccacctcctcaagagccgtggcctcgctccgctcaaaagtgtggagcagctgacgaacggattccttgacacggcggtggaggacgtgccggggctgcggaacatgaggttccgggacttcccgagcttcatccgctccacggacccggacgagtacatggtgggctacgtcctccaggagacggggcgcacggcgggcgcgtcggccgtgatcctcaacaccttcgacgagctggagggcgaggcggtggcggccatgcgctcgctcggcctggcgcgcaaggtgtacacgctgggcccgctcccgctgctggcgcgcgaggacccgcccaccccgcgctccgccatcagcctcagcctgtggaaggaggaggaggagtgcctgcggtggctcgacggcagggaccccggctccgtcgtctacgtcaacttcggcagcatcaccgtgatgaccagcgaccagctggtggagttcgcgtgggggctggccaacagcggcaggccgttcctgtggatcatccggcgcgacctcgtcaggggcgacactgccgtgctgccgccggagttcctgtccgagacggccggccgcgggctcatggccacctggtgcccgcagcaggcggtgctggaccacccggccgtggccgcgttcctcacgcacagcggatggaactccacgctggaggccatgtgcggcggcgtcccggtcatcagctggcccttcttcgccgaccagcagaccaactgccgctaccagtgcaacgagtggggcgtcgggatggagatcgacagcaacgtccggcgcgacgccgtggcgagcctcatcgctgagctcatggagggggagcaggggaaggagatgaggagaagggcactggaatggagggacaaggccatcgaggtggccaagcccggaggcacgtcttaccggaatttcgatgaactggttcgcaatgtgctcctgccaaagaactaggcaacttagctctatatttgcagtttgcacggtgcttctgccagtgccgtgtgattttgttcctttgttttggagggagatggacaggtcagtgtcgttgtgtaaacaataaaaatacatgcatacgagcgtccaattgaggatgggcaagtctg

SEQ ID NO: 23591 - protein, 484 aa, Zea mays subsp. mays
  peptide (1)..(484): Ceres Seq. ID no. 12372962
  misc_feature (16)..(481): Pfam Name: Pfam Description:  UDP-glucoronosyl and UDP-glucosyl transferase
  misc_feature (4)..(481): NCBI GI NO: 38569188 NR Description: OSJNBa0086B14.13
  misc_feature (13)..(481): NCBI GI NO: 38569140 NR Description: OSJNBb0033P05.8
  misc_feature (4)..(481): NCBI GI NO: 38344776 NR Description: OSJNBb0026L04.7
  misc_feature (4)..(481): NCBI GI NO: 38569139 NR Description: OSJNBb0033P05.7
  misc_feature (13)..(481): NCBI GI NO: 15219870 NR Description: UDP-glucose glucosyltransferase
  misc_feature (4)..(481): NCBI GI NO: 25286821 NR Description: T16E15.2 protein - Arabidopsis thaliana
  misc_feature (13)..(481): NCBI GI NO: 17065006 NR Description: UDP-glucose glucosyltransferase
  misc_feature (13)..(484): NCBI GI NO: 19911203 NR Description: glucosyltransferase-10 [Vigna angularis]
  misc_feature (4)..(481): NCBI GI NO: 15219876 NR Description: UDP-glucose glucosyltransferase, putative
  misc_feature (13)..(481): NCBI GI NO: 15219867 NR Description: UDP-glucose glucosyltransferase, putative
MGSLGSAAQQQPQQPHAVCLPYPAQGHITPMLNVAKLLHARGFHVTFVNTEYNQARLVRTRGAAAVAGLPGFRFATIPDGLPPSEDDDVTQDIPSLCKSTTETCLGPFRRLLADLSDPPVTCVVSDVVMGFSIDATKELGLPYVQLWTASTISFLGYRHYHLLKSRGLAPLKSVEQLTNGFLDTAVEDVPGLRNMRFRDFPSFIRSTDPDEYMVGYVLQETGRTAGASAVILNTFDELEGEAVAAMRSLGLARKVYTLGPLPLLAREDPPTPRSAISLSLWKEEEECLRWLDGRDPGSVVYVNFGSITVMTSDQLVEFAWGLANSGRPFLWIIRRDLVRGDTAVLPPEFLSETAGRGLMATWCPQQAVLDHPAVAAFLTHSGWNSTLEAMCGGVPVISWPFFADQQTNCRYQCNEWGVGMEIDSNVRRDAVASLIAELMEGEQGKEMRRRALEWRDKAIEVAKPGGTSYRNFDELVRNVLLPKN

SEQ ID NO: 23592 - protein, 454 aa, Zea mays subsp. mays
  peptide (1)..(454): Ceres Seq. ID no. 12372963
  misc_feature (1)..(451): Pfam Name: Pfam Description:  UDP-glucoronosyl and UDP-glucosyl transferase
  misc_feature (1)..(451): NCBI GI NO: 38569188 NR Description: OSJNBa0086B14.13
  misc_feature (1)..(451): NCBI GI NO: 38569140 NR Description: OSJNBb0033P05.8
  misc_feature (1)..(451): NCBI GI NO: 38344776 NR Description: OSJNBb0026L04.7
  misc_feature (1)..(451): NCBI GI NO: 38569139 NR Description: OSJNBb0033P05.7
  misc_feature (1)..(451): NCBI GI NO: 15219870 NR Description: UDP-glucose glucosyltransferase
  misc_feature (1)..(451): NCBI GI NO: 25286821 NR Description: T16E15.2 protein - Arabidopsis thaliana
  misc_feature (1)..(451): NCBI GI NO: 17065006 NR Description: UDP-glucose glucosyltransferase
  misc_feature (1)..(454): NCBI GI NO: 19911203 NR Description: glucosyltransferase-10 [Vigna angularis]
  misc_feature (1)..(451): NCBI GI NO: 15219876 NR Description: UDP-glucose glucosyltransferase, putative
  misc_feature (1)..(451): NCBI GI NO: 15219867 NR Description: UDP-glucose glucosyltransferase, putative
MLNVAKLLHARGFHVTFVNTEYNQARLVRTRGAAAVAGLPGFRFATIPDGLPPSEDDDVTQDIPSLCKSTTETCLGPFRRLLADLSDPPVTCVVSDVVMGFSIDATKELGLPYVQLWTASTISFLGYRHYHLLKSRGLAPLKSVEQLTNGFLDTAVEDVPGLRNMRFRDFPSFIRSTDPDEYMVGYVLQETGRTAGASAVILNTFDELEGEAVAAMRSLGLARKVYTLGPLPLLAREDPPTPRSAISLSLWKEEEECLRWLDGRDPGSVVYVNFGSITVMTSDQLVEFAWGLANSGRPFLWIIRRDLVRGDTAVLPPEFLSETAGRGLMATWCPQQAVLDHPAVAAFLTHSGWNSTLEAMCGGVPVISWPFFADQQTNCRYQCNEWGVGMEIDSNVRRDAVASLIAELMEGEQGKEMRRRALEWRDKAIEVAKPGGTSYRNFDELVRNVLLPKN

SEQ ID NO: 23593 - protein, 356 aa, Zea mays subsp. mays
  peptide (1)..(356): Ceres Seq. ID no. 12372964
  misc_feature (1)..(353): Pfam Name: Pfam Description:  UDP-glucoronosyl and UDP-glucosyl transferase
  misc_feature (1)..(353): NCBI GI NO: 38569188 NR Description: OSJNBa0086B14.13
  misc_feature (1)..(353): NCBI GI NO: 38569140 NR Description: OSJNBb0033P05.8
  misc_feature (1)..(353): NCBI GI NO: 38344776 NR Description: OSJNBb0026L04.7
  misc_feature (1)..(353): NCBI GI NO: 38569139 NR Description: OSJNBb0033P05.7
  misc_feature (1)..(353): NCBI GI NO: 15219870 NR Description: UDP-glucose glucosyltransferase
  misc_feature (1)..(353): NCBI GI NO: 25286821 NR Description: T16E15.2 protein - Arabidopsis thaliana
  misc_feature (1)..(353): NCBI GI NO: 17065006 NR Description: UDP-glucose glucosyltransferase
  misc_feature (1)..(356): NCBI GI NO: 19911203 NR Description: glucosyltransferase-10 [Vigna angularis]
  misc_feature (1)..(353): NCBI GI NO: 15219876 NR Description: UDP-glucose glucosyltransferase, putative
  misc_feature (1)..(353): NCBI GI NO: 15219867 NR Description: UDP-glucose glucosyltransferase, putative
MGFSIDATKELGLPYVQLWTASTISFLGYRHYHLLKSRGLAPLKSVEQLTNGFLDTAVEDVPGLRNMRFRDFPSFIRSTDPDEYMVGYVLQETGRTAGASAVILNTFDELEGEAVAAMRSLGLARKVYTLGPLPLLAREDPPTPRSAISLSLWKEEEECLRWLDGRDPGSVVYVNFGSITVMTSDQLVEFAWGLANSGRPFLWIIRRDLVRGDTAVLPPEFLSETAGRGLMATWCPQQAVLDHPAVAAFLTHSGWNSTLEAMCGGVPVISWPFFADQQTNCRYQCNEWGVGMEIDSNVRRDAVASLIAELMEGEQGKEMRRRALEWRDKAIEVAKPGGTSYRNFDELVRNVLLPKN

SEQ ID NO: 23594 - DNA, 1175 bp, Zea mays subsp. mays
  misc_feature (1)..(1175): Ceres Seq. ID no. 12566396
gacgtcgtcccgaccttcttttcaatcccgtctcggattcgttccgtctcagctaccgcgaccacgacgccgacgcgagagggcagggaacacagccactcgccgacgagaccccggcgcgcgcgagagaaagagaagagaggaggatcttttgttcgtgaaaaatattggaggcggagggaaggtgaaggagggggatcggagatgaacgtgttccggctggcgggggacatgacccacctcctcagcgtggtagtgctgctcctcaagatccataccatcaagtcctgcgcaggcatatctctgaagacacaggagctgtatgcacttgtttttgcagcacggtacctggacctgtttgttcattttgtgtctctgtataacactgtcatgaagctggtcttcttggcaagttctttctcgatagtttggtacatgaagcggcataagattgtgcggaggacatatgacaaggatcatgacacctttcgccattacgttttagtgttgccttgtcttcttctggctctcctcattaatgagaagtttacttttagagaggtgatgtgggcattctccatttatttggaagctgtcgcgatatttccacaacttgtgttgctacagcggacaaggaatattgacaacctgactggccaatatgtcttcttcttgggtgcctaccgtgtgctttatatccttaactggatttaccgatacttcactgagccccattttgtccactggataagttggatggcaggaatagtgcaaactctgttgtatgctgacttcttcttttattacataatgagctggaagaacaatgtgaagctagagctgccagcttaaggttgctgctcctgtccccaagatatagtagggtaatatatcagataggcaggccccatacacagcatgatcattgctatcgccaactgggttatgaaaaaagcattttagttgcgtggcttgtatcgccttgtatctctctgctattgttggaagaacaggaaagtcaggctcaccatgtaactttttacaataagctgcgtaagatcagcactagaaggttgtgaattgtgatcgtccttagggaattttgtgctgatgtaaccctttcggcaagtgattctcatacaatataatctcagactataattggtaattgtttc

SEQ ID NO: 23595 - protein, 283 aa, Zea mays subsp. mays
  peptide (1)..(283): Ceres Seq. ID no. 12566397
  misc_feature (69)..(273): Pfam Name: Pfam Description:  ER lumen protein retaining receptor
  misc_feature (69)..(283): NCBI GI NO: 6685428 NR Description: ER lumen protein retaining receptor
  misc_feature (69)..(283): NCBI GI NO: 21592401 NR Description: ER lumen retaining receptor
  misc_feature (69)..(283): NCBI GI NO: 18404390 NR Description: ER lumen retaining receptor
  misc_feature (69)..(283): NCBI GI NO: 9293986 NR Description: ER lumen protein-retaining receptor-like protein
  misc_feature (69)..(283): NCBI GI NO: 18397049 NR Description: ER lumen protein retaining receptor
  misc_feature (69)..(283): NCBI GI NO: 14285310 NR Description: ERD2 protein [Scherffelia dubia]
  misc_feature (69)..(282): NCBI GI NO: 22656361 NR Description: endoplasmic reticulum retention receptor
  misc_feature (69)..(283): NCBI GI NO: 17137442 NR Description: KDEL receptor CG5183-PA [Drosophila melanogaster]
  misc_feature (69)..(283): NCBI GI NO: 17551392 NR Description: Yeast Endoplasmic Reticulum retention Defectiverelated ERD-2
  misc_feature (69)..(270): NCBI GI NO: 34870419 NR Description: similar to KDEL
DVVPTFFSIPSRIRSVSATATTTPTREGREHSHSPTRPRRAREKEKRGGSFVREKYWRRREGEGGGSEMNVFRLAGDMTHLLSVVVLLLKIHTIKSCAGISLKTQELYALVFAARYLDLFVHFVSLYNTVMKLVFLASSFSIVWYMKRHKIVRRTYDKDHDTFRHYVLVLPCLLLALLINEKFTFREVMWAFSIYLEAVAIFPQLVLLQRTRNIDNLTGQYVFFLGAYRVLYILNWIYRYFTEPHFVHWISWMAGIVQTLLYADFFFYYIMSWKNNVKLELPA

SEQ ID NO: 23596 - protein, 215 aa, Zea mays subsp. mays
  peptide (1)..(215): Ceres Seq. ID no. 12566398
  misc_feature (1)..(205): Pfam Name: Pfam Description:  ER lumen protein retaining receptor
  misc_feature (1)..(215): NCBI GI NO: 6685428 NR Description: ER lumen protein retaining receptor
  misc_feature (1)..(215): NCBI GI NO: 21592401 NR Description: ER lumen retaining receptor
  misc_feature (1)..(215): NCBI GI NO: 18404390 NR Description: ER lumen retaining receptor
  misc_feature (1)..(215): NCBI GI NO: 9293986 NR Description: ER lumen protein-retaining receptor-like protein
  misc_feature (1)..(215): NCBI GI NO: 18397049 NR Description: ER lumen protein retaining receptor
  misc_feature (1)..(215): NCBI GI NO: 14285310 NR Description: ERD2 protein [Scherffelia dubia]
  misc_feature (1)..(214): NCBI GI NO: 22656361 NR Description: endoplasmic reticulum retention receptor
  misc_feature (1)..(215): NCBI GI NO: 17137442 NR Description: KDEL receptor CG5183-PA [Drosophila melanogaster]
  misc_feature (1)..(215): NCBI GI NO: 17551392 NR Description: Yeast Endoplasmic Reticulum retention Defectiverelated ERD-2
  misc_feature (1)..(202): NCBI GI NO: 34870419 NR Description: similar to KDEL
MNVFRLAGDMTHLLSVVVLLLKIHTIKSCAGISLKTQELYALVFAARYLDLFVHFVSLYNTVMKLVFLASSFSIVWYMKRHKIVRRTYDKDHDTFRHYVLVLPCLLLALLINEKFTFREVMWAFSIYLEAVAIFPQLVLLQRTRNIDNLTGQYVFFLGAYRVLYILNWIYRYFTEPHFVHWISWMAGIVQTLLYADFFFYYIMSWKNNVKLELPA

SEQ ID NO: 23597 - protein, 206 aa, Zea mays subsp. mays
  peptide (1)..(206): Ceres Seq. ID no. 12566399
  misc_feature (1)..(196): Pfam Name: Pfam Description:  ER lumen protein retaining receptor
  misc_feature (1)..(206): NCBI GI NO: 6685428 NR Description: ER lumen protein retaining receptor
  misc_feature (1)..(206): NCBI GI NO: 21592401 NR Description: ER lumen retaining receptor
  misc_feature (1)..(206): NCBI GI NO: 18404390 NR Description: ER lumen retaining receptor
  misc_feature (1)..(206): NCBI GI NO: 9293986 NR Description: ER lumen protein-retaining receptor-like protein
  misc_feature (1)..(206): NCBI GI NO: 18397049 NR Description: ER lumen protein retaining receptor
  misc_feature (1)..(206): NCBI GI NO: 14285310 NR Description: ERD2 protein [Scherffelia dubia]
  misc_feature (1)..(205): NCBI GI NO: 22656361 NR Description: endoplasmic reticulum retention receptor
  misc_feature (1)..(206): NCBI GI NO: 17137442 NR Description: KDEL receptor CG5183-PA [Drosophila melanogaster]
  misc_feature (1)..(206): NCBI GI NO: 17551392 NR Description: Yeast Endoplasmic Reticulum retention Defectiverelated ERD-2
  misc_feature (1)..(193): NCBI GI NO: 34870419 NR Description: similar to KDEL
MTHLLSVVVLLLKIHTIKSCAGISLKTQELYALVFAARYLDLFVHFVSLYNTVMKLVFLASSFSIVWYMKRHKIVRRTYDKDHDTFRHYVLVLPCLLLALLINEKFTFREVMWAFSIYLEAVAIFPQLVLLQRTRNIDNLTGQYVFFLGAYRVLYILNWIYRYFTEPHFVHWISWMAGIVQTLLYADFFFYYIMSWKNNVKLELPA

SEQ ID NO: 23598 - DNA, 1375 bp, Zea mays subsp. mays
  misc_feature (1)..(1375): Ceres Seq. ID no. 12410950
actggcatgggcagggacaagtaattcattctgatacatataatcccaagctcctctatcatagggatatatggatataagacgtgatttccatatggccgaaggggaaggagaatggagctactccaagaattgtaggcgccaacaagtagctgtccgcgagaccaggccaatggtcgagactgccgtcaagcaggtatacgcagctctcctccccagaaccatggtcgtcgccgacctcggatgctctgcaggaccgaacacgctgctcttcatctctagcgtcctgagcagcatcgctgctgcggctggtgctgaacggtgcaagccgccgagcggcggcggagacgatgacgaccatcacgtggagcttcagttcgtcctgaacgacctccccggcaacgacttcaaccacctgtttcggtcagtcgaggaggagttcagaagggcagcaggttgtgaaaggggtcctcctcctcctccctactatgtcatggggctaccggagtcctattacaacaggctgtttcctcgtcagagtgtgcatctgttccactcctcctactgcctccactggcgctcccaggaacctgagggactagaggcgtggagaaagccttgcctgaacgaggacaacatctacatcgcaaggagtaggaccacgacaccttctgtggcgaaactgttccaggagcagttccagaaggacttctccctcttcctcaagctgcgccacgaagagctcgtgcatggagggcgaatggtgcttgtatttctcggcaggaagaacgaggacgcgtacagtggcgacctcaaccagctcttcgcactggtcgcaacagcgttgcagtctcttgttttgaagggccttgtggagaaggaaaagctagagtctttcaacctaccgatctacgggccgtcggtgggagaagtggaggatctggtcacgcagagcggtctgttcagcatggatctgatcaagcagttcgagatgaactgggaccctctcgacgactcggagggtgacgacgtcgtcgaggacagcgctcgcagcagcatgaatgtcgccaagtacatcagatccgtgctgaagtctttaattgtccgccattttggagaagccataattgatgcatggtttgccgagttcaggcgccttgtcgctgagcacctcgagaaggagaagaccaagttcactaccttcgccatgtgcttgaagaaagagtgatatagatgtatcgatctacatatacgtatgtgtattgtatttcgtacggtgtagctaatatactcatatgtgatatatcatgtgtatttcatgggacacgtacaattgagtatatgtgtgcatgcattatacatatggtacggtcgt

SEQ ID NO: 23599 - protein, 385 aa, Zea mays subsp. mays
  peptide (1)..(385): Ceres Seq. ID no. 12410951
  misc_feature (36)..(375): Pfam Name: Pfam Description:  SAM dependent carboxyl methyltransferase
  misc_feature (1)..(375): NCBI GI NO: 23957318 NR Description: S-adenosyl-L-methionine: salicylic acidmethyltransferase
  misc_feature (140)..(382): NCBI GI NO: 34809619 NR Description: Chain X
  misc_feature (1)..(123): NCBI GI NO: 34809619 NR Description: Chain X
  misc_feature (140)..(384): NCBI GI NO: 9789277 NR Description: SAM:benzoic acid carboxyl methyltransferase
  misc_feature (12)..(159): NCBI GI NO: 9789277 NR Description: SAM:benzoic acid carboxyl methyltransferase
  misc_feature (1)..(384): NCBI GI NO: 34911508 NR Description: putative S-adenosyl-L-methionine:salicylic acidcarboxyl methyltransferase
  misc_feature (1)..(384): NCBI GI NO: 34911486 NR Description: putative S-adenosyl-L-methionine:salicylic acidcarboxyl methyltransferase
  misc_feature (2)..(385): NCBI GI NO: 15234420 NR Description: S-adenosyl-L-methionine: carboxyl methyltransferasefamily
  misc_feature (1)..(382): NCBI GI NO: 6651395 NR Description: floral nectary-specific protein
  misc_feature (9)..(385): NCBI GI NO: 15237695 NR Description: S-adenosyl-L-methionine: carboxyl methyltransferasefamily
MDIRRDFHMAEGEGEWSYSKNCRRQQVAVRETRPMVETAVKQVYAALLPRTMVVADLGCSAGPNTLLFISSVLSSIAAAAGAERCKPPSGGGDDDDHHVELQFVLNDLPGNDFNHLFRSVEEEFRRAAGCERGPPPPPYYVMGLPESYYNRLFPRQSVHLFHSSYCLHWRSQEPEGLEAWRKPCLNEDNIYIARSRTTTPSVAKLFQEQFQKDFSLFLKLRHEELVHGGRMVLVFLGRKNEDAYSGDLNQLFALVATALQSLVLKGLVEKEKLESFNLPIYGPSVGEVEDLVTQSGLFSMDLIKQFEMNWDPLDDSEGDDVVEDSARSSMNVAKYIRSVLKSLIVRHFGEAIIDAWFAEFRRLVAEHLEKEKTKFTTFAMCLKKE

SEQ ID NO: 23600 - protein, 377 aa, Zea mays subsp. mays
  peptide (1)..(377): Ceres Seq. ID no. 12410952
  misc_feature (28)..(367): Pfam Name: Pfam Description:  SAM dependent carboxyl methyltransferase
  misc_feature (1)..(367): NCBI GI NO: 23957318 NR Description: S-adenosyl-L-methionine: salicylic acidmethyltransferase
  misc_feature (132)..(374): NCBI GI NO: 34809619 NR Description: Chain X
  misc_feature (1)..(115): NCBI GI NO: 34809619 NR Description: Chain X
  misc_feature (132)..(376): NCBI GI NO: 9789277 NR Description: SAM:benzoic acid carboxyl methyltransferase
  misc_feature (4)..(151): NCBI GI NO: 9789277 NR Description: SAM:benzoic acid carboxyl methyltransferase
  misc_feature (1)..(376): NCBI GI NO: 34911508 NR Description: putative S-adenosyl-L-methionine:salicylic acidcarboxyl methyltransferase
  misc_feature (1)..(376): NCBI GI NO: 34911486 NR Description: putative S-adenosyl-L-methionine:salicylic acidcarboxyl methyltransferase
  misc_feature (1)..(377): NCBI GI NO: 15234420 NR Description: S-adenosyl-L-methionine: carboxyl methyltransferasefamily
  misc_feature (1)..(374): NCBI GI NO: 6651395 NR Description: floral nectary-specific protein
  misc_feature (1)..(377): NCBI GI NO: 15237695 NR Description: S-adenosyl-L-methionine: carboxyl methyltransferasefamily
MAEGEGEWSYSKNCRRQQVAVRETRPMVETAVKQVYAALLPRTMVVADLGCSAGPNTLLFISSVLSSIAAAAGAERCKPPSGGGDDDDHHVELQFVLNDLPGNDFNHLFRSVEEEFRRAAGCERGPPPPPYYVMGLPESYYNRLFPRQSVHLFHSSYCLHWRSQEPEGLEAWRKPCLNEDNIYIARSRTTTPSVAKLFQEQFQKDFSLFLKLRHEELVHGGRMVLVFLGRKNEDAYSGDLNQLFALVATALQSLVLKGLVEKEKLESFNLPIYGPSVGEVEDLVTQSGLFSMDLIKQFEMNWDPLDDSEGDDVVEDSARSSMNVAKYIRSVLKSLIVRHFGEAIIDAWFAEFRRLVAEHLEKEKTKFTTFAMCLKKE

SEQ ID NO: 23601 - protein, 351 aa, Zea mays subsp. mays
  peptide (1)..(351): Ceres Seq. ID no. 12410953
  misc_feature (2)..(341): Pfam Name: Pfam Description:  SAM dependent carboxyl methyltransferase
  misc_feature (1)..(341): NCBI GI NO: 23957318 NR Description: S-adenosyl-L-methionine: salicylic acidmethyltransferase
  misc_feature (106)..(348): NCBI GI NO: 34809619 NR Description: Chain X
  misc_feature (1)..(89): NCBI GI NO: 34809619 NR Description: Chain X
  misc_feature (106)..(350): NCBI GI NO: 9789277 NR Description: SAM:benzoic acid carboxyl methyltransferase
  misc_feature (1)..(125): NCBI GI NO: 9789277 NR Description: SAM:benzoic acid carboxyl methyltransferase
  misc_feature (1)..(350): NCBI GI NO: 34911508 NR Description: putative S-adenosyl-L-methionine:salicylic acidcarboxyl methyltransferase
  misc_feature (1)..(350): NCBI GI NO: 34911486 NR Description: putative S-adenosyl-L-methionine:salicylic acidcarboxyl methyltransferase
  misc_feature (1)..(351): NCBI GI NO: 15234420 NR Description: S-adenosyl-L-methionine: carboxyl methyltransferasefamily
  misc_feature (1)..(348): NCBI GI NO: 6651395 NR Description: floral nectary-specific protein
  misc_feature (1)..(351): NCBI GI NO: 15237695 NR Description: S-adenosyl-L-methionine: carboxyl methyltransferasefamily
MVETAVKQVYAALLPRTMVVADLGCSAGPNTLLFISSVLSSIAAAAGAERCKPPSGGGDDDDHHVELQFVLNDLPGNDFNHLFRSVEEEFRRAAGCERGPPPPPYYVMGLPESYYNRLFPRQSVHLFHSSYCLHWRSQEPEGLEAWRKPCLNEDNIYIARSRTTTPSVAKLFQEQFQKDFSLFLKLRHEELVHGGRMVLVFLGRKNEDAYSGDLNQLFALVATALQSLVLKGLVEKEKLESFNLPIYGPSVGEVEDLVTQSGLFSMDLIKQFEMNWDPLDDSEGDDVVEDSARSSMNVAKYIRSVLKSLIVRHFGEAIIDAWFAEFRRLVAEHLEKEKTKFTTFAMCLKKE

SEQ ID NO: 23602 - DNA, 904 bp, Zea mays subsp. mays
  misc_feature (1)..(904): Ceres Seq. ID no. 12405189
atcaacaacatacacacaagcaaaacaaaaagctaagaagctccgtagctaaattcagatattacaaacacaaaaaaggagtgcagaaccaaaatggctgcctcgaccttccttctcattgcttttctagcattgatcacttctcaggccattgcctctgatcctagcccgctccaagacttctgtgttgccgataaagactctccggtgaaggtgaatggatttgtttgcaaggaccctatggctgtgaacgctgacgacttcttcaaggctgcaaaacttgaccagccaagggacaccaccaaaagcaaggtgggatccaacgttactctaatcaatgtcatgcagctgcctggactcaacacgttggggatctcgttggctcgcattgactacgcaccattaggtcagaatcctccacacacacacccacgtgccactgagatcctcactgtgcttgaggggacactctacgtcggatttgtcacctccaaccaagctgatagaagcaacaggctatttgccaaggttctcaacaagggcgatgtgtttgtattcccccaaggactaatccacttccagttcaacccagtacatgacaagccagcagtcgcgctcgctgctctaagtagccagaaccctggagctattactattgccaatgcagtctttggatcaaagccacctatctcggatgatgtcctagctaaggcctttcaagtgcaaaaggggacaattgattggcttcaagctcagttctgggagaacaaccactactgaaaaaatcaagtctgagttcaacatatgagaataaagaaatgtacttgtattttacatactactctatgtgttaacctttttctaggttgcgactgataataaaataaatgttcagtatttatgt

SEQ ID NO: 23603 - protein, 228 aa, Zea mays subsp. mays
  peptide (1)..(228): Ceres Seq. ID no. 12405190
  misc_feature (61)..(216): Pfam Name: Pfam Description:  Cupin
  misc_feature (1)..(228): NCBI GI NO: 7447336 NR Description: germin-like protein 6 - rice
  misc_feature (1)..(228): NCBI GI NO: 40253800 NR Description: putative germin A
  misc_feature (2)..(228): NCBI GI NO: 5869975 NR Description: germin-like protein [Triticum aestivum]
  misc_feature (1)..(228): NCBI GI NO: 5499730 NR Description: germin-like protein 1 precursor [Oryza sativa]
  misc_feature (1)..(228): NCBI GI NO: 40253804 NR Description: putative germin A
  misc_feature (3)..(228): NCBI GI NO: 40253797 NR Description: putative germin A
  misc_feature (1)..(228): NCBI GI NO: 5499732 NR Description: germin-like protein 2 precursor [Oryza sativa]
  misc_feature (2)..(227): NCBI GI NO: 9837111 NR Description: germin A [Hordeum vulgare]
  misc_feature (1)..(228): NCBI GI NO: 40253802 NR Description: putative germin A
  misc_feature (1)..(227): NCBI GI NO: 7447340 NR Description: germin-like protein - barley
MAASTFLLIAFLALITSQAIASDPSPLQDFCVADKDSPVKVNGFVCKDPMAVNADDFFKAAKLDQPRDTTKSKVGSNVTLINVMQLPGLNTLGISLARIDYAPLGQNPPHTHPRATEILTVLEGTLYVGFVTSNQADRSNRLFAKVLNKGDVFVFPQGLIHFQFNPVHDKPAVALAALSSQNPGAITIANAVFGSKPPISDDVLAKAFQVQKGTIDWLQAQFWENNHY

SEQ ID NO: 23604 - protein, 179 aa, Zea mays subsp. mays
  peptide (1)..(179): Ceres Seq. ID no. 12405191
  misc_feature (12)..(167): Pfam Name: Pfam Description:  Cupin
  misc_feature (1)..(179): NCBI GI NO: 7447336 NR Description: germin-like protein 6 - rice
  misc_feature (1)..(179): NCBI GI NO: 40253800 NR Description: putative germin A
  misc_feature (1)..(179): NCBI GI NO: 5869975 NR Description: germin-like protein [Triticum aestivum]
  misc_feature (1)..(179): NCBI GI NO: 5499730 NR Description: germin-like protein 1 precursor [Oryza sativa]
  misc_feature (1)..(179): NCBI GI NO: 40253804 NR Description: putative germin A
  misc_feature (1)..(179): NCBI GI NO: 40253797 NR Description: putative germin A
  misc_feature (1)..(179): NCBI GI NO: 5499732 NR Description: germin-like protein 2 precursor [Oryza sativa]
  misc_feature (1)..(178): NCBI GI NO: 9837111 NR Description: germin A [Hordeum vulgare]
  misc_feature (1)..(179): NCBI GI NO: 40253802 NR Description: putative germin A
  misc_feature (1)..(178): NCBI GI NO: 7447340 NR Description: germin-like protein - barley
MAVNADDFFKAAKLDQPRDTTKSKVGSNVTLINVMQLPGLNTLGISLARIDYAPLGQNPPHTHPRATEILTVLEGTLYVGFVTSNQADRSNRLFAKVLNKGDVFVFPQGLIHFQFNPVHDKPAVALAALSSQNPGAITIANAVFGSKPPISDDVLAKAFQVQKGTIDWLQAQFWENNHY

SEQ ID NO: 23605 - protein, 145 aa, Zea mays subsp. mays
  peptide (1)..(145): Ceres Seq. ID no. 12405192
  misc_feature (1)..(133): Pfam Name: Pfam Description:  Cupin
  misc_feature (1)..(145): NCBI GI NO: 7447336 NR Description: germin-like protein 6 - rice
  misc_feature (1)..(145): NCBI GI NO: 40253800 NR Description: putative germin A
  misc_feature (1)..(145): NCBI GI NO: 5869975 NR Description: germin-like protein [Triticum aestivum]
  misc_feature (1)..(145): NCBI GI NO: 5499730 NR Description: germin-like protein 1 precursor [Oryza sativa]
  misc_feature (1)..(145): NCBI GI NO: 40253804 NR Description: putative germin A
  misc_feature (1)..(145): NCBI GI NO: 40253797 NR Description: putative germin A
  misc_feature (1)..(145): NCBI GI NO: 5499732 NR Description: germin-like protein 2 precursor [Oryza sativa]
  misc_feature (1)..(144): NCBI GI NO: 9837111 NR Description: germin A [Hordeum vulgare]
  misc_feature (1)..(145): NCBI GI NO: 40253802 NR Description: putative germin A
  misc_feature (1)..(144): NCBI GI NO: 7447340 NR Description: germin-like protein - barley
MQLPGLNTLGISLARIDYAPLGQNPPHTHPRATEILTVLEGTLYVGFVTSNQADRSNRLFAKVLNKGDVFVFPQGLIHFQFNPVHDKPAVALAALSSQNPGAITIANAVFGSKPPISDDVLAKAFQVQKGTIDWLQAQFWENNHY

SEQ ID NO: 23606 - DNA, 934 bp, Zea mays subsp. mays
  misc_feature (1)..(934): Ceres Seq. ID no. 12351299
gttttggcgcaataaggcgacctgagtcctgaaccgcctcgagccgctctcggcttcgaatcccgacaacctccctccccaagctgcttagccgccgtctgggcctcagacctgcgtcaagcttccggcggcagcccatcgagcaccacaatggcgtccggcggagcggccatctcggcggggcctacaccgccgtcggcgacggcgtcgtcggttgagtggcaccagcggccgccgaacccgaagaaccccgtggtgttcttcgacgtgaccatcgggtccatcgccgccggccgcatcaagatggagctcttcgccgacatcgcccccaagaccgcggagaacttccggcagttctgcactggggagcatagaaaaaatgctttgccacaaggttataagggctgccaattccatagagtgatcaaagatttcatgattcagggtggtgacttcttgaagaatgatggtactggatgcacatcaatctacggtaccaaatttgatgatgaaaattttatagcaaagcatacagggcctggactgctctcgatggcaaacagtggaattaactctaatggatctcagttctttataacatgtgcaaagtgtgactggcttgacaacaaacatgtggtatttgggagagtgcttggagacggtttgctcgtcgtgaggaagattgaaaatgttgcaactggagcgaataacaaaccaaagcttgcctgcgttataagtgagtgtggtgaaatgtagtttgatccctttgtgtggctaatcgtggattcttgacgctgctgatgtagaccctgtttggttgatggaagtacttaaacagtggaaacattgatggaaatgtattgtgtctaggcaacctgcagaataatagaccaaaaaaactaatattcttgtttggcttgggagttcggccttc

SEQ ID NO: 23607 - protein, 201 aa, Zea mays subsp. mays
  peptide (1)..(201): Ceres Seq. ID no. 12351300
  misc_feature (35)..(201): Pfam Name: Pfam Description:  Cyclophilin type peptidyl-prolyl cis-trans isomerase
  misc_feature (2)..(201): NCBI GI NO: 32129321 NR Description: putative cyclophilin
  misc_feature (1)..(201): NCBI GI NO: 15224944 NR Description: putative peptidyl-prolyl cis-trans isomerase
  misc_feature (17)..(201): NCBI GI NO: 4454307 NR Description: cyclophilin [Pseudotsuga menziesii]
  misc_feature (27)..(201): NCBI GI NO: 37595420 NR Description: peptidyl prolyl isomerase H [Danio rerio]
  misc_feature (26)..(201): NCBI GI NO: 11602709 NR Description: putative U-snRNP-associated cyclophilin
  misc_feature (30)..(201): NCBI GI NO: 5454154 NR Description: peptidyl prolyl isomerase H; cyclophilin H
  misc_feature (30)..(201): NCBI GI NO: 39849992 NR Description: Unknown (protein for MGC:76244)
  misc_feature (30)..(201): NCBI GI NO: 39597495 NR Description: Hypothetical protein CBG03161
  misc_feature (30)..(201): NCBI GI NO: 17532643 NR Description: Peptidyl-prolyl cis-trans isomerase cyclophilinfamily member 11
  misc_feature (33)..(201): NCBI GI NO: 24586038 NR Description: CG17266-PA [Drosophila melanogaster]
MASGGAAISAGPTPPSATASSVEWHQRPPNPKNPVVFFDVTIGSIAAGRIKMELFADIAPKTAENFRQFCTGEHRKNALPQGYKGCQFHRVIKDFMIQGGDFLKNDGTGCTSIYGTKFDDENFIAKHTGPGLLSMANSGINSNGSQFFITCAKCDWLDNKHVVFGRVLGDGLLVVRKIENVATGANNKPKLACVISECGEM

SEQ ID NO: 23608 - protein, 150 aa, Zea mays subsp. mays
  peptide (1)..(150): Ceres Seq. ID no. 12351301
  misc_feature (1)..(150): Pfam Name: Pfam Description:  Cyclophilin type peptidyl-prolyl cis-trans isomerase
  misc_feature (1)..(150): NCBI GI NO: 32129321 NR Description: putative cyclophilin
  misc_feature (1)..(150): NCBI GI NO: 15224944 NR Description: putative peptidyl-prolyl cis-trans isomerase
  misc_feature (1)..(150): NCBI GI NO: 4454307 NR Description: cyclophilin [Pseudotsuga menziesii]
  misc_feature (1)..(150): NCBI GI NO: 37595420 NR Description: peptidyl prolyl isomerase H [Danio rerio]
  misc_feature (1)..(150): NCBI GI NO: 11602709 NR Description: putative U-snRNP-associated cyclophilin
  misc_feature (1)..(150): NCBI GI NO: 5454154 NR Description: peptidyl prolyl isomerase H; cyclophilin H
  misc_feature (1)..(150): NCBI GI NO: 39849992 NR Description: Unknown (protein for MGC:76244)
  misc_feature (1)..(150): NCBI GI NO: 39597495 NR Description: Hypothetical protein CBG03161
  misc_feature (1)..(150): NCBI GI NO: 17532643 NR Description: Peptidyl-prolyl cis-trans isomerase cyclophilinfamily member 11
  misc_feature (1)..(150): NCBI GI NO: 24586038 NR Description: CG17266-PA [Drosophila melanogaster]
MELFADIAPKTAENFRQFCTGEHRKNALPQGYKGCQFHRVIKDFMIQGGDFLKNDGTGCTSIYGTKFDDENFIAKHTGPGLLSMANSGINSNGSQFFITCAKCDWLDNKHVVFGRVLGDGLLVVRKIENVATGANNKPKLACVISECGEM

SEQ ID NO: 23609 - protein, 106 aa, Zea mays subsp. mays
  peptide (1)..(106): Ceres Seq. ID no. 12351302
  misc_feature (1)..(106): Pfam Name: Pfam Description:  Cyclophilin type peptidyl-prolyl cis-trans isomerase
  misc_feature (1)..(106): NCBI GI NO: 32129321 NR Description: putative cyclophilin
  misc_feature (1)..(106): NCBI GI NO: 15224944 NR Description: putative peptidyl-prolyl cis-trans isomerase
  misc_feature (1)..(106): NCBI GI NO: 4454307 NR Description: cyclophilin [Pseudotsuga menziesii]
  misc_feature (1)..(106): NCBI GI NO: 37595420 NR Description: peptidyl prolyl isomerase H [Danio rerio]
  misc_feature (1)..(106): NCBI GI NO: 11602709 NR Description: putative U-snRNP-associated cyclophilin
  misc_feature (1)..(106): NCBI GI NO: 5454154 NR Description: peptidyl prolyl isomerase H; cyclophilin H
  misc_feature (1)..(106): NCBI GI NO: 39849992 NR Description: Unknown (protein for MGC:76244)
  misc_feature (1)..(106): NCBI GI NO: 39597495 NR Description: Hypothetical protein CBG03161
  misc_feature (1)..(106): NCBI GI NO: 17532643 NR Description: Peptidyl-prolyl cis-trans isomerase cyclophilinfamily member 11
  misc_feature (1)..(106): NCBI GI NO: 24586038 NR Description: CG17266-PA [Drosophila melanogaster]
MIQGGDFLKNDGTGCTSIYGTKFDDENFIAKHTGPGLLSMANSGINSNGSQFFITCAKCDWLDNKHVVFGRVLGDGLLVVRKIENVATGANNKPKLACVISECGEM

SEQ ID NO: 23610 - DNA, 1416 bp, Zea mays subsp. mays
  misc_feature (1)..(1416): Ceres Seq. ID no. 12373949
gcacgagaccattacctagaacatcctaatcgaaaactcggacccaaacccaaacatccatctcatcgatctccttatcccttcccgtcgcataaacccccgccgccgtgacctcgcagcgaccctgccctcgttctaggctttcattgcaggcctcgcgtctccagtggcagggcaagagaaaggagaggatggcgtcgccgataccgcgcgagtgggtcgggctgcagcagtttccggcggctacacagaccaagctgcacgaactcctcggcaaactcaaggaggaggatgtgagcacattaacaattctggtgatggggaaaggtggagtgggaaagtcatccactgttaactccatcgttggggagagggttgcctctgtcagcgctttgccagtctgagggtctgagaccaatgatgtgctcgcgcacaagggcagggttcactttgaacattatcgacactcctgggcttattgaaggtggatacattaatgagcaggccgttgacatcattaagagatttcttctaggcaagactatcgatgttctcctgtacgtggatcgtttggatgcgtatagaatggatacactggatgaacaggttataagagccatcaccaattcatttggaaaagatatttggcgaagatcattggttgtgttgacccatgcccaactctcaccacctgatggaatcgactataatgatttctttacaagaagatcagaggcacttttgcgatacatccactcaggagcaggaatcaacaaacgagaatatggggatttccccttgccaatagcattggtggagaacagtggaaggtgcaagactaatgagcatggggagaagatacttccggacggaactctgtgggttccaaacctgatgaaagaaattactgttgtcatctcaaacgggagcagtcccactcatgttgatcagaagttaattgatggtccaaaccctaacaatcgccgaaagttgttcataccacttatccttgctgtggagtacttcttggtggtaaaaggaatccggagggcgatccatgcagatatcgcaaacgggaaggtagatgactgggagcagcgttaccgggacctggtgggaagcagggacctcgtagagcagaaaggttctacctcccggaaccgcaaagcctaagttggtgtaccagaaaggattctattcgtgttgagacccacccactcgatctgctgctccttttcctaaatctgtgctgggggctttatagagttcgctggtactacttgaaaaaaaaatgctcctgttgtagttgataagattatgtttcccattttatgacgattggccgtcttcgcaattttgaagatgttatcgaatacgtgttattttattgttttaaattatatatggcatggaaac

SEQ ID NO: 23611 - protein, 251 aa, Zea mays subsp. mays
  peptide (1)..(251): Ceres Seq. ID no. 12373950
  misc_feature (1)..(160): Pfam Name: Pfam Description:  AIG1 family
  misc_feature (1)..(251): NCBI GI NO: 7259224 NR Description: Toc34-2 protein [Zea mays]
  misc_feature (1)..(251): NCBI GI NO: 6689637 NR Description: Toc34-1 protein [Zea mays]
  misc_feature (1)..(236): NCBI GI NO: 15238381 NR Description: GTP-binding protein (gb|AAD09203
  misc_feature (1)..(236): NCBI GI NO: 25091410 NR Description: Translocase of chloroplast 34
  misc_feature (1)..(236): NCBI GI NO: 21594231 NR Description: GTP-binding protein [Arabidopsis thaliana]
  misc_feature (1)..(236): NCBI GI NO: 25091388 NR Description: Translocase of chloroplast 34
  misc_feature (1)..(236): NCBI GI NO: 1076522 NR Description: chloroplast import-associated protein IAP36
  misc_feature (1)..(221): NCBI GI NO: 33391904 NR Description: TOC33 [Brassica napus]
  misc_feature (1)..(221): NCBI GI NO: 32765535 NR Description: TOC33 [Brassica napus]
  misc_feature (1)..(221): NCBI GI NO: 15217705 NR Description: putative GTP-binding protein; protein id:At1g02280
MMCSRTRAGFTLNIIDTPGLIEGGYINEQAVDIIKRFLLGKTIDVLLYVDRLDAYRMDTLDEQVIRAITNSFGKDIWRRSLVVLTHAQLSPPDGIDYNDFFTRRSEALLRYIHSGAGINKREYGDFPLPIALVENSGRCKTNEHGEKILPDGTLWVPNLMKEITVVISNGSSPTHVDQKLIDGPNPNNRRKLFIPLILAVEYFLVVKGIRRAIHADIANGKVDDWEQRYRDLVGSRDLVEQKGSTSRNRKA

SEQ ID NO: 23612 - protein, 250 aa, Zea mays subsp. mays
  peptide (1)..(250): Ceres Seq. ID no. 12373951
  misc_feature (1)..(159): Pfam Name: Pfam Description:  AIG1 family
  misc_feature (1)..(250): NCBI GI NO: 7259224 NR Description: Toc34-2 protein [Zea mays]
  misc_feature (1)..(250): NCBI GI NO: 6689637 NR Description: Toc34-1 protein [Zea mays]
  misc_feature (1)..(235): NCBI GI NO: 15238381 NR Description: GTP-binding protein (gb|AAD09203
  misc_feature (1)..(235): NCBI GI NO: 25091410 NR Description: Translocase of chloroplast 34
  misc_feature (1)..(235): NCBI GI NO: 21594231 NR Description: GTP-binding protein [Arabidopsis thaliana]
  misc_feature (1)..(235): NCBI GI NO: 25091388 NR Description: Translocase of chloroplast 34
  misc_feature (1)..(235): NCBI GI NO: 1076522 NR Description: chloroplast import-associated protein IAP36
  misc_feature (1)..(220): NCBI GI NO: 33391904 NR Description: TOC33 [Brassica napus]
  misc_feature (1)..(220): NCBI GI NO: 32765535 NR Description: TOC33 [Brassica napus]
  misc_feature (1)..(220): NCBI GI NO: 15217705 NR Description: putative GTP-binding protein; protein id:At1g02280
MCSRTRAGFTLNIIDTPGLIEGGYINEQAVDIIKRFLLGKTIDVLLYVDRLDAYRMDTLDEQVIRAITNSFGKDIWRRSLVVLTHAQLSPPDGIDYNDFFTRRSEALLRYIHSGAGINKREYGDFPLPIALVENSGRCKTNEHGEKILPDGTLWVPNLMKEITVVISNGSSPTHVDQKLIDGPNPNNRRKLFIPLILAVEYFLVVKGIRRAIHADIANGKVDDWEQRYRDLVGSRDLVEQKGSTSRNRKA

SEQ ID NO: 23613 - protein, 195 aa, Zea mays subsp. mays
  peptide (1)..(195): Ceres Seq. ID no. 12373952
  misc_feature (1)..(104): Pfam Name: Pfam Description:  AIG1 family
  misc_feature (1)..(195): NCBI GI NO: 7259224 NR Description: Toc34-2 protein [Zea mays]
  misc_feature (1)..(195): NCBI GI NO: 6689637 NR Description: Toc34-1 protein [Zea mays]
  misc_feature (1)..(180): NCBI GI NO: 15238381 NR Description: GTP-binding protein (gb|AAD09203
  misc_feature (1)..(180): NCBI GI NO: 25091410 NR Description: Translocase of chloroplast 34
  misc_feature (1)..(180): NCBI GI NO: 21594231 NR Description: GTP-binding protein [Arabidopsis thaliana]
  misc_feature (1)..(180): NCBI GI NO: 25091388 NR Description: Translocase of chloroplast 34
  misc_feature (1)..(180): NCBI GI NO: 1076522 NR Description: chloroplast import-associated protein IAP36
  misc_feature (1)..(165): NCBI GI NO: 33391904 NR Description: TOC33 [Brassica napus]
  misc_feature (1)..(165): NCBI GI NO: 32765535 NR Description: TOC33 [Brassica napus]
  misc_feature (1)..(165): NCBI GI NO: 15217705 NR Description: putative GTP-binding protein; protein id:At1g02280
MDTLDEQVIRAITNSFGKDIWRRSLVVLTHAQLSPPDGIDYNDFFTRRSEALLRYIHSGAGINKREYGDFPLPIALVENSGRCKTNEHGEKILPDGTLWVPNLMKEITVVISNGSSPTHVDQKLIDGPNPNNRRKLFIPLILAVEYFLVVKGIRRAIHADIANGKVDDWEQRYRDLVGSRDLVEQKGSTSRNRKA

SEQ ID NO: 23614 - DNA, 909 bp, Zea mays subsp. mays
  misc_feature (1)..(909): Ceres Seq. ID no. 12413503
acacggcgtgccgcggtgggcgaccttttttgcaccgggagataaatcgacagcaccctgacctcaagtcctcaacccgcaggccgcagctgctcccgcccgccgcgcaagcggccaagcgccgccggttcttctcgagcaattctcataaatcattgtcctcataacttgtaatgggtggaagccagtatgatgatgactgggtgttgcccagtgccgatatcactcttgttctggttgggaaacttggctatggcaagagtgcaactggaaatagcatccttggacgggaagcatttgtatcagaatattcacatgccagtgttactaatacttgtcagttgggaagcactaccctgaaggacggccgcaccatcaatgttattgatacaccagggttatttgatatgagcattacatcggacgaggctggtaaagagattgttaaatgcatgaacatggctaaagatgggatacatgcagttctgatggttttttctgccacatctcggttttctcgagaggacgcaagtacagttgagaccattaaagtcttctttggtgaaaagattgtcgaccacatgattttagtcttcacttatggagatttagttggtgaatctaagttgaagaaaatgttaaataatgcgccagagtatttgcagaatgttgttgagctatgccaaaacagagtggttgtcttcgataacgtgactgaagaccgaaggctccaagcgcagcaacttgacaaattgctcgatgtagtggattcagtttgtgcaaaaaatggaggaaaaccattttcagatcaaatgttcactagcatcaaggaggtgcatgatagagaaaaagaggtgcatacctcgggatattcagatgagcagatatctgaattgaaaaaggagattc

SEQ ID NO: 23615 - protein, 245 aa, Zea mays subsp. mays
  peptide (1)..(245): Ceres Seq. ID no. 12413504
  misc_feature (18)..(220): Pfam Name: Pfam Description:  AIG1 family
  misc_feature (7)..(237): NCBI GI NO: 38346576 NR Description: OSJNBa0064D20.7
  misc_feature (1)..(244): NCBI GI NO: 4097585 NR Description: NTGP4 [Nicotiana tabacum]
  misc_feature (1)..(244): NCBI GI NO: 18399081 NR Description: expressed protein; protein id: At1g33970
  misc_feature (1)..(244): NCBI GI NO: 25373414 NR Description: hypothetical protein F12G12
  misc_feature (1)..(244): NCBI GI NO: 24417378 NR Description: unknown [Arabidopsis thaliana]
  misc_feature (8)..(244): NCBI GI NO: 15217724 NR Description: AIG1-like protein; protein id: At1g33930.1
  misc_feature (19)..(244): NCBI GI NO: 10092442 NR Description: disease resistance protein AIG1; 916-2572
  misc_feature (19)..(244): NCBI GI NO: 15217731 NR Description: AIG1; protein id: At1g33960
  misc_feature (19)..(244): NCBI GI NO: 15220922 NR Description: AIG1-like protein; protein id: At1g33950.1
  misc_feature (19)..(244): NCBI GI NO: 15217717 NR Description: AIG1-like protein; protein id: At1g33890.1
MGGSQYDDDWVLPSADITLVLVGKLGYGKSATGNSILGREAFVSEYSHASVTNTCQLGSTTLKDGRTINVIDTPGLFDMSITSDEAGKEIVKCMNMAKDGIHAVLMVFSATSRFSREDASTVETIKVFFGEKIVDHMILVFTYGDLVGESKLKKMLNNAPEYLQNVVELCQNRVVVFDNVTEDRRLQAQQLDKLLDVVDSVCAKNGGKPFSDQMFTSIKEVHDREKEVHTSGYSDEQISELKKEI

SEQ ID NO: 23616 - protein, 167 aa, Zea mays subsp. mays
  peptide (1)..(167): Ceres Seq. ID no. 12413505
  misc_feature (1)..(142): Pfam Name: Pfam Description:  AIG1 family
  misc_feature (1)..(159): NCBI GI NO: 38346576 NR Description: OSJNBa0064D20.7
  misc_feature (1)..(166): NCBI GI NO: 4097585 NR Description: NTGP4 [Nicotiana tabacum]
  misc_feature (1)..(166): NCBI GI NO: 18399081 NR Description: expressed protein; protein id: At1g33970
  misc_feature (1)..(166): NCBI GI NO: 25373414 NR Description: hypothetical protein F12G12
  misc_feature (1)..(166): NCBI GI NO: 24417378 NR Description: unknown [Arabidopsis thaliana]
  misc_feature (1)..(166): NCBI GI NO: 15217724 NR Description: AIG1-like protein; protein id: At1g33930.1
  misc_feature (1)..(166): NCBI GI NO: 10092442 NR Description: disease resistance protein AIG1; 916-2572
  misc_feature (1)..(166): NCBI GI NO: 15217731 NR Description: AIG1; protein id: At1g33960
  misc_feature (1)..(166): NCBI GI NO: 15220922 NR Description: AIG1-like protein; protein id: At1g33950.1
  misc_feature (1)..(166): NCBI GI NO: 15217717 NR Description: AIG1-like protein; protein id: At1g33890.1
MSITSDEAGKEIVKCMNMAKDGIHAVLMVFSATSRFSREDASTVETIKVFFGEKIVDHMILVFTYGDLVGESKLKKMLNNAPEYLQNVVELCQNRVVVFDNVTEDRRLQAQQLDKLLDVVDSVCAKNGGKPFSDQMFTSIKEVHDREKEVHTSGYSDEQISELKKEI

SEQ ID NO: 23617 - protein, 152 aa, Zea mays subsp. mays
  peptide (1)..(152): Ceres Seq. ID no. 12413506
  misc_feature (1)..(127): Pfam Name: Pfam Description:  AIG1 family
  misc_feature (1)..(144): NCBI GI NO: 38346576 NR Description: OSJNBa0064D20.7
  misc_feature (1)..(151): NCBI GI NO: 4097585 NR Description: NTGP4 [Nicotiana tabacum]
  misc_feature (1)..(151): NCBI GI NO: 18399081 NR Description: expressed protein; protein id: At1g33970
  misc_feature (1)..(151): NCBI GI NO: 25373414 NR Description: hypothetical protein F12G12
  misc_feature (1)..(151): NCBI GI NO: 24417378 NR Description: unknown [Arabidopsis thaliana]
  misc_feature (1)..(151): NCBI GI NO: 15217724 NR Description: AIG1-like protein; protein id: At1g33930.1
  misc_feature (1)..(151): NCBI GI NO: 10092442 NR Description: disease resistance protein AIG1; 916-2572
  misc_feature (1)..(151): NCBI GI NO: 15217731 NR Description: AIG1; protein id: At1g33960
  misc_feature (1)..(151): NCBI GI NO: 15220922 NR Description: AIG1-like protein; protein id: At1g33950.1
  misc_feature (1)..(151): NCBI GI NO: 15217717 NR Description: AIG1-like protein; protein id: At1g33890.1
MNMAKDGIHAVLMVFSATSRFSREDASTVETIKVFFGEKIVDHMILVFTYGDLVGESKLKKMLNNAPEYLQNVVELCQNRVVVFDNVTEDRRLQAQQLDKLLDVVDSVCAKNGGKPFSDQMFTSIKEVHDREKEVHTSGYSDEQISELKKEI

SEQ ID NO: 23618 - DNA, 1414 bp, Zea mays subsp. mays
  misc_feature (1)..(1414): Ceres Seq. ID no. 12410938
acacaagctagcaattgaaaaaaaaaacaggcaaggaaaatggctccgaccgccgccaaggacagtggctccgccgatcgctggcgcgaggtgcaggcgttcgaggacagcaagctgggtgtgaagggcctggtcgactccggcgtcaagtccatcccggccatgttccaccacccgccggagtccctcaaggatgtcatttctccaccagctctgccctcctccgacgatgcgccggccatcccagtggtggacctgtccgtggcgcggcgcgaggatctggtggcccaggtgaagcacgcggccgggacggtgggcttcttctgggtggtgaaccacggcgtgccggaggagctgatggccagcatgctcagcggggtgcgccagttcaacgagggctctctggaggccaagcaggcgctctactcacgggaccccgctcgcaacgtgcgcttcgcttccaacttcgacctcttcgagtccgcggcggccgactggcgcgacacgctctactgcaagattgcgccggatccggcgccgcgggagctcgtgccggagcctctccggaacgtgatgatggaatacggcgaggaactgacgaagctggcgcggtccatgttcgagctgctgtcggagtccctcggcatgcccagcgaccacctgcacaagatggagtgcatgcagcagctccacatcgtgtgccagtactacccgccatgcccggagccgcacctcaccatcggcgtcaggaagcactcggacaccggtttcttcaccatcctcctgcaggacggcatgggcggcctgcaggtgctagtcgatcgcggaggcggccgccagacgtgggtggacgtcactccccgacctggggcactcatggtcaacatgggcagctttcttcagcttgtgacgaatgaccggtacaagagcgtggatcaccgggtgccggctaacaagagcagtgacacggcgagggtctcggtagctgccttcttcaaccccgacgagaagagaaccgagaggctgtatggccccattccagaccccagcaagcctccgctgtacaggagcgtcacgttcccggacttcatcgccaagttcaacagcatcggactggacggtcgcgtgctcgaccacttccggttggaggacgacggccctactcgtcttgctgctcctgcacaccacgtctagtcttgttttcgttcgatcgaacaaacagttctcgtcgtcgtctcttttatttttcctgcaatctgaatttcgagttctccaaataaataagggtatccattcccttcatccgcagagcgcgcggatgccttcactagcagctctagttttgctatgtatatagctgtgtgtgtggtacctttgtgactcatatattatgcaataaagtatgctttctcct

SEQ ID NO: 23619 - protein, 384 aa, Zea mays subsp. mays
  peptide (1)..(384): Ceres Seq. ID no. 12410939
  misc_feature (215)..(320): Pfam Name: II Pfam Description: 2OG-Fe
  misc_feature (1)..(369): NCBI GI NO: 29123084 NR Description: 2-oxoglutarate-dependent oxygenase [Zea mays]
  misc_feature (9)..(369): NCBI GI NO: 40253423 NR Description: putative 2-oxoglutarate-dependent oxygenase
  misc_feature (9)..(371): NCBI GI NO: 40253419 NR Description: putative 2-oxoglutarate-dependent oxygenase
  misc_feature (13)..(361): NCBI GI NO: 30679748 NR Description: 2-oxoglutarate-dependent dioxygenase, putative
  misc_feature (13)..(369): NCBI GI NO: 13878119 NR Description: putative oxidoreductase [Arabidopsis thaliana]
  misc_feature (13)..(369): NCBI GI NO: 15221545 NR Description: oxidoreductase, putative; protein id: At1g06650
  misc_feature (9)..(380): NCBI GI NO: 40253431 NR Description: putative 2-oxoglutarate-dependent oxygenase
  misc_feature (5)..(361): NCBI GI NO: 15221544 NR Description: oxidoreductase, putative; protein id: At1g06640
  misc_feature (11)..(369): NCBI GI NO: 15218794 NR Description: putative 1-aminocyclopropane-1-carboxylate oxidase
  misc_feature (13)..(369): NCBI GI NO: 5031283 NR Description: unknown [Prunus armeniaca]
MAPTAAKDSGSADRWREVQAFEDSKLGVKGLVDSGVKSIPAMFHHPPESLKDVISPPALPSSDDAPAIPVVDLSVARREDLVAQVKHAAGTVGFFWVVNHGVPEELMASMLSGVRQFNEGSLEAKQALYSRDPARNVRFASNFDLFESAAADWRDTLYCKIAPDPAPRELVPEPLRNVMMEYGEELTKLARSMFELLSESLGMPSDHLHKMECMQQLHIVCQYYPPCPEPHLTIGVRKHSDTGFFTILLQDGMGGLQVLVDRGGGRQTWVDVTPRPGALMVNMGSFLQLVTNDRYKSVDHRVPANKSSDTARVSVAAFFNPDEKRTERLYGPIPDPSKPPLYRSVTFPDFIAKFNSIGLDGRVLDHFRLEDDGPTRLAAPAHHV

SEQ ID NO: 23620 - protein, 343 aa, Zea mays subsp. mays
  peptide (1)..(343): Ceres Seq. ID no. 12410940
  misc_feature (174)..(279): Pfam Name: II Pfam Description: 2OG-Fe
  misc_feature (1)..(328): NCBI GI NO: 29123084 NR Description: 2-oxoglutarate-dependent oxygenase [Zea mays]
  misc_feature (1)..(328): NCBI GI NO: 40253423 NR Description: putative 2-oxoglutarate-dependent oxygenase
  misc_feature (1)..(330): NCBI GI NO: 40253419 NR Description: putative 2-oxoglutarate-dependent oxygenase
  misc_feature (1)..(320): NCBI GI NO: 30679748 NR Description: 2-oxoglutarate-dependent dioxygenase, putative
  misc_feature (1)..(328): NCBI GI NO: 13878119 NR Description: putative oxidoreductase [Arabidopsis thaliana]
  misc_feature (1)..(328): NCBI GI NO: 15221545 NR Description: oxidoreductase, putative; protein id: At1g06650
  misc_feature (1)..(339): NCBI GI NO: 40253431 NR Description: putative 2-oxoglutarate-dependent oxygenase
  misc_feature (1)..(320): NCBI GI NO: 15221544 NR Description: oxidoreductase, putative; protein id: At1g06640
  misc_feature (1)..(328): NCBI GI NO: 15218794 NR Description: putative 1-aminocyclopropane-1-carboxylate oxidase
  misc_feature (1)..(328): NCBI GI NO: 5031283 NR Description: unknown [Prunus armeniaca]
MFHHPPESLKDVISPPALPSSDDAPAIPVVDLSVARREDLVAQVKHAAGTVGFFWVVNHGVPEELMASMLSGVRQFNEGSLEAKQALYSRDPARNVRFASNFDLFESAAADWRDTLYCKIAPDPAPRELVPEPLRNVMMEYGEELTKLARSMFELLSESLGMPSDHLHKMECMQQLHIVCQYYPPCPEPHLTIGVRKHSDTGFFTILLQDGMGGLQVLVDRGGGRQTWVDVTPRPGALMVNMGSFLQLVTNDRYKSVDHRVPANKSSDTARVSVAAFFNPDEKRTERLYGPIPDPSKPPLYRSVTFPDFIAKFNSIGLDGRVLDHFRLEDDGPTRLAAPAHHV

SEQ ID NO: 23621 - protein, 278 aa, Zea mays subsp. mays
  peptide (1)..(278): Ceres Seq. ID no. 12410941
  misc_feature (109)..(214): Pfam Name: II Pfam Description: 2OG-Fe
  misc_feature (1)..(263): NCBI GI NO: 29123084 NR Description: 2-oxoglutarate-dependent oxygenase [Zea mays]
  misc_feature (1)..(263): NCBI GI NO: 40253423 NR Description: putative 2-oxoglutarate-dependent oxygenase
  misc_feature (1)..(265): NCBI GI NO: 40253419 NR Description: putative 2-oxoglutarate-dependent oxygenase
  misc_feature (1)..(255): NCBI GI NO: 30679748 NR Description: 2-oxoglutarate-dependent dioxygenase, putative
  misc_feature (1)..(263): NCBI GI NO: 13878119 NR Description: putative oxidoreductase [Arabidopsis thaliana]
  misc_feature (1)..(263): NCBI GI NO: 15221545 NR Description: oxidoreductase, putative; protein id: At1g06650
  misc_feature (1)..(274): NCBI GI NO: 40253431 NR Description: putative 2-oxoglutarate-dependent oxygenase
  misc_feature (1)..(255): NCBI GI NO: 15221544 NR Description: oxidoreductase, putative; protein id: At1g06640
  misc_feature (1)..(263): NCBI GI NO: 15218794 NR Description: putative 1-aminocyclopropane-1-carboxylate oxidase
  misc_feature (1)..(263): NCBI GI NO: 5031283 NR Description: unknown [Prunus armeniaca]
MASMLSGVRQFNEGSLEAKQALYSRDPARNVRFASNFDLFESAAADWRDTLYCKIAPDPAPRELVPEPLRNVMMEYGEELTKLARSMFELLSESLGMPSDHLHKMECMQQLHIVCQYYPPCPEPHLTIGVRKHSDTGFFTILLQDGMGGLQVLVDRGGGRQTWVDVTPRPGALMVNMGSFLQLVTNDRYKSVDHRVPANKSSDTARVSVAAFFNPDEKRTERLYGPIPDPSKPPLYRSVTFPDFIAKFNSIGLDGRVLDHFRLEDDGPTRLAAPAHHV

SEQ ID NO: 23622 - DNA, 1186 bp, Zea mays subsp. mays
  misc_feature (1)..(1186): Ceres Seq. ID no. 12405834
aaaagtcccacttagacaatacgagtggagtggtctcatagatagcgctacgagcagtagaaaccgccgccactaggctaggagtggaagcctcgggccccggcagcagccatggcggcgttcctggcgcctccctgcacttccttctatcgctcgtccgcattccttaccccctgttcctcgaatcgccggagtacagcgctaagggcggcggccgttcgtgggtcggcggtgacgcgggcccagcggacggtctccgctaggtgggtcccatccaggttagcggtggcgaggccggcggccaggaaggcgtgcctagaggagcttgatacaaccaacatgctccttcgccagcgcatcgtcttcctgggttccccggtggatgatacaagtgctgatctcattatcagccaactcctactattggatgcagaggaccagactaaagatattaaattgtttatcaactcacctggaggctctataacagcagggatgggagtatatgatgctatgaaattttgcaaagctgatgtgtcaactgtttgctttggattggcggcttcaatgggtgcatttttacttgctgctgggacaaagggtaagaggtactgcatgccaaatgcgaggattatgatccatcagccatcaggtggcgctggcgggaaagtcacagagatgggactacagataagagagatgatgtacgaaaagattaagatcaataaaataatgtcgagaattactggaaaatctgaggagcagattgatgaagacacgaagtttgattatttcatgagtccttcggaagccaaggattatgggatagttgacaatatcatagatgaggggaaaccagggttggtagctcccttggcaggatctgttccgcctcccaaatcgcgtgtgtggtacttgtggaaggcttcggggccgaccaggaagatcatgaaacatctaccttcataggagaaactaattcacaatggtaacggaagtgcaactggagatgatggaaagctcaaggaggcaacggcaacttgaagacattttaggtgataaatagtaggtcgataatagaatggcttagtgcattacctgtattttaaatcattgtttgaatacagattattggaggatgttaatacagtgcagtattttggatgctgcgttttcatggggtgct

SEQ ID NO: 23623 - protein, 285 aa, Zea mays subsp. mays
  peptide (1)..(285): Ceres Seq. ID no. 12405835
  misc_feature (69)..(247): Pfam Name: Pfam Description:  Clp protease
  misc_feature (1)..(285): NCBI GI NO: 34914540 NR Description: putative ATP-dependent Clp protease
  misc_feature (21)..(285): NCBI GI NO: 18408572 NR Description: ATP-dependent Clp protease proteolytic subunit
  misc_feature (21)..(285): NCBI GI NO: 25456012 NR Description: probable ATP-dependent clp proteinase (EC 3
  misc_feature (42)..(285): NCBI GI NO: 6069464 NR Description: S-locus protein 2 [Brassica rapa]
  misc_feature (21)..(285): NCBI GI NO: 13899067 NR Description: ATP-dependent Clp protease; nClpP3
  misc_feature (43)..(285): NCBI GI NO: 15864561 NR Description: ClpP putative protein [Brassica napus]
  misc_feature (43)..(285): NCBI GI NO: 7657879 NR Description: ClpP [Brassica napus var. napus]
  misc_feature (43)..(285): NCBI GI NO: 17028170 NR Description: ClpP [Brassica oleracea]
  misc_feature (129)..(285): NCBI GI NO: 21449427 NR Description: ATP-dependent Clp protease
  misc_feature (73)..(250): NCBI GI NO: 17228733 NR Description: ATP-dependent Clp protease proteolytic subunit
MAAFLAPPCTSFYRSSAFLTPCSSNRRSTALRAAAVRGSAVTRAQRTVSARWVPSRLAVARPAARKACLEELDTTNMLLRQRIVFLGSPVDDTSADLIISQLLLLDAEDQTKDIKLFINSPGGSITAGMGVYDAMKFCKADVSTVCFGLAASMGAFLLAAGTKGKRYCMPNARIMIHQPSGGAGGKVTEMGLQIREMMYEKIKINKIMSRITGKSEEQIDEDTKFDYFMSPSEAKDYGIVDNIIDEGKPGLVAPLAGSVPPPKSRVWYLWKASGPTRKIMKHLPS

SEQ ID NO: 23624 - protein, 209 aa, Zea mays subsp. mays
  peptide (1)..(209): Ceres Seq. ID no. 12405836
  misc_feature (1)..(171): Pfam Name: Pfam Description:  Clp protease
  misc_feature (1)..(209): NCBI GI NO: 34914540 NR Description: putative ATP-dependent Clp protease
  misc_feature (1)..(209): NCBI GI NO: 18408572 NR Description: ATP-dependent Clp protease proteolytic subunit
  misc_feature (1)..(209): NCBI GI NO: 25456012 NR Description: probable ATP-dependent clp proteinase (EC 3
  misc_feature (1)..(209): NCBI GI NO: 6069464 NR Description: S-locus protein 2 [Brassica rapa]
  misc_feature (1)..(209): NCBI GI NO: 13899067 NR Description: ATP-dependent Clp protease; nClpP3
  misc_feature (1)..(209): NCBI GI NO: 15864561 NR Description: ClpP putative protein [Brassica napus]
  misc_feature (1)..(209): NCBI GI NO: 7657879 NR Description: ClpP [Brassica napus var. napus]
  misc_feature (1)..(209): NCBI GI NO: 17028170 NR Description: ClpP [Brassica oleracea]
  misc_feature (53)..(209): NCBI GI NO: 21449427 NR Description: ATP-dependent Clp protease
  misc_feature (1)..(174): NCBI GI NO: 17228733 NR Description: ATP-dependent Clp protease proteolytic subunit
MLLRQRIVFLGSPVDDTSADLIISQLLLLDAEDQTKDIKLFINSPGGSITAGMGVYDAMKFCKADVSTVCFGLAASMGAFLLAAGTKGKRYCMPNARIMIHQPSGGAGGKVTEMGLQIREMMYEKIKINKIMSRITGKSEEQIDEDTKFDYFMSPSEAKDYGIVDNIIDEGKPGLVAPLAGSVPPPKSRVWYLWKASGPTRKIMKHLPS

SEQ ID NO: 23625 - protein, 157 aa, Zea mays subsp. mays
  peptide (1)..(157): Ceres Seq. ID no. 12405837
  misc_feature (1)..(119): Pfam Name: Pfam Description:  Clp protease
  misc_feature (1)..(157): NCBI GI NO: 34914540 NR Description: putative ATP-dependent Clp protease
  misc_feature (1)..(157): NCBI GI NO: 18408572 NR Description: ATP-dependent Clp protease proteolytic subunit
  misc_feature (1)..(157): NCBI GI NO: 25456012 NR Description: probable ATP-dependent clp proteinase (EC 3
  misc_feature (1)..(157): NCBI GI NO: 6069464 NR Description: S-locus protein 2 [Brassica rapa]
  misc_feature (1)..(157): NCBI GI NO: 13899067 NR Description: ATP-dependent Clp protease; nClpP3
  misc_feature (1)..(157): NCBI GI NO: 15864561 NR Description: ClpP putative protein [Brassica napus]
  misc_feature (1)..(157): NCBI GI NO: 7657879 NR Description: ClpP [Brassica napus var. napus]
  misc_feature (1)..(157): NCBI GI NO: 17028170 NR Description: ClpP [Brassica oleracea]
  misc_feature (1)..(157): NCBI GI NO: 21449427 NR Description: ATP-dependent Clp protease
  misc_feature (1)..(122): NCBI GI NO: 17228733 NR Description: ATP-dependent Clp protease proteolytic subunit
MGVYDAMKFCKADVSTVCFGLAASMGAFLLAAGTKGKRYCMPNARIMIHQPSGGAGGKVTEMGLQIREMMYEKIKINKIMSRITGKSEEQIDEDTKFDYFMSPSEAKDYGIVDNIIDEGKPGLVAPLAGSVPPPKSRVWYLWKASGPTRKIMKHLPS

SEQ ID NO: 23626 - DNA, 1823 bp, Zea mays subsp. mays
  misc_feature (1)..(1823): Ceres Seq. ID no. 12405830
cccgtccttccctccgcctccgcctccgcccccgcccccgcccacgcccactcctcgctgccaccactcctgtcacctcttcccgcgccgacgcagccgccatggaccccgtcgccacatgggggctaaccccgctcgcgggcgccgacccggagatctacgacctcctggagcgcgagaagcggcgccagcgtcgcggcatcgagctcatcgcctccgagaacttcacctccttcgccgtcatggaggcgctcggctccgcgctcactaacaagtactccgagggcatgcccggcgcccgctactacggcggcaacgacgtcatcgacgagatcgagaacctctgccggtcacgcgcgctcgctgccttccaccttgacgccgcgtcctggggcgtcaacgtgcagccctactcgggctcccccgccaacttcgccgcctacaccgcgctgctcaacccgcacgaccggatcatggggctcgaccttccctccggcggacacctcactcacgggtactacacggccggcggtaagaagatctccgccacctcgatctactttgagagcctgccgtacaaggtgagcgccgcaacggggtacatcgactacgagaagctcgaggagaaggcacttgacttccgccccaagctcatcatctgcggtggcagtgcgtacccgagggactgggattacgccaagctcagggccgtcgccgacaaggtcggggccctgctgctctgcgacatggcgcacatcagcgggctcgtcgccgcgcaggaagctgcaaatccttttgaatattgtgatgtggttaccacaaccacgcacaagtccctcagagggccaagggctggcatgatcttctacaggaaaggccctaagccccccaagaagggccagcctgagggtgctgtttatgattacgaagacaagatcaactttgcagtgttcccatctctccaaggtggccctcacaaccaccagattgctgcacttgctgttgctctacagcaaactatgtcgcctggcttcaaggcctatgcaaagcaagtgaaggccaatgctgttgcaattggaaactatctcatgagcaagggctacaagatggtgactgatggaactgagaaccaccttgttctctgggatctccgcccccttggcttgactggaaacaaggtcgaaaagctatgtgatctttgccacatcacattgaacaagaatgctgtcttcggtgacagcagtgcattgtctccgggtggtgtccgcattggcgcgccagcaatgacctcgaggggtctactggagaaggatttcgagcagattggggagttcctccaccaggcagtgaccatctgcctgaacatccagaaggagtacggcaagctcctcaaggacttcaacaagggcctggtgaacaacaaggacatcgagaacctcaaggtccaggtggagaagtttgccgactccttcgacatgcctgggttcacgcttgagagcatgaaatacaaggagtagatatgcctctttcatgcgcggcaaggtcctcctgtaccgatgtctttccttgtggtggcgcagggtgccatggcactgcattgccgccacacttacgatgatgatgatgggttatggattttgtctacaatgtcagcaggataggctcacaattgccccctgccctccggtttggtcgcctctcaggttttcatttggtagttgttcgcagggaaccatatgagaattgcaatgtcaatcaggtgtttgccaataataattgggtggtttctgctaaaaaaaaaaaaaacaaaaaaaaaaaaaaaa

SEQ ID NO: 23627 - protein, 504 aa, Zea mays subsp. mays
  peptide (1)..(504): Ceres Seq. ID no. 12405831
  misc_feature (45)..(445): Pfam Name: Pfam Description:  Serine hydroxymethyltransferase
  misc_feature (34)..(504): NCBI GI NO: 15236375 NR Description: hydroxymethyltransferase; protein id: At4g13930
  misc_feature (34)..(504): NCBI GI NO: 21592544 NR Description: hydroxymethyltransferase [Arabidopsis thaliana]
  misc_feature (34)..(504): NCBI GI NO: 11762130 NR Description: AT4g13930 [Arabidopsis thaliana]
  misc_feature (34)..(501): NCBI GI NO: 15236371 NR Description: glycine hydroxymethyltransferase - like protein
  misc_feature (11)..(493): NCBI GI NO: 18400090 NR Description: putative hydroxymethyltransferase
  misc_feature (11)..(493): NCBI GI NO: 25286207 NR Description: probable hydroxymethyltransferase, 49598-47322
  misc_feature (11)..(493): NCBI GI NO: 21537165 NR Description: putative hydroxymethyltransferase
  misc_feature (37)..(497): NCBI GI NO: 15219182 NR Description: glycine hydroxymethyltransferase, putative
  misc_feature (45)..(503): NCBI GI NO: 17066746 NR Description: serine hydroxymethyltransferase
  misc_feature (45)..(494): NCBI GI NO: 18418028 NR Description: glycine hydroxymethyltransferase (EC 2
RPSLRLRLRPRPRPRPLLAATTPVTSSRADAAAMDPVATWGLTPLAGADPEIYDLLEREKRRQRRGIELIASENFTSFAVMEALGSALTNKYSEGMPGARYYGGNDVIDEIENLCRSRALAAFHLDAASWGVNVQPYSGSPANFAAYTALLNPHDRIMGLDLPSGGHLTHGYYTAGGKKISATSIYFESLPYKVSAATGYIDYEKLEEKALDFRPKLIICGGSAYPRDWDYAKLRAVADKVGALLLCDMAHISGLVAAQEAANPFEYCDVVTTTTHKSLRGPRAGMIFYRKGPKPPKKGQPEGAVYDYEDKINFAVFPSLQGGPHNHQIAALAVALQQTMSPGFKAYAKQVKANAVAIGNYLMSKGYKMVTDGTENHLVLWDLRPLGLTGNKVEKLCDLCHITLNKNAVFGDSSALSPGGVRIGAPAMTSRGLLEKDFEQIGEFLHQAVTICLNIQKEYGKLLKDFNKGLVNNKDIENLKVQVEKFADSFDMPGFTLESMKYKE

SEQ ID NO: 23628 - protein, 471 aa, Zea mays subsp. mays
  peptide (1)..(471): Ceres Seq. ID no. 12405832
  misc_feature (12)..(412): Pfam Name: Pfam Description:  Serine hydroxymethyltransferase
  misc_feature (1)..(471): NCBI GI NO: 15236375 NR Description: hydroxymethyltransferase; protein id: At4g13930
  misc_feature (1)..(471): NCBI GI NO: 21592544 NR Description: hydroxymethyltransferase [Arabidopsis thaliana]
  misc_feature (1)..(471): NCBI GI NO: 11762130 NR Description: AT4g13930 [Arabidopsis thaliana]
  misc_feature (1)..(468): NCBI GI NO: 15236371 NR Description: glycine hydroxymethyltransferase - like protein
  misc_feature (1)..(460): NCBI GI NO: 18400090 NR Description: putative hydroxymethyltransferase
  misc_feature (1)..(460): NCBI GI NO: 25286207 NR Description: probable hydroxymethyltransferase, 49598-47322
  misc_feature (1)..(460): NCBI GI NO: 21537165 NR Description: putative hydroxymethyltransferase
  misc_feature (4)..(464): NCBI GI NO: 15219182 NR Description: glycine hydroxymethyltransferase, putative
  misc_feature (12)..(470): NCBI GI NO: 17066746 NR Description: serine hydroxymethyltransferase
  misc_feature (12)..(461): NCBI GI NO: 18418028 NR Description: glycine hydroxymethyltransferase (EC 2
MDPVATWGLTPLAGADPEIYDLLEREKRRQRRGIELIASENFTSFAVMEALGSALTNKYSEGMPGARYYGGNDVIDEIENLCRSRALAAFHLDAASWGVNVQPYSGSPANFAAYTALLNPHDRIMGLDLPSGGHLTHGYYTAGGKKISATSIYFESLPYKVSAATGYIDYEKLEEKALDFRPKLIICGGSAYPRDWDYAKLRAVADKVGALLLCDMAHISGLVAAQEAANPFEYCDVVTTTTHKSLRGPRAGMIFYRKGPKPPKKGQPEGAVYDYEDKINFAVFPSLQGGPHNHQIAALAVALQQTMSPGFKAYAKQVKANAVAIGNYLMSKGYKMVTDGTENHLVLWDLRPLGLTGNKVEKLCDLCHITLNKNAVFGDSSALSPGGVRIGAPAMTSRGLLEKDFEQIGEFLHQAVTICLNIQKEYGKLLKDFNKGLVNNKDIENLKVQVEKFADSFDMPGFTLESMKYKE

SEQ ID NO: 23629 - protein, 424 aa, Zea mays subsp. mays
  peptide (1)..(424): Ceres Seq. ID no. 12405833
  misc_feature (1)..(365): Pfam Name: Pfam Description:  Serine hydroxymethyltransferase
  misc_feature (1)..(424): NCBI GI NO: 15236375 NR Description: hydroxymethyltransferase; protein id: At4g13930
  misc_feature (1)..(424): NCBI GI NO: 21592544 NR Description: hydroxymethyltransferase [Arabidopsis thaliana]
  misc_feature (1)..(424): NCBI GI NO: 11762130 NR Description: AT4g13930 [Arabidopsis thaliana]
  misc_feature (1)..(421): NCBI GI NO: 15236371 NR Description: glycine hydroxymethyltransferase - like protein
  misc_feature (1)..(413): NCBI GI NO: 18400090 NR Description: putative hydroxymethyltransferase
  misc_feature (1)..(413): NCBI GI NO: 25286207 NR Description: probable hydroxymethyltransferase, 49598-47322
  misc_feature (1)..(413): NCBI GI NO: 21537165 NR Description: putative hydroxymethyltransferase
  misc_feature (1)..(417): NCBI GI NO: 15219182 NR Description: glycine hydroxymethyltransferase, putative
  misc_feature (1)..(423): NCBI GI NO: 17066746 NR Description: serine hydroxymethyltransferase
  misc_feature (1)..(414): NCBI GI NO: 18418028 NR Description: glycine hydroxymethyltransferase (EC 2
MEALGSALTNKYSEGMPGARYYGGNDVIDEIENLCRSRALAAFHLDAASWGVNVQPYSGSPANFAAYTALLNPHDRIMGLDLPSGGHLTHGYYTAGGKKISATSIYFESLPYKVSAATGYIDYEKLEEKALDFRPKLIICGGSAYPRDWDYAKLRAVADKVGALLLCDMAHISGLVAAQEAANPFEYCDVVTTTTHKSLRGPRAGMIFYRKGPKPPKKGQPEGAVYDYEDKINFAVFPSLQGGPHNHQIAALAVALQQTMSPGFKAYAKQVKANAVAIGNYLMSKGYKMVTDGTENHLVLWDLRPLGLTGNKVEKLCDLCHITLNKNAVFGDSSALSPGGVRIGAPAMTSRGLLEKDFEQIGEFLHQAVTICLNIQKEYGKLLKDFNKGLVNNKDIENLKVQVEKFADSFDMPGFTLESMKYKE

SEQ ID NO: 23630 - DNA, 1492 bp, Zea mays subsp. mays
  misc_feature (1)..(1492): Ceres Seq. ID no. 12349916
ctccccgatttccttccccactctgtcagtctagtgccccgcgcgcgctctctcgccgcctcgccgccggcgacgagcttgagctcgagctcgagctggtttctcgtatcgaagacgcggccgcggtatggatcccatgaacgtagacaacggcggctgcggcggccttgacgcgcagatcgagcagctgatgcagtgccgcccgctcgccgagcaggaggttaaggccctgtgcgagaaggccaaggagatattgatggaggaaagcaacgttcagcctgtcaagagtccagttacaatatgtggtgatatacatggacaattccatgatcttgtagagcttttccgaattggtgggaagtgtccagacaccaattacttatttatgggggattatgtagatcgtggctactattctgttgagactgtcactctgctagtagccactaaaagtgaggtacccacatcgaattacaatccttcgtggaaaccatgagagtcggcagatcacacaggtgtatggattctatgacgaatgtctacgcaagtatggcaatgcaaatctatggaagacatttacggatctttttgattattttcctctgacagctctggtggaatctgagattttctgccttcatggtggcttatccccatcaattgaaaatcttgatagtgtgcgcagcttagatcgagtccaagaggttcctcatgagggacctatgtgcgatcttttatggtcagatccggacgatcgatgtggttggggcatatccccacctggtgctggctacacttttggccaggacatatcggagcagtttaatcacacaaacaatctcaaacttgtagctcgggctcatcaattagttatggagggatataactgggctcatgaacagaaggttgtcaccatattcagtgctccaaactattgctaccgatgcggcaatatggcatccattttggaagttgacgactgcaatagtcacacattcatacagtttgacccagcccctaggagaggcgagccagatgtgacacgaagaacaccggactatttcctttgagttgtggtgttaccaattcccagcttgtgctgtgataatcgatgtcaacgtctgctggatcaagggccagacagaaataacaggggaataccaaagcactatgcgaaacttgaggtcctcattgccattggtcagtgcaagagatgtctgcaatcctgagagaaagcaattgtgccaagccatgcccgagtttcagccttttcaggtgatatagaggagcggacatccatttgttacagctctcgccgccctcccttttatgcactttttacagaggcttggaattggcaaaaaagaccgaactttcaattgtacttctgtagcgtaagcttgtaccaataggcgtgtactaatttgtatcatcattcatccatggcaagacattgttaaactccttttcatcagtaaattaattttttgtt

SEQ ID NO: 23631 - protein, 122 aa, Zea mays subsp. mays
  peptide (1)..(122): Ceres Seq. ID no. 12349917
  misc_feature (54)..(112): Pfam Name: Pfam Description:  Calcineurin-like phosphoesterase
  misc_feature (51)..(112): NCBI GI NO: 19071628 NR Description: serine/threonine protein phosphatase PP2A-4catalytic subunit
  misc_feature (1)..(57): NCBI GI NO: 19071628 NR Description: serine/threonine protein phosphatase PP2A-4catalytic subunit
  misc_feature (8)..(112): NCBI GI NO: 11134154 NR Description: Serine/threonine protein phosphatase PP2A-4catalytic subunit
  misc_feature (12)..(112): NCBI GI NO: 11134218 NR Description: Serine/threonine protein phosphatase PP2A-2catalytic subunit
  misc_feature (14)..(112): NCBI GI NO: 418777 NR Description: phosphoprotein phosphatase (EC 3
  misc_feature (14)..(112): NCBI GI NO: 18410971 NR Description: protein phosphatase PP2A catalytic subunit
  misc_feature (14)..(112): NCBI GI NO: 18405985 NR Description: protein phosphatase 2A
  misc_feature (1)..(112): NCBI GI NO: 11133821 NR Description: Serine/threonine protein phosphatase PP2A catalytic subunit
  misc_feature (14)..(112): NCBI GI NO: 548441 NR Description: SERINE/THREONINE PROTEIN PHOSPHATASE PP2A CATALYTICSUBUNIT
  misc_feature (14)..(112): NCBI GI NO: 7248363 NR Description: type 2A protein phosphatase-3 [Vicia faba]
MDPMNVDNGGCGGLDAQIEQLMQCRPLAEQEVKALCEKAKEILMEESNVQPVKSPVTICGDIHGQFHDLVELFRIGGKCPDTNYLFMGDYVDRGYYSVETVTLLVATKSEVPTSNYNPSWKP

SEQ ID NO: 23632 - protein, 119 aa, Zea mays subsp. mays
  peptide (1)..(119): Ceres Seq. ID no. 12349918
  misc_feature (51)..(109): Pfam Name: Pfam Description:  Calcineurin-like phosphoesterase
  misc_feature (48)..(109): NCBI GI NO: 19071628 NR Description: serine/threonine protein phosphatase PP2A-4catalytic subunit
  misc_feature (1)..(54): NCBI GI NO: 19071628 NR Description: serine/threonine protein phosphatase PP2A-4catalytic subunit
  misc_feature (5)..(109): NCBI GI NO: 11134154 NR Description: Serine/threonine protein phosphatase PP2A-4catalytic subunit
  misc_feature (9)..(109): NCBI GI NO: 11134218 NR Description: Serine/threonine protein phosphatase PP2A-2catalytic subunit
  misc_feature (11)..(109): NCBI GI NO: 418777 NR Description: phosphoprotein phosphatase (EC 3
  misc_feature (11)..(109): NCBI GI NO: 18405985 NR Description: protein phosphatase 2A
  misc_feature (11)..(109): NCBI GI NO: 18410971 NR Description: protein phosphatase PP2A catalytic subunit
  misc_feature (1)..(109): NCBI GI NO: 11133821 NR Description: Serine/threonine protein phosphatase PP2A catalytic subunit
  misc_feature (11)..(109): NCBI GI NO: 548441 NR Description: SERINE/THREONINE PROTEIN PHOSPHATASE PP2A CATALYTICSUBUNIT
  misc_feature (11)..(109): NCBI GI NO: 7248363 NR Description: type 2A protein phosphatase-3 [Vicia faba]
MNVDNGGCGGLDAQIEQLMQCRPLAEQEVKALCEKAKEILMEESNVQPVKSPVTICGDIHGQFHDLVELFRIGGKCPDTNYLFMGDYVDRGYYSVETVTLLVATKSEVPTSNYNPSWKP

SEQ ID NO: 23633 - protein, 115 aa, Zea mays subsp. mays
  peptide (1)..(115): Ceres Seq. ID no. 12349919
  misc_feature (1)..(51): Pfam Name: Pfam Description:  Calcineurin-like phosphoesterase
  misc_feature (1)..(115): NCBI GI NO: 19071628 NR Description: serine/threonine protein phosphatase PP2A-4catalytic subunit
  misc_feature (1)..(115): NCBI GI NO: 11134154 NR Description: Serine/threonine protein phosphatase PP2A-4catalytic subunit
  misc_feature (1)..(115): NCBI GI NO: 11134218 NR Description: Serine/threonine protein phosphatase PP2A-2catalytic subunit
  misc_feature (1)..(115): NCBI GI NO: 418777 NR Description: phosphoprotein phosphatase (EC 3
  misc_feature (1)..(115): NCBI GI NO: 18405985 NR Description: protein phosphatase 2A
  misc_feature (1)..(115): NCBI GI NO: 18410971 NR Description: protein phosphatase PP2A catalytic subunit
  misc_feature (1)..(115): NCBI GI NO: 11133821 NR Description: Serine/threonine protein phosphatase PP2A catalytic subunit
  misc_feature (1)..(115): NCBI GI NO: 548441 NR Description: SERINE/THREONINE PROTEIN PHOSPHATASE PP2A CATALYTICSUBUNIT
  misc_feature (1)..(115): NCBI GI NO: 7248363 NR Description: type 2A protein phosphatase-3 [Vicia faba]
  misc_feature (1)..(115): NCBI GI NO: 11133837 NR Description: Serine/threonine protein phosphatase PP2A-5catalytic subunit
MCDLLWSDPDDRCGWGISPPGAGYTFGQDISEQFNHTNNLKLVARAHQLVMEGYNWAHEQKVVTIFSAPNYCYRCGNMASILEVDDCNSHTFIQFDPAPRRGEPDVTRRTPDYFL

SEQ ID NO: 23634 - DNA, 1240 bp, Zea mays subsp. mays
  misc_feature (1)..(1240): Ceres Seq. ID no. 12355975
gctagctatcccctcatcgtcttctcttatcctcactcgcgtagtcgcctccctcctcttctcttccgcggcctggtgcaagaccaagagggaggaggaggccacgatggccggcagcgtcagcaacggcagcgggaagagcctggcgcgctggctgcgggagaacgggttcgacgacgacgccgtggcgcgcatgtccaggcggtgcaggaacctgcacagcctcgacgccggcgaggccccgggcgtgtgggactacctcctgaccggcgtcaagatggagcggcggaagctgcggcacgtggtggccaagtgccccaagctgctcaccctgtccgtggacggcaagctcgcgcccacggtgcagtgcctcgccacgctgcaggccaggcccggggaggtggcgcaggccatcgccaagttcccccagatactgttccacagcgtcgaggagaagctctgcccgctcctcgccttcttccagacgctcggcgtctccgagaggcagctcgccaagctgctcatggtcaacccgcgcctcatcagctacagcatcgaggccaagttctcgcagaccgtcggcttcctcgccggcctcggcgtcgacagggaaggcatgatcggcaagatcctcaccaaggagccgtatatcatggggtacagcgtcgacaagcggttgcgccccactgccgagttcctcaagtcggaagtcgggttacaggggccagatctccagagggtggtcatgaccttccccgatatactgtcgcgagacgtggataagatcctgcggcccaatctggcgttcctacagagccgcggattcagcagggatcaggtcacggcactggtagctggttaccctcctgttctcatcaagagcatcaaacattgcctggagccaaggatcaagttcctggtcgaagagatggggcgggacatgggcgaggtggtaggttacccccagttctttcgccatggcctcaagaggagcctggagtaccgccacaaggtgcttaagcagatgaactcgagctgcagcctcagcgagatgctagactgtaaccacaagaagtttgccatgaaattcggtttggtcgcagcagtttaggtactcaacttttctctagtccaatccaaggtagtttgttttattctcaggtgaatctttccgtttgtaccgtcaggttgtgttgttcttttgaacatttgggcaatgataactaataattcaaggtcc

SEQ ID NO: 23635 - protein, 369 aa, Zea mays subsp. mays
  peptide (1)..(369): Ceres Seq. ID no. 12355976
  misc_feature (51)..(359): Pfam Name: Pfam Description:  mTERF
  misc_feature (36)..(369): NCBI GI NO: 34905080 NR Description: P0686C03.23
  misc_feature (40)..(364): NCBI GI NO: 15233700 NR Description: putative protein; protein id: At4g38160
  misc_feature (133)..(365): NCBI GI NO: 33589698 NR Description: At1g78930 [Arabidopsis thaliana]
  misc_feature (133)..(365): NCBI GI NO: 30699372 NR Description: expressed protein [Arabidopsis thaliana]
  misc_feature (88)..(359): NCBI GI NO: 18406426 NR Description: expressed protein; protein id: At2g44020
  misc_feature (72)..(362): NCBI GI NO: 15236230 NR Description: hypothetical protein; protein id: At4g02990.1
  misc_feature (133)..(365): NCBI GI NO: 7487916 NR Description: hypothetical protein YUP8H12R
  misc_feature (58)..(324): NCBI GI NO: 18414260 NR Description: hypothetical protein; protein id: At4g14605.1
  misc_feature (58)..(324): NCBI GI NO: 7485117 NR Description: hypothetical protein - Arabidopsis thaliana
  misc_feature (51)..(362): NCBI GI NO: 34394417 NR Description: hypothetical protein
LAIPSSSSLILTRVVASLLFSSAAWCKTKREEEATMAGSVSNGSGKSLARWLRENGFDDDAVARMSRRCRNLHSLDAGEAPGVWDYLLTGVKMERRKLRHVVAKCPKLLTLSVDGKLAPTVQCLATLQARPGEVAQAIAKFPQILFHSVEEKLCPLLAFFQTLGVSERQLAKLLMVNPRLISYSIEAKFSQTVGFLAGLGVDREGMIGKILTKEPYIMGYSVDKRLRPTAEFLKSEVGLQGPDLQRVVMTFPDILSRDVDKILRPNLAFLQSRGFSRDQVTALVAGYPPVLIKSIKHCLEPRIKFLVEEMGRDMGEVVGYPQFFRHGLKRSLEYRHKVLKQMNSSCSLSEMLDCNHKKFAMKFGLVAAV

SEQ ID NO: 23636 - protein, 334 aa, Zea mays subsp. mays
  peptide (1)..(334): Ceres Seq. ID no. 12355977
  misc_feature (16)..(324): Pfam Name: Pfam Description:  mTERF
  misc_feature (1)..(334): NCBI GI NO: 34905080 NR Description: P0686C03.23
  misc_feature (5)..(329): NCBI GI NO: 15233700 NR Description: putative protein; protein id: At4g38160
  misc_feature (98)..(330): NCBI GI NO: 33589698 NR Description: At1g78930 [Arabidopsis thaliana]
  misc_feature (98)..(330): NCBI GI NO: 30699372 NR Description: expressed protein [Arabidopsis thaliana]
  misc_feature (53)..(324): NCBI GI NO: 18406426 NR Description: expressed protein; protein id: At2g44020
  misc_feature (37)..(327): NCBI GI NO: 15236230 NR Description: hypothetical protein; protein id: At4g02990.1
  misc_feature (98)..(330): NCBI GI NO: 7487916 NR Description: hypothetical protein YUP8H12R
  misc_feature (23)..(289): NCBI GI NO: 18414260 NR Description: hypothetical protein; protein id: At4g14605.1
  misc_feature (23)..(289): NCBI GI NO: 7485117 NR Description: hypothetical protein - Arabidopsis thaliana
  misc_feature (16)..(327): NCBI GI NO: 34394417 NR Description: hypothetical protein
MAGSVSNGSGKSLARWLRENGFDDDAVARMSRRCRNLHSLDAGEAPGVWDYLLTGVKMERRKLRHVVAKCPKLLTLSVDGKLAPTVQCLATLQARPGEVAQAIAKFPQILFHSVEEKLCPLLAFFQTLGVSERQLAKLLMVNPRLISYSIEAKFSQTVGFLAGLGVDREGMIGKILTKEPYIMGYSVDKRLRPTAEFLKSEVGLQGPDLQRVVMTFPDILSRDVDKILRPNLAFLQSRGFSRDQVTALVAGYPPVLIKSIKHCLEPRIKFLVEEMGRDMGEVVGYPQFFRHGLKRSLEYRHKVLKQMNSSCSLSEMLDCNHKKFAMKFGLVAAV

SEQ ID NO: 23637 - protein, 305 aa, Zea mays subsp. mays
  peptide (1)..(305): Ceres Seq. ID no. 12355978
  misc_feature (1)..(295): Pfam Name: Pfam Description:  mTERF
  misc_feature (1)..(305): NCBI GI NO: 34905080 NR Description: P0686C03.23
  misc_feature (1)..(300): NCBI GI NO: 15233700 NR Description: putative protein; protein id: At4g38160
  misc_feature (69)..(301): NCBI GI NO: 33589698 NR Description: At1g78930 [Arabidopsis thaliana]
  misc_feature (69)..(301): NCBI GI NO: 30699372 NR Description: expressed protein [Arabidopsis thaliana]
  misc_feature (24)..(295): NCBI GI NO: 18406426 NR Description: expressed protein; protein id: At2g44020
  misc_feature (8)..(298): NCBI GI NO: 15236230 NR Description: hypothetical protein; protein id: At4g02990.1
  misc_feature (69)..(301): NCBI GI NO: 7487916 NR Description: hypothetical protein YUP8H12R
  misc_feature (1)..(260): NCBI GI NO: 18414260 NR Description: hypothetical protein; protein id: At4g14605.1
  misc_feature (1)..(260): NCBI GI NO: 7485117 NR Description: hypothetical protein - Arabidopsis thaliana
  misc_feature (1)..(298): NCBI GI NO: 34394417 NR Description: hypothetical protein
MSRRCRNLHSLDAGEAPGVWDYLLTGVKMERRKLRHVVAKCPKLLTLSVDGKLAPTVQCLATLQARPGEVAQAIAKFPQILFHSVEEKLCPLLAFFQTLGVSERQLAKLLMVNPRLISYSIEAKFSQTVGFLAGLGVDREGMIGKILTKEPYIMGYSVDKRLRPTAEFLKSEVGLQGPDLQRVVMTFPDILSRDVDKILRPNLAFLQSRGFSRDQVTALVAGYPPVLIKSIKHCLEPRIKFLVEEMGRDMGEVVGYPQFFRHGLKRSLEYRHKVLKQMNSSCSLSEMLDCNHKKFAMKFGLVAAV

SEQ ID NO: 23638 - DNA, 1411 bp, Zea mays subsp. mays
  misc_feature (1)..(1411): Ceres Seq. ID no. 12357466
agagagagagacaagagagagagagagagagagctaacgatggcgtccagagacgcggccagcagccccaaatcagcgccgcgtcgccatgggccggcggcgcccaagaatggcgccgacctgctcagcccacggttccggtcggctgccgcgctggccggctgggacgaggagtccgtcctccttgccgcgatggtcgtcgacgacaccccagtccgcgactcccgtcgcaagaggcgggcctccacctcctccgtcggcggcagcgccggatccagcaccaggaagaggaggccgcgcaggctgtctccggccaagatcccgccggtggttttcgcgctcgacgacgaaaagtcggacactgcggcagatagcaaatcggaagtgaaggccgccaaggaggaagagaagcctgtccttgtgggcgacaaggaggcgtccggttctggcgagaaagcagtggccgcggcaaacatgccgtgcatggatcggctccgggaggagctctcttgcgcgatttgcctggacatctgctttgagccgaccactacgccttgtggacacagcttctgcatgagatgcttaagacacgctgcagccaagtgcgggaaacggtgtcccaaatgcaggcagttcatcagcagctcgaaatcgtgcaccatcaacactgtgctctggaacaccattcagctcttatttcccagtgaggttgaggcaagaaagggttcgagctcatcaccttcaccatgcgacaaggacgatgtgagagctaataggttctcacaaggtggccccggtatgagaactaggagcaggagcagcggcagcggcttcatcagcagcgagggtaggacaagaagcagcttcatcgaacccggcgccagtgcgaacttcatcgtcagcacatatggcagcgcaagaagcagtaacagcaggaggggcttcgtccctgcctcgcagctgctgttgacaagattagagcaatctgaagatgccgcggcgttggcgtacaggttgcaacaggaggagttcgtgaatgcctttgaggagcctgagcaggagaggcagccacgcgacgccgtgtccacagcacgagacaccctgagagccatggcctcccgggccatccgcctccgtgctagaggctggcctgtttagtactactattgctctgctctgcatggaagttgagacctctgaacatataggcatcggtggggttgatagctctcgacattcactagggactctagaagatgtctgccccacgattgttcacgggaaggcccagcgacagctatgggctcccaactagaggagaagacgcgtaggctcaaagctgctgtcgccggtgagttgtaaaaatgctaaaaatctcattctctaagttttcagatgaagtgcacctagt

SEQ ID NO: 23639 - protein, 385 aa, Zea mays subsp. mays
  peptide (1)..(385): Ceres Seq. ID no. 12357467
  misc_feature (171)..(209): Pfam Name: RING finger Pfam Description: Zinc finger, C3HC4 type
  misc_feature (33)..(288): NCBI GI NO: 11994635 NR Description: gene_id:K1G2
  misc_feature (2)..(288): NCBI GI NO: 15232143 NR Description: hypothetical protein; protein id: At3g27330.1
  misc_feature (167)..(246): NCBI GI NO: 21554128 NR Description: unknown [Arabidopsis thaliana]
  misc_feature (168)..(356): NCBI GI NO: 26379538 NR Description: unnamed protein product [Mus musculus]
  misc_feature (168)..(299): NCBI GI NO: 26343717 NR Description: unnamed protein product [Mus musculus]
  misc_feature (167)..(246): NCBI GI NO: 18394639 NR Description: expressed protein; protein id: At1g18660
  misc_feature (162)..(240): NCBI GI NO: 21706565 NR Description: Similar to tripartite motif protein 25
  misc_feature (89)..(234): NCBI GI NO: 10438137 NR Description: unnamed protein product [Homo sapiens]
  misc_feature (115)..(231): NCBI GI NO: 23487732 NR Description: zinc finger protein-related
  misc_feature (162)..(240): NCBI GI NO: 13905224 NR Description: Unknown (protein for MGC:6886) [Mus musculus]
RERDKRERERELTMASRDAASSPKSAPRRHGPAAPKNGADLLSPRFRSAAALAGWDEESVLLAAMVVDDTPVRDSRRKRRASTSSVGGSAGSSTRKRRPRRLSPAKIPPVVFALDDEKSDTAADSKSEVKAAKEEEKPVLVGDKEASGSGEKAVAAANMPCMDRLREELSCAICLDICFEPTTTPCGHSFCMRCLRHAAAKCGKRCPKCRQFISSSKSCTINTVLWNTIQLLFPSEVEARKGSSSSPSPCDKDDVRANRFSQGGPGMRTRSRSSGSGFISSEGRTRSSFIEPGASANFIVSTYGSARSSNSRRGFVPASQLLLTRLEQSEDAAALAYRLQQEEFVNAFEEPEQERQPRDAVSTARDTLRAMASRAIRLRARGWPV

SEQ ID NO: 23640 - protein, 372 aa, Zea mays subsp. mays
  peptide (1)..(372): Ceres Seq. ID no. 12357468
  misc_feature (158)..(196): Pfam Name: RING finger Pfam Description: Zinc finger, C3HC4 type
  misc_feature (20)..(275): NCBI GI NO: 11994635 NR Description: gene_id:K1G2
  misc_feature (1)..(275): NCBI GI NO: 15232143 NR Description: hypothetical protein; protein id: At3g27330.1
  misc_feature (154)..(233): NCBI GI NO: 21554128 NR Description: unknown [Arabidopsis thaliana]
  misc_feature (155)..(343): NCBI GI NO: 26379538 NR Description: unnamed protein product [Mus musculus]
  misc_feature (155)..(286): NCBI GI NO: 26343717 NR Description: unnamed protein product [Mus musculus]
  misc_feature (154)..(233): NCBI GI NO: 18394639 NR Description: expressed protein; protein id: At1g18660
  misc_feature (149)..(227): NCBI GI NO: 21706565 NR Description: Similar to tripartite motif protein 25
  misc_feature (76)..(221): NCBI GI NO: 10438137 NR Description: unnamed protein product [Homo sapiens]
  misc_feature (102)..(218): NCBI GI NO: 23487732 NR Description: zinc finger protein-related
  misc_feature (149)..(227): NCBI GI NO: 13905224 NR Description: Unknown (protein for MGC:6886) [Mus musculus]
MASRDAASSPKSAPRRHGPAAPKNGADLLSPRFRSAAALAGWDEESVLLAAMVVDDTPVRDSRRKRRASTSSVGGSAGSSTRKRRPRRLSPAKIPPVVFALDDEKSDTAADSKSEVKAAKEEEKPVLVGDKEASGSGEKAVAAANMPCMDRLREELSCAICLDICFEPTTTPCGHSFCMRCLRHAAAKCGKRCPKCRQFISSSKSCTINTVLWNTIQLLFPSEVEARKGSSSSPSPCDKDDVRANRFSQGGPGMRTRSRSSGSGFISSEGRTRSSFIEPGASANFIVSTYGSARSSNSRRGFVPASQLLLTRLEQSEDAAALAYRLQQEEFVNAFEEPEQERQPRDAVSTARDTLRAMASRAIRLRARGWPV

SEQ ID NO: 23641 - protein, 321 aa, Zea mays subsp. mays
  peptide (1)..(321): Ceres Seq. ID no. 12357469
  misc_feature (107)..(145): Pfam Name: RING finger Pfam Description: Zinc finger, C3HC4 type
  misc_feature (1)..(224): NCBI GI NO: 11994635 NR Description: gene_id:K1G2
  misc_feature (1)..(224): NCBI GI NO: 15232143 NR Description: hypothetical protein; protein id: At3g27330.1
  misc_feature (103)..(182): NCBI GI NO: 21554128 NR Description: unknown [Arabidopsis thaliana]
  misc_feature (104)..(292): NCBI GI NO: 26379538 NR Description: unnamed protein product [Mus musculus]
  misc_feature (104)..(235): NCBI GI NO: 26343717 NR Description: unnamed protein product [Mus musculus]
  misc_feature (103)..(182): NCBI GI NO: 18394639 NR Description: expressed protein; protein id: At1g18660
  misc_feature (98)..(176): NCBI GI NO: 21706565 NR Description: Similar to tripartite motif protein 25
  misc_feature (25)..(170): NCBI GI NO: 10438137 NR Description: unnamed protein product [Homo sapiens]
  misc_feature (51)..(167): NCBI GI NO: 23487732 NR Description: zinc finger protein-related
  misc_feature (98)..(176): NCBI GI NO: 13905224 NR Description: Unknown (protein for MGC:6886) [Mus musculus]
MVVDDTPVRDSRRKRRASTSSVGGSAGSSTRKRRPRRLSPAKIPPVVFALDDEKSDTAADSKSEVKAAKEEEKPVLVGDKEASGSGEKAVAAANMPCMDRLREELSCAICLDICFEPTTTPCGHSFCMRCLRHAAAKCGKRCPKCRQFISSSKSCTINTVLWNTIQLLFPSEVEARKGSSSSPSPCDKDDVRANRFSQGGPGMRTRSRSSGSGFISSEGRTRSSFIEPGASANFIVSTYGSARSSNSRRGFVPASQLLLTRLEQSEDAAALAYRLQQEEFVNAFEEPEQERQPRDAVSTARDTLRAMASRAIRLRARGWPV

SEQ ID NO: 23642 - DNA, 1691 bp, Zea mays subsp. mays
  misc_feature (1)..(1691): Ceres Seq. ID no. 12365235
ctgggccgttactagcttagctcatatacgtacgtacgcaggctgcaagtgatcgagaggagcaatataatggctggttcttccatggacactgaagctgcaggcaaggagctcaagcagggcagcggcggcggcggcggctacaccatgccggctactgctcatgcggtggacacagactcgtggcagcaggtggggctgctcctggtgatcggcttcaactgcgcctacgtgctcagcttctccaacctcatgatggtgcccctgggctgggcgtggggcgtcgcctgcctgctgctcgtcggcgccgccgcgtggtacgccaactggctcctcgccggcctccacttcgtcgacggccagaggttcatccgctacagggacctcatgggcttcatattcgggaggaacatgtactacatcacctggttcctgcagttcgcaactctacttctgtgcaacatgggcttcattttgctaggagcaagagcgctcaaggcaatcaacacggagtttacccacaccccagccaggctgcagtggttcatcacggccacgggaatcgtctacttcgccttcgcctacttcgtgccgacgatttctgccatgaggaactggctcgccacgtcggcggcgctgacgttagcttacgacgtcgctctgctggctatcttgatcagagatgggaaatcgaacaagcagaaggactatgacgtccatgccggatcccaagccgagaaggtgttcaacgcgttgggcgccgtcgctgccatcctcgtctgcaacacgtccgggctgctcccggagatacagtcgacggtgcgggagccggcggtgcgcggcatgaggcgggcgctgctgctgcagtacaccgccggcgccgcggggtactacggcatcagcgtggcggggtactgggcgtacgggtcagcggtgtcggagtacctccccaacgagctcggcggcccgaggtgggccgccgtcctcatcaacgccaccgccttcctgcagagcattgtgtcccaacacctgtttacggtgccgatccacgaggcgatggacacgcggctgcagcggctggacgaaggcatattctcccgctacaacctcacgcgccgcgtgcgcgcgggggctcgtcttcggcttcaacgtcttcgtcaccgcgctgttcccgttcatgggggatttcgtcaacctcgtcggctccttagcgctcgtcccgctcaccttcacgttccccagcatggccgtcctcaagatcaaaggcaagagctgtgggagatgtaacagactttggcattggggcatcatagttctgtcctcggctctctgcgttgctaccaccgccgccgccgttcgtttgatcttcaacaatgctaggatctaccacttcttcgccgacatgtagcgagcgagtagtagtgggattgacatgtgtatcgtcaccatgaggtgatagtatggccacttcgttctcaattttttgtttgcttcaagagtggaagggtacggtggtcacttagctcatgtttgataatggcactacatgattaataagcatgcatcatgtacgtagtcatcctatcaaaatttagaaatgagcttattgtaatcgatggaccacctccctctaaccaaacatctctgttttccgtgaaagcttaaaaggcaactcgtgaatgtgttctttt

SEQ ID NO: 23643 - protein, 405 aa, Zea mays subsp. mays
  peptide (1)..(405): Ceres Seq. ID no. 12365236
  misc_feature (1)..(353): NCBI GI NO: 20804893 NR Description: proline transport protein-like
  misc_feature (30)..(392): NCBI GI NO: 11358960 NR Description: proline transport protein [imported] - rice
  misc_feature (27)..(392): NCBI GI NO: 15228183 NR Description: proline transporter 2; protein id: At3g55740
  misc_feature (20)..(392): NCBI GI NO: 15228000 NR Description: putative proline transporter; protein id:At2g36590
  misc_feature (27)..(392): NCBI GI NO: 11358949 NR Description: proline transport protein 2 [imported] - tomato
  misc_feature (9)..(392): NCBI GI NO: 21069018 NR Description: betaine/proline transporter [Avicennia marina]
  misc_feature (27)..(392): NCBI GI NO: 11358950 NR Description: proline transport protein 3 [imported] - tomato
  misc_feature (27)..(392): NCBI GI NO: 21069020 NR Description: betaine/proline transporter [Avicennia marina]
  misc_feature (6)..(392): NCBI GI NO: 21069016 NR Description: betaine/proline transporter [Avicennia marina]
  misc_feature (8)..(403): NCBI GI NO: 15225591 NR Description: proline transporter 1; protein id: At2g39890
MAGSSMDTEAAGKELKQGSGGGGGYTMPATAHAVDTDSWQQVGLLLVIGFNCAYVLSFSNLMMVPLGWAWGVACLLLVGAAAWYANWLLAGLHFVDGQRFIRYRDLMGFIFGRNMYYITWFLQFATLLLCNMGFILLGARALKAINTEFTHTPARLQWFITATGIVYFAFAYFVPTISAMRNWLATSAALTLAYDVALLAILIRDGKSNKQKDYDVHAGSQAEKVFNALGAVAAILVCNTSGLLPEIQSTVREPAVRGMRRALLLQYTAGAAGYYGISVAGYWAYGSAVSEYLPNELGGPRWAAVLINATAFLQSIVSQHLFTVPIHEAMDTRLQRLDEGIFSRYNLTRRVRAGARLRLQRLRHRAVPVHGGFRQPRRLLSARPAHLHVPQHGRPQDQRQELWEM

SEQ ID NO: 23644 - protein, 400 aa, Zea mays subsp. mays
  peptide (1)..(400): Ceres Seq. ID no. 12365237
  misc_feature (1)..(348): NCBI GI NO: 20804893 NR Description: proline transport protein-like
  misc_feature (25)..(387): NCBI GI NO: 11358960 NR Description: proline transport protein [imported] - rice
  misc_feature (22)..(387): NCBI GI NO: 15228183 NR Description: proline transporter 2; protein id: At3g55740
  misc_feature (15)..(387): NCBI GI NO: 15228000 NR Description: putative proline transporter; protein id:At2g36590
  misc_feature (22)..(387): NCBI GI NO: 11358949 NR Description: proline transport protein 2 [imported] - tomato
  misc_feature (4)..(387): NCBI GI NO: 21069018 NR Description: betaine/proline transporter [Avicennia marina]
  misc_feature (22)..(387): NCBI GI NO: 11358950 NR Description: proline transport protein 3 [imported] - tomato
  misc_feature (22)..(387): NCBI GI NO: 21069020 NR Description: betaine/proline transporter [Avicennia marina]
  misc_feature (1)..(387): NCBI GI NO: 21069016 NR Description: betaine/proline transporter [Avicennia marina]
  misc_feature (3)..(398): NCBI GI NO: 15225591 NR Description: proline transporter 1; protein id: At2g39890
MDTEAAGKELKQGSGGGGGYTMPATAHAVDTDSWQQVGLLLVIGFNCAYVLSFSNLMMVPLGWAWGVACLLLVGAAAWYANWLLAGLHFVDGQRFIRYRDLMGFIFGRNMYYITWFLQFATLLLCNMGFILLGARALKAINTEFTHTPARLQWFITATGIVYFAFAYFVPTISAMRNWLATSAALTLAYDVALLAILIRDGKSNKQKDYDVHAGSQAEKVFNALGAVAAILVCNTSGLLPEIQSTVREPAVRGMRRALLLQYTAGAAGYYGISVAGYWAYGSAVSEYLPNELGGPRWAAVLINATAFLQSIVSQHLFTVPIHEAMDTRLQRLDEGIFSRYNLTRRVRAGARLRLQRLRHRAVPVHGGFRQPRRLLSARPAHLHVPQHGRPQDQRQELWEM

SEQ ID NO: 23645 - protein, 379 aa, Zea mays subsp. mays
  peptide (1)..(379): Ceres Seq. ID no. 12365238
  misc_feature (1)..(327): NCBI GI NO: 20804893 NR Description: proline transport protein-like
  misc_feature (4)..(366): NCBI GI NO: 11358960 NR Description: proline transport protein [imported] - rice
  misc_feature (1)..(366): NCBI GI NO: 15228183 NR Description: proline transporter 2; protein id: At3g55740
  misc_feature (1)..(366): NCBI GI NO: 15228000 NR Description: putative proline transporter; protein id:At2g36590
  misc_feature (1)..(366): NCBI GI NO: 11358949 NR Description: proline transport protein 2 [imported] - tomato
  misc_feature (1)..(366): NCBI GI NO: 21069018 NR Description: betaine/proline transporter [Avicennia marina]
  misc_feature (1)..(366): NCBI GI NO: 11358950 NR Description: proline transport protein 3 [imported] - tomato
  misc_feature (1)..(366): NCBI GI NO: 21069020 NR Description: betaine/proline transporter [Avicennia marina]
  misc_feature (1)..(366): NCBI GI NO: 21069016 NR Description: betaine/proline transporter [Avicennia marina]
  misc_feature (1)..(377): NCBI GI NO: 15225591 NR Description: proline transporter 1; protein id: At2g39890
MPATAHAVDTDSWQQVGLLLVIGFNCAYVLSFSNLMMVPLGWAWGVACLLLVGAAAWYANWLLAGLHFVDGQRFIRYRDLMGFIFGRNMYYITWFLQFATLLLCNMGFILLGARALKAINTEFTHTPARLQWFITATGIVYFAFAYFVPTISAMRNWLATSAALTLAYDVALLAILIRDGKSNKQKDYDVHAGSQAEKVFNALGAVAAILVCNTSGLLPEIQSTVREPAVRGMRRALLLQYTAGAAGYYGISVAGYWAYGSAVSEYLPNELGGPRWAAVLINATAFLQSIVSQHLFTVPIHEAMDTRLQRLDEGIFSRYNLTRRVRAGARLRLQRLRHRAVPVHGGFRQPRRLLSARPAHLHVPQHGRPQDQRQELWEM

SEQ ID NO: 23646 - DNA, 1720 bp, Zea mays subsp. mays
  misc_feature (1)..(1720): Ceres Seq. ID no. 12374340
gcacgagaccattacctagaacatcctaatcgaaaaataccttgctgggtcgttgccaaatgccaacgcaggcgccgggcagtgcacgcacatggctgcgcgcgtgggcctgctcccgcacgcgatcctcgtctcctcccgagctctacccacgccccgagctcgcgtcccttatcctcttccacccgtcccttcctacctccgccacgcctcctcctccgcctcccgctcctgccgcgcgtcgccgcgttttgtcgcagtccgcgccatggcttcggggaacccctacgccgccgagctcgccgccgccaagaaggccgttaccctcgccgccaaactctgccagacagttcaacaggatattatgcattctggcgttcaggctaaggcagacaaaagtcctgtcacagttgctgattatggatctcaaatattggtcggtttttccttaaagatggatgtatcatctggaccattttcattggtggctgaagaggactcagatgaattgagaaaagatggcgctgaagaaattttggaagatattactgaccttgtcaatgaaaccatctttgatgatggttcatataacatttcgtttacaaaggaaggtatactctctgcaattgatgatgggaagtctgagggaggtccatctggacgacattgggtgcttgatccgattgacggtactaaaggtttcttgaggggcgaccaatatgccattgcattggctctgcttgatgaaggtaaagttgttttgggtgtattggcttgtccaaatcttccattgtcatcaataaacaacatcaatggtaactcttcgggagataaagttggtgccctgttttctgctacaattggttgtggggctgaagtagagtccttagatggctctccaccacaaaagattagtgtttgctccatcgacaatcctgtcaatgcatcattttttgaatcctatgaaagtgcacactccatgcatgatttgactggctctattgcagagaaacttggtgtccaagctcctccagttagaatcgacagccaagcaaaatatggtgctctggcccgaggtgatggcgccatttacttgcgctttccacacaaaggttatagagagaaaatatgggaccatgcagcaggatcaattgtcgtgacagaagctggaggcatagtaacagatgctgcgggaaacgacttggatttctccaaagggagatttctcgatctcgacacaggcatcatcgcaaccaacaaggagttgatgccgtcgctcctgaaagctgtccaagaggctattaaagagacgaaccaggctgcctccctcttatagctgttgtagtggtcgacaaaaaagtagttgcaaaattttcgtactggcaaacagcattgctagaagtggacaacatgaataatttgagcatcatcaagacaggcgagcgcttggtgccggtgctcctaaaggccatccaagaggttatcaaggagaaagttgagcagtcgtaatgatgaacagaaattttagttgcacgtgacttacatatttcagctgtaccacttttgatcagacacgttcccagtgggtgcttagcagataacagttcttttactgaatactgtaaaagccttttttttcaaaaataaactaggtttcctccgttttcaaaaaaaaaaaaaaaaaaaaaaaaaaaaaaaaaaaagaaaaaaaaaaaaaaaa

SEQ ID NO: 23647 - protein, 414 aa, Zea mays subsp. mays
  peptide (1)..(414): Ceres Seq. ID no. 12374341
  misc_feature (60)..(414): NCBI GI NO: 14268820 NR Description: diphosphonucleotide phosphatase 1 [Zea mays]
  misc_feature (59)..(414): NCBI GI NO: 3913517 NR Description: 3'
  misc_feature (66)..(413): NCBI GI NO: 15237567 NR Description: 3
  misc_feature (66)..(408): NCBI GI NO: 15237589 NR Description: 3(2),5-bisphosphate nucleotidase (emb|CAB05889
  misc_feature (65)..(406): NCBI GI NO: 34395640 NR Description: Probable SAL4 phosphatase
  misc_feature (66)..(413): NCBI GI NO: 18424775 NR Description: 3
  misc_feature (66)..(413): NCBI GI NO: 21618152 NR Description: 3(2),5-bisphosphate nucleotidase
  misc_feature (65)..(406): NCBI GI NO: 15242383 NR Description: 3'
  misc_feature (66)..(413): NCBI GI NO: 8777312 NR Description: 3'(2'),5'-bisphosphate nucleotidase
  misc_feature (195)..(413): NCBI GI NO: 17017951 NR Description: 3'(2'),5'-bisphosphate nucleotidase
MAARVGLLPHAILVSSRALPTPRARVPYPLPPVPSYLRHASSSASRSCRASPRFVAVRAMASGNPYAAELAAAKKAVTLAAKLCQTVQQDIMHSGVQAKADKSPVTVADYGSQILVGFSLKMDVSSGPFSLVAEEDSDELRKDGAEEILEDITDLVNETIFDDGSYNISFTKEGILSAIDDGKSEGGPSGRHWVLDPIDGTKGFLRGDQYAIALALLDEGKVVLGVLACPNLPLSSINNINGNSSGDKVGALFSATIGCGAEVESLDGSPPQKISVCSIDNPVNASFFESYESAHSMHDLTGSIAEKLGVQAPPVRIDSQAKYGALARGDGAIYLRFPHKGYREKIWDHAAGSIVVTEAGGIVTDAAGNDLDFSKGRFLDLDTGIIATNKELMPSLLKAVQEAIKETNQAASLL

SEQ ID NO: 23648 - protein, 355 aa, Zea mays subsp. mays
  peptide (1)..(355): Ceres Seq. ID no. 12374342
  misc_feature (1)..(355): NCBI GI NO: 14268820 NR Description: diphosphonucleotide phosphatase 1 [Zea mays]
  misc_feature (1)..(355): NCBI GI NO: 3913517 NR Description: 3'
  misc_feature (7)..(354): NCBI GI NO: 15237567 NR Description: 3
  misc_feature (7)..(349): NCBI GI NO: 15237589 NR Description: 3(2),5-bisphosphate nucleotidase (emb|CAB05889
  misc_feature (6)..(347): NCBI GI NO: 34395640 NR Description: Probable SAL4 phosphatase
  misc_feature (7)..(354): NCBI GI NO: 18424775 NR Description: 3
  misc_feature (7)..(354): NCBI GI NO: 21618152 NR Description: 3(2),5-bisphosphate nucleotidase
  misc_feature (6)..(347): NCBI GI NO: 15242383 NR Description: 3'
  misc_feature (7)..(354): NCBI GI NO: 8777312 NR Description: 3'(2'),5'-bisphosphate nucleotidase
  misc_feature (136)..(354): NCBI GI NO: 17017951 NR Description: 3'(2'),5'-bisphosphate nucleotidase
MASGNPYAAELAAAKKAVTLAAKLCQTVQQDIMHSGVQAKADKSPVTVADYGSQILVGFSLKMDVSSGPFSLVAEEDSDELRKDGAEEILEDITDLVNETIFDDGSYNISFTKEGILSAIDDGKSEGGPSGRHWVLDPIDGTKGFLRGDQYAIALALLDEGKVVLGVLACPNLPLSSINNINGNSSGDKVGALFSATIGCGAEVESLDGSPPQKISVCSIDNPVNASFFESYESAHSMHDLTGSIAEKLGVQAPPVRIDSQAKYGALARGDGAIYLRFPHKGYREKIWDHAAGSIVVTEAGGIVTDAAGNDLDFSKGRFLDLDTGIIATNKELMPSLLKAVQEAIKETNQAASLL

SEQ ID NO: 23649 - protein, 323 aa, Zea mays subsp. mays
  peptide (1)..(323): Ceres Seq. ID no. 12374343
  misc_feature (1)..(323): NCBI GI NO: 14268820 NR Description: diphosphonucleotide phosphatase 1 [Zea mays]
  misc_feature (1)..(323): NCBI GI NO: 3913517 NR Description: 3'
  misc_feature (1)..(322): NCBI GI NO: 15237567 NR Description: 3
  misc_feature (1)..(317): NCBI GI NO: 15237589 NR Description: 3(2),5-bisphosphate nucleotidase (emb|CAB05889
  misc_feature (1)..(315): NCBI GI NO: 34395640 NR Description: Probable SAL4 phosphatase
  misc_feature (1)..(322): NCBI GI NO: 18424775 NR Description: 3
  misc_feature (1)..(322): NCBI GI NO: 21618152 NR Description: 3(2),5-bisphosphate nucleotidase
  misc_feature (1)..(315): NCBI GI NO: 15242383 NR Description: 3'
  misc_feature (1)..(322): NCBI GI NO: 8777312 NR Description: 3'(2'),5'-bisphosphate nucleotidase
  misc_feature (104)..(322): NCBI GI NO: 17017951 NR Description: 3'(2'),5'-bisphosphate nucleotidase
MHSGVQAKADKSPVTVADYGSQILVGFSLKMDVSSGPFSLVAEEDSDELRKDGAEEILEDITDLVNETIFDDGSYNISFTKEGILSAIDDGKSEGGPSGRHWVLDPIDGTKGFLRGDQYAIALALLDEGKVVLGVLACPNLPLSSINNINGNSSGDKVGALFSATIGCGAEVESLDGSPPQKISVCSIDNPVNASFFESYESAHSMHDLTGSIAEKLGVQAPPVRIDSQAKYGALARGDGAIYLRFPHKGYREKIWDHAAGSIVVTEAGGIVTDAAGNDLDFSKGRFLDLDTGIIATNKELMPSLLKAVQEAIKETNQAASLL

SEQ ID NO: 23650 - DNA, 1081 bp, Zea mays subsp. mays
  misc_feature (1)..(1081): Ceres Seq. ID no. 12373946
gcactccgcaagacgcaagaccacctcaccagcctcctcgtccccgatctcctcccacccgcatccaagggtttccttctcgaccgtgcggaacgagccagagaacaggtatggcggcggcgcggcacctcagatccggcctccccctcctccgcgcccacctcgcatcctccgaatccgcggccgtcgctcaggtttcgaggggcttcgcgtcgcaggccgccaagcccaccgggaaggagatcaaggttccaaaggctctgtttggcggcacaggcaactatgccagtgcactgttcctcacagcagctaaatctaatgcattggacaaagttgaatctgagattaaagctattgtagaggcttccaagaagagcccgttgttttctcaattcataaaggacttgtcagttccaaaagcgaccagggtgaaggctatagccgaaatatttgctgacgctgggttttcagatgttacaaagaatttcttggctgtcctggcggacaatggcaggctgaaatatattgaacgcattgcggagagatttgttgatttgactatggaacataagggggagatgaaggttgtggtcaggacagttatttcactcaccaaggaggaggagaaagaactcaaggaaaccttgcaggatatccttggggaaaacaaaactattttggttgaacagaagattgactacagcatcatgggaggattagtgattgaattcgggcagaaggtgcttgatatctcaatcaggaacagggcgaagcaaatggaggcgttcttgaggcaaccacttgacttctaacagccttttggataaaagaagcatcatcggaatgcagaggctgtcctgttgaaggttttcctgtgtctgcaattttaatctgtccttttgaataaaatgtttcctctaacaagtgaagggcactgtttttattgtctcgtgggccacagatgcctgctgaacaatttatgttcatttcttcttttcttaaagaagcatgcactaagaacatgaaggatgcatgtcatgaaagtttttgaaagtcattgaaacttatgagctcctcatgc

SEQ ID NO: 23651 - protein, 269 aa, Zea mays subsp. mays
  peptide (1)..(269): Ceres Seq. ID no. 12373947
  misc_feature (91)..(263): Pfam Name: OSCP Pfam Description: ATP synthase delta
  misc_feature (37)..(268): NCBI GI NO: 23507246 NR Description: oligomycin sensitivity conferring protein
  misc_feature (30)..(269): NCBI GI NO: 4774163 NR Description: F1-ATP synthase delta subunit [Ipomoea batatas]
  misc_feature (30)..(269): NCBI GI NO: 114682 NR Description: ATP synthase delta chain, mitochondrial precursor
  misc_feature (37)..(268): NCBI GI NO: 23507248 NR Description: oligomycin sensitivity conferring protein
  misc_feature (40)..(269): NCBI GI NO: 14190495 NR Description: AT5g13450/T22N19_100 [Arabidopsis thaliana]
  misc_feature (40)..(269): NCBI GI NO: 15240628 NR Description: delta subunit of mitochondrial F1-ATPase
  misc_feature (40)..(269): NCBI GI NO: 1655482 NR Description: delta subunit of mitochondrial F1-ATPase
  misc_feature (54)..(267): NCBI GI NO: 27806307 NR Description: ATP synthase
  misc_feature (54)..(265): NCBI GI NO: 4502303 NR Description: ATP synthase
  misc_feature (62)..(258): NCBI GI NO: 39589686 NR Description: Hypothetical protein CBG12309
TPQDARPPHQPPRPRSPPTRIQGFPSRPCGTSQRTGMAAARHLRSGLPLLRAHLASSESAAVAQVSRGFASQAAKPTGKEIKVPKALFGGTGNYASALFLTAAKSNALDKVESEIKAIVEASKKSPLFSQFIKDLSVPKATRVKAIAEIFADAGFSDVTKNFLAVLADNGRLKYIERIAERFVDLTMEHKGEMKVVVRTVISLTKEEEKELKETLQDILGENKTILVEQKIDYSIMGGLVIEFGQKVLDISIRNRAKQMEAFLRQPLDF

SEQ ID NO: 23652 - protein, 233 aa, Zea mays subsp. mays
  peptide (1)..(233): Ceres Seq. ID no. 12373948
  misc_feature (55)..(227): Pfam Name: OSCP Pfam Description: ATP synthase delta
  misc_feature (1)..(232): NCBI GI NO: 23507246 NR Description: oligomycin sensitivity conferring protein
  misc_feature (1)..(233): NCBI GI NO: 4774163 NR Description: F1-ATP synthase delta subunit [Ipomoea batatas]
  misc_feature (1)..(233): NCBI GI NO: 114682 NR Description: ATP synthase delta chain, mitochondrial precursor
  misc_feature (1)..(232): NCBI GI NO: 23507248 NR Description: oligomycin sensitivity conferring protein
  misc_feature (4)..(233): NCBI GI NO: 14190495 NR Description: AT5g13450/T22N19_100 [Arabidopsis thaliana]
  misc_feature (4)..(233): NCBI GI NO: 15240628 NR Description: delta subunit of mitochondrial F1-ATPase
  misc_feature (4)..(233): NCBI GI NO: 1655482 NR Description: delta subunit of mitochondrial F1-ATPase
  misc_feature (18)..(231): NCBI GI NO: 27806307 NR Description: ATP synthase
  misc_feature (18)..(229): NCBI GI NO: 4502303 NR Description: ATP synthase
  misc_feature (26)..(222): NCBI GI NO: 39589686 NR Description: Hypothetical protein CBG12309
MAAARHLRSGLPLLRAHLASSESAAVAQVSRGFASQAAKPTGKEIKVPKALFGGTGNYASALFLTAAKSNALDKVESEIKAIVEASKKSPLFSQFIKDLSVPKATRVKAIAEIFADAGFSDVTKNFLAVLADNGRLKYIERIAERFVDLTMEHKGEMKVVVRTVISLTKEEEKELKETLQDILGENKTILVEQKIDYSIMGGLVIEFGQKVLDISIRNRAKQMEAFLRQPLDF

SEQ ID NO: 23653 - DNA, 1542 bp, Zea mays subsp. mays
  misc_feature (1)..(1542): Ceres Seq. ID no. 12341469
ccggccccaccggccagtgatacgcactcctcccctcaaagccctagccagacgccgccgccgcacccgatctggctgcctcggtcgatttctaattctcctcgcgagcccaaaccctaaacctaaacctttcacccgccgccgccgccaccaccagcactgccactccgccaccaccgtcccgaagccccctcccagcgccatcgacttcatctcggattgaagcaatgtcgtcggacgatgaggtcagggaggagaaggagctcgacctctcctccaacgacgttgtcaccaagtacaaggctgccgccgaaatcctcaacaacgctctgaagattgttgtgtctcagtgcaagccaaaagtcaagattgttgacctttgcgagaagggcgactctttcataagagagcaaactgggaatgtttacaagaacgcaaagaggaagattgaaaggggtattgctttcccaacctgtgtatccgtcaatgacacagtttgccacttctcaccgcttgcaaccgatgatgccgttctggaagaaaatgacatggttaaaattgatatgggctgtcatattgatggctttattgctgtggtggcacatacacatgtaattacaaatgggcctgtcacaggaagggctggtgatgtgcttgctgctgccaacacagcagcagaagtcgcaatgcggcttgtgagacctgggaagaaaaataaggatgttactgaagcaattcagaaagttgctgctgcttatgattgcaaaattgtggaaggtgttcttagccatcaactgaaacaatttgtgattgatggtaacaaagttgtgctcagtgtctccaatgctgatacaaaggttgatgatgctgaatttgaagaaaatgaagtatatgcaatcgatattgtcaccagcactggggaggggaagcccaagttattggatgagaaacagaccaccatctacaaaagggccgtagacaagaattatcacttgaagatgaaagcgtcaaggtttattttcagtgagatcagccagaagttcccaatcatgccttttactgctagggcattagaagagaagcgtgcgcgtttaggcttggtggaatgcatgaaccatgaactattgcagccgtaccctgtacttcatgagaagccaggcgatcttgttgcacacataaagttcactgtgctgctgatgcccaatggatcagataagataacatcacatcctctacaggagttaaagcccaccaaatccattgaagacaatgcagagataaaggcatggcttgctttggggacgaaatcaaagaagaagggtggtgggaagaagaagaaaggcaagaaaggagatgcagcagaagcagatcccatggaggaggcgacaaacggtgctacaagccaagaataattctgatttttggaattactgccaccagcttttttcttgtttcttcgctgcatctgatggtgttatattacattcagttgtggaaaaattgagtactatttctagcttctaagaaatgaagcatcctatt

SEQ ID NO: 23654 - protein, 394 aa, Zea mays subsp. mays
  peptide (1)..(394): Ceres Seq. ID no. 12341470
  misc_feature (1)..(393): NCBI GI NO: 7447216 NR Description: probable DNA-binding protein GBP16 - rice
  misc_feature (3)..(390): NCBI GI NO: 9652218 NR Description: putative DNA binding protein [Atriplex hortensis]
  misc_feature (1)..(388): NCBI GI NO: 15231039 NR Description: putative nuclear DNA-binding protein G2p
  misc_feature (1)..(388): NCBI GI NO: 13430628 NR Description: putative nuclear DNA-binding protein G2p
  misc_feature (1)..(388): NCBI GI NO: 30693537 NR Description: nuclear DNA-binding protein G2p -related
  misc_feature (1)..(390): NCBI GI NO: 34193902 NR Description: Proliferation-associated protein 1 [Danio rerio]
  misc_feature (1)..(390): NCBI GI NO: 6755100 NR Description: proliferation-associated 2G4
  misc_feature (1)..(390): NCBI GI NO: 34862215 NR Description: similar to proliferation-associated protein 1
  misc_feature (3)..(384): NCBI GI NO: 26788026 NR Description: SI:dZ150I12
  misc_feature (1)..(394): NCBI GI NO: 13632817 NR Description: Proliferation-associated protein 2G4
MSSDDEVREEKELDLSSNDVVTKYKAAAEILNNALKIVVSQCKPKVKIVDLCEKGDSFIREQTGNVYKNAKRKIERGIAFPTCVSVNDTVCHFSPLATDDAVLEENDMVKIDMGCHIDGFIAVVAHTHVITNGPVTGRAGDVLAAANTAAEVAMRLVRPGKKNKDVTEAIQKVAAAYDCKIVEGVLSHQLKQFVIDGNKVVLSVSNADTKVDDAEFEENEVYAIDIVTSTGEGKPKLLDEKQTTIYKRAVDKNYHLKMKASRFIFSEISQKFPIMPFTARALEEKRARLGLVECMNHELLQPYPVLHEKPGDLVAHIKFTVLLMPNGSDKITSHPLQELKPTKSIEDNAEIKAWLALGTKSKKKGGGKKKKGKKGDAAEADPMEEATNGATSQE

SEQ ID NO: 23655 - protein, 287 aa, Zea mays subsp. mays
  peptide (1)..(287): Ceres Seq. ID no. 12341471
  misc_feature (1)..(286): NCBI GI NO: 7447216 NR Description: probable DNA-binding protein GBP16 - rice
  misc_feature (1)..(283): NCBI GI NO: 9652218 NR Description: putative DNA binding protein [Atriplex hortensis]
  misc_feature (1)..(281): NCBI GI NO: 15231039 NR Description: putative nuclear DNA-binding protein G2p
  misc_feature (1)..(281): NCBI GI NO: 13430628 NR Description: putative nuclear DNA-binding protein G2p
  misc_feature (1)..(281): NCBI GI NO: 30693537 NR Description: nuclear DNA-binding protein G2p -related
  misc_feature (1)..(283): NCBI GI NO: 34193902 NR Description: Proliferation-associated protein 1 [Danio rerio]
  misc_feature (1)..(283): NCBI GI NO: 6755100 NR Description: proliferation-associated 2G4
  misc_feature (1)..(283): NCBI GI NO: 34862215 NR Description: similar to proliferation-associated protein 1
  misc_feature (1)..(277): NCBI GI NO: 26788026 NR Description: SI:dZ150I12
  misc_feature (1)..(287): NCBI GI NO: 13632817 NR Description: Proliferation-associated protein 2G4
MVKIDMGCHIDGFIAVVAHTHVITNGPVTGRAGDVLAAANTAAEVAMRLVRPGKKNKDVTEAIQKVAAAYDCKIVEGVLSHQLKQFVIDGNKVVLSVSNADTKVDDAEFEENEVYAIDIVTSTGEGKPKLLDEKQTTIYKRAVDKNYHLKMKASRFIFSEISQKFPIMPFTARALEEKRARLGLVECMNHELLQPYPVLHEKPGDLVAHIKFTVLLMPNGSDKITSHPLQELKPTKSIEDNAEIKAWLALGTKSKKKGGGKKKKGKKGDAAEADPMEEATNGATSQE

SEQ ID NO: 23656 - protein, 282 aa, Zea mays subsp. mays
  peptide (1)..(282): Ceres Seq. ID no. 12341472
  misc_feature (1)..(281): NCBI GI NO: 7447216 NR Description: probable DNA-binding protein GBP16 - rice
  misc_feature (1)..(278): NCBI GI NO: 9652218 NR Description: putative DNA binding protein [Atriplex hortensis]
  misc_feature (1)..(276): NCBI GI NO: 15231039 NR Description: putative nuclear DNA-binding protein G2p
  misc_feature (1)..(276): NCBI GI NO: 13430628 NR Description: putative nuclear DNA-binding protein G2p
  misc_feature (1)..(276): NCBI GI NO: 30693537 NR Description: nuclear DNA-binding protein G2p -related
  misc_feature (1)..(278): NCBI GI NO: 34193902 NR Description: Proliferation-associated protein 1 [Danio rerio]
  misc_feature (1)..(278): NCBI GI NO: 6755100 NR Description: proliferation-associated 2G4
  misc_feature (1)..(278): NCBI GI NO: 34862215 NR Description: similar to proliferation-associated protein 1
  misc_feature (1)..(272): NCBI GI NO: 26788026 NR Description: SI:dZ150I12
  misc_feature (1)..(282): NCBI GI NO: 13632817 NR Description: Proliferation-associated protein 2G4
MGCHIDGFIAVVAHTHVITNGPVTGRAGDVLAAANTAAEVAMRLVRPGKKNKDVTEAIQKVAAAYDCKIVEGVLSHQLKQFVIDGNKVVLSVSNADTKVDDAEFEENEVYAIDIVTSTGEGKPKLLDEKQTTIYKRAVDKNYHLKMKASRFIFSEISQKFPIMPFTARALEEKRARLGLVECMNHELLQPYPVLHEKPGDLVAHIKFTVLLMPNGSDKITSHPLQELKPTKSIEDNAEIKAWLALGTKSKKKGGGKKKKGKKGDAAEADPMEEATNGATSQE

SEQ ID NO: 23657 - DNA, 2031 bp, Zea mays subsp. mays
  misc_feature (1)..(2031): Ceres Seq. ID no. 12348893
atcaggcccacgctttgttaacaaagaattccctcatagccgccgccgccgccgccgccgccgctcatctcgccgagaggtgacgggaccgaggaactcgccgagttctaagatagagaatcgcttttcacagcctggggtctgctgcgtagggtggtgttgaaggggagaagtttaagatctgttccacagatcacgcgtgcgcgctcgcgaatcgggggttccacacatagcttcgtcgttttgaatttgatgtactaatggagtctaagggtggcaagaagtctagcagtagtcgttccatgatgtatgaagctccccttggctacagcattgaggacgttcgacctgccggaggcgcgaagaagttccagtctgctgcttactccaactgcgcaaagaagccatcctgatatcccttttggcttcctcgttctagtagtttaggatttcttttctgacacttcgattcttaccaatccccctggcctgctgctttcctgacaatcgaccagttccccagtcttgctccctgcagtcctccctcctccatctccagcgttgtgttctgactcacctgcaccaatggctgttctttctgctgctggtgctcccccggcctcagctatcgggtttgagggctatgagaagcgccttgagatcacattctctgaggcacctgtctttgtggacccccatggcagcggtttgcgtgccctctccaggtcccagattgactctgttctggatcttgcacggtgcacgatcgtgtccgagctctccaacaaggattttgactcctatgttctctccgagtcaagcttgttcatctatcctctgaagattgtcatcaagacctgtggcactaccaagctcctgctcacaattccaaggatcctagagcttgctgaagagctgtctatgcctcttgctgctgtgaagtactcccgcgggacgttcatctttcctggcgcacagccagccccccaccggagcttctccgaggaagttgctgtacttaaccgatactttgggggcctgaagtctggtggcaatgcttatgtgattggagatgcagcaagaccaggacagaagtggcacatctactacgccactgagtacccagagcaaccaatggtcaaccttgagatgtgcatgactggtctggacacgaagaaagcttcagtcttcttcaagactaatgctgatggcaacacaacatgtgccaaggaaatgacgaagctctctggtatctctgaaattatccctgagatggagatctgtgattttgacttcgaaccctgcggctactccatgaatgcaatccatggctctgcgttctccacgatccatgtgacgcctgaggatgggttcagctacgccagttatgaggttatgggcttggatgccactgccctgtcttacggtgaccttgtcaagagggtccttgggtgcttcggcccctcggaattttctgtcgccgtgaccatcttcggcgggcggggccaagctgggacatggggaaaggaacttggtgcggaggcttatgactgcaacaacatggtcgagcaggagctgcctggaggtgggatcctcatctaccagagcttctgtgctgctgaagacgccgttgctagctcgcccaaatccgttcttcgctgctttgatggcgagaatgcagcaccttttgcgaaggactgcaagctggctaatcttgtctgcttggaggaagttggatgctatcgaggagaaggatggagtgcttgatgagtaagacgggtttctggtgtcgatttgcttctgagtttttttctttttatatcgttgcgatctcgtggttgtcgtttggttagcagccaagccaggctattagtacgaagaatgtcgtctataaacatgtgttcctacgttgccacatgctgagtcaatctgtatacagctagctctaggtggtcagctgcgtctaccacaatgagcatacatgtatggataaatcttctgtgaaagcattcgatgaataagggttgttct

SEQ ID NO: 23658 - protein, 393 aa, Zea mays subsp. mays
  peptide (1)..(393): Ceres Seq. ID no. 12348894
  misc_feature (13)..(346): Pfam Name: Pfam Description:  Adenosylmethionine decarboxylase
  misc_feature (1)..(382): NCBI GI NO: 3913427 NR Description: S-adenosylmethionine decarboxylase proenzyme
  misc_feature (1)..(378): NCBI GI NO: 19855056 NR Description: S-adenosylmethionine decarboxylase proenzyme
  misc_feature (1)..(378): NCBI GI NO: 3929545 NR Description: S-adenosylmethionine decarboxylase [Oryza sativa]
  misc_feature (9)..(390): NCBI GI NO: 3913438 NR Description: S-adenosylmethionine decarboxylase proenzyme
  misc_feature (9)..(378): NCBI GI NO: 4325045 NR Description: S-adenosylmethionine decarboxylase precursor
  misc_feature (1)..(378): NCBI GI NO: 7436593 NR Description: adenosylmethionine decarboxylase homolog
  misc_feature (1)..(370): NCBI GI NO: 6646868 NR Description: S-adenosylmethionine decarboxylase 2
  misc_feature (1)..(278): NCBI GI NO: 10241685 NR Description: S-adenosylmethionine decarboxylase
  misc_feature (13)..(363): NCBI GI NO: 28566348 NR Description: S-adenosylmethionine decarboxylase
  misc_feature (9)..(359): NCBI GI NO: 31980105 NR Description: S-adenosylmethionine decarboxylase proenzyme
MAVLSAAGAPPASAIGFEGYEKRLEITFSEAPVFVDPHGSGLRALSRSQIDSVLDLARCTIVSELSNKDFDSYVLSESSLFIYPLKIVIKTCGTTKLLLTIPRILELAEELSMPLAAVKYSRGTFIFPGAQPAPHRSFSEEVAVLNRYFGGLKSGGNAYVIGDAARPGQKWHIYYATEYPEQPMVNLEMCMTGLDTKKASVFFKTNADGNTTCAKEMTKLSGISEIIPEMEICDFDFEPCGYSMNAIHGSAFSTIHVTPEDGFSYASYEVMGLDATALSYGDLVKRVLGCFGPSEFSVAVTIFGGRGQAGTWGKELGAEAYDCNNMVEQELPGGGILIYQSFCAAEDAVASSPKSVLRCFDGENAAPFAKDCKLANLVCLEEVGCYRGEGWSA

SEQ ID NO: 23659 - protein, 281 aa, Zea mays subsp. mays
  peptide (1)..(281): Ceres Seq. ID no. 12348895
  misc_feature (1)..(234): Pfam Name: Pfam Description:  Adenosylmethionine decarboxylase
  misc_feature (1)..(270): NCBI GI NO: 3913427 NR Description: S-adenosylmethionine decarboxylase proenzyme
  misc_feature (1)..(266): NCBI GI NO: 19855056 NR Description: S-adenosylmethionine decarboxylase proenzyme
  misc_feature (1)..(266): NCBI GI NO: 3929545 NR Description: S-adenosylmethionine decarboxylase [Oryza sativa]
  misc_feature (1)..(278): NCBI GI NO: 3913438 NR Description: S-adenosylmethionine decarboxylase proenzyme
  misc_feature (1)..(266): NCBI GI NO: 4325045 NR Description: S-adenosylmethionine decarboxylase precursor
  misc_feature (1)..(266): NCBI GI NO: 7436593 NR Description: adenosylmethionine decarboxylase homolog
  misc_feature (1)..(258): NCBI GI NO: 6646868 NR Description: S-adenosylmethionine decarboxylase 2
  misc_feature (1)..(166): NCBI GI NO: 10241685 NR Description: S-adenosylmethionine decarboxylase
  misc_feature (1)..(251): NCBI GI NO: 28566348 NR Description: S-adenosylmethionine decarboxylase
  misc_feature (1)..(247): NCBI GI NO: 31980105 NR Description: S-adenosylmethionine decarboxylase proenzyme
MPLAAVKYSRGTFIFPGAQPAPHRSFSEEVAVLNRYFGGLKSGGNAYVIGDAARPGQKWHIYYATEYPEQPMVNLEMCMTGLDTKKASVFFKTNADGNTTCAKEMTKLSGISEIIPEMEICDFDFEPCGYSMNAIHGSAFSTIHVTPEDGFSYASYEVMGLDATALSYGDLVKRVLGCFGPSEFSVAVTIFGGRGQAGTWGKELGAEAYDCNNMVEQELPGGGILIYQSFCAAEDAVASSPKSVLRCFDGENAAPFAKDCKLANLVCLEEVGCYRGEGWSA

SEQ ID NO: 23660 - protein, 210 aa, Zea mays subsp. mays
  peptide (1)..(210): Ceres Seq. ID no. 12348896
  misc_feature (1)..(163): Pfam Name: Pfam Description:  Adenosylmethionine decarboxylase
  misc_feature (1)..(199): NCBI GI NO: 3913427 NR Description: S-adenosylmethionine decarboxylase proenzyme
  misc_feature (1)..(195): NCBI GI NO: 19855056 NR Description: S-adenosylmethionine decarboxylase proenzyme
  misc_feature (1)..(195): NCBI GI NO: 3929545 NR Description: S-adenosylmethionine decarboxylase [Oryza sativa]
  misc_feature (1)..(207): NCBI GI NO: 3913438 NR Description: S-adenosylmethionine decarboxylase proenzyme
  misc_feature (1)..(195): NCBI GI NO: 4325045 NR Description: S-adenosylmethionine decarboxylase precursor
  misc_feature (1)..(195): NCBI GI NO: 7436593 NR Description: adenosylmethionine decarboxylase homolog
  misc_feature (1)..(187): NCBI GI NO: 6646868 NR Description: S-adenosylmethionine decarboxylase 2
  misc_feature (1)..(95): NCBI GI NO: 10241685 NR Description: S-adenosylmethionine decarboxylase
  misc_feature (1)..(180): NCBI GI NO: 28566348 NR Description: S-adenosylmethionine decarboxylase
  misc_feature (1)..(176): NCBI GI NO: 31980105 NR Description: S-adenosylmethionine decarboxylase proenzyme
MVNLEMCMTGLDTKKASVFFKTNADGNTTCAKEMTKLSGISEIIPEMEICDFDFEPCGYSMNAIHGSAFSTIHVTPEDGFSYASYEVMGLDATALSYGDLVKRVLGCFGPSEFSVAVTIFGGRGQAGTWGKELGAEAYDCNNMVEQELPGGGILIYQSFCAAEDAVASSPKSVLRCFDGENAAPFAKDCKLANLVCLEEVGCYRGEGWSA

SEQ ID NO: 23661 - DNA, 1078 bp, Zea mays subsp. mays
  misc_feature (1)..(1078): Ceres Seq. ID no. 12341568
gtaccaggctataccagcatcagcgaagagccggcgttcttgagacttgagagaggagagcgaccgacgacctcgaagcttggcctgcgcggtggtgacgatggatgtcaaatgccggcgtctggaggggaaggtggccgtcgtgacggcgtccacgcaggggatcggcctagccatcgccgagcgcctcggcctggagggcgccgccgccgtcgtctcctcccgcaagcagaagaacgtggacgaggccgtggaggggctcaaggccaaggggatcaccgtggtgggcgccgtctgccacgtatccgacgcacagcaacgcaagaacatcatcgagacggccgtcaagaactttgggcacattgatattcttgtctccaacgctgctgcaaatcctactgtgaatgtcatacttgaaatgaaagaggttgttctcgataagttgtgggatattaacgtcaaggcttctattcttcttattcaggatgctgctccccacctacgggcagggtcatctgtgatccttatttcttcaattgctggttacaatcctgagcaaggattgacaatgtatggtgttacaaagaccgctctctttggtctcacaaaggctcttgctggtgagatgggacccgatattcgtgttaattgtatagcccctggttttgttccgacacggtttgctagtttcttcatagacaacgagaccattaggaaaaagcttaacgagaggactatgcttaagagattgggttccgtggaagatatggcggcagctgccgcattcctggcatctgacgatgcatcattcatcacagctgaaaccattgttgttgctggaggggtgccgtcgagattgtaaatttggctcaagtttgtaccgattgttactaggttggtgacatagcaactatactgtaataatccactctgaaaatgtgggtcgtgctaagttggccaccgttagatctaataattttttaggtgtcttggtatttgtttgagataataatctactcagattatctgtcacttagttcaaattttattggattatataatataaatagataatccc

SEQ ID NO: 23662 - protein, 253 aa, Zea mays subsp. mays
  peptide (1)..(253): Ceres Seq. ID no. 12341569
  misc_feature (6)..(253): NCBI GI NO: 18412959 NR Description: coded for by A
  misc_feature (3)..(253): NCBI GI NO: 31198899 NR Description: ENSANGP00000019038 [Anopheles gambiae]
  misc_feature (6)..(253): NCBI GI NO: 33991766 NR Description: Unknown (protein for MGC:65987) [Danio rerio]
  misc_feature (8)..(253): NCBI GI NO: 11559412 NR Description: NADPH-dependent retinol dehydrogenase/reductase
  misc_feature (8)..(253): NCBI GI NO: 32483357 NR Description: peroxisomal short-chain alcohol dehydrogenase
  misc_feature (8)..(253): NCBI GI NO: 7023407 NR Description: unnamed protein product [Homo sapiens]
  misc_feature (6)..(253): NCBI GI NO: 21355319 NR Description: CG10672-PA [Drosophila melanogaster]
  misc_feature (8)..(253): NCBI GI NO: 11559416 NR Description: NADPH-dependent retinol dehydrogenase/reductase
  misc_feature (8)..(253): NCBI GI NO: 4105190 NR Description: peroxisomal short-chain alcohol dehydrogenase
  misc_feature (8)..(253): NCBI GI NO: 33337583 NR Description: Hep27-like protein [Homo sapiens]
MDVKCRRLEGKVAVVTASTQGIGLAIAERLGLEGAAAVVSSRKQKNVDEAVEGLKAKGITVVGAVCHVSDAQQRKNIIETAVKNFGHIDILVSNAAANPTVNVILEMKEVVLDKLWDINVKASILLIQDAAPHLRAGSSVILISSIAGYNPEQGLTMYGVTKTALFGLTKALAGEMGPDIRVNCIAPGFVPTRFASFFIDNETIRKKLNERTMLKRLGSVEDMAAAAAFLASDDASFITAETIVVAGGVPSRL

SEQ ID NO: 23663 - protein, 147 aa, Zea mays subsp. mays
  peptide (1)..(147): Ceres Seq. ID no. 12341570
  misc_feature (1)..(147): NCBI GI NO: 18412959 NR Description: coded for by A
  misc_feature (1)..(147): NCBI GI NO: 31198899 NR Description: ENSANGP00000019038 [Anopheles gambiae]
  misc_feature (1)..(147): NCBI GI NO: 33991766 NR Description: Unknown (protein for MGC:65987) [Danio rerio]
  misc_feature (1)..(147): NCBI GI NO: 11559412 NR Description: NADPH-dependent retinol dehydrogenase/reductase
  misc_feature (1)..(147): NCBI GI NO: 32483357 NR Description: peroxisomal short-chain alcohol dehydrogenase
  misc_feature (1)..(147): NCBI GI NO: 7023407 NR Description: unnamed protein product [Homo sapiens]
  misc_feature (1)..(147): NCBI GI NO: 21355319 NR Description: CG10672-PA [Drosophila melanogaster]
  misc_feature (1)..(147): NCBI GI NO: 11559416 NR Description: NADPH-dependent retinol dehydrogenase/reductase
  misc_feature (1)..(147): NCBI GI NO: 4105190 NR Description: peroxisomal short-chain alcohol dehydrogenase
  misc_feature (1)..(147): NCBI GI NO: 33337583 NR Description: Hep27-like protein [Homo sapiens]
MKEVVLDKLWDINVKASILLIQDAAPHLRAGSSVILISSIAGYNPEQGLTMYGVTKTALFGLTKALAGEMGPDIRVNCIAPGFVPTRFASFFIDNETIRKKLNERTMLKRLGSVEDMAAAAAFLASDDASFITAETIVVAGGVPSRL

SEQ ID NO: 23664 - DNA, 1270 bp, Zea mays subsp. mays
  misc_feature (1)..(1270): Ceres Seq. ID no. 12410926
agaaacccccttccttcccattcccactgctcggattgctttccccacctccaccgccaccagaccagatagcaagcaaccgacccctcctcgctgtattcgcagggaaggagaagatggagcctggccagagcgggactgagcaggcctctccacgcgggaacgattgggaggtcgtgcagctcaccgcgtccgcatacgccgccgcgcccgctccgaggaagcccgagccctccgacgaagcggaagctaagagatacggcgcaaagggggacgatctagccgccggcctactcatgtccggccacttctccgtgtctcagagcgaggtcgagagcctcctcgtaggcgccgacaccaaagaaccaccgcccaaggacaaggaggagccttgcgagcatactaagctgctggaggacgacgtccccaccatcccgttcgatgacggcaaggcgctgaaaggcatgggtctggtcggggaagagccggccgggttctcgtcgcctgtctacagctccatcacggagagcaggagtgacaagaggagcgaggagcctactactctgcatagtttgaaccccgtgactggctcaacaaaggtcgtctcacctgacgagcagagcgagcctgctgctgggtctgggtccgggtctgggtcaggcccgcgtgaagcgtggtggaagaagcagcttctctccctttacaggaacgccaaggagagcaagcatctctggcctatcgtcgccaccactgctgctttggtgggcctggcgtatctggggcggcgctggcataagggcaggctgcactttcagctgctcaagatatcgccgtctaccaacaacgagaaaatcagcgacgcggttggaccgttaaaccgcatcaacgacattctcgttgctggcaaccacccaagtcacggtgtccatgggcatgcccgtgcaggctgaatgcagtcagttcgcgaacccatcgggcgtcctggacccatatactatcatgtgtcgctttgagaatcggctcaagacaaaccatcgggcaggactggagtagttgtccaaggactgaggatgtttatgcagacacaagtatgtttggtggctcgatgtatgtgaattccaaaactccatctgggtatgtaaatatttgtatgggtttagtttggttgctttttcgtttggtcatctcatgaaacctctgctggtggtttccttgtctatattactgtcttatttggggttcgttcatgcatgcatacatgtgatggggc

SEQ ID NO: 23665 - protein, 315 aa, Zea mays subsp. mays
  peptide (1)..(315): Ceres Seq. ID no. 12410927
  misc_feature (47)..(313): NCBI GI NO: 18411306 NR Description: Expressed protein; protein id: At4g00355
  misc_feature (43)..(274): NCBI GI NO: 38346457 NR Description: OSJNBa0019G23.5
  misc_feature (47)..(285): NCBI GI NO: 30678620 NR Description: expressed protein [Arabidopsis thaliana]
  misc_feature (15)..(274): NCBI GI NO: 1808686 NR Description: hypothetical protein [Sporobolus stapfianus]
  misc_feature (61)..(302): NCBI GI NO: 18406940 NR Description: expressed protein; protein id: At2g45980
  misc_feature (61)..(302): NCBI GI NO: 21553358 NR Description: unknown [Arabidopsis thaliana]
  misc_feature (55)..(285): NCBI GI NO: 7485264 NR Description: hypothetical protein A_IG005I10
  misc_feature (43)..(140): NCBI GI NO: 10241633 NR Description: hypothetical protein
KPPSFPFPLLGLLSPPPPPPDQIASNRPLLAVFAGKEKMEPGQSGTEQASPRGNDWEVVQLTASAYAAAPAPRKPEPSDEAEAKRYGAKGDDLAAGLLMSGHFSVSQSEVESLLVGADTKEPPPKDKEEPCEHTKLLEDDVPTIPFDDGKALKGMGLVGEEPAGFSSPVYSSITESRSDKRSEEPTTLHSLNPVTGSTKVVSPDEQSEPAAGSGSGSGSGPREAWWKKQLLSLYRNAKESKHLWPIVATTAALVGLAYLGRRWHKGRLHFQLLKISPSTNNEKISDAVGPLNRINDILVAGNHPSHGVHGHARAG

SEQ ID NO: 23666 - protein, 277 aa, Zea mays subsp. mays
  peptide (1)..(277): Ceres Seq. ID no. 12410928
  misc_feature (9)..(275): NCBI GI NO: 18411306 NR Description: Expressed protein; protein id: At4g00355
  misc_feature (5)..(236): NCBI GI NO: 38346457 NR Description: OSJNBa0019G23.5
  misc_feature (9)..(247): NCBI GI NO: 30678620 NR Description: expressed protein [Arabidopsis thaliana]
  misc_feature (1)..(236): NCBI GI NO: 1808686 NR Description: hypothetical protein [Sporobolus stapfianus]
  misc_feature (23)..(264): NCBI GI NO: 18406940 NR Description: expressed protein; protein id: At2g45980
  misc_feature (23)..(264): NCBI GI NO: 21553358 NR Description: unknown [Arabidopsis thaliana]
  misc_feature (17)..(247): NCBI GI NO: 7485264 NR Description: hypothetical protein A_IG005I10
  misc_feature (5)..(102): NCBI GI NO: 10241633 NR Description: hypothetical protein
MEPGQSGTEQASPRGNDWEVVQLTASAYAAAPAPRKPEPSDEAEAKRYGAKGDDLAAGLLMSGHFSVSQSEVESLLVGADTKEPPPKDKEEPCEHTKLLEDDVPTIPFDDGKALKGMGLVGEEPAGFSSPVYSSITESRSDKRSEEPTTLHSLNPVTGSTKVVSPDEQSEPAAGSGSGSGSGPREAWWKKQLLSLYRNAKESKHLWPIVATTAALVGLAYLGRRWHKGRLHFQLLKISPSTNNEKISDAVGPLNRINDILVAGNHPSHGVHGHARAG

SEQ ID NO: 23667 - protein, 217 aa, Zea mays subsp. mays
  peptide (1)..(217): Ceres Seq. ID no. 12410929
  misc_feature (1)..(215): NCBI GI NO: 18411306 NR Description: Expressed protein; protein id: At4g00355
  misc_feature (1)..(176): NCBI GI NO: 38346457 NR Description: OSJNBa0019G23.5
  misc_feature (1)..(187): NCBI GI NO: 30678620 NR Description: expressed protein [Arabidopsis thaliana]
  misc_feature (1)..(176): NCBI GI NO: 1808686 NR Description: hypothetical protein [Sporobolus stapfianus]
  misc_feature (1)..(204): NCBI GI NO: 18406940 NR Description: expressed protein; protein id: At2g45980
  misc_feature (1)..(204): NCBI GI NO: 21553358 NR Description: unknown [Arabidopsis thaliana]
  misc_feature (1)..(187): NCBI GI NO: 7485264 NR Description: hypothetical protein A_IG005I10
  misc_feature (1)..(42): NCBI GI NO: 10241633 NR Description: hypothetical protein
MSGHFSVSQSEVESLLVGADTKEPPPKDKEEPCEHTKLLEDDVPTIPFDDGKALKGMGLVGEEPAGFSSPVYSSITESRSDKRSEEPTTLHSLNPVTGSTKVVSPDEQSEPAAGSGSGSGSGPREAWWKKQLLSLYRNAKESKHLWPIVATTAALVGLAYLGRRWHKGRLHFQLLKISPSTNNEKISDAVGPLNRINDILVAGNHPSHGVHGHARAG

SEQ ID NO: 23668 - DNA, 700 bp, Zea mays subsp. mays
  misc_feature (1)..(700): Ceres Seq. ID no. 13494781
gatcagcgaacggaagaccgtggaagcaaagaggcgcaagcgagcacggaacaaatacaccttcaggtggcctccctccgactgccgactgaatcttccacctcgcttcgcgcctccggctccgcgccgggcccgcataatctgtgctcgggatcgcctcttcccgcggcaaatgggggccgactccgaggacgccgtcaagcagctcagcctcctcatggagcaagtggaggccccgctgaagagatcgtttcagaatatgcaccagggctatcctaaagaaacactggtgcgtttccttaaggctagagagtggaatgtagcaaaggctcataaaatgattgtagaatgtttgaattggaggattcaaaatgaaattgatagtgtgctagagaggcctatagtcccagtagatttatacaggtcaatacgtgattcacaacttattggcctgtcaggatacacaaaggagggtctcccaatttttggcattggtgttggacatagcacatatgacaaagcttcggtccactactatgtgcaatctcatatccagattaacgagtaccgtgatcgtataattttgcctaggctgacacaacagtttgggcggcctgttaccagctgtataaaagtgctggatatgactggtttgaagctatcagcactaagccaaataaagatgttgacttccatatcg

SEQ ID NO: 23669 - protein, 233 aa, Zea mays subsp. mays
  peptide (1)..(233): Ceres Seq. ID no. 13494782
  misc_feature (59)..(126): Pfam Name: Pfam Description:  CRAL/TRIO, N-terminus
  misc_feature (58)..(232): NCBI GI NO: 7488694 NR Description: phosphatidylinositol-phosphatidylcholine transfer protein SEC14 homolog Ssh1
  misc_feature (58)..(232): NCBI GI NO: 15238794 NR Description: sec14 cytosolic factor, putative
  misc_feature (58)..(232): NCBI GI NO: 14532536 NR Description: AT5g47730/MCA23_5 [Arabidopsis thaliana]
  misc_feature (58)..(232): NCBI GI NO: 15222786 NR Description: sec14 cytosolic factor, putative
  misc_feature (85)..(232): NCBI GI NO: 25295905 NR Description: protein F14J16.8 [imported] - Arabidopsis thaliana
  misc_feature (69)..(223): NCBI GI NO: 4506867 NR Description: SEC14 (S. cerevisiae)-like 1 [Homo sapiens]
ISERKTVEAKRRKRARNKYTFRWPPSDCRLNLPPRFAPPAPRRARIICARDRLFPRQMGADSEDAVKQLSLLMEQVEAPLKRSFQNMHQGYPKETLVRFLKAREWNVAKAHKMIVECLNWRIQNEIDSVLERPIVPVDLYRSIRDSQLIGLSGYTKEGLPIFGIGVGHSTYDKASVHYYVQSHIQINEYRDRIILPRLTQQFGRPVTSCIKVLDMTGLKLSALSQIKMLTSIS

SEQ ID NO: 23670 - protein, 176 aa, Zea mays subsp. mays
  peptide (1)..(176): Ceres Seq. ID no. 13494783
  misc_feature (2)..(69): Pfam Name: Pfam Description:  CRAL/TRIO, N-terminus
  misc_feature (1)..(175): NCBI GI NO: 7488694 NR Description: phosphatidylinositol-phosphatidylcholine transfer protein SEC14 homolog Ssh1
  misc_feature (1)..(175): NCBI GI NO: 15238794 NR Description: sec14 cytosolic factor, putative
  misc_feature (1)..(175): NCBI GI NO: 14532536 NR Description: AT5g47730/MCA23_5 [Arabidopsis thaliana]
  misc_feature (1)..(175): NCBI GI NO: 15222786 NR Description: sec14 cytosolic factor, putative
  misc_feature (28)..(175): NCBI GI NO: 25295905 NR Description: protein F14J16.8 [imported] - Arabidopsis thaliana
  misc_feature (12)..(166): NCBI GI NO: 4506867 NR Description: SEC14 (S. cerevisiae)-like 1 [Homo sapiens]
MGADSEDAVKQLSLLMEQVEAPLKRSFQNMHQGYPKETLVRFLKAREWNVAKAHKMIVECLNWRIQNEIDSVLERPIVPVDLYRSIRDSQLIGLSGYTKEGLPIFGIGVGHSTYDKASVHYYVQSHIQINEYRDRIILPRLTQQFGRPVTSCIKVLDMTGLKLSALSQIKMLTSIS

SEQ ID NO: 23671 - protein, 161 aa, Zea mays subsp. mays
  peptide (1)..(161): Ceres Seq. ID no. 13494784
  misc_feature (1)..(54): Pfam Name: Pfam Description:  CRAL/TRIO, N-terminus
  misc_feature (1)..(160): NCBI GI NO: 7488694 NR Description: phosphatidylinositol-phosphatidylcholine transfer protein SEC14 homolog Ssh1
  misc_feature (1)..(160): NCBI GI NO: 15238794 NR Description: sec14 cytosolic factor, putative
  misc_feature (1)..(160): NCBI GI NO: 14532536 NR Description: AT5g47730/MCA23_5 [Arabidopsis thaliana]
  misc_feature (1)..(160): NCBI GI NO: 15222786 NR Description: sec14 cytosolic factor, putative
  misc_feature (13)..(160): NCBI GI NO: 25295905 NR Description: protein F14J16.8 [imported] - Arabidopsis thaliana
  misc_feature (1)..(151): NCBI GI NO: 4506867 NR Description: SEC14 (S. cerevisiae)-like 1 [Homo sapiens]
MEQVEAPLKRSFQNMHQGYPKETLVRFLKAREWNVAKAHKMIVECLNWRIQNEIDSVLERPIVPVDLYRSIRDSQLIGLSGYTKEGLPIFGIGVGHSTYDKASVHYYVQSHIQINEYRDRIILPRLTQQFGRPVTSCIKVLDMTGLKLSALSQIKMLTSIS

SEQ ID NO: 23672 - DNA, 1185 bp, Zea mays subsp. mays
  misc_feature (1)..(1185): Ceres Seq. ID no. 12588534
  misc_feature (1176)..(1176): n is a, c, t, g, unknown, or other
catcgcgagcacccacccacctttgcttgcacggcccgcccattcaccggttgaggggagaagggagaggagaggtagctcagtcctcctctgaccgccgacccatccgccatggccgcctcctacgaccgcgagttctggaacttcagcgaccagctgcgcctgcacaacaacttctccaacctctccatcgccgaccctatctggtcctccaccacactggatcctccctcctccttcagcgacgccccgggcctcataggatccgccaagctcgcctttggcaacgccaccacggccaacgccgaccgctacaacgccaacgccgccggtgtcgccagcaagagcatgagcgtgggcatgatcgaccactacctcaacaagaacactaacaacgacgtcgtcaagagctacttcaacaagtccgtcggcagcaggccggccaacaacaacaccaccacaaccgtcaagaagaactccgccgcccaccacgacaagaagcacaagaactccggcaacggcgccggcgtcgacaagaggttcaagagcctgccggcggcggaggcgctgcccaggggcgaggccatcggcggctacatcttcgtctgcaacaacgacaccatggaggagaacctcaagaggcggctcttcgggctgccgtccaggtacagggattctgtgagggccatcaggcccggcctgcccctcttcctctacaactactccacccaccagctccacggcatctttgaggctgcaagcttcggaggatccaacatcgatccagcagcttgggaggacaagaagtgccccggcgagtcccgcttccctgctcaggtgagggttgcaacgcgcaagatctgttcgccgctggaggaggacgctttccgccccatcctccaccactacgacggccccaagttcaggctggagctcagtgtccctgaggcgctctcccttcttgatatatttgcggagaagatttttgacagacagacagcctgatgtctccatacttgcttccagttccagaggagtagtacatgtataatataaatataatatgctgattaccgacatctgattatctattctagtataagttacactcgaacttaggccctctttggaattatagtatttttatagttttaaaacaatactatgttatttggngatactata

SEQ ID NO: 23673 - protein, 297 aa, Zea mays subsp. mays
  peptide (1)..(297): Ceres Seq. ID no. 12588535
  misc_feature (56)..(290): NCBI GI NO: 34913876 NR Description: B1156H12.22
  misc_feature (10)..(290): NCBI GI NO: 18422167 NR Description: putative protein; protein id: At5g42050
  misc_feature (121)..(289): NCBI GI NO: 584825 NR Description: B2 PROTEIN
  misc_feature (120)..(290): NCBI GI NO: 9757950 NR Description: gene_id:MJC20
  misc_feature (89)..(286): NCBI GI NO: 21665866 NR Description: GDA2 protein [Pisum sativum]
  misc_feature (59)..(286): NCBI GI NO: 2369766 NR Description: hypothetical protein [Citrus x paradisi]
  misc_feature (92)..(286): NCBI GI NO: 15232081 NR Description: gda-1, putative; protein id: At3g27090
  misc_feature (92)..(286): NCBI GI NO: 21592623 NR Description: gda-1, putative [Arabidopsis thaliana]
  misc_feature (171)..(255): NCBI GI NO: 7488804 NR Description: gda-1 protein - garden pea
  misc_feature (139)..(287): NCBI GI NO: 34896110 NR Description: P0701D05.9
MAASYDREFWNFSDQLRLHNNFSNLSIADPIWSSTTLDPPSSFSDAPGLIGSAKLAFGNATTANADRYNANAAGVASKSMSVGMIDHYLNKNTNNDVVKSYFNKSVGSRPANNNTTTTVKKNSAAHHDKKHKNSGNGAGVDKRFKSLPAAEALPRGEAIGGYIFVCNNDTMEENLKRRLFGLPSRYRDSVRAIRPGLPLFLYNYSTHQLHGIFEAASFGGSNIDPAAWEDKKCPGESRFPAQVRVATRKICSPLEEDAFRPILHHYDGPKFRLELSVPEALSLLDIFAEKIFDRQTA

SEQ ID NO: 23674 - protein, 218 aa, Zea mays subsp. mays
  peptide (1)..(218): Ceres Seq. ID no. 12588536
  misc_feature (1)..(211): NCBI GI NO: 34913876 NR Description: B1156H12.22
  misc_feature (1)..(211): NCBI GI NO: 18422167 NR Description: putative protein; protein id: At5g42050
  misc_feature (42)..(210): NCBI GI NO: 584825 NR Description: B2 PROTEIN
  misc_feature (41)..(211): NCBI GI NO: 9757950 NR Description: gene_id:MJC20
  misc_feature (10)..(207): NCBI GI NO: 21665866 NR Description: GDA2 protein [Pisum sativum]
  misc_feature (1)..(207): NCBI GI NO: 2369766 NR Description: hypothetical protein [Citrus x paradisi]
  misc_feature (13)..(207): NCBI GI NO: 15232081 NR Description: gda-1, putative; protein id: At3g27090
  misc_feature (13)..(207): NCBI GI NO: 21592623 NR Description: gda-1, putative [Arabidopsis thaliana]
  misc_feature (92)..(176): NCBI GI NO: 7488804 NR Description: gda-1 protein - garden pea
  misc_feature (60)..(208): NCBI GI NO: 34896110 NR Description: P0701D05.9
MSVGMIDHYLNKNTNNDVVKSYFNKSVGSRPANNNTTTTVKKNSAAHHDKKHKNSGNGAGVDKRFKSLPAAEALPRGEAIGGYIFVCNNDTMEENLKRRLFGLPSRYRDSVRAIRPGLPLFLYNYSTHQLHGIFEAASFGGSNIDPAAWEDKKCPGESRFPAQVRVATRKICSPLEEDAFRPILHHYDGPKFRLELSVPEALSLLDIFAEKIFDRQTA

SEQ ID NO: 23675 - protein, 214 aa, Zea mays subsp. mays
  peptide (1)..(214): Ceres Seq. ID no. 12588537
  misc_feature (1)..(207): NCBI GI NO: 34913876 NR Description: B1156H12.22
  misc_feature (1)..(207): NCBI GI NO: 18422167 NR Description: putative protein; protein id: At5g42050
  misc_feature (38)..(206): NCBI GI NO: 584825 NR Description: B2 PROTEIN
  misc_feature (37)..(207): NCBI GI NO: 9757950 NR Description: gene_id:MJC20
  misc_feature (6)..(203): NCBI GI NO: 21665866 NR Description: GDA2 protein [Pisum sativum]
  misc_feature (1)..(203): NCBI GI NO: 2369766 NR Description: hypothetical protein [Citrus x paradisi]
  misc_feature (9)..(203): NCBI GI NO: 15232081 NR Description: gda-1, putative; protein id: At3g27090
  misc_feature (9)..(203): NCBI GI NO: 21592623 NR Description: gda-1, putative [Arabidopsis thaliana]
  misc_feature (88)..(172): NCBI GI NO: 7488804 NR Description: gda-1 protein - garden pea
  misc_feature (56)..(204): NCBI GI NO: 34896110 NR Description: P0701D05.9
MIDHYLNKNTNNDVVKSYFNKSVGSRPANNNTTTTVKKNSAAHHDKKHKNSGNGAGVDKRFKSLPAAEALPRGEAIGGYIFVCNNDTMEENLKRRLFGLPSRYRDSVRAIRPGLPLFLYNYSTHQLHGIFEAASFGGSNIDPAAWEDKKCPGESRFPAQVRVATRKICSPLEEDAFRPILHHYDGPKFRLELSVPEALSLLDIFAEKIFDRQTA

SEQ ID NO: 23676 - DNA, 1728 bp, Zea mays subsp. mays
  misc_feature (1)..(1728): Ceres Seq. ID no. 12367331
ccaatcggacggcctagacggctcccttcctctccttgccacacttgcgctcctcttcgagactccgagttgtcgtctccgtcgctgctggctgctgcgccactcccccagccccgagatctgctcaacaatggcgacgcggcgccacatcctcctcctcgccgctgccttcgtgtcccttctcgcgctcgaggctgtggagggcctcgaagaggggccccgcgggcgccggctgctggtcctgctggacgacctggccgtgcggtcgtcgcactcggccttcttcggctcgctccaggcgcgcgggttcgatctcgaattccgcctcgccgacgaccccaagctctcgctgcaccgctacggccagtacctctacgatggcctcgtgctgttcgccccctccaccccacgttttggtggatcagtggaccagaacgcagtccttgaatttattgatgctgggcatgatatgatcctggcggcagattcctctgcctctgatcttattcgtggcattgcgacagagtgtggggttgattttgatgaggatccagaggcaatggttattgaccacattaactatgccgctatggatgttgaaggcgatcacaccttgattgttggtgatgatcttattcaatcagatgtcatactggggtctaaaaagattgaggctcctgtattatttcgtggaattggacacacggctaatccatcaaacagtttggttctgaaagtcctatctgcctctccatcagcatactcagctaacccaaagactaagttattgttgcctccatcgcttactgggtcagctatatcactggtttcggttatgcaggcaagaaataatgctcgggtgctgctatctggatcacttgatctttttagcaaccggttcctgaagtctggtgttcaaaaggctggtagcaaaacgagatacgagagagctggaaatgagcaatttgtgacagagacaagcaaatgggtcttccatgagagggggcaccttaaggctgttaatgttaagcaccacaaggttggggagaccaatgaaccaggcatgtaccgcattaacgatgacctggaatactctgttgagatctatgaatggtctggaacaagctggaagccatatgttgctgatgatgtgcaactccagtttttcatgatgagtccttatgttctgaaaactatgtcgaatgacaacaagggtttatactcaacatccttcaaagttcctgatgtctacggagttttccagttcaaagttgagtaccagaggctgggatatactggtttgtcttttacaaagcagattccagtgcgcccttacaggcataacgagtatgagaggttcataacatcagcgtacccatactacactgcctcattttcaacgatgtgtgctttcttcatattctcgcttgtgtacctgtaccacaaataaaggactcacgggagcgcacaagtttctggaggctgctgatgcgacctagatctgtggccaagtgttacccggtgcaattttatggaatcatatatttgtagtaggccaacttagctagaattagacgaccgtgaccgcaatcatgggaaatttactcgtgctagtaggatgttcgatctgccccacaattttttgttttcggatccttctgatcagcacttgtgaaaacgtttacagtctgtagcattgaaaggatgatgaagcatgtagtgattttg

SEQ ID NO: 23677 - protein, 482 aa, Zea mays subsp. mays
  peptide (1)..(482): Ceres Seq. ID no. 12367332
  misc_feature (53)..(482): Pfam Name: Pfam Description:  Dolichyl-diphosphooligosaccharide- proteinglycosyltransferase 48kD subunit
  misc_feature (45)..(482): NCBI GI NO: 38175467 NR Description: putative dolichyl-di-phosphooligosaccharide-protein
  misc_feature (53)..(482): NCBI GI NO: 18425101 NR Description: dolichyl-di-phosphooligosaccharide- proteinglycotransferase
  misc_feature (53)..(482): NCBI GI NO: 21553942 NR Description: dolichyl-di-phosphooligosaccharide- proteinglycotransferase
  misc_feature (53)..(482): NCBI GI NO: 14334506 NR Description: putative dolichyl-di-phosphooligosaccharide-proteinglycotransferase
  misc_feature (53)..(482): NCBI GI NO: 8843726 NR Description: dolichyl-di-phosphooligosaccharide- proteinglycotransferase
  misc_feature (75)..(482): NCBI GI NO: 627424 NR Description: dolichyl-diphosphooligosaccharide- proteinglycotransferase
  misc_feature (75)..(482): NCBI GI NO: 20070197 NR Description: dolichyl-diphosphooligosaccharide- proteinglycosyltransferase
  misc_feature (75)..(482): NCBI GI NO: 21104416 NR Description: dolichyl-diphosphooligosaccharide- proteinglycosyltransferase
  misc_feature (75)..(482): NCBI GI NO: 30584753 NR Description: Homo sapiens dolichyl-diphosphooligosaccharide- protein glycosyltransferase
  misc_feature (75)..(482): NCBI GI NO: 2662375 NR Description: oligosaccharyltransferase [Homo sapiens]
QSDGLDGSLPLLATLALLFETPSCRLRRCWLLRHSPSPEICSTMATRRHILLLAAAFVSLLALEAVEGLEEGPRGRRLLVLLDDLAVRSSHSAFFGSLQARGFDLEFRLADDPKLSLHRYGQYLYDGLVLFAPSTPRFGGSVDQNAVLEFIDAGHDMILAADSSASDLIRGIATECGVDFDEDPEAMVIDHINYAAMDVEGDHTLIVGDDLIQSDVILGSKKIEAPVLFRGIGHTANPSNSLVLKVLSASPSAYSANPKTKLLLPPSLTGSAISLVSVMQARNNARVLLSGSLDLFSNRFLKSGVQKAGSKTRYERAGNEQFVTETSKWVFHERGHLKAVNVKHHKVGETNEPGMYRINDDLEYSVEIYEWSGTSWKPYVADDVQLQFFMMSPYVLKTMSNDNKGLYSTSFKVPDVYGVFQFKVEYQRLGYTGLSFTKQIPVRPYRHNEYERFITSAYPYYTASFSTMCAFFIFSLVYLYHK

SEQ ID NO: 23678 - protein, 439 aa, Zea mays subsp. mays
  peptide (1)..(439): Ceres Seq. ID no. 12367333
  misc_feature (10)..(439): Pfam Name: Pfam Description:  Dolichyl-diphosphooligosaccharide- proteinglycosyltransferase 48kD subunit
  misc_feature (2)..(439): NCBI GI NO: 38175467 NR Description: putative dolichyl-di-phosphooligosaccharide-protein
  misc_feature (10)..(439): NCBI GI NO: 18425101 NR Description: dolichyl-di-phosphooligosaccharide- proteinglycotransferase
  misc_feature (10)..(439): NCBI GI NO: 21553942 NR Description: dolichyl-di-phosphooligosaccharide- proteinglycotransferase
  misc_feature (10)..(439): NCBI GI NO: 14334506 NR Description: putative dolichyl-di-phosphooligosaccharide-proteinglycotransferase
  misc_feature (10)..(439): NCBI GI NO: 8843726 NR Description: dolichyl-di-phosphooligosaccharide- proteinglycotransferase
  misc_feature (32)..(439): NCBI GI NO: 627424 NR Description: dolichyl-diphosphooligosaccharide- proteinglycotransferase
  misc_feature (32)..(439): NCBI GI NO: 21104416 NR Description: dolichyl-diphosphooligosaccharide- proteinglycosyltransferase
  misc_feature (32)..(439): NCBI GI NO: 20070197 NR Description: dolichyl-diphosphooligosaccharide- proteinglycosyltransferase
  misc_feature (32)..(439): NCBI GI NO: 30584753 NR Description: Homo sapiens dolichyl-diphosphooligosaccharide- protein glycosyltransferase
  misc_feature (32)..(439): NCBI GI NO: 2662375 NR Description: oligosaccharyltransferase [Homo sapiens]
MATRRHILLLAAAFVSLLALEAVEGLEEGPRGRRLLVLLDDLAVRSSHSAFFGSLQARGFDLEFRLADDPKLSLHRYGQYLYDGLVLFAPSTPRFGGSVDQNAVLEFIDAGHDMILAADSSASDLIRGIATECGVDFDEDPEAMVIDHINYAAMDVEGDHTLIVGDDLIQSDVILGSKKIEAPVLFRGIGHTANPSNSLVLKVLSASPSAYSANPKTKLLLPPSLTGSAISLVSVMQARNNARVLLSGSLDLFSNRFLKSGVQKAGSKTRYERAGNEQFVTETSKWVFHERGHLKAVNVKHHKVGETNEPGMYRINDDLEYSVEIYEWSGTSWKPYVADDVQLQFFMMSPYVLKTMSNDNKGLYSTSFKVPDVYGVFQFKVEYQRLGYTGLSFTKQIPVRPYRHNEYERFITSAYPYYTASFSTMCAFFIFSLVYLYHK

SEQ ID NO: 23679 - protein, 326 aa, Zea mays subsp. mays
  peptide (1)..(326): Ceres Seq. ID no. 12367334
  misc_feature (1)..(326): Pfam Name: Pfam Description:  Dolichyl-diphosphooligosaccharide- proteinglycosyltransferase 48kD subunit
  misc_feature (1)..(326): NCBI GI NO: 38175467 NR Description: putative dolichyl-di-phosphooligosaccharide-protein
  misc_feature (1)..(326): NCBI GI NO: 18425101 NR Description: dolichyl-di-phosphooligosaccharide- proteinglycotransferase
  misc_feature (1)..(326): NCBI GI NO: 21553942 NR Description: dolichyl-di-phosphooligosaccharide- proteinglycotransferase
  misc_feature (1)..(326): NCBI GI NO: 14334506 NR Description: putative dolichyl-di-phosphooligosaccharide-proteinglycotransferase
  misc_feature (1)..(326): NCBI GI NO: 8843726 NR Description: dolichyl-di-phosphooligosaccharide- proteinglycotransferase
  misc_feature (1)..(326): NCBI GI NO: 627424 NR Description: dolichyl-diphosphooligosaccharide- proteinglycotransferase
  misc_feature (1)..(326): NCBI GI NO: 21104416 NR Description: dolichyl-diphosphooligosaccharide- proteinglycosyltransferase
  misc_feature (1)..(326): NCBI GI NO: 20070197 NR Description: dolichyl-diphosphooligosaccharide- proteinglycosyltransferase
  misc_feature (1)..(326): NCBI GI NO: 30584753 NR Description: Homo sapiens dolichyl-diphosphooligosaccharide- protein glycosyltransferase
  misc_feature (1)..(326): NCBI GI NO: 2662375 NR Description: oligosaccharyltransferase [Homo sapiens]
MILAADSSASDLIRGIATECGVDFDEDPEAMVIDHINYAAMDVEGDHTLIVGDDLIQSDVILGSKKIEAPVLFRGIGHTANPSNSLVLKVLSASPSAYSANPKTKLLLPPSLTGSAISLVSVMQARNNARVLLSGSLDLFSNRFLKSGVQKAGSKTRYERAGNEQFVTETSKWVFHERGHLKAVNVKHHKVGETNEPGMYRINDDLEYSVEIYEWSGTSWKPYVADDVQLQFFMMSPYVLKTMSNDNKGLYSTSFKVPDVYGVFQFKVEYQRLGYTGLSFTKQIPVRPYRHNEYERFITSAYPYYTASFSTMCAFFIFSLVYLYHK

SEQ ID NO: 23680 - DNA, 1180 bp, Zea mays subsp. mays
  misc_feature (1)..(1180): Ceres Seq. ID no. 12355979
attcgcgccgggttccgcgagatctctggtgccccccggtttcgctcccgcgccccaatgctccctgtcgcgagtcgtggtctccgccgctcgttgcatcttcgttaccgatcagttgatcccgctcatccggcgggggatcatccgaccattggcagtctaccttttcaacactaaagcttctaagttgatgagtgatgaggccaggcaagcaaagattgtcaaattctcggagtccatttggaaacttacatactatgcttctgttcaagcatgggtcctcatgataataaagcaagaaccatggtcgttggatatggtgcagtactttgatggctggccaaatcaacccatcgtgtcctcgttgatgcttttctatatgtgccagtgtggattttatatctacagcattggtgctcttgttgcttgggaaacccgcagaaaagattttgctgtaatgatgtctcatcatgtaataacatctactcttattggagtttcatatctgacaggattttttcgaattgggaccatcgttcttgctcttcatgatacaagtgatgtgtttcttgagactgccaaattgtgcaagtacacagaaaaggagttgggggctagcttgtttttcggtctcttcgctatctcctggcttctattgcgtttgatttacttcccgttttggataatcaaagcctctagctatcattccatcacattctggaggaagctggatgaattccctacagctttgtactatatcttcaatacaatgcttctcacattgcttgtattccatatgtactggtggaaactcatatgtttgatgataatgagacaattgaataataaaggacaggttacagatgatgttcgatctgattctgaggatgacgagtaatgggggagattcattctttgacatctgcaatgtgtcatttcttcgccaatacttatctacgcctgcttccagaattgattgttttgatcgtggcaagtctcgggcatggataggaaagtttatcctctgtatattgccttgtgatatcaaacatggctagaacgagaatggagcaggtcctatacattacgggtatagctagcaagcttacttgaaggttccttcaaaaaattttggttcaccttttctgatatatggggaaagatatgagagggggtacag

SEQ ID NO: 23681 - protein, 298 aa, Zea mays subsp. mays
  peptide (1)..(298): Ceres Seq. ID no. 12355980
  misc_feature (94)..(298): Pfam Name: LAG1 Pfam Description: Longevity-assurance protein
  misc_feature (45)..(298): NCBI GI NO: 34901974 NR Description: unknown protein
  misc_feature (42)..(298): NCBI GI NO: 15230323 NR Description: longevity factor-like protein
  misc_feature (42)..(298): NCBI GI NO: 7658241 NR Description: LAG1 homolog 2 [Arabidopsis thaliana]
  misc_feature (42)..(298): NCBI GI NO: 25518747 NR Description: hypothetical protein F13B4
  misc_feature (51)..(298): NCBI GI NO: 18404559 NR Description: expressed protein; protein id: At3g25540
  misc_feature (42)..(297): NCBI GI NO: 16974114 NR Description: putative resistance protein
  misc_feature (42)..(298): NCBI GI NO: 7688742 NR Description: ASC1 [Lycopersicon esculentum]
  misc_feature (42)..(234): NCBI GI NO: 30683361 NR Description: longevity assurance protein -related
  misc_feature (66)..(298): NCBI GI NO: 27769146 NR Description: Similar to RIKEN cDNA 0610013I17 gene
  misc_feature (73)..(297): NCBI GI NO: 31241781 NR Description: ENSANGP00000012836 [Anopheles gambiae]
FAPGSARSLVPPGFAPAPQCSLSRVVVSAARCIFVTDQLIPLIRRGIIRPLAVYLFNTKASKLMSDEARQAKIVKFSESIWKLTYYASVQAWVLMIIKQEPWSLDMVQYFDGWPNQPIVSSLMLFYMCQCGFYIYSIGALVAWETRRKDFAVMMSHHVITSTLIGVSYLTGFFRIGTIVLALHDTSDVFLETAKLCKYTEKELGASLFFGLFAISWLLLRLIYFPFWIIKASSYHSITFWRKLDEFPTALYYIFNTMLLTLLVFHMYWWKLICLMIMRQLNNKGQVTDDVRSDSEDDE

SEQ ID NO: 23682 - protein, 235 aa, Zea mays subsp. mays
  peptide (1)..(235): Ceres Seq. ID no. 12355981
  misc_feature (31)..(235): Pfam Name: LAG1 Pfam Description: Longevity-assurance protein
  misc_feature (1)..(235): NCBI GI NO: 34901974 NR Description: unknown protein
  misc_feature (1)..(235): NCBI GI NO: 15230323 NR Description: longevity factor-like protein
  misc_feature (1)..(235): NCBI GI NO: 7658241 NR Description: LAG1 homolog 2 [Arabidopsis thaliana]
  misc_feature (1)..(235): NCBI GI NO: 25518747 NR Description: hypothetical protein F13B4
  misc_feature (1)..(235): NCBI GI NO: 18404559 NR Description: expressed protein; protein id: At3g25540
  misc_feature (1)..(234): NCBI GI NO: 16974114 NR Description: putative resistance protein
  misc_feature (1)..(235): NCBI GI NO: 7688742 NR Description: ASC1 [Lycopersicon esculentum]
  misc_feature (1)..(171): NCBI GI NO: 30683361 NR Description: longevity assurance protein -related
  misc_feature (3)..(235): NCBI GI NO: 27769146 NR Description: Similar to RIKEN cDNA 0610013I17 gene
  misc_feature (10)..(234): NCBI GI NO: 31241781 NR Description: ENSANGP00000012836 [Anopheles gambiae]
MSDEARQAKIVKFSESIWKLTYYASVQAWVLMIIKQEPWSLDMVQYFDGWPNQPIVSSLMLFYMCQCGFYIYSIGALVAWETRRKDFAVMMSHHVITSTLIGVSYLTGFFRIGTIVLALHDTSDVFLETAKLCKYTEKELGASLFFGLFAISWLLLRLIYFPFWIIKASSYHSITFWRKLDEFPTALYYIFNTMLLTLLVFHMYWWKLICLMIMRQLNNKGQVTDDVRSDSEDDE

SEQ ID NO: 23683 - protein, 204 aa, Zea mays subsp. mays
  peptide (1)..(204): Ceres Seq. ID no. 12355982
  misc_feature (1)..(204): Pfam Name: LAG1 Pfam Description: Longevity-assurance protein
  misc_feature (1)..(204): NCBI GI NO: 34901974 NR Description: unknown protein
  misc_feature (1)..(204): NCBI GI NO: 15230323 NR Description: longevity factor-like protein
  misc_feature (1)..(204): NCBI GI NO: 7658241 NR Description: LAG1 homolog 2 [Arabidopsis thaliana]
  misc_feature (1)..(204): NCBI GI NO: 25518747 NR Description: hypothetical protein F13B4
  misc_feature (1)..(204): NCBI GI NO: 18404559 NR Description: expressed protein; protein id: At3g25540
  misc_feature (1)..(203): NCBI GI NO: 16974114 NR Description: putative resistance protein
  misc_feature (1)..(204): NCBI GI NO: 7688742 NR Description: ASC1 [Lycopersicon esculentum]
  misc_feature (1)..(140): NCBI GI NO: 30683361 NR Description: longevity assurance protein -related
  misc_feature (1)..(204): NCBI GI NO: 27769146 NR Description: Similar to RIKEN cDNA 0610013I17 gene
  misc_feature (1)..(203): NCBI GI NO: 31241781 NR Description: ENSANGP00000012836 [Anopheles gambiae]
MIIKQEPWSLDMVQYFDGWPNQPIVSSLMLFYMCQCGFYIYSIGALVAWETRRKDFAVMMSHHVITSTLIGVSYLTGFFRIGTIVLALHDTSDVFLETAKLCKYTEKELGASLFFGLFAISWLLLRLIYFPFWIIKASSYHSITFWRKLDEFPTALYYIFNTMLLTLLVFHMYWWKLICLMIMRQLNNKGQVTDDVRSDSEDDE

SEQ ID NO: 23684 - DNA, 1435 bp, Zea mays subsp. mays
  misc_feature (1)..(1435): Ceres Seq. ID no. 12355983
atcaaatcacacacccatcagatcacaaaggcaaagaggagagagagagagagagggatgatgaggacgacgatgagagagatatactactaaactatctatccatcaatcaatcaggtagcccggcagcaatcgcgtgccgcctttcctctcacgtacaccaccacacctcccaggctcagctcgattcgttcgttgccgcgtcaaatcgggacaagaagccagccggccctgttgcagtgttgcttcgcctgccctgctgctgttgcttgcgccacgcacgtacctgaagaaagcagcgacggattgatcgaccggtggttcgctgtcgccacggccggcatgtcgtcctcgtcctcgtcctcgtcgtcctccgccgcctccgccgccacggtgttcccgcggtccccgcagctgccgcctccggtcctggtggagaacggcctcacgccgctgcatcagcttacgccggtagccgcggccgcgccggccgccgagcagctctgctacgtgcactgctacttctgcgacaccgtcctcgtcgtgagcgtgcctacgagcagcttgttcaagacggtgacggtacgatgcggccactgcagcagcttgctcaccgtcgacatgaggggcctcctcttcccgggcacgccgacggacacggtcgcgggggccgcaccaccaccagctgctgacactagtacgactaccaccaccatcaccacggcgccgccgccggccaactcggtcaacaacgggcagttccacctcccccactcgctcaaccaccctcaccaccaatccctcctggtggtacgcgcgtggttcaaagctgccggtggagctagctagctcgctctgatctgatgtcatatatcgcatgcctaatctcttgtttccgcgcgcgcgcgtgcatgcaggacgagatatccagcgccgcgaacccgagcctgcagttgcagatggagcagcacggcggcctcggcggcctgatactcggcggcagcaggaacacggccgcgccgcctccgccgcagccgcctgcagcgggtaaaggggccaaagagccgtcgccgcgcactaatcccgccgtcaacagacctccggagaagaggcagcgcgtgccgtcggcctacaaccgcttcatcaaggacgaaatccaacgcatcaaggctggcaatcccaacatctcgcacagggaggccttcagcgcggcggccaagaactgggcgcactttccacatatccactttggactcatgccggatcaccaggggctcaagacgacaagcctgctacctcagggtcaccagagaaaggacgggcttcttaaggaagggctctacgcggcagcggcggcggccgcagctcatgcggcagccaacatggggattgctccatactaatttacaattactcctactcaagcttgctactg

SEQ ID NO: 23685 - protein, 179 aa, Zea mays subsp. mays
  peptide (1)..(179): Ceres Seq. ID no. 12355984
  misc_feature (19)..(131): Pfam Name: Pfam Description:  YABBY protein
  misc_feature (14)..(179): NCBI GI NO: 32330679 NR Description: yabby9 protein [Zea mays]
  misc_feature (14)..(179): NCBI GI NO: 37551421 NR Description: FIL-like protein [Triticum aestivum]
  misc_feature (19)..(179): NCBI GI NO: 37535908 NR Description: hypothetical protein
  misc_feature (19)..(179): NCBI GI NO: 32330677 NR Description: yabby15 protein [Zea mays]
  misc_feature (1)..(179): NCBI GI NO: 32330681 NR Description: yabby10 protein [Zea mays]
  misc_feature (19)..(179): NCBI GI NO: 38605890 NR Description: OSJNBb0020O11.2
  misc_feature (1)..(179): NCBI GI NO: 32330675 NR Description: yabby14 protein [Zea mays]
  misc_feature (70)..(169): NCBI GI NO: 18411242 NR Description: putative YABBY3 axial regulator
  misc_feature (68)..(179): NCBI GI NO: 27804377 NR Description: MADS-box transcription factor CDM51
  misc_feature (74)..(179): NCBI GI NO: 18406725 NR Description: expressed protein; protein id: At2g45190
MSYIACLISCFRARACMQDEISSAANPSLQLQMEQHGGLGGLILGGSRNTAAPPPPQPPAAGKGAKEPSPRTNPAVNRPPEKRQRVPSAYNRFIKDEIQRIKAGNPNISHREAFSAAAKNWAHFPHIHFGLMPDHQGLKTTSLLPQGHQRKDGLLKEGLYAAAAAAAAHAAANMGIAPY

SEQ ID NO: 23686 - protein, 168 aa, Zea mays subsp. mays
  peptide (1)..(168): Ceres Seq. ID no. 12355985
  misc_feature (45)..(155): Pfam Name: Pfam Description:  YABBY protein
  misc_feature (5)..(156): NCBI GI NO: 32330679 NR Description: yabby9 protein [Zea mays]
  misc_feature (6)..(155): NCBI GI NO: 37551421 NR Description: FIL-like protein [Triticum aestivum]
  misc_feature (1)..(155): NCBI GI NO: 37535908 NR Description: hypothetical protein
  misc_feature (43)..(113): NCBI GI NO: 32330677 NR Description: yabby15 protein [Zea mays]
  misc_feature (52)..(100): NCBI GI NO: 38605890 NR Description: OSJNBb0020O11.2
  misc_feature (49)..(113): NCBI GI NO: 32330675 NR Description: yabby14 protein [Zea mays]
  misc_feature (7)..(156): NCBI GI NO: 32330681 NR Description: yabby10 protein [Zea mays]
  misc_feature (50)..(158): NCBI GI NO: 18411242 NR Description: putative YABBY3 axial regulator
  misc_feature (48)..(108): NCBI GI NO: 27804377 NR Description: MADS-box transcription factor CDM51
  misc_feature (51)..(102): NCBI GI NO: 18406725 NR Description: expressed protein; protein id: At2g45190
MSSSSSSSSSSAASAATVFPRSPQLPPPVLVENGLTPLHQLTPVAAAAPAAEQLCYVHCYFCDTVLVVSVPTSSLFKTVTVRCGHCSSLLTVDMRGLLFPGTPTDTVAGAAPPPAADTSTTTTTITTAPPPANSVNNGQFHLPHSLNHPHHQSLLVVRAWFKAAGGAS

SEQ ID NO: 23687 - protein, 163 aa, Zea mays subsp. mays
  peptide (1)..(163): Ceres Seq. ID no. 12355986
  misc_feature (3)..(115): Pfam Name: Pfam Description:  YABBY protein
  misc_feature (1)..(163): NCBI GI NO: 32330679 NR Description: yabby9 protein [Zea mays]
  misc_feature (1)..(163): NCBI GI NO: 37551421 NR Description: FIL-like protein [Triticum aestivum]
  misc_feature (3)..(163): NCBI GI NO: 37535908 NR Description: hypothetical protein
  misc_feature (3)..(163): NCBI GI NO: 32330677 NR Description: yabby15 protein [Zea mays]
  misc_feature (1)..(163): NCBI GI NO: 32330681 NR Description: yabby10 protein [Zea mays]
  misc_feature (3)..(163): NCBI GI NO: 38605890 NR Description: OSJNBb0020O11.2
  misc_feature (1)..(163): NCBI GI NO: 32330675 NR Description: yabby14 protein [Zea mays]
  misc_feature (54)..(153): NCBI GI NO: 18411242 NR Description: putative YABBY3 axial regulator
  misc_feature (52)..(163): NCBI GI NO: 27804377 NR Description: MADS-box transcription factor CDM51
  misc_feature (58)..(163): NCBI GI NO: 18406725 NR Description: expressed protein; protein id: At2g45190
MQDEISSAANPSLQLQMEQHGGLGGLILGGSRNTAAPPPPQPPAAGKGAKEPSPRTNPAVNRPPEKRQRVPSAYNRFIKDEIQRIKAGNPNISHREAFSAAAKNWAHFPHIHFGLMPDHQGLKTTSLLPQGHQRKDGLLKEGLYAAAAAAAAHAAANMGIAPY

SEQ ID NO: 23688 - DNA, 941 bp, Zea mays subsp. mays
  misc_feature (1)..(941): Ceres Seq. ID no. 12374363
aaggataaatctggtgataaaagtagcatctctccagcaagcatgacaaagaagtgtacgccgttggcacctaggaagactttgcagcctgagcaagcatttcaccctctggaagaggactcttgttctgtgacttcctcgactacaacatcatcaagagctggcagaactaagacaactgttcctgttgccccatcatttgtgtgtgctaaccgtgctgacaagaggaaggagttctacacaaaattagaggagaaacataaagctttggaagcagagaaggacgaggctgaggccaggaaaaaggaagagcaagacgttgctataaagcaactaaggaagtcattggtgattagagcgaaacccatgccaagcttctatcaagaaggccccccaccaaaggctgaacttaagaaggtgcctcctactcgtgccaaatcaccaaagtttacaagctcaaggagaaagagctgcaatgacacaccacagacacccgagggaaaaaacaccaacgcaacatctaccacccggccacatcgtcacagcatcggggcttctaaagatgccagcagagtacagtgctcgccgaagagcggcgtggcgaccaaaactagatctgtcaagcctgagctgaaggccctctgaagcgcatgcgaagcagccaagtgctgcgattgtctctgtacaaacagaatcgcctgactcttagccgtttccatttccatgcattttttgttttgttttgttttgttctatacccagcatctccaccaaaaagaaggctgtagggccaatgacgttgttcgcgatgctggaccttgtccccattttcgtcttgtactcgttaagaactttgttgctgctgggaccatgtgacattcattccatgtaaattacctggggatccctgtagggatctcgactggtgttttggtcttgtg

SEQ ID NO: 23689 - protein, 214 aa, Zea mays subsp. mays
  peptide (1)..(214): Ceres Seq. ID no. 12374364
  misc_feature (2)..(209): NCBI GI NO: 34897180 NR Description: unknown protein
  misc_feature (19)..(212): NCBI GI NO: 34393229 NR Description: putative seed specific protein
  misc_feature (13)..(188): NCBI GI NO: 30679219 NR Description: expressed protein [Arabidopsis thaliana]
  misc_feature (22)..(188): NCBI GI NO: 6175167 NR Description: unknown protein [Arabidopsis thaliana]
  misc_feature (22)..(188): NCBI GI NO: 18396961 NR Description: expressed protein; protein id: At3g04630
  misc_feature (22)..(188): NCBI GI NO: 21618286 NR Description: unknown [Arabidopsis thaliana]
  misc_feature (8)..(198): NCBI GI NO: 18404945 NR Description: expressed protein; protein id: At1g54460
  misc_feature (8)..(198): NCBI GI NO: 21553401 NR Description: unknown [Arabidopsis thaliana]
  misc_feature (24)..(192): NCBI GI NO: 9294199 NR Description: gb|AAF04893
  misc_feature (24)..(192): NCBI GI NO: 15228950 NR Description: unknown protein; protein id: At3g23090.1
KDKSGDKSSISPASMTKKCTPLAPRKTLQPEQAFHPLEEDSCSVTSSTTTSSRAGRTKTTVPVAPSFVCANRADKRKEFYTKLEEKHKALEAEKDEAEARKKEEQDVAIKQLRKSLVIRAKPMPSFYQEGPPPKAELKKVPPTRAKSPKFTSSRRKSCNDTPQTPEGKNTNATSTTRPHRHSIGASKDASRVQCSPKSGVATKTRSVKPELKAL

SEQ ID NO: 23690 - protein, 200 aa, Zea mays subsp. mays
  peptide (1)..(200): Ceres Seq. ID no. 12374365
  misc_feature (1)..(195): NCBI GI NO: 34897180 NR Description: unknown protein
  misc_feature (5)..(198): NCBI GI NO: 34393229 NR Description: putative seed specific protein
  misc_feature (1)..(174): NCBI GI NO: 30679219 NR Description: expressed protein [Arabidopsis thaliana]
  misc_feature (8)..(174): NCBI GI NO: 6175167 NR Description: unknown protein [Arabidopsis thaliana]
  misc_feature (8)..(174): NCBI GI NO: 21618286 NR Description: unknown [Arabidopsis thaliana]
  misc_feature (8)..(174): NCBI GI NO: 18396961 NR Description: expressed protein; protein id: At3g04630
  misc_feature (1)..(184): NCBI GI NO: 18404945 NR Description: expressed protein; protein id: At1g54460
  misc_feature (1)..(184): NCBI GI NO: 21553401 NR Description: unknown [Arabidopsis thaliana]
  misc_feature (10)..(178): NCBI GI NO: 9294199 NR Description: gb|AAF04893
  misc_feature (10)..(178): NCBI GI NO: 15228950 NR Description: unknown protein; protein id: At3g23090.1
MTKKCTPLAPRKTLQPEQAFHPLEEDSCSVTSSTTTSSRAGRTKTTVPVAPSFVCANRADKRKEFYTKLEEKHKALEAEKDEAEARKKEEQDVAIKQLRKSLVIRAKPMPSFYQEGPPPKAELKKVPPTRAKSPKFTSSRRKSCNDTPQTPEGKNTNATSTTRPHRHSIGASKDASRVQCSPKSGVATKTRSVKPELKAL

SEQ ID NO: 23691 - DNA, 1365 bp, Zea mays subsp. mays
  misc_feature (1)..(1365): Ceres Seq. ID no. 12410913
atataccctttcgtctccgcccagcagcaacggcacccaccgaatccgcccctccctctttccgttccgcctcgtcgcgctcgctctcgctgcgccgcccgccccacctcacggagctcacggcaacaccggcagggacggaaaaggaaagccgaggaggcgaggagagagagatacaaggcaggcagccaggcacaggcagcccgcggctggctacggggccaaaacccttacgcgcgacgcggccccctcctcttcttctctctcccaccaccgccctccccttgccatttttgccgcaggagccgccgccatccgatccggaagagggaggaggggggagggaggaggatctgtgtcccgattcgattggagctctcgtccccggcggtccaggatggtgcggggcaagacgcagatgaagcggatagagaacccggccagtcgccaggtcaccttctccaagcgccgcaacggcctgctcaagaaggcgttcgagctctccgtcctctgcgacgccgaggtcgcgctcgtcgtcttctccccgcgcggcaagctctacgaattcgccagcggaagtgcccagaaaacaattgaacgttatagaacgtacacaaaggataatgtcagcaacaagacagcacatcaggacattgagcaagtaaaagctgatgctgagggcctggcaaagaaactggaagcacttgaagcttacaaaagaaaacttttgggtgagaggttggaagaatgctcctttgaagaactgcacagtttggaagtgaaactcgaaaagagccttcattgcatcaggggaagaaagactcagctgctggaggagcaactccataagctgaaggagaaggagatgaatctgcgcaagagcaacgaagatttacgtgaaaagtgcaagaagcagccgccgccgccgccgccctatgctgatggctcctccgccgcctccagccgccggcagccatcgatcacacggggccgaaggatgtcgggatggacgtggagacggagctgtacataggattgcccggcagagattaccgctcaaacaacaaagacatgactgcacagtagctgtcaggtcaggtcaggtcaggctagccagcagtgcagagaataatcttagatctgtggtgcggagaactggagatgcaagccaagcccaagccaatcaacatgataaggatcatgagtgtcgcgtcgtgttttacaaacctgtccaccgtccgtcaaaggcacatgcgccagaacgtccgtcagagaacacttaccccctcatctccctctattagctagctgctccggcctgctcatgtcgaaaccttctgttcaagtatgttctcctcctgatgt

SEQ ID NO: 23692 - protein, 343 aa, Zea mays subsp. mays
  peptide (1)..(343): Ceres Seq. ID no. 12410914
  misc_feature (206)..(304): Pfam Name: Pfam Description:  K-box region
  misc_feature (133)..(325): NCBI GI NO: 12002139 NR Description: MADS box protein 1 [Zea mays]
  misc_feature (133)..(311): NCBI GI NO: 5295990 NR Description: MADS box-like protein
  misc_feature (133)..(301): NCBI GI NO: 5051933 NR Description: MADS-box protein FDRMADS8 [Oryza sativa]
  misc_feature (133)..(301): NCBI GI NO: 33621123 NR Description: transcription factor MADS56
  misc_feature (133)..(301): NCBI GI NO: 37536442 NR Description: putative transcription factor
  misc_feature (133)..(322): NCBI GI NO: 6635740 NR Description: agamous-like MADS box protein OPMADS1
  misc_feature (133)..(301): NCBI GI NO: 15225534 NR Description: MADS-box protein (AGL20); protein id: At2g45660
  misc_feature (133)..(301): NCBI GI NO: 7446552 NR Description: MADS box protein A - white mustard
  misc_feature (133)..(301): NCBI GI NO: 30171309 NR Description: MADS-box protein [Cardamine flexuosa]
  misc_feature (133)..(301): NCBI GI NO: 30171311 NR Description: MADS-box protein [Draba nemorosa var. hebecarpa]
YTLSSPPSSNGTHRIRPSLFPFRLVALALAAPPAPPHGAHGNTGRDGKGKPRRRGERDTRQAARHRQPAAGYGAKTLTRDAAPSSSSLSHHRPPLAIFAAGAAAIRSGRGRRGEGGGSVSRFDWSSRPRRSRMVRGKTQMKRIENPASRQVTFSKRRNGLLKKAFELSVLCDAEVALVVFSPRGKLYEFASGSAQKTIERYRTYTKDNVSNKTAHQDIEQVKADAEGLAKKLEALEAYKRKLLGERLEECSFEELHSLEVKLEKSLHCIRGRKTQLLEEQLHKLKEKEMNLRKSNEDLREKCKKQPPPPPPYADGSSAASSRRQPSITRGRRMSGWTWRRSCT

SEQ ID NO: 23693 - protein, 211 aa, Zea mays subsp. mays
  peptide (1)..(211): Ceres Seq. ID no. 12410915
  misc_feature (74)..(172): Pfam Name: Pfam Description:  K-box region
  misc_feature (1)..(193): NCBI GI NO: 12002139 NR Description: MADS box protein 1 [Zea mays]
  misc_feature (1)..(179): NCBI GI NO: 5295990 NR Description: MADS box-like protein
  misc_feature (1)..(169): NCBI GI NO: 5051933 NR Description: MADS-box protein FDRMADS8 [Oryza sativa]
  misc_feature (1)..(169): NCBI GI NO: 33621123 NR Description: transcription factor MADS56
  misc_feature (1)..(169): NCBI GI NO: 37536442 NR Description: putative transcription factor
  misc_feature (1)..(190): NCBI GI NO: 6635740 NR Description: agamous-like MADS box protein OPMADS1
  misc_feature (1)..(169): NCBI GI NO: 15225534 NR Description: MADS-box protein (AGL20); protein id: At2g45660
  misc_feature (1)..(169): NCBI GI NO: 7446552 NR Description: MADS box protein A - white mustard
  misc_feature (1)..(169): NCBI GI NO: 30171309 NR Description: MADS-box protein [Cardamine flexuosa]
  misc_feature (1)..(169): NCBI GI NO: 30171311 NR Description: MADS-box protein [Draba nemorosa var. hebecarpa]
MVRGKTQMKRIENPASRQVTFSKRRNGLLKKAFELSVLCDAEVALVVFSPRGKLYEFASGSAQKTIERYRTYTKDNVSNKTAHQDIEQVKADAEGLAKKLEALEAYKRKLLGERLEECSFEELHSLEVKLEKSLHCIRGRKTQLLEEQLHKLKEKEMNLRKSNEDLREKCKKQPPPPPPYADGSSAASSRRQPSITRGRRMSGWTWRRSCT

SEQ ID NO: 23694 - protein, 204 aa, Zea mays subsp. mays
  peptide (1)..(204): Ceres Seq. ID no. 12410916
  misc_feature (67)..(165): Pfam Name: Pfam Description:  K-box region
  misc_feature (1)..(186): NCBI GI NO: 12002139 NR Description: MADS box protein 1 [Zea mays]
  misc_feature (1)..(172): NCBI GI NO: 5295990 NR Description: MADS box-like protein
  misc_feature (1)..(162): NCBI GI NO: 5051933 NR Description: MADS-box protein FDRMADS8 [Oryza sativa]
  misc_feature (1)..(162): NCBI GI NO: 33621123 NR Description: transcription factor MADS56
  misc_feature (1)..(162): NCBI GI NO: 37536442 NR Description: putative transcription factor
  misc_feature (1)..(183): NCBI GI NO: 6635740 NR Description: agamous-like MADS box protein OPMADS1
  misc_feature (1)..(162): NCBI GI NO: 15225534 NR Description: MADS-box protein (AGL20); protein id: At2g45660
  misc_feature (1)..(162): NCBI GI NO: 7446552 NR Description: MADS box protein A - white mustard
  misc_feature (1)..(162): NCBI GI NO: 30171309 NR Description: MADS-box protein [Cardamine flexuosa]
  misc_feature (1)..(162): NCBI GI NO: 30171311 NR Description: MADS-box protein [Draba nemorosa var. hebecarpa]
MKRIENPASRQVTFSKRRNGLLKKAFELSVLCDAEVALVVFSPRGKLYEFASGSAQKTIERYRTYTKDNVSNKTAHQDIEQVKADAEGLAKKLEALEAYKRKLLGERLEECSFEELHSLEVKLEKSLHCIRGRKTQLLEEQLHKLKEKEMNLRKSNEDLREKCKKQPPPPPPYADGSSAASSRRQPSITRGRRMSGWTWRRSCT

SEQ ID NO: 23695 - DNA, 1461 bp, Zea mays subsp. mays
  misc_feature (1)..(1461): Ceres Seq. ID no. 12348941
tccaccgaagcatctccatcgcctccccgtccgcctcctcctcctcctccacctctacctccaccggcgccgccgcctcgtcctactccaacaacaacaatccgctcgcccgcttccccgtcgagcccgcccaccaccgcgacgtggccacgcggcacttcgtcggcggcaaggtgccgctgggcctcaaacggaaggcgctccgcgtcctcgtcaccggcggcgccggcttcgtcggcagccacctggtggaccgcctcctcgagcgcggcgacagcgttatcgtcgtcgataacttcttcaccggccgcaaggacaacgttctgcaccacctcaacgacccaaacttcgagatgatccgccacgatgtcgtcgagcccatcctgctcgaggtcgaccagatctaccacctcgcctgcccggcgtcccccgtccactacaaatacaaccccatcaagacaatcaagaccaatgtggttgggactctgaacatgctcggattagcaaagaggatcaacgccaggttcctcctcaccagtaccagtgaggtctatggtgatcctctccagcacccgcaggtggagacttactggggcaatgtcaatcccatcggtgtcaggagctgttacgatgagggcaagcgtacagctgaaacgttgaccatggattaccaccgtggtgccaaccttgaggttaggatcgcacgtatcttcaatacatatggccctcgcatgtgcattgacgatggccgtgttgtcagtaactttgttgctcaggcactgaggaaggagcccttgacggtttatggtgatggaaagcaaaccaggagtttccaatatgtttctgatctggttgagggtctgatgaagctgatggaaggcgagcatgtggggccattcaacctgggtaaccctggcgagttcaccatgcttgagcttgccaaggttgtccaggacaccatcgaccccaacgcacggatcgagttccgcaagaacacccaggacgacccgcacaagcgcaagcccgacatcagccgcgccaaggagttccttgggtgggagccgaagatccccctgcgtgagggccttcccctcatggtctccgacttccgcaagcgcatcttcggcgaccaagacgctgctgccaccaccaccggaaaccagcaaggttaggatgaaggagcgcacatgacatggaaatttttggtggccctgcttctagctgcttggttgctctctccttactgacaaaagctatgggccacgtagttcgttgggaatgtgttactggaatacctcggctgatgctgtaatgccattctttttttcccctgtattttttctttctcagttctctcagtccttagctatacaaaaaaaaagttcagttgaacagttggagataaacccggatgatctaattctttgttgagagcatagcatcatatatatggtataaacc

SEQ ID NO: 23696 - protein, 389 aa, Zea mays subsp. mays
  peptide (1)..(389): Ceres Seq. ID no. 12348942
  misc_feature (69)..(373): Pfam Name: Pfam Description:  NAD dependent epimerase/dehydratase family
  misc_feature (55)..(386): NCBI GI NO: 15227109 NR Description: putative dTDP-glucose 4-6-dehydratase
  misc_feature (55)..(384): NCBI GI NO: 15229334 NR Description: dTDP-glucose 4-6-dehydratase homolog D18
  misc_feature (55)..(384): NCBI GI NO: 2129578 NR Description: dTDP-glucose 4-6-dehydratase homolog D18 -Arabidopsis thaliana
  misc_feature (6)..(378): NCBI GI NO: 17473549 NR Description: dTDP-glucose 4-6-dehydratase-like protein
  misc_feature (58)..(376): NCBI GI NO: 25396402 NR Description: UDP-glucuronic acid decarboxylase
  misc_feature (6)..(378): NCBI GI NO: 11270116 NR Description: dTDP-glucose 4-6-dehydratase-like protein -Arabidopsis thaliana
  misc_feature (6)..(378): NCBI GI NO: 30693847 NR Description: NAD-dependent epimerase/dehydratase family
  misc_feature (156)..(376): NCBI GI NO: 34908082 NR Description: P0506B12.30
  misc_feature (58)..(115): NCBI GI NO: 34908082 NR Description: P0506B12.30
  misc_feature (67)..(373): NCBI GI NO: 13591616 NR Description: UDP-D-glucuronate carboxy-lyase [Pisum sativum]
HRSISIASPSASSSSSTSTSTGAAASSYSNNNNPLARFPVEPAHHRDVATRHFVGGKVPLGLKRKALRVLVTGGAGFVGSHLVDRLLERGDSVIVVDNFFTGRKDNVLHHLNDPNFEMIRHDVVEPILLEVDQIYHLACPASPVHYKYNPIKTIKTNVVGTLNMLGLAKRINARFLLTSTSEVYGDPLQHPQVETYWGNVNPIGVRSCYDEGKRTAETLTMDYHRGANLEVRIARIFNTYGPRMCIDDGRVVSNFVAQALRKEPLTVYGDGKQTRSFQYVSDLVEGLMKLMEGEHVGPFNLGNPGEFTMLELAKVVQDTIDPNARIEFRKNTQDDPHKRKPDISRAKEFLGWEPKIPLREGLPLMVSDFRKRIFGDQDAAATTTGNQQG

SEQ ID NO: 23697 - protein, 272 aa, Zea mays subsp. mays
  peptide (1)..(272): Ceres Seq. ID no. 12348943
  misc_feature (1)..(256): Pfam Name: Pfam Description:  NAD dependent epimerase/dehydratase family
  misc_feature (1)..(269): NCBI GI NO: 15227109 NR Description: putative dTDP-glucose 4-6-dehydratase
  misc_feature (1)..(267): NCBI GI NO: 15229334 NR Description: dTDP-glucose 4-6-dehydratase homolog D18
  misc_feature (1)..(267): NCBI GI NO: 2129578 NR Description: dTDP-glucose 4-6-dehydratase homolog D18 -Arabidopsis thaliana
  misc_feature (1)..(261): NCBI GI NO: 17473549 NR Description: dTDP-glucose 4-6-dehydratase-like protein
  misc_feature (1)..(259): NCBI GI NO: 25396402 NR Description: UDP-glucuronic acid decarboxylase
  misc_feature (1)..(261): NCBI GI NO: 11270116 NR Description: dTDP-glucose 4-6-dehydratase-like protein -Arabidopsis thaliana
  misc_feature (1)..(261): NCBI GI NO: 30693847 NR Description: NAD-dependent epimerase/dehydratase family
  misc_feature (39)..(259): NCBI GI NO: 34908082 NR Description: P0506B12.30
  misc_feature (1)..(256): NCBI GI NO: 13591616 NR Description: UDP-D-glucuronate carboxy-lyase [Pisum sativum]
  misc_feature (1)..(256): NCBI GI NO: 15226950 NR Description: putative nucleotide-sugar dehydratase
MIRHDVVEPILLEVDQIYHLACPASPVHYKYNPIKTIKTNVVGTLNMLGLAKRINARFLLTSTSEVYGDPLQHPQVETYWGNVNPIGVRSCYDEGKRTAETLTMDYHRGANLEVRIARIFNTYGPRMCIDDGRVVSNFVAQALRKEPLTVYGDGKQTRSFQYVSDLVEGLMKLMEGEHVGPFNLGNPGEFTMLELAKVVQDTIDPNARIEFRKNTQDDPHKRKPDISRAKEFLGWEPKIPLREGLPLMVSDFRKRIFGDQDAAATTTGNQQG

SEQ ID NO: 23698 - protein, 226 aa, Zea mays subsp. mays
  peptide (1)..(226): Ceres Seq. ID no. 12348944
  misc_feature (1)..(210): Pfam Name: Pfam Description:  NAD dependent epimerase/dehydratase family
  misc_feature (1)..(223): NCBI GI NO: 15227109 NR Description: putative dTDP-glucose 4-6-dehydratase
  misc_feature (1)..(221): NCBI GI NO: 15229334 NR Description: dTDP-glucose 4-6-dehydratase homolog D18
  misc_feature (1)..(221): NCBI GI NO: 2129578 NR Description: dTDP-glucose 4-6-dehydratase homolog D18 -Arabidopsis thaliana
  misc_feature (1)..(215): NCBI GI NO: 17473549 NR Description: dTDP-glucose 4-6-dehydratase-like protein
  misc_feature (1)..(213): NCBI GI NO: 25396402 NR Description: UDP-glucuronic acid decarboxylase
  misc_feature (1)..(215): NCBI GI NO: 11270116 NR Description: dTDP-glucose 4-6-dehydratase-like protein -Arabidopsis thaliana
  misc_feature (1)..(215): NCBI GI NO: 30693847 NR Description: NAD-dependent epimerase/dehydratase family
  misc_feature (1)..(213): NCBI GI NO: 34908082 NR Description: P0506B12.30
  misc_feature (1)..(210): NCBI GI NO: 13591616 NR Description: UDP-D-glucuronate carboxy-lyase [Pisum sativum]
  misc_feature (1)..(210): NCBI GI NO: 15226950 NR Description: putative nucleotide-sugar dehydratase
MLGLAKRINARFLLTSTSEVYGDPLQHPQVETYWGNVNPIGVRSCYDEGKRTAETLTMDYHRGANLEVRIARIFNTYGPRMCIDDGRVVSNFVAQALRKEPLTVYGDGKQTRSFQYVSDLVEGLMKLMEGEHVGPFNLGNPGEFTMLELAKVVQDTIDPNARIEFRKNTQDDPHKRKPDISRAKEFLGWEPKIPLREGLPLMVSDFRKRIFGDQDAAATTTGNQQG

SEQ ID NO: 23699 - DNA, 1473 bp, Zea mays subsp. mays
  misc_feature (1)..(1473): Ceres Seq. ID no. 12407354
aatgtccactcagatctgaaatgtcaatggaatccgttgccgttgccgtcgtggcggtgccgttcccggcgcagggccacctcaacggcatgctgcacttgtctctgctactcgcgtcccgagggctttccgtgcactacgcggcgccggggccgcacgtccgccaggcgcgcgcgcgcgtgcacggctggggcgacgacgcccaccgccgcatcgagttccacgagctcgaggtccccgcgtacgccaccccgccgccggacccggtcgcgccctcgccgttcccgacccacctcatccccatgagcgaggccttcctcgcgggcgcgcgcgccccagtcgccagcctcatcgggagggtctccgcgcgccaccgccgcgtggtggtcctgtacgatcgcctcagctccttcgccgcccccgaggcggcgcggatccccaacggcgaagcgttctgcctgcagtgcgtggccgcgtgcttcgacgccgcgtggacggacgccgggcagcggctcctgcgcaagcacggcctcgacgccccgcaccccggcgcctgcatgccgagggagttcgtggagtacattgtcaggacgcaggaggacagccggagtccggcgttcgctggggtagtggcgaacacgtgccgcgcgatcgagagcgagttcatcgacgtggtggccggggaccctgagaaccgaggaaagagagtcttcgcagtcgggccgatgaatccgctgcttaacgtgaccgcgccgacagcgggacagagtgcacggcacgagtgcttggactggctcgacaagcaaccgccggcgtcggtgctgtacgtgtcgttcggcacgacgtcgtcgctgcgggcggagcagatcgcggaactcgccgcggcgctgcgcgacagcaaacagcggttcgtctgggttctgcgcgacgctgatcgcggtgtggtacacgaggaggaagccgtggagagtaggcacgccaggttcctatccgagttcaccgaggaaactcaaggcatcgggttggtgatcaccgggtgggcgccgcagctggagatcctggcccacggcgccacggcagctttcatgagtcactgcggctggaactcgaccatggagagcctgagccacgggaagccgatgctcgcctggcccatgcactccgaccagccgctggtggcggagctcgtgtgcaagtgcctcaaggccgggctcctcgtaaggccatgggagcaacacagtgctgtgacacctgcggaaaccatccgcgaggtgatcgagaaggtgatggcacgcgatgaaggtttggcggtccgggagagggccaaggagctcatggagtttattcgccgctctgtggccgagggcgggtcttcgcgcaaggaccttgacgacttcgttgcttacatagcaagatgaaatgcgtcctgtatttgactatttctactagtttcaattttgagttctcgtgatg

SEQ ID NO: 23700 - protein, 471 aa, Zea mays subsp. mays
  peptide (1)..(471): Ceres Seq. ID no. 12407355
  misc_feature (7)..(471): NCBI GI NO: 38345594 NR Description: OSJNBb0012E24.12
  misc_feature (8)..(471): NCBI GI NO: 14091010 NR Description: cis-zeatin O-glucosyltransferase [Zea mays]
  misc_feature (9)..(471): NCBI GI NO: 18568243 NR Description: putative cis-zeatin O-glucosyltransferase
  misc_feature (7)..(471): NCBI GI NO: 38345593 NR Description: OSJNBb0012E24.11
  misc_feature (8)..(471): NCBI GI NO: 19743738 NR Description: cis-zeatin O-glucosyltransferase 2 [Zea mays]
  misc_feature (13)..(471): NCBI GI NO: 38345403 NR Description: OSJNBa0017B10.9
  misc_feature (14)..(471): NCBI GI NO: 38345407 NR Description: OSJNBa0017B10.13
  misc_feature (6)..(471): NCBI GI NO: 34899110 NR Description: putative cis-zeatin O-glucosyltransferase
  misc_feature (14)..(377): NCBI GI NO: 38345592 NR Description: OSJNBb0012E24.10
  misc_feature (14)..(471): NCBI GI NO: 20067056 NR Description: putative glucosyltransferase [Phaseolus lunatus]
CPLRSEMSMESVAVAVVAVPFPAQGHLNGMLHLSLLLASRGLSVHYAAPGPHVRQARARVHGWGDDAHRRIEFHELEVPAYATPPPDPVAPSPFPTHLIPMSEAFLAGARAPVASLIGRVSARHRRVVVLYDRLSSFAAPEAARIPNGEAFCLQCVAACFDAAWTDAGQRLLRKHGLDAPHPGACMPREFVEYIVRTQEDSRSPAFAGVVANTCRAIESEFIDVVAGDPENRGKRVFAVGPMNPLLNVTAPTAGQSARHECLDWLDKQPPASVLYVSFGTTSSLRAEQIAELAAALRDSKQRFVWVLRDADRGVVHEEEAVESRHARFLSEFTEETQGIGLVITGWAPQLEILAHGATAAFMSHCGWNSTMESLSHGKPMLAWPMHSDQPLVAELVCKCLKAGLLVRPWEQHSAVTPAETIREVIEKVMARDEGLAVRERAKELMEFIRRSVAEGGSSRKDLDDFVAYIAR

SEQ ID NO: 23701 - protein, 465 aa, Zea mays subsp. mays
  peptide (1)..(465): Ceres Seq. ID no. 12407356
  misc_feature (1)..(465): NCBI GI NO: 38345594 NR Description: OSJNBb0012E24.12
  misc_feature (2)..(465): NCBI GI NO: 14091010 NR Description: cis-zeatin O-glucosyltransferase [Zea mays]
  misc_feature (3)..(465): NCBI GI NO: 18568243 NR Description: putative cis-zeatin O-glucosyltransferase
  misc_feature (1)..(465): NCBI GI NO: 38345593 NR Description: OSJNBb0012E24.11
  misc_feature (2)..(465): NCBI GI NO: 19743738 NR Description: cis-zeatin O-glucosyltransferase 2 [Zea mays]
  misc_feature (7)..(465): NCBI GI NO: 38345403 NR Description: OSJNBa0017B10.9
  misc_feature (8)..(465): NCBI GI NO: 38345407 NR Description: OSJNBa0017B10.13
  misc_feature (1)..(465): NCBI GI NO: 34899110 NR Description: putative cis-zeatin O-glucosyltransferase
  misc_feature (8)..(371): NCBI GI NO: 38345592 NR Description: OSJNBb0012E24.10
  misc_feature (8)..(465): NCBI GI NO: 20067056 NR Description: putative glucosyltransferase [Phaseolus lunatus]
MSMESVAVAVVAVPFPAQGHLNGMLHLSLLLASRGLSVHYAAPGPHVRQARARVHGWGDDAHRRIEFHELEVPAYATPPPDPVAPSPFPTHLIPMSEAFLAGARAPVASLIGRVSARHRRVVVLYDRLSSFAAPEAARIPNGEAFCLQCVAACFDAAWTDAGQRLLRKHGLDAPHPGACMPREFVEYIVRTQEDSRSPAFAGVVANTCRAIESEFIDVVAGDPENRGKRVFAVGPMNPLLNVTAPTAGQSARHECLDWLDKQPPASVLYVSFGTTSSLRAEQIAELAAALRDSKQRFVWVLRDADRGVVHEEEAVESRHARFLSEFTEETQGIGLVITGWAPQLEILAHGATAAFMSHCGWNSTMESLSHGKPMLAWPMHSDQPLVAELVCKCLKAGLLVRPWEQHSAVTPAETIREVIEKVMARDEGLAVRERAKELMEFIRRSVAEGGSSRKDLDDFVAYIAR

SEQ ID NO: 23702 - protein, 463 aa, Zea mays subsp. mays
  peptide (1)..(463): Ceres Seq. ID no. 12407357
  misc_feature (1)..(463): NCBI GI NO: 38345594 NR Description: OSJNBb0012E24.12
  misc_feature (1)..(463): NCBI GI NO: 14091010 NR Description: cis-zeatin O-glucosyltransferase [Zea mays]
  misc_feature (1)..(463): NCBI GI NO: 18568243 NR Description: putative cis-zeatin O-glucosyltransferase
  misc_feature (1)..(463): NCBI GI NO: 38345593 NR Description: OSJNBb0012E24.11
  misc_feature (1)..(463): NCBI GI NO: 19743738 NR Description: cis-zeatin O-glucosyltransferase 2 [Zea mays]
  misc_feature (5)..(463): NCBI GI NO: 38345403 NR Description: OSJNBa0017B10.9
  misc_feature (6)..(463): NCBI GI NO: 38345407 NR Description: OSJNBa0017B10.13
  misc_feature (1)..(463): NCBI GI NO: 34899110 NR Description: putative cis-zeatin O-glucosyltransferase
  misc_feature (6)..(369): NCBI GI NO: 38345592 NR Description: OSJNBb0012E24.10
  misc_feature (6)..(463): NCBI GI NO: 20067056 NR Description: putative glucosyltransferase [Phaseolus lunatus]
MESVAVAVVAVPFPAQGHLNGMLHLSLLLASRGLSVHYAAPGPHVRQARARVHGWGDDAHRRIEFHELEVPAYATPPPDPVAPSPFPTHLIPMSEAFLAGARAPVASLIGRVSARHRRVVVLYDRLSSFAAPEAARIPNGEAFCLQCVAACFDAAWTDAGQRLLRKHGLDAPHPGACMPREFVEYIVRTQEDSRSPAFAGVVANTCRAIESEFIDVVAGDPENRGKRVFAVGPMNPLLNVTAPTAGQSARHECLDWLDKQPPASVLYVSFGTTSSLRAEQIAELAAALRDSKQRFVWVLRDADRGVVHEEEAVESRHARFLSEFTEETQGIGLVITGWAPQLEILAHGATAAFMSHCGWNSTMESLSHGKPMLAWPMHSDQPLVAELVCKCLKAGLLVRPWEQHSAVTPAETIREVIEKVMARDEGLAVRERAKELMEFIRRSVAEGGSSRKDLDDFVAYIAR

SEQ ID NO: 23703 - DNA, 1491 bp, Zea mays subsp. mays
  misc_feature (1)..(1491): Ceres Seq. ID no. 12382090
agtggcacagtggcagtggctggccacccaatcgtctcgttcgtcatctacctctccctcctccaacccaagctaagctaaacagcttacagctcgctccgccatcaccgtatcgagagagacagagacaggctagcgagggaatggagaggatgctggccaggctgatgcagcggcggagctccgtccccctgtccggcctcctccaccacggaggagcgcccgccccgctgcaggccgccggcgccactggggcctccccgctgatcttctcgcaccagcagcagcagcagcacacggccgcctccgccgtcctgccggggctcaagatcagggactccgcgtcccagctgatcgggaggactccgatggtgtacctgaacaaggtgaccgaggggtgcggcgcccgggtggctgccaagctcgagttcctgcagccgtccttcagcgtcaaagacagaccggcgatctcgatgctggaagacgccgaaaagagggggctcatcactccaggaaagaccacgttgatcgagcccacgtcggggaacatgggcatcgggctggcgttcatggcggcgctcaaggggtacgagctcgtgctcaccatgccgtcctacaccagcctggagaggagggtgacgatgcgggcgttcggcgccaacctggtgctgaccgacccggccaaagggatgggcgggacggtgaggaaggcgacggagctgtacgagagacatcccagcgcgcacatgctccagcagttccagaaccctgccaacgtcaaggtgcactacgacacgacgggaccggagatctgggaggacacgcttggccaggtcgatatcttcgtcatggggatcgggagcggcggcaccgtcacgggagtcggcaagtacctcaaggagaaaaaccctaacgcaaagatctatggagttgaacctgccgaggcaaatgttctgaatggtggaaagccaggacctcacctcatcactggaaacggagtagggttcaagccagatattctggacatggacgtgatggaaaaggtgctcgaggtgaaaggtgaggacgccgtcaagatggctcgagagctggcagtcaaggagggtcttttggtcgggatatcatcgggagccaacaccgttgctgctctcgagctagccaagaggccggagaacaaggggaagctcatcgtgaccgttcttccgagccttggcgagcggtacctgtcgtccgcgctgttcgatgagctgaggaaggaggcacaagccatggaaccggtcgcggtggattgatctcgccggtcaagctagctagcctgccgggcacgctggagatctggttcctatcgtcacagctgccagccaagccaattgtacttccattcccccctcatccagttttttattttattttaccgtcagtgtgtcacctcatctatgaaccttgcgaaaaggaaaaaaaaagtgcatgaataatgatgggaaaatgttg

SEQ ID NO: 23704 - protein, 429 aa, Zea mays subsp. mays
  peptide (1)..(429): Ceres Seq. ID no. 12382091
  misc_feature (114)..(403): Pfam Name: Pfam Description:  Pyridoxal-phosphate dependent enzyme
  misc_feature (48)..(429): NCBI GI NO: 10241630 NR Description: cysteine synthase
  misc_feature (48)..(429): NCBI GI NO: 38346461 NR Description: OSJNBa0019G23.9
  misc_feature (105)..(429): NCBI GI NO: 30840956 NR Description: beta-cyanoalanine synthase [Betula pendula]
  misc_feature (105)..(429): NCBI GI NO: 11559260 NR Description: beta-cyanoalanine synthase [Solanum tuberosum]
  misc_feature (97)..(429): NCBI GI NO: 1071913 NR Description: cysteine synthase (EC 4
  misc_feature (106)..(429): NCBI GI NO: 15233111 NR Description: cysteine synthase AtcysC1; protein id: At3g61440
  misc_feature (102)..(429): NCBI GI NO: 11995005 NR Description: beta-cyanoalanine synthase like protein
  misc_feature (103)..(425): NCBI GI NO: 303902 NR Description: cysteine synthase [Spinacia oleracea]
  misc_feature (103)..(425): NCBI GI NO: 12644209 NR Description: CYSTEINE SYNTHASE, CHLOROPLAST PRECURSOR
  misc_feature (103)..(425): NCBI GI NO: 421795 NR Description: cysteine synthase (EC 4
WHSGSGWPPNRLVRHLPLPPPTQAKLNSLQLAPPSPYRERQRQASEGMERMLARLMQRRSSVPLSGLLHHGGAPAPLQAAGATGASPLIFSHQQQQQHTAASAVLPGLKIRDSASQLIGRTPMVYLNKVTEGCGARVAAKLEFLQPSFSVKDRPAISMLEDAEKRGLITPGKTTLIEPTSGNMGIGLAFMAALKGYELVLTMPSYTSLERRVTMRAFGANLVLTDPAKGMGGTVRKATELYERHPSAHMLQQFQNPANVKVHYDTTGPEIWEDTLGQVDIFVMGIGSGGTVTGVGKYLKEKNPNAKIYGVEPAEANVLNGGKPGPHLITGNGVGFKPDILDMDVMEKVLEVKGEDAVKMARELAVKEGLLVGISSGANTVAALELAKRPENKGKLIVTVLPSLGERYLSSALFDELRKEAQAMEPVAVD

SEQ ID NO: 23705 - protein, 382 aa, Zea mays subsp. mays
  peptide (1)..(382): Ceres Seq. ID no. 12382092
  misc_feature (67)..(356): Pfam Name: Pfam Description:  Pyridoxal-phosphate dependent enzyme
  misc_feature (1)..(382): NCBI GI NO: 10241630 NR Description: cysteine synthase
  misc_feature (1)..(382): NCBI GI NO: 38346461 NR Description: OSJNBa0019G23.9
  misc_feature (58)..(382): NCBI GI NO: 30840956 NR Description: beta-cyanoalanine synthase [Betula pendula]
  misc_feature (58)..(382): NCBI GI NO: 11559260 NR Description: beta-cyanoalanine synthase [Solanum tuberosum]
  misc_feature (50)..(382): NCBI GI NO: 1071913 NR Description: cysteine synthase (EC 4
  misc_feature (59)..(382): NCBI GI NO: 15233111 NR Description: cysteine synthase AtcysC1; protein id: At3g61440
  misc_feature (55)..(382): NCBI GI NO: 11995005 NR Description: beta-cyanoalanine synthase like protein
  misc_feature (56)..(378): NCBI GI NO: 303902 NR Description: cysteine synthase [Spinacia oleracea]
  misc_feature (56)..(378): NCBI GI NO: 12644209 NR Description: CYSTEINE SYNTHASE, CHLOROPLAST PRECURSOR
  misc_feature (56)..(378): NCBI GI NO: 421795 NR Description: cysteine synthase (EC 4
MERMLARLMQRRSSVPLSGLLHHGGAPAPLQAAGATGASPLIFSHQQQQQHTAASAVLPGLKIRDSASQLIGRTPMVYLNKVTEGCGARVAAKLEFLQPSFSVKDRPAISMLEDAEKRGLITPGKTTLIEPTSGNMGIGLAFMAALKGYELVLTMPSYTSLERRVTMRAFGANLVLTDPAKGMGGTVRKATELYERHPSAHMLQQFQNPANVKVHYDTTGPEIWEDTLGQVDIFVMGIGSGGTVTGVGKYLKEKNPNAKIYGVEPAEANVLNGGKPGPHLITGNGVGFKPDILDMDVMEKVLEVKGEDAVKMARELAVKEGLLVGISSGANTVAALELAKRPENKGKLIVTVLPSLGERYLSSALFDELRKEAQAMEPVAVD

SEQ ID NO: 23706 - protein, 379 aa, Zea mays subsp. mays
  peptide (1)..(379): Ceres Seq. ID no. 12382093
  misc_feature (64)..(353): Pfam Name: Pfam Description:  Pyridoxal-phosphate dependent enzyme
  misc_feature (1)..(379): NCBI GI NO: 10241630 NR Description: cysteine synthase
  misc_feature (1)..(379): NCBI GI NO: 38346461 NR Description: OSJNBa0019G23.9
  misc_feature (55)..(379): NCBI GI NO: 30840956 NR Description: beta-cyanoalanine synthase [Betula pendula]
  misc_feature (55)..(379): NCBI GI NO: 11559260 NR Description: beta-cyanoalanine synthase [Solanum tuberosum]
  misc_feature (47)..(379): NCBI GI NO: 1071913 NR Description: cysteine synthase (EC 4
  misc_feature (56)..(379): NCBI GI NO: 15233111 NR Description: cysteine synthase AtcysC1; protein id: At3g61440
  misc_feature (52)..(379): NCBI GI NO: 11995005 NR Description: beta-cyanoalanine synthase like protein
  misc_feature (53)..(375): NCBI GI NO: 303902 NR Description: cysteine synthase [Spinacia oleracea]
  misc_feature (53)..(375): NCBI GI NO: 12644209 NR Description: CYSTEINE SYNTHASE, CHLOROPLAST PRECURSOR
  misc_feature (53)..(375): NCBI GI NO: 421795 NR Description: cysteine synthase (EC 4
MLARLMQRRSSVPLSGLLHHGGAPAPLQAAGATGASPLIFSHQQQQQHTAASAVLPGLKIRDSASQLIGRTPMVYLNKVTEGCGARVAAKLEFLQPSFSVKDRPAISMLEDAEKRGLITPGKTTLIEPTSGNMGIGLAFMAALKGYELVLTMPSYTSLERRVTMRAFGANLVLTDPAKGMGGTVRKATELYERHPSAHMLQQFQNPANVKVHYDTTGPEIWEDTLGQVDIFVMGIGSGGTVTGVGKYLKEKNPNAKIYGVEPAEANVLNGGKPGPHLITGNGVGFKPDILDMDVMEKVLEVKGEDAVKMARELAVKEGLLVGISSGANTVAALELAKRPENKGKLIVTVLPSLGERYLSSALFDELRKEAQAMEPVAVD

SEQ ID NO: 23707 - DNA, 1844 bp, Zea mays subsp. mays
  misc_feature (1)..(1844): Ceres Seq. ID no. 12405181
ctaatcgaaaatcttgtttgtttgcttccgtcgtcccctctccacgtagagcacgcccccggaccaccttttataagcaccaaccatctggccttgccgcgccgattcgccacgaagccgcactgtgagagagggacgcggcctgttgtcccggcttttagacgcaacttccatcgctgcgaagctatccattcgtgttcgtcatggccgccagcgtcaccgtggaaaacctcaaccccaaggtcttaaaatgtgagtatgcagtccgtggggagattgtcatccatgctcagcgcctgcagcaacaactacaaacacaaccagggtctcttccttttgatgagatcctctattgcaatattgggaatccccaatctcttggtcagcaacctgtgacattcttcagggaggttcttgctctttgtgattatccgtgcctcttggaaaaagaggaaaccaaatcattgttcagtgctgatgcaatttctcgagcaaagcagattcttgcaactattcctggaagggcaacaggtgcatatagtcacagtcagggtatcaaaggactgcgtgatgcaattgctgctggaatcatgtcacgtgatggattccctgcaaatgcagatgacattttcattacagacggagcaagtcctggggtccacatgatgatgcaattactgattaggaatgagaaagatggcattctgtgcccaattcctcagtaccccttgtactcagcctccatagctcttcatggtggagctcttgtcccctattaccttaatgaaaaaactgggtggggtttggagatctctgatcttaagatgcaactggaaaatgctcggtcaaaaggcattgatgttagggctttggtggttatcaatccaggaaatccgactgggcaggttcttgctgaagacaaccaatatgatatagtgaaattctgcaaaaatgagggccttgttcttctagctgatgaggtatatcaagagaacatctatgtggacaacaagaaatttaactctttcaagaagattgtaagatccatggggtatggcgaggatgatctccctctagtatcgttacagtctgtttccaaaggatactatggagagtgtggtaaaagaggagggtacatggagattactggcttcagtactccagtaagagagcagatctacaagatagcttcagtgaacctgtgctccaatatcactggtcaaatccttgcgagcctcgtcatgaatccaccaaaggttggagacgaatcatatgcttcctacaaggcagagaaagatggaatccttgagtctttagctcgtcgtgcaaaggcgttggaggatgcattcaacaagcttgagggattttcatgtaacaaggccgaaggagcaatgtatcttttccctcagattcatctgccacagaaggcaatcgaggctgctaaagctgctaagaaagcgcctgacgctttctacgctctccgtctccttgaatcaactggaatcgtcgtggtccctggatctggatttcgtcaagttcctggaacatggcacatcagatgcacgatcctgccgcaggaagacaagatccccgcggtgatcagccgcttcagggctttccatgaggcgttcttggccgaataccgcgactaaactgttacgctgtgtgtgagttaagttggaggttcagtagaactgtagaagagctcagtgacagcgcagaaagaggcagtgttagaaaggcttaggtccttcttcacaggagcaacagttgtctccatcaaggagaaataaaaattttagttttacaacttctcattgacactgttgggttcttgacatggc

SEQ ID NO: 23708 - protein, 482 aa, Zea mays subsp. mays
  peptide (1)..(482): Ceres Seq. ID no. 12405182
  misc_feature (128)..(473): Pfam Name: Pfam Description:  Aminotransferase class I and II
  misc_feature (1)..(482): NCBI GI NO: 3694807 NR Description: alanine aminotransferase [Zea mays]
  misc_feature (1)..(482): NCBI GI NO: 461498 NR Description: ALANINE AMINOTRANSFERASE 2
  misc_feature (1)..(482): NCBI GI NO: 4730884 NR Description: alanine aminotransferase [Oryza sativa]
  misc_feature (1)..(482): NCBI GI NO: 37533928 NR Description: putative alanine aminotransferase
  misc_feature (1)..(482): NCBI GI NO: 1703227 NR Description: ALANINE AMINOTRANSFERASE 2
  misc_feature (2)..(482): NCBI GI NO: 34906732 NR Description: alanine aminotransferase
  misc_feature (5)..(482): NCBI GI NO: 21954071 NR Description: putative alanine aminotransferase
  misc_feature (5)..(482): NCBI GI NO: 9082270 NR Description: alanine aminotransferase [Arabidopsis thaliana]
  misc_feature (5)..(482): NCBI GI NO: 30698866 NR Description: alanine aminotransferase, putative
  misc_feature (1)..(481): NCBI GI NO: 39595413 NR Description: Hypothetical protein CBG04059
MAASVTVENLNPKVLKCEYAVRGEIVIHAQRLQQQLQTQPGSLPFDEILYCNIGNPQSLGQQPVTFFREVLALCDYPCLLEKEETKSLFSADAISRAKQILATIPGRATGAYSHSQGIKGLRDAIAAGIMSRDGFPANADDIFITDGASPGVHMMMQLLIRNEKDGILCPIPQYPLYSASIALHGGALVPYYLNEKTGWGLEISDLKMQLENARSKGIDVRALVVINPGNPTGQVLAEDNQYDIVKFCKNEGLVLLADEVYQENIYVDNKKFNSFKKIVRSMGYGEDDLPLVSLQSVSKGYYGECGKRGGYMEITGFSTPVREQIYKIASVNLCSNITGQILASLVMNPPKVGDESYASYKAEKDGILESLARRAKALEDAFNKLEGFSCNKAEGAMYLFPQIHLPQKAIEAAKAAKKAPDAFYALRLLESTGIVVVPGSGFRQVPGTWHIRCTILPQEDKIPAVISRFRAFHEAFLAEYRD

SEQ ID NO: 23709 - protein, 353 aa, Zea mays subsp. mays
  peptide (1)..(353): Ceres Seq. ID no. 12405183
  misc_feature (1)..(344): Pfam Name: Pfam Description:  Aminotransferase class I and II
  misc_feature (1)..(353): NCBI GI NO: 3694807 NR Description: alanine aminotransferase [Zea mays]
  misc_feature (1)..(353): NCBI GI NO: 461498 NR Description: ALANINE AMINOTRANSFERASE 2
  misc_feature (1)..(353): NCBI GI NO: 4730884 NR Description: alanine aminotransferase [Oryza sativa]
  misc_feature (1)..(353): NCBI GI NO: 37533928 NR Description: putative alanine aminotransferase
  misc_feature (1)..(353): NCBI GI NO: 1703227 NR Description: ALANINE AMINOTRANSFERASE 2
  misc_feature (1)..(353): NCBI GI NO: 34906732 NR Description: alanine aminotransferase
  misc_feature (1)..(353): NCBI GI NO: 21954071 NR Description: putative alanine aminotransferase
  misc_feature (1)..(353): NCBI GI NO: 9082270 NR Description: alanine aminotransferase [Arabidopsis thaliana]
  misc_feature (1)..(353): NCBI GI NO: 30698866 NR Description: alanine aminotransferase, putative
  misc_feature (1)..(352): NCBI GI NO: 39595413 NR Description: Hypothetical protein CBG04059
MSRDGFPANADDIFITDGASPGVHMMMQLLIRNEKDGILCPIPQYPLYSASIALHGGALVPYYLNEKTGWGLEISDLKMQLENARSKGIDVRALVVINPGNPTGQVLAEDNQYDIVKFCKNEGLVLLADEVYQENIYVDNKKFNSFKKIVRSMGYGEDDLPLVSLQSVSKGYYGECGKRGGYMEITGFSTPVREQIYKIASVNLCSNITGQILASLVMNPPKVGDESYASYKAEKDGILESLARRAKALEDAFNKLEGFSCNKAEGAMYLFPQIHLPQKAIEAAKAAKKAPDAFYALRLLESTGIVVVPGSGFRQVPGTWHIRCTILPQEDKIPAVISRFRAFHEAFLAEYRD

SEQ ID NO: 23710 - protein, 329 aa, Zea mays subsp. mays
  peptide (1)..(329): Ceres Seq. ID no. 12405184
  misc_feature (1)..(320): Pfam Name: Pfam Description:  Aminotransferase class I and II
  misc_feature (1)..(329): NCBI GI NO: 3694807 NR Description: alanine aminotransferase [Zea mays]
  misc_feature (1)..(329): NCBI GI NO: 461498 NR Description: ALANINE AMINOTRANSFERASE 2
  misc_feature (1)..(329): NCBI GI NO: 4730884 NR Description: alanine aminotransferase [Oryza sativa]
  misc_feature (1)..(329): NCBI GI NO: 37533928 NR Description: putative alanine aminotransferase
  misc_feature (1)..(329): NCBI GI NO: 1703227 NR Description: ALANINE AMINOTRANSFERASE 2
  misc_feature (1)..(329): NCBI GI NO: 34906732 NR Description: alanine aminotransferase
  misc_feature (1)..(329): NCBI GI NO: 21954071 NR Description: putative alanine aminotransferase
  misc_feature (1)..(329): NCBI GI NO: 9082270 NR Description: alanine aminotransferase [Arabidopsis thaliana]
  misc_feature (1)..(329): NCBI GI NO: 30698866 NR Description: alanine aminotransferase, putative
  misc_feature (1)..(328): NCBI GI NO: 39595413 NR Description: Hypothetical protein CBG04059
MMMQLLIRNEKDGILCPIPQYPLYSASIALHGGALVPYYLNEKTGWGLEISDLKMQLENARSKGIDVRALVVINPGNPTGQVLAEDNQYDIVKFCKNEGLVLLADEVYQENIYVDNKKFNSFKKIVRSMGYGEDDLPLVSLQSVSKGYYGECGKRGGYMEITGFSTPVREQIYKIASVNLCSNITGQILASLVMNPPKVGDESYASYKAEKDGILESLARRAKALEDAFNKLEGFSCNKAEGAMYLFPQIHLPQKAIEAAKAAKKAPDAFYALRLLESTGIVVVPGSGFRQVPGTWHIRCTILPQEDKIPAVISRFRAFHEAFLAEYRD

SEQ ID NO: 23711 - DNA, 1416 bp, Zea mays subsp. mays
  misc_feature (1)..(1416): Ceres Seq. ID no. 12351956
aactcaccaaacaaacactcgagcaaagctcagcctcacacagcctctcctctcgagctagagtgctactagcttagaagaagcagcagcttaccgctgaagctgcagcaatggcgaaatcttacaccttactgttcgtcgcactggtcgttctggcccttctagtgagccccattgcttgctcccgcaagctcgccaagccgaacaagcccaagccgacccacaagccggcggccagggtcacgcccggcagcaaccacaccggtatccccgcagtgtccgccgcctacggctccggcggctggttgtctgccggcgcgacgtactacggcgccccaaacggcgacggcagtgacggcggtgcgtgcgggtaccagaccgccgtcgggcagcgccccttctcgtcgatgatcgccgccgggagcccgtctctgttcaagggaggcaagggctgcggcgcctgctacgaggttaaatgcgacggcaacccggcatgctccggccagccggccaccgtggtcatcaccgacgagtgccccggcggtgtctgcctcgcagaggcggctcacttcgacatgagcggcacctccatgggcgccatggcgaagcccggcatggccgacaggcttcgcgccgccggcatcctcaagatccagtacaagagggtgccgtgcaagtacagcggcgtgaacatcgccttccgggtggaccagggatccaacccgttctacttggaggtgctcatcgagttcgaggacggcgacggcgacctcagcgccgtccacctcatggaggccgggtgcggcacgtggaccccgatggtgcagaactggggcgcgctctggcgctacaactccaacaccggcaaggcgctgaaggcgcccttctcgctccggctgacctccgactccggcagggtgctcgtcgccaacaacgtcatccccgccggctggaaccccggggccacgtaccgctccttggtgaactactcctgattgatgaactgcggcggcggttcggttctccgcgccccattgcatgcgcttggctggattattatgcgtggccaagaagtgctttgcagggtgcgtggtgtttaaggaacgagctagctagtctcgagtttgttttctgagaagaagaaaaaaatgtctgttcgggtgtccgcgagaggcggtggaagaagaagaggaggaggaggacaagaaggttaaggagccgtgtgttcttcactccctccacggtctctgcagtcacctagttatgtgtgtagtggtcggtgtaggtttctttttcgttgtgatggctcaggagaggagttggattggacgttgtatcagtctgtgtgtgtgtgcgcgcgtagttttctgtaccacgcaatcctttcagagaattgaattcctgctttcttgtttc

SEQ ID NO: 23712 - protein, 294 aa, Zea mays subsp. mays
  peptide (1)..(294): Ceres Seq. ID no. 12351957
  misc_feature (195)..(278): Pfam Name: Pfam Description:  Pollen allergen
  misc_feature (1)..(294): NCBI GI NO: 16517013 NR Description: beta-expansin [Oryza sativa]
  misc_feature (1)..(293): NCBI GI NO: 14193767 NR Description: beta-expansin 4 [Zea mays]
  misc_feature (1)..(293): NCBI GI NO: 40363749 NR Description: putative beta-expansin [Triticum aestivum]
  misc_feature (49)..(294): NCBI GI NO: 16303229 NR Description: beta-expansin 5 [Oryza sativa]
  misc_feature (49)..(294): NCBI GI NO: 8118428 NR Description: beta-expansin [Oryza sativa]
  misc_feature (65)..(293): NCBI GI NO: 21666630 NR Description: beta-expansin [Oryza sativa]
  misc_feature (65)..(294): NCBI GI NO: 34101047 NR Description: beta-expansin 1 precursor [Hordeum vulgare]
  misc_feature (64)..(288): NCBI GI NO: 16303233 NR Description: beta-expansin [Oryza sativa]
  misc_feature (64)..(288): NCBI GI NO: 16517017 NR Description: beta-expansin [Oryza sativa]
  misc_feature (62)..(294): NCBI GI NO: 1076486 NR Description: cim1 protein - soybean
MAKSYTLLFVALVVLALLVSPIACSRKLAKPNKPKPTHKPAARVTPGSNHTGIPAVSAAYGSGGWLSAGATYYGAPNGDGSDGGACGYQTAVGQRPFSSMIAAGSPSLFKGGKGCGACYEVKCDGNPACSGQPATVVITDECPGGVCLAEAAHFDMSGTSMGAMAKPGMADRLRAAGILKIQYKRVPCKYSGVNIAFRVDQGSNPFYLEVLIEFEDGDGDLSAVHLMEAGCGTWTPMVQNWGALWRYNSNTGKALKAPFSLRLTSDSGRVLVANNVIPAGWNPGATYRSLVNYS

SEQ ID NO: 23713 - protein, 219 aa, Zea mays subsp. mays
  peptide (1)..(219): Ceres Seq. ID no. 12351958
MRRQPGMLRPAGHRGHHRRVPRRCLPRRGGSLRHERHLHGRHGEARHGRQASRRRHPQDPVQEGAVQVQRREHRLPGGPGIQPVLLGGAHRVRGRRRRPQRRPPHGGRVRHVDPDGAELGRALALQLQHRQGAEGALLAPADLRLRQGARRQQRHPRRLEPRGHVPLLGELLLIDELRRRFGSPRPIACAWLDYYAWPRSALQGAWCLRNELASLEFVF

SEQ ID NO: 23714 - protein, 213 aa, Zea mays subsp. mays
  peptide (1)..(213): Ceres Seq. ID no. 12351959
MLRPAGHRGHHRRVPRRCLPRRGGSLRHERHLHGRHGEARHGRQASRRRHPQDPVQEGAVQVQRREHRLPGGPGIQPVLLGGAHRVRGRRRRPQRRPPHGGRVRHVDPDGAELGRALALQLQHRQGAEGALLAPADLRLRQGARRQQRHPRRLEPRGHVPLLGELLLIDELRRRFGSPRPIACAWLDYYAWPRSALQGAWCLRNELASLEFVF

SEQ ID NO: 23715 - DNA, 1845 bp, Zea mays subsp. mays
  misc_feature (1)..(1845): Ceres Seq. ID no. 12345235
  misc_feature (724)..(724): n is a, c, t, g, unknown, or other
aaaacaaactccaagcccatccatcaccagtcctctgtcccctccccgaccgcaacgatctgctttgcatcttccccttcctccaattccagtcccatgcgtaatcgtctttcggaattgaatctctccatgtcatggcgctctgagcaagtacagctgcagtcagtgagagaaatgtaggcaccacaaatcggtccagcaaatccctgctcgtgctctaccaaaaaatccagtctttttccagcccaaatccgcctcttccgctgctgccataaagtccggactttacgaggctttcacgacgtgcgagatttctgttatcgatctccacgaacccgatagcctgccataaagtctgcacagacgcttcgcattgcttcaaccaaagatccatccaaactctgcaccccaaaagctagtacgatctcggggggacatgaagcgcctgcagtgcttcaagaagagcagcggcggcggcaatggtggcgggccggggaagcgcctggagcggcagctgtcgctgggcgagtacaagaaggcagtgtcgtggtccaagtacctcgtagcgccgccgggggctaggatccggagcggcggcgaggagctgtggagcgccgacctgtccaagctggagatccggggcaagtttgcgtcaggccggcacagccgcgtctactccggcaggtacaccggccgcgaggtggccatcaagatggtcagtcanccggaggaggacgccgcgctcgccgctgagctagagcgccagttcgcctccgaggtcgcgctcctacttcgcctccaccacccaaacatcatctcgtttgttgcagcatgcaagaaaccaccagtattctgcatcatcactgagttcatggcagggggctcccttaggaagtatctacatcagcaggagcctcactcagttcccctcaacctagtgctgaaattagctctagatatcgctcgcggaatgagctacctacactcccagggtatactccatagagacctgaaatcagagaacatacttctgggagaagatatgtcagtcaaagtcgcagatttcgggatttcatgcttggaatcacagtgtggaagtggcaaggggtttacaggaacctacaggtggatggctccggagatgatcaaagaggaacatcatactaggaaagtggacgtgtacagctttggaatcgtcatgtgggagatcttgactgctttggtcccgttcagcgacatgactccagagcaggctgctgttgctgttgccctgaagaatgcaaggccgccactgcctgcttcatgccctgtggcaataagccacctgatcatgcagtgctgggcgaccaaccctgacaaaagacctcagtttgatgacatcgtggcgatcctcgagagctacaaggaagcccttgatgaggacccgtcgttcttcttgtcgtatataccacctccaccggaccacggccaccaccaccatcatcagagccttctccggtgcttccctcgctccatgcgaaggtctgcatctctgaaagtatgatcaggccgggatgttgcctctgctcatcgatgctgtgtacaatatgcaccccctttcgactttctttgttttctatgcgcgcgtcggccctctattatgcggcattagcatgctatatgagctagtttatgctctcattttctccttgttggttaattatttccgtcattgatgccttgagtaatgtagagatgacaggcaggcatgcagcttccggttattatctatggatgccatttgcttttggtgatgggaaacatgaaagagccccagtaaatgtaatataattaagctctccatcc

SEQ ID NO: 23716 - protein, 368 aa, Zea mays subsp. mays
  peptide (1)..(368): Ceres Seq. ID no. 12345236
  misc_feature (4)..(281): NCBI GI NO: 34894114 NR Description: putative protein kinase
  misc_feature (1)..(328): NCBI GI NO: 7488256 NR Description: protein kinase homolog F24O1
  misc_feature (53)..(328): NCBI GI NO: 15220773 NR Description: protein kinase, putative; protein id: At1g62400.1
  misc_feature (142)..(328): NCBI GI NO: 7940280 NR Description: F24O1.13 [Arabidopsis thaliana]
  misc_feature (1)..(127): NCBI GI NO: 7940280 NR Description: F24O1.13 [Arabidopsis thaliana]
  misc_feature (1)..(352): NCBI GI NO: 478809 NR Description: protein kinase 6 (EC 2.7.1.-) - soybean
  misc_feature (31)..(343): NCBI GI NO: 10241603 NR Description: protein kinase (PK) [Fagus sylvatica]
  misc_feature (56)..(348): NCBI GI NO: 34909474 NR Description: putative protein kinase
  misc_feature (33)..(352): NCBI GI NO: 18424175 NR Description: protein kinase 6 - like; protein id: At5g58950
  misc_feature (33)..(352): NCBI GI NO: 18087633 NR Description: AT5g58950/k19m22_150 [Arabidopsis thaliana]
  misc_feature (96)..(96): Xaa is any aa, unknown or other
MKRLQCFKKSSGGGNGGGPGKRLERQLSLGEYKKAVSWSKYLVAPPGARIRSGGEELWSADLSKLEIRGKFASGRHSRVYSGRYTGREVAIKMVSXPEEDAALAAELERQFASEVALLLRLHHPNIISFVAACKKPPVFCIITEFMAGGSLRKYLHQQEPHSVPLNLVLKLALDIARGMSYLHSQGILHRDLKSENILLGEDMSVKVADFGISCLESQCGSGKGFTGTYRWMAPEMIKEEHHTRKVDVYSFGIVMWEILTALVPFSDMTPEQAAVAVALKNARPPLPASCPVAISHLIMQCWATNPDKRPQFDDIVAILESYKEALDEDPSFFLSYIPPPPDHGHHHHHQSLLRCFPRSMRRSASLKV

SEQ ID NO: 23717 - protein, 276 aa, Zea mays subsp. mays
  peptide (1)..(276): Ceres Seq. ID no. 12345237
  misc_feature (1)..(189): NCBI GI NO: 34894114 NR Description: putative protein kinase
  misc_feature (1)..(236): NCBI GI NO: 7488256 NR Description: protein kinase homolog F24O1
  misc_feature (1)..(236): NCBI GI NO: 15220773 NR Description: protein kinase, putative; protein id: At1g62400.1
  misc_feature (50)..(236): NCBI GI NO: 7940280 NR Description: F24O1.13 [Arabidopsis thaliana]
  misc_feature (1)..(35): NCBI GI NO: 7940280 NR Description: F24O1.13 [Arabidopsis thaliana]
  misc_feature (1)..(260): NCBI GI NO: 478809 NR Description: protein kinase 6 (EC 2.7.1.-) - soybean
  misc_feature (1)..(251): NCBI GI NO: 10241603 NR Description: protein kinase (PK) [Fagus sylvatica]
  misc_feature (1)..(256): NCBI GI NO: 34909474 NR Description: putative protein kinase
  misc_feature (1)..(260): NCBI GI NO: 18424175 NR Description: protein kinase 6 - like; protein id: At5g58950
  misc_feature (1)..(260): NCBI GI NO: 18087633 NR Description: AT5g58950/k19m22_150 [Arabidopsis thaliana]
  misc_feature (4)..(4): Xaa is any aa, unknown or other
MVSXPEEDAALAAELERQFASEVALLLRLHHPNIISFVAACKKPPVFCIITEFMAGGSLRKYLHQQEPHSVPLNLVLKLALDIARGMSYLHSQGILHRDLKSENILLGEDMSVKVADFGISCLESQCGSGKGFTGTYRWMAPEMIKEEHHTRKVDVYSFGIVMWEILTALVPFSDMTPEQAAVAVALKNARPPLPASCPVAISHLIMQCWATNPDKRPQFDDIVAILESYKEALDEDPSFFLSYIPPPPDHGHHHHHQSLLRCFPRSMRRSASLKV

SEQ ID NO: 23718 - protein, 223 aa, Zea mays subsp. mays
  peptide (1)..(223): Ceres Seq. ID no. 12345238
  misc_feature (1)..(136): NCBI GI NO: 34894114 NR Description: putative protein kinase
  misc_feature (1)..(183): NCBI GI NO: 7488256 NR Description: protein kinase homolog F24O1
  misc_feature (1)..(183): NCBI GI NO: 15220773 NR Description: protein kinase, putative; protein id: At1g62400.1
  misc_feature (1)..(183): NCBI GI NO: 7940280 NR Description: F24O1.13 [Arabidopsis thaliana]
  misc_feature (1)..(207): NCBI GI NO: 478809 NR Description: protein kinase 6 (EC 2.7.1.-) - soybean
  misc_feature (1)..(198): NCBI GI NO: 10241603 NR Description: protein kinase (PK) [Fagus sylvatica]
  misc_feature (1)..(203): NCBI GI NO: 34909474 NR Description: putative protein kinase
  misc_feature (1)..(207): NCBI GI NO: 18424175 NR Description: protein kinase 6 - like; protein id: At5g58950
  misc_feature (1)..(207): NCBI GI NO: 18087633 NR Description: AT5g58950/k19m22_150 [Arabidopsis thaliana]
  misc_feature (1)..(183): NCBI GI NO: 34903666 NR Description: putative protein kinase
MAGGSLRKYLHQQEPHSVPLNLVLKLALDIARGMSYLHSQGILHRDLKSENILLGEDMSVKVADFGISCLESQCGSGKGFTGTYRWMAPEMIKEEHHTRKVDVYSFGIVMWEILTALVPFSDMTPEQAAVAVALKNARPPLPASCPVAISHLIMQCWATNPDKRPQFDDIVAILESYKEALDEDPSFFLSYIPPPPDHGHHHHHQSLLRCFPRSMRRSASLKV

SEQ ID NO: 23719 - DNA, 1385 bp, Zea mays subsp. mays
  misc_feature (1)..(1385): Ceres Seq. ID no. 12351964
accagcctgctccggtcctcttggagttgggcctgcccacctcccggccggtccgccgcgcggttccagtttcgcctctcgtcgccggtcctggcgagccccgcctccttgatctccgaccagcagcttccccactgcccactccccagccccggacgtgcccttcgccggtgctgtcatggcgttcggccgacggagccccggatcctcgcggcaccctcccgcgctcaccatcgtcacggcgctactcctcgcctccctctacttcgccgccgcggcggcggctctatcgcccaccgacgcgatgcacaacaacaactgggccgtgctcgtgtgtacctcccgcttctggtttaattatcgacacatggcgaatacattgtccctatacaggactgttaagagattaggaatacctgatgagcgaatcatacttatgttggcggacgatatggcctgtaacccaaggaacagctatcctgcccaagttttcaataatgagaaccaccagctaaatctctatggtgacaatgttgaggtcgattatcgagggtatgaggtgacagttgaaaatttcttgagagttttgactggccgacatgaaagtgctgtaccaagatcgaagcgtcttcttagtgatgaaggaagtcatatacttttgtacatgactggacatggtggtgatgaatttttgaagttccaagattctgaagagcttcagagccatgacttagcagatgctgtgaagcaaatgaaggagaagcatagatttaaagagctgctgataatggtagatacctgccaagctgctactctcttttcacagcttcagtcacctggtgttttggcgattggtagtagcatgaagggtgaaaactcttattctcaccatcttgattcagatgtaggtgtttctgttgtggataggtttacctattatacacttgctttctttgagaaactgaacatgtatagcaatgcctcactgaacagccttttcacctcatacaatccttccatgctgttgtctactgcatattatcgaatggatctttatgaacgtcccttaaatgaggtgcctgtgacaaatttttttggatcagtcatgaagactctccacactgattcagcctacacaggtttcttggctgcgcatgacaatgaaactccaatgtccacgggagataaccttgatgatcatttcatgttaaagggcagggctatcgcacgaagatcaaccatagaaaaggaggcacaattaacaccgcatggatggactgaagttctggctgaacagctggagggaaagaatactgatactgttgtgatgtatggtctgggagctatgggtatactgttggcactttcaacctggttatcaatgt

SEQ ID NO: 23720 - protein, 402 aa, Zea mays subsp. mays
  peptide (1)..(402): Ceres Seq. ID no. 12351965
  misc_feature (19)..(322): Pfam Name: Pfam Description:  Peptidase C13 family
  misc_feature (17)..(400): NCBI GI NO: 18390936 NR Description: putative GPI-anchor transamidase
  misc_feature (17)..(400): NCBI GI NO: 21537105 NR Description: putative GPI-anchor transamidase
  misc_feature (17)..(322): NCBI GI NO: 7485988 NR Description: hypothetical protein F22O13
  misc_feature (43)..(322): NCBI GI NO: 9802563 NR Description: F22O13.24 [Arabidopsis thaliana]
  misc_feature (17)..(317): NCBI GI NO: 6320538 NR Description: Protein involved in the attachment ofglycosylphosphatidylinositol
  misc_feature (19)..(316): NCBI GI NO: 7511896 NR Description: hypothetical protein 133E12
  misc_feature (19)..(316): NCBI GI NO: 24639234 NR Description: CG4406-PA [Drosophila melanogaster]
  misc_feature (16)..(311): NCBI GI NO: 1518259 NR Description: gpi8 [Homo sapiens]
  misc_feature (16)..(311): NCBI GI NO: 23199983 NR Description: phosphatidylinositol glycan, class K precursor
  misc_feature (16)..(311): NCBI GI NO: 20071719 NR Description: Similar to phosphatidylinositol glycan, class K
MAFGRRSPGSSRHPPALTIVTALLLASLYFAAAAAALSPTDAMHNNNWAVLVCTSRFWFNYRHMANTLSLYRTVKRLGIPDERIILMLADDMACNPRNSYPAQVFNNENHQLNLYGDNVEVDYRGYEVTVENFLRVLTGRHESAVPRSKRLLSDEGSHILLYMTGHGGDEFLKFQDSEELQSHDLADAVKQMKEKHRFKELLIMVDTCQAATLFSQLQSPGVLAIGSSMKGENSYSHHLDSDVGVSVVDRFTYYTLAFFEKLNMYSNASLNSLFTSYNPSMLLSTAYYRMDLYERPLNEVPVTNFFGSVMKTLHTDSAYTGFLAAHDNETPMSTGDNLDDHFMLKGRAIARRSTIEKEAQLTPHGWTEVLAEQLEGKNTDTVVMYGLGAMGILLALSTWLSM

SEQ ID NO: 23721 - protein, 360 aa, Zea mays subsp. mays
  peptide (1)..(360): Ceres Seq. ID no. 12351966
  misc_feature (1)..(280): Pfam Name: Pfam Description:  Peptidase C13 family
  misc_feature (1)..(358): NCBI GI NO: 18390936 NR Description: putative GPI-anchor transamidase
  misc_feature (1)..(358): NCBI GI NO: 21537105 NR Description: putative GPI-anchor transamidase
  misc_feature (1)..(280): NCBI GI NO: 7485988 NR Description: hypothetical protein F22O13
  misc_feature (1)..(280): NCBI GI NO: 9802563 NR Description: F22O13.24 [Arabidopsis thaliana]
  misc_feature (1)..(275): NCBI GI NO: 6320538 NR Description: Protein involved in the attachment ofglycosylphosphatidylinositol
  misc_feature (1)..(274): NCBI GI NO: 7511896 NR Description: hypothetical protein 133E12
  misc_feature (1)..(274): NCBI GI NO: 24639234 NR Description: CG4406-PA [Drosophila melanogaster]
  misc_feature (1)..(269): NCBI GI NO: 1518259 NR Description: gpi8 [Homo sapiens]
  misc_feature (1)..(269): NCBI GI NO: 23199983 NR Description: phosphatidylinositol glycan, class K precursor
  misc_feature (1)..(269): NCBI GI NO: 20071719 NR Description: Similar to phosphatidylinositol glycan, class K
MHNNNWAVLVCTSRFWFNYRHMANTLSLYRTVKRLGIPDERIILMLADDMACNPRNSYPAQVFNNENHQLNLYGDNVEVDYRGYEVTVENFLRVLTGRHESAVPRSKRLLSDEGSHILLYMTGHGGDEFLKFQDSEELQSHDLADAVKQMKEKHRFKELLIMVDTCQAATLFSQLQSPGVLAIGSSMKGENSYSHHLDSDVGVSVVDRFTYYTLAFFEKLNMYSNASLNSLFTSYNPSMLLSTAYYRMDLYERPLNEVPVTNFFGSVMKTLHTDSAYTGFLAAHDNETPMSTGDNLDDHFMLKGRAIARRSTIEKEAQLTPHGWTEVLAEQLEGKNTDTVVMYGLGAMGILLALSTWLSM

SEQ ID NO: 23722 - protein, 339 aa, Zea mays subsp. mays
  peptide (1)..(339): Ceres Seq. ID no. 12351967
  misc_feature (1)..(259): Pfam Name: Pfam Description:  Peptidase C13 family
  misc_feature (1)..(337): NCBI GI NO: 18390936 NR Description: putative GPI-anchor transamidase
  misc_feature (1)..(337): NCBI GI NO: 21537105 NR Description: putative GPI-anchor transamidase
  misc_feature (1)..(259): NCBI GI NO: 7485988 NR Description: hypothetical protein F22O13
  misc_feature (1)..(259): NCBI GI NO: 9802563 NR Description: F22O13.24 [Arabidopsis thaliana]
  misc_feature (1)..(254): NCBI GI NO: 6320538 NR Description: Protein involved in the attachment ofglycosylphosphatidylinositol
  misc_feature (1)..(253): NCBI GI NO: 7511896 NR Description: hypothetical protein 133E12
  misc_feature (1)..(253): NCBI GI NO: 24639234 NR Description: CG4406-PA [Drosophila melanogaster]
  misc_feature (1)..(248): NCBI GI NO: 1518259 NR Description: gpi8 [Homo sapiens]
  misc_feature (1)..(248): NCBI GI NO: 23199983 NR Description: phosphatidylinositol glycan, class K precursor
  misc_feature (1)..(248): NCBI GI NO: 20071719 NR Description: Similar to phosphatidylinositol glycan, class K
MANTLSLYRTVKRLGIPDERIILMLADDMACNPRNSYPAQVFNNENHQLNLYGDNVEVDYRGYEVTVENFLRVLTGRHESAVPRSKRLLSDEGSHILLYMTGHGGDEFLKFQDSEELQSHDLADAVKQMKEKHRFKELLIMVDTCQAATLFSQLQSPGVLAIGSSMKGENSYSHHLDSDVGVSVVDRFTYYTLAFFEKLNMYSNASLNSLFTSYNPSMLLSTAYYRMDLYERPLNEVPVTNFFGSVMKTLHTDSAYTGFLAAHDNETPMSTGDNLDDHFMLKGRAIARRSTIEKEAQLTPHGWTEVLAEQLEGKNTDTVVMYGLGAMGILLALSTWLSM

SEQ ID NO: 23723 - DNA, 1477 bp, Zea mays subsp. mays
  misc_feature (1)..(1477): Ceres Seq. ID no. 12405682
aaaagactgcgagtgcgcatccttcgtccttccccttcccagccgccctctccccccctctcccggtcgcctctaacgtcgctggtgactcacgaagacctccatcgacggcggtgaaactggggccgacttctggagggtttgacttgttggatacagcgctggctcttccaatcgccgggtgctctctgccactctgtcttgcggagccctcaccgcggaaaccagttggtgcgcgtggccatggcggtggcgaaggtcaaatcggtcgccctctccgtcagtcacaagtgccggaacatcttggccgccggttgggaagcccacctcaacactgtcaaggctgacaacaagggaagcaagaatgagatttacacgtcgagggtgcactacatgatccataagggcacgccctacttgattgtccccgagaacgacatgcacaacattaacattataatcgatgagcgggggtctcttgcagtattcagtccgatccgtggccgagttgcgagcttattgaagccatcgaagacacctcctcgtgttgctatgactggtgatgttctgcgcctgaaagactcaaaggttccaattattgccgatagcctgaagcaaactattctgaaggaacatgaagctgctagtaaagctagttatggagtgtcagcaatactgtcttcggcaggtgctacctgcaggtcccggagtgagggcctccttagtctactcagtgaggagagctcttacaacatcttaaaatttgacataggttcctgtgtctacatagacttcaatgggagcagccataatattgaattggacagctttgaagcaccaaaagcagatctgctaatgccattctctgcgaagcttgtggatggtatcaaccaaaatgactctaggaggagggcactggtgatgttctgttttgcgtattttaatagcgctgtcatgctttccattgaccaccatggttttgatgtcctcgccaaagtgcctcaaggagacatccttactaatccacaataccactggaaggagttcaggttcacattcaaggaacctgccaaggatgctgaggacttctgccgcatgctggttgggttagaggaagagggtttgcagaccgtgaagagctgtagcggttacggttgacaacccacttgcaaggttcacattcaaggaaccagccaaggatgctgaggactctgccgcatgctggttcgattagagggattttgcagcgcgtgaagagctatagcggtctaggtgacagctcacttgccacaaaaccagtgagaaactatatatccgttattttggaactttgaaatatggttttagattgctatgttttattcgaagatctatggcttctcgaatttaatagagtagatgatgtttgaacatggagccgtaaactatcaatatctgtttgaatggtatttatataaataataaaactggtaacggc

SEQ ID NO: 23724 - protein, 304 aa, Zea mays subsp. mays
  peptide (1)..(304): Ceres Seq. ID no. 12405683
  misc_feature (72)..(292): NCBI GI NO: 15229211 NR Description: unknown protein; protein id: At3g04020.1
MAVAKVKSVALSVSHKCRNILAAGWEAHLNTVKADNKGSKNEIYTSRVHYMIHKGTPYLIVPENDMHNINIIIDERGSLAVFSPIRGRVASLLKPSKTPPRVAMTGDVLRLKDSKVPIIADSLKQTILKEHEAASKASYGVSAILSSAGATCRSRSEGLLSLLSEESSYNILKFDIGSCVYIDFNGSSHNIELDSFEAPKADLLMPFSAKLVDGINQNDSRRRALVMFCFAYFNSAVMLSIDHHGFDVLAKVPQGDILTNPQYHWKEFRFTFKEPAKDAEDFCRMLVGLEEEGLQTVKSCSGYG

SEQ ID NO: 23725 - protein, 254 aa, Zea mays subsp. mays
  peptide (1)..(254): Ceres Seq. ID no. 12405684
  misc_feature (22)..(242): NCBI GI NO: 15229211 NR Description: unknown protein; protein id: At3g04020.1
MIHKGTPYLIVPENDMHNINIIIDERGSLAVFSPIRGRVASLLKPSKTPPRVAMTGDVLRLKDSKVPIIADSLKQTILKEHEAASKASYGVSAILSSAGATCRSRSEGLLSLLSEESSYNILKFDIGSCVYIDFNGSSHNIELDSFEAPKADLLMPFSAKLVDGINQNDSRRRALVMFCFAYFNSAVMLSIDHHGFDVLAKVPQGDILTNPQYHWKEFRFTFKEPAKDAEDFCRMLVGLEEEGLQTVKSCSGYG

SEQ ID NO: 23726 - protein, 239 aa, Zea mays subsp. mays
  peptide (1)..(239): Ceres Seq. ID no. 12405685
  misc_feature (7)..(227): NCBI GI NO: 15229211 NR Description: unknown protein; protein id: At3g04020.1
MHNINIIIDERGSLAVFSPIRGRVASLLKPSKTPPRVAMTGDVLRLKDSKVPIIADSLKQTILKEHEAASKASYGVSAILSSAGATCRSRSEGLLSLLSEESSYNILKFDIGSCVYIDFNGSSHNIELDSFEAPKADLLMPFSAKLVDGINQNDSRRRALVMFCFAYFNSAVMLSIDHHGFDVLAKVPQGDILTNPQYHWKEFRFTFKEPAKDAEDFCRMLVGLEEEGLQTVKSCSGYG

SEQ ID NO: 23727 - DNA, 1339 bp, Zea mays subsp. mays
  misc_feature (1)..(1339): Ceres Seq. ID no. 12405822
cggttctttaattgcgcgccaatctgttttatatatacggagagagcactcctgttttgtggcaaattctattactagctgcaaaagggcgtgtttgagactagcggaccgaccttgaagttgaagttgaaaaggccggcctgcgcggcgatggatgtcaagtgccggcgtctggaggggaaggtggccatcgtgacggcgtccacgatggggatcggcctcgccatcgccgagcgcctcggtctggagggcgccgccgtcgtcatctcctcccgcaagcagaagaacgtgaacgaggcggtggaggggctcagggccaagggtatcaccgcggttggtgccgtctgccacgtctccgacgcacagcagcgcaagagcctcatcgagacggccgtcaagagctttgggcacatagatattcttgtctccaatgctgccgcaaatccttctgtagatagcatacttgaaatgaaagagtctgttctcgataagttgtgggatattaacgtcaaggcttctatccttcttatccaggatgctgctcctcacctacggaaggggtcatctgtgattattatttcttcaattgctggttacaatccagaacaaggattgacaatgtatagtgtcacaaagactgctctctttggtctcacgaaggctcttgctggtgagatgggacccgatactcgtgttaactgtatagcccctggttttgttcctacacggtttgctagtttcctcacagaaaatgagaccattaggaaagagcttaacgagaggaccaagcttaagagattgggtactgtggaagacatggctgcggctgcggctttcctggcatctgacgacgcatcatacattacggctgaaaccattgttgttgctggaggggtgcagtctaggctgtaaatctggctgaagtttatatttacttggttaataatgtgtactagtgccctaggcgtggctaataatgtgtactagtgccgctagagcatcaggctaccttctatatatgacaggcaactctaaaatattttctatatcttattcctcttcaataatgtcctctctatcagcatcttctatatgtcgttctccagtctccacgcttaaaaaaatttgtattaaggatatattttgttttcagttttttttaagcgtggagaacataagtagcctcggttcatgaatcagatgtatggattattgtaacgcattcttgaaagggaaaaacatgtattatagcgtgataactgtaccttttgtgtttgttgtacagaaccatagaattgtacttcattttaggtgaagacgcctttgaacatttaagccc

SEQ ID NO: 23728 - protein, 253 aa, Zea mays subsp. mays
  peptide (1)..(253): Ceres Seq. ID no. 12405823
  misc_feature (6)..(253): NCBI GI NO: 18412959 NR Description: coded for by A
  misc_feature (6)..(253): NCBI GI NO: 33991766 NR Description: Unknown (protein for MGC:65987) [Danio rerio]
  misc_feature (1)..(253): NCBI GI NO: 21355319 NR Description: CG10672-PA [Drosophila melanogaster]
  misc_feature (8)..(253): NCBI GI NO: 11559412 NR Description: NADPH-dependent retinol dehydrogenase/reductase
  misc_feature (8)..(253): NCBI GI NO: 7023407 NR Description: unnamed protein product [Homo sapiens]
  misc_feature (8)..(253): NCBI GI NO: 11559416 NR Description: NADPH-dependent retinol dehydrogenase/reductase
  misc_feature (8)..(253): NCBI GI NO: 33337583 NR Description: Hep27-like protein [Homo sapiens]
  misc_feature (1)..(253): NCBI GI NO: 17298119 NR Description: carbonyl reductase/NADP-retinol dehydrogenase
  misc_feature (8)..(253): NCBI GI NO: 27807351 NR Description: NADPH-dependent retinol dehydrogenase/reductase
  misc_feature (1)..(253): NCBI GI NO: 39593247 NR Description: Hypothetical protein CBG09503
MDVKCRRLEGKVAIVTASTMGIGLAIAERLGLEGAAVVISSRKQKNVNEAVEGLRAKGITAVGAVCHVSDAQQRKSLIETAVKSFGHIDILVSNAAANPSVDSILEMKESVLDKLWDINVKASILLIQDAAPHLRKGSSVIIISSIAGYNPEQGLTMYSVTKTALFGLTKALAGEMGPDTRVNCIAPGFVPTRFASFLTENETIRKELNERTKLKRLGTVEDMAAAAAFLASDDASYITAETIVVAGGVQSRL

SEQ ID NO: 23729 - protein, 234 aa, Zea mays subsp. mays
  peptide (1)..(234): Ceres Seq. ID no. 12405824
  misc_feature (1)..(234): NCBI GI NO: 18412959 NR Description: coded for by A
  misc_feature (1)..(234): NCBI GI NO: 33991766 NR Description: Unknown (protein for MGC:65987) [Danio rerio]
  misc_feature (1)..(234): NCBI GI NO: 21355319 NR Description: CG10672-PA [Drosophila melanogaster]
  misc_feature (1)..(234): NCBI GI NO: 11559412 NR Description: NADPH-dependent retinol dehydrogenase/reductase
  misc_feature (1)..(234): NCBI GI NO: 7023407 NR Description: unnamed protein product [Homo sapiens]
  misc_feature (1)..(234): NCBI GI NO: 11559416 NR Description: NADPH-dependent retinol dehydrogenase/reductase
  misc_feature (1)..(234): NCBI GI NO: 33337583 NR Description: Hep27-like protein [Homo sapiens]
  misc_feature (1)..(234): NCBI GI NO: 17298119 NR Description: carbonyl reductase/NADP-retinol dehydrogenase
  misc_feature (1)..(234): NCBI GI NO: 27807351 NR Description: NADPH-dependent retinol dehydrogenase/reductase
  misc_feature (1)..(234): NCBI GI NO: 39593247 NR Description: Hypothetical protein CBG09503
MGIGLAIAERLGLEGAAVVISSRKQKNVNEAVEGLRAKGITAVGAVCHVSDAQQRKSLIETAVKSFGHIDILVSNAAANPSVDSILEMKESVLDKLWDINVKASILLIQDAAPHLRKGSSVIIISSIAGYNPEQGLTMYSVTKTALFGLTKALAGEMGPDTRVNCIAPGFVPTRFASFLTENETIRKELNERTKLKRLGTVEDMAAAAAFLASDDASYITAETIVVAGGVQSRL

SEQ ID NO: 23730 - protein, 147 aa, Zea mays subsp. mays
  peptide (1)..(147): Ceres Seq. ID no. 12405825
  misc_feature (1)..(147): NCBI GI NO: 18412959 NR Description: coded for by A
  misc_feature (1)..(147): NCBI GI NO: 33991766 NR Description: Unknown (protein for MGC:65987) [Danio rerio]
  misc_feature (1)..(147): NCBI GI NO: 21355319 NR Description: CG10672-PA [Drosophila melanogaster]
  misc_feature (1)..(147): NCBI GI NO: 11559412 NR Description: NADPH-dependent retinol dehydrogenase/reductase
  misc_feature (1)..(147): NCBI GI NO: 7023407 NR Description: unnamed protein product [Homo sapiens]
  misc_feature (1)..(147): NCBI GI NO: 11559416 NR Description: NADPH-dependent retinol dehydrogenase/reductase
  misc_feature (1)..(147): NCBI GI NO: 33337583 NR Description: Hep27-like protein [Homo sapiens]
  misc_feature (1)..(147): NCBI GI NO: 17298119 NR Description: carbonyl reductase/NADP-retinol dehydrogenase
  misc_feature (1)..(147): NCBI GI NO: 27807351 NR Description: NADPH-dependent retinol dehydrogenase/reductase
  misc_feature (1)..(147): NCBI GI NO: 39593247 NR Description: Hypothetical protein CBG09503
MKESVLDKLWDINVKASILLIQDAAPHLRKGSSVIIISSIAGYNPEQGLTMYSVTKTALFGLTKALAGEMGPDTRVNCIAPGFVPTRFASFLTENETIRKELNERTKLKRLGTVEDMAAAAAFLASDDASYITAETIVVAGGVQSRL

SEQ ID NO: 23731 - DNA, 1309 bp, Zea mays subsp. mays
  misc_feature (1)..(1309): Ceres Seq. ID no. 12365183
atgcacaggcggactcgcggactcggggctcgtaccaacaggaaaaaaggcccagaggcagtgccgtgaccgattcgagacgcaagagaaggatcgagacgaggcggcggttttccggggcagcatcgtctcggccacgaagatgtcttactcaaggggctcaaggtatggatctcgctcaccttactcgagaagcacaaggtaccgaagtcgctctaggagtgtcgactctagtgatgctgaaaaccctgggaacaacctgtatgtgactggtttgtcggctcgtgtaacggatcgagatctggagaagcacttctccactgagggtgaggtgattgatgcaagcgttgtgtatgatccttggacaagggaatcacgggggtttggttttgttaccatggctgctgttaaagatgcagatcgctgcatcaaatatctggaccgttctgtgttgcaaggtcgggtcataactgttgagaagggtagatgttggtagctgctctgcaacaaactgatacaacctaacaccaaaccatgccaacctcagccaaagggcaaagagaagacgaggtagaaccccaacacctgggaagtatcttggcacaaaatcatcccgtggacggaggtactccacaagctactcacctgatcggaggggccgttacagttcccgctactcacctgatcggagggactgtcatggtagagaccggtcatactctccatatgacagaaggcgatcatactctccttacggcagggatgaatcatattccccttactatggccggcgatcatactcaccttactacagcagacggtatcgttcaaggtccccatactgctacagaagacgcaggtcaccttctgtttcgccatactaccgccggcacaggtacagatctgtctccaagtcatccagttcatctccaagggccagaggacggagctattcgtgcagtttatcaccacagagaagctactcgcgcagccattccccagaatccgagagatcaacaagctattctcctaagaaagggagtaaaagggaaccctcgcgtagcagatactctggcaagagtcgtcattcaagggaaagccactctcatagccgcagttcgtactccaggtctgtgtccagggagcgctcagcttgatctgcgaggtgtgtcgtcctaggtggttataagatatgcgctgtatttgcatctatcagaacttgtgtacttcgtatattacgaacttgagaactgtatggatgtgtgcattgtgccaaattatgttcattctgtgctatctttctgatgct

SEQ ID NO: 23732 - protein, 214 aa, Zea mays subsp. mays
  peptide (1)..(214): Ceres Seq. ID no. 12365184
MPTSAKGQREDEVEPQHLGSILAQNHPVDGGTPQATHLIGGAVTVPATHLIGGTVMVETGHTLHMTEGDHTLLTAGMNHIPLTMAGDHTHLTTADGIVQGPHTATEDAGHLLFRHTTAGTGTDLSPSHPVHLQGPEDGAIRAVYHHREATRAAIPQNPRDQQAILLRKGVKGNPRVADTLARVVIQGKATLIAAVRTPGLCPGSAQLDLRGVSS

SEQ ID NO: 23733 - protein, 164 aa, Zea mays subsp. mays
  peptide (1)..(164): Ceres Seq. ID no. 12365185
  misc_feature (87)..(158): Pfam Name: a.k.a. RRM, RBD, or RNP domain Pfam Description: RNA recognition motif.
  misc_feature (68)..(162): NCBI GI NO: 34902002 NR Description: putative transformer serine/arginine-richribonucleoprotein
  misc_feature (48)..(162): NCBI GI NO: 18390758 NR Description: transformer serine/arginine-rich ribonucleoprotein
  misc_feature (48)..(162): NCBI GI NO: 28973767 NR Description: putative transformer-SR ribonucleoprotein
  misc_feature (73)..(162): NCBI GI NO: 8778550 NR Description: F22G5.31 [Arabidopsis thaliana]
  misc_feature (46)..(162): NCBI GI NO: 11275253 NR Description: transformer-2-like protein - liverwort
  misc_feature (47)..(162): NCBI GI NO: 40253470 NR Description: putative transformer-SR ribonucleoprotein
  misc_feature (49)..(162): NCBI GI NO: 7489207 NR Description: transformer-SR ribonucleoprotein - common tobacco
  misc_feature (48)..(164): NCBI GI NO: 30680096 NR Description: transformer serine/arginine-rich ribonucleoprotein
  misc_feature (87)..(162): NCBI GI NO: 29735276 NR Description: similar to 46kD arginine/serine-rich splicingfactor
  misc_feature (86)..(162): NCBI GI NO: 28279759 NR Description: Similar to splicing factor, arginine/serine-rich 2
CTGGLADSGLVPTGKKAQRQCRDRFETQEKDRDEAAVFRGSIVSATKMSYSRGSRYGSRSPYSRSTRYRSRSRSVDSSDAENPGNNLYVTGLSARVTDRDLEKHFSTEGEVIDASVVYDPWTRESRGFGFVTMAAVKDADRCIKYLDRSVLQGRVITVEKGRCW

SEQ ID NO: 23734 - protein, 159 aa, Zea mays subsp. mays
  peptide (1)..(159): Ceres Seq. ID no. 12365186
MVETGHTLHMTEGDHTLLTAGMNHIPLTMAGDHTHLTTADGIVQGPHTATEDAGHLLFRHTTAGTGTDLSPSHPVHLQGPEDGAIRAVYHHREATRAAIPQNPRDQQAILLRKGVKGNPRVADTLARVVIQGKATLIAAVRTPGLCPGSAQLDLRGVSS

SEQ ID NO: 23735 - DNA, 1379 bp, Zea mays subsp. mays
  misc_feature (1)..(1379): Ceres Seq. ID no. 12353653
cccagctagacctacagaaaaaaaactctaaaatagttgttggtaaaccagcaggtgagcagtcgaacatcgtggccgcctctgctcagcccagatctccgatggccaccgcacccgccgccccgccgccggcctccgcggacgacgagatcatctacgagtccatgccctgcatccgcgtctacaaggaccgcgtggagcgctacttcggcaccgagttcgtcgccgcctcgacgaacgactccaccggcgtggcctccagggacgtcgtcatctcccccaacgtctccgcgcgcctctacctcccgcgcctggacgacgggaacgccaagctccccatcttcgtctactaccacggcggcggcttctgcatcggctccgccttcaaccccatcttccacgactacttcaactgcctcgtggccctcgccgacatcctcgtcgtctccgtcgagtaccgcctcgccccggagcaccccgtccccgccgcctacgccgactcctgggaagcgctcgcctgggtcatctctcacctcggccccgccggcgacggcgcccgggacccgtggatcgcgagccacgccgacttctcccgcctcttcctgggcggcgagagcgcgggctccaacatcgcgcaccacatggcgatgcgcgctgccgcggaggggctggcccacggcgcccggatccggggactcgtcatgatccacccctacttcctgggcacggacaaggtgccctccgacgacctcagcccggaggtgcgcgagagcctggggtccctgtggcgcttcatgtgcccgaccaccacgggggaggacgacccgctcatcaaccccttcgttgacggcgccccgccgctagcgtccctgccgtgcggccgcgtgctcgtgtgcatcggcgagggcgacgtcctccgcgaccgcggccgcgcctactacgaccggctcagggccagcgggtggcccggcaaggcagagatttggcaggcgcccggcaagggacacacgttccacctcctggatccgtgctgcgacgaggccatcgcgcaggataaagtcatcagctacttcctcagccactgactcgcctcgcgtcctcgccggtggtggtggcgttgttgggcttggatcaaaattagcttctttcatgctggcgctacactacataccttacttctagtacatatcaggttcagagttgtatccgtattctttgaaattggatctcagaatggagctttgcccattgttagtaggcaatggtgttgatgtattgcacctggtaatttggggacgatgatacagtcatagtgtcatacatatgaaattatacttgtttgtcacacagaatttgttgaaacaaatgttccatctttt

SEQ ID NO: 23736 - protein, 360 aa, Zea mays subsp. mays
  peptide (1)..(360): Ceres Seq. ID no. 12353654
  misc_feature (47)..(348): NCBI GI NO: 18086341 NR Description: AT3g48690/T8P19_200 [Arabidopsis thaliana]
  misc_feature (45)..(359): NCBI GI NO: 18401743 NR Description: expressed protein; protein id: At1g47480
  misc_feature (47)..(348): NCBI GI NO: 15228425 NR Description: putative protein; protein id: At3g48690
  misc_feature (44)..(359): NCBI GI NO: 38344841 NR Description: OSJNBa0064H22.22
  misc_feature (45)..(359): NCBI GI NO: 21536771 NR Description: unknown [Arabidopsis thaliana]
  misc_feature (47)..(347): NCBI GI NO: 15228426 NR Description: putative protein; protein id: At3g48700.1
  misc_feature (46)..(359): NCBI GI NO: 21537287 NR Description: putative esterase [Arabidopsis thaliana]
  misc_feature (46)..(347): NCBI GI NO: 18402731 NR Description: expressed protein; protein id: At1g49650
  misc_feature (47)..(347): NCBI GI NO: 15221975 NR Description: hypothetical protein; protein id: At1g19190.1
  misc_feature (47)..(348): NCBI GI NO: 15222795 NR Description: unknown protein; protein id: At1g49660.1
QLDLQKKNSKIVVGKPAGEQSNIVAASAQPRSPMATAPAAPPPASADDEIIYESMPCIRVYKDRVERYFGTEFVAASTNDSTGVASRDVVISPNVSARLYLPRLDDGNAKLPIFVYYHGGGFCIGSAFNPIFHDYFNCLVALADILVVSVEYRLAPEHPVPAAYADSWEALAWVISHLGPAGDGARDPWIASHADFSRLFLGGESAGSNIAHHMAMRAAAEGLAHGARIRGLVMIHPYFLGTDKVPSDDLSPEVRESLGSLWRFMCPTTTGEDDPLINPFVDGAPPLASLPCGRVLVCIGEGDVLRDRGRAYYDRLRASGWPGKAEIWQAPGKGHTFHLLDPCCDEAIAQDKVISYFLSH

SEQ ID NO: 23737 - protein, 327 aa, Zea mays subsp. mays
  peptide (1)..(327): Ceres Seq. ID no. 12353655
  misc_feature (14)..(315): NCBI GI NO: 18086341 NR Description: AT3g48690/T8P19_200 [Arabidopsis thaliana]
  misc_feature (12)..(326): NCBI GI NO: 18401743 NR Description: expressed protein; protein id: At1g47480
  misc_feature (14)..(315): NCBI GI NO: 15228425 NR Description: putative protein; protein id: At3g48690
  misc_feature (11)..(326): NCBI GI NO: 38344841 NR Description: OSJNBa0064H22.22
  misc_feature (12)..(326): NCBI GI NO: 21536771 NR Description: unknown [Arabidopsis thaliana]
  misc_feature (14)..(314): NCBI GI NO: 15228426 NR Description: putative protein; protein id: At3g48700.1
  misc_feature (13)..(326): NCBI GI NO: 21537287 NR Description: putative esterase [Arabidopsis thaliana]
  misc_feature (13)..(314): NCBI GI NO: 18402731 NR Description: expressed protein; protein id: At1g49650
  misc_feature (14)..(314): NCBI GI NO: 15221975 NR Description: hypothetical protein; protein id: At1g19190.1
  misc_feature (14)..(315): NCBI GI NO: 15222795 NR Description: unknown protein; protein id: At1g49660.1
MATAPAAPPPASADDEIIYESMPCIRVYKDRVERYFGTEFVAASTNDSTGVASRDVVISPNVSARLYLPRLDDGNAKLPIFVYYHGGGFCIGSAFNPIFHDYFNCLVALADILVVSVEYRLAPEHPVPAAYADSWEALAWVISHLGPAGDGARDPWIASHADFSRLFLGGESAGSNIAHHMAMRAAAEGLAHGARIRGLVMIHPYFLGTDKVPSDDLSPEVRESLGSLWRFMCPTTTGEDDPLINPFVDGAPPLASLPCGRVLVCIGEGDVLRDRGRAYYDRLRASGWPGKAEIWQAPGKGHTFHLLDPCCDEAIAQDKVISYFLSH

SEQ ID NO: 23738 - protein, 306 aa, Zea mays subsp. mays
  peptide (1)..(306): Ceres Seq. ID no. 12353656
  misc_feature (1)..(294): NCBI GI NO: 18086341 NR Description: AT3g48690/T8P19_200 [Arabidopsis thaliana]
  misc_feature (1)..(305): NCBI GI NO: 18401743 NR Description: expressed protein; protein id: At1g47480
  misc_feature (1)..(294): NCBI GI NO: 15228425 NR Description: putative protein; protein id: At3g48690
  misc_feature (1)..(305): NCBI GI NO: 38344841 NR Description: OSJNBa0064H22.22
  misc_feature (1)..(305): NCBI GI NO: 21536771 NR Description: unknown [Arabidopsis thaliana]
  misc_feature (1)..(293): NCBI GI NO: 15228426 NR Description: putative protein; protein id: At3g48700.1
  misc_feature (1)..(305): NCBI GI NO: 21537287 NR Description: putative esterase [Arabidopsis thaliana]
  misc_feature (1)..(293): NCBI GI NO: 18402731 NR Description: expressed protein; protein id: At1g49650
  misc_feature (1)..(293): NCBI GI NO: 15221975 NR Description: hypothetical protein; protein id: At1g19190.1
  misc_feature (1)..(294): NCBI GI NO: 15222795 NR Description: unknown protein; protein id: At1g49660.1
MPCIRVYKDRVERYFGTEFVAASTNDSTGVASRDVVISPNVSARLYLPRLDDGNAKLPIFVYYHGGGFCIGSAFNPIFHDYFNCLVALADILVVSVEYRLAPEHPVPAAYADSWEALAWVISHLGPAGDGARDPWIASHADFSRLFLGGESAGSNIAHHMAMRAAAEGLAHGARIRGLVMIHPYFLGTDKVPSDDLSPEVRESLGSLWRFMCPTTTGEDDPLINPFVDGAPPLASLPCGRVLVCIGEGDVLRDRGRAYYDRLRASGWPGKAEIWQAPGKGHTFHLLDPCCDEAIAQDKVISYFLSH

SEQ ID NO: 23739 - DNA, 1005 bp, Zea mays subsp. mays
  misc_feature (1)..(1005): Ceres Seq. ID no. 13492805
  misc_feature (983)..(983): n is a, c, t, g, unknown, or other
  misc_feature (1000)..(1000): n is a, c, t, g, unknown, or other
aggagagcacaacgttacaaggacgcatcgaggagactacctacggccatggcgaggagaaggcttctcgcgctcgcctcccggctctacgggaggcctcaggcgacgcagccgtggcggcgacccccgccccggtttctctcctcagctgcgtccggcaccctcgatcacctgaagtcgccgcctttcgcgcgtccggctgcccggaaccccgcctcctatccatgggatcgattcggaggagggcagaagaggaccatgttcatccagacacagtcgaccccgaacccgcagtcactcatgttctatcctggaaagccagttatggagattgggagctctgatttccctaatgctcggactgcgatgacatcccctttggctaagtcgctttttgctattgatggagtaaccagggtattctttggatctgattttgtaactgttacaaaatcagaagaaacttcatgggattgcctcaaacctgaggtttttgctgcaataatggacttctactcatctgggcaaccactttttctggactcaaatgctgcagcttctatggacacagcaattcacgaggatgattctgaaatagttgccatgataaaagaattattggagactcgtattcgaccagctgttcaagatgacggcggtgacattgaataccgaggattcgacccagaaacaggaacagttaagcttaaaatgcaaggtgcctgcagcggctgtccaagttcgtcagtcacattgaagtctgggatagaaaacatgcttatgcactatgtgcctgaggtgaaaggagtagaacaggagttcgatggtgatgaggaagctgaagtggctggatagatcgagagagtttttacaggttttgagggtcaacacagcctgatgttatagcaacttcgcacgtacggtattgccgatcctgatgtatgcaggaggcaggcttagatagcagaggcgtcaatagtctnaaataacatccgttgcnctagt

SEQ ID NO: 23740 - protein, 284 aa, Zea mays subsp. mays
  peptide (1)..(284): Ceres Seq. ID no. 13492806
  misc_feature (203)..(273): Pfam Name: Pfam Description:  NifU-like domain
  misc_feature (17)..(284): NCBI GI NO: 34897632 NR Description: hypothetical protein [Oryza sativa]
  misc_feature (76)..(284): NCBI GI NO: 18402817 NR Description: expressed protein [Arabidopsis thaliana]
  misc_feature (46)..(284): NCBI GI NO: 25405462 NR Description: unknown protein, 90320-88994
  misc_feature (70)..(284): NCBI GI NO: 15223842 NR Description: expressed protein [Arabidopsis thaliana]
  misc_feature (87)..(281): NCBI GI NO: 26324295 NR Description: unnamed protein product [Mus musculus]
  misc_feature (85)..(283): NCBI GI NO: 37681825 NR Description: HIRA interacting protein 5 [Danio rerio]
  misc_feature (85)..(281): NCBI GI NO: 12834577 NR Description: unnamed protein product [Mus musculus]
  misc_feature (85)..(281): NCBI GI NO: 34500321 NR Description: NifU-like protein HIRIP5 [Mus musculus]
  misc_feature (87)..(281): NCBI GI NO: 9910264 NR Description: histone cell cycle regulation defective interacting protein 5
  misc_feature (85)..(281): NCBI GI NO: 34856373 NR Description: similar to HIRA-interacting protein 5 (mHIRIP5)
RRAQRYKDASRRLPTAMARRRLLALASRLYGRPQATQPWRRPPPRFLSSAASGTLDHLKSPPFARPAARNPASYPWDRFGGGQKRTMFIQTQSTPNPQSLMFYPGKPVMEIGSSDFPNARTAMTSPLAKSLFAIDGVTRVFFGSDFVTVTKSEETSWDCLKPEVFAAIMDFYSSGQPLFLDSNAAASMDTAIHEDDSEIVAMIKELLETRIRPAVQDDGGDIEYRGFDPETGTVKLKMQGACSGCPSSSVTLKSGIENMLMHYVPEVKGVEQEFDGDEEAEVAG

SEQ ID NO: 23741 - protein, 268 aa, Zea mays subsp. mays
  peptide (1)..(268): Ceres Seq. ID no. 13492807
  misc_feature (187)..(257): Pfam Name: Pfam Description:  NifU-like domain
  misc_feature (1)..(268): NCBI GI NO: 34897632 NR Description: hypothetical protein [Oryza sativa]
  misc_feature (60)..(268): NCBI GI NO: 18402817 NR Description: expressed protein [Arabidopsis thaliana]
  misc_feature (30)..(268): NCBI GI NO: 25405462 NR Description: unknown protein, 90320-88994
  misc_feature (54)..(268): NCBI GI NO: 15223842 NR Description: expressed protein [Arabidopsis thaliana]
  misc_feature (71)..(265): NCBI GI NO: 26324295 NR Description: unnamed protein product [Mus musculus]
  misc_feature (69)..(267): NCBI GI NO: 37681825 NR Description: HIRA interacting protein 5 [Danio rerio]
  misc_feature (69)..(265): NCBI GI NO: 12834577 NR Description: unnamed protein product [Mus musculus]
  misc_feature (69)..(265): NCBI GI NO: 34500321 NR Description: NifU-like protein HIRIP5 [Mus musculus]
  misc_feature (71)..(265): NCBI GI NO: 9910264 NR Description: histone cell cycle regulation defective interacting protein 5
  misc_feature (69)..(265): NCBI GI NO: 34856373 NR Description: similar to HIRA-interacting protein 5 (mHIRIP5)
MARRRLLALASRLYGRPQATQPWRRPPPRFLSSAASGTLDHLKSPPFARPAARNPASYPWDRFGGGQKRTMFIQTQSTPNPQSLMFYPGKPVMEIGSSDFPNARTAMTSPLAKSLFAIDGVTRVFFGSDFVTVTKSEETSWDCLKPEVFAAIMDFYSSGQPLFLDSNAAASMDTAIHEDDSEIVAMIKELLETRIRPAVQDDGGDIEYRGFDPETGTVKLKMQGACSGCPSSSVTLKSGIENMLMHYVPEVKGVEQEFDGDEEAEVAG

SEQ ID NO: 23742 - protein, 198 aa, Zea mays subsp. mays
  peptide (1)..(198): Ceres Seq. ID no. 13492808
  misc_feature (117)..(187): Pfam Name: Pfam Description:  NifU-like domain
  misc_feature (1)..(198): NCBI GI NO: 34897632 NR Description: hypothetical protein [Oryza sativa]
  misc_feature (1)..(198): NCBI GI NO: 18402817 NR Description: expressed protein [Arabidopsis thaliana]
  misc_feature (1)..(198): NCBI GI NO: 25405462 NR Description: unknown protein, 90320-88994
  misc_feature (1)..(198): NCBI GI NO: 15223842 NR Description: expressed protein [Arabidopsis thaliana]
  misc_feature (1)..(195): NCBI GI NO: 26324295 NR Description: unnamed protein product [Mus musculus]
  misc_feature (1)..(197): NCBI GI NO: 37681825 NR Description: HIRA interacting protein 5 [Danio rerio]
  misc_feature (1)..(195): NCBI GI NO: 12834577 NR Description: unnamed protein product [Mus musculus]
  misc_feature (1)..(195): NCBI GI NO: 34500321 NR Description: NifU-like protein HIRIP5 [Mus musculus]
  misc_feature (1)..(195): NCBI GI NO: 9910264 NR Description: histone cell cycle regulation defective interacting protein 5
  misc_feature (1)..(195): NCBI GI NO: 34856373 NR Description: similar to HIRA-interacting protein 5 (mHIRIP5)
MFIQTQSTPNPQSLMFYPGKPVMEIGSSDFPNARTAMTSPLAKSLFAIDGVTRVFFGSDFVTVTKSEETSWDCLKPEVFAAIMDFYSSGQPLFLDSNAAASMDTAIHEDDSEIVAMIKELLETRIRPAVQDDGGDIEYRGFDPETGTVKLKMQGACSGCPSSSVTLKSGIENMLMHYVPEVKGVEQEFDGDEEAEVAG

SEQ ID NO: 23743 - DNA, 1157 bp, Zea mays subsp. mays; identical to SEQ ID NO: 23442
  misc_feature (1)..(1157): Ceres Seq. ID no. 12373468

SEQ ID NO: 23744 - protein, 189 aa, Zea mays subsp. mays; identical to SEQ ID NO: 23443
  peptide (1)..(189): Ceres Seq. ID no. 12373469
  misc_feature (51)..(185): NCBI GI NO: 38346164 NR Description: OSJNBa0079A21.11
  misc_feature (42)..(185): NCBI GI NO: 14140139 NR Description: putative protein [Oryza sativa]
  misc_feature (51)..(185): NCBI GI NO: 15236549 NR Description: carboxyl-terminal proteinase like protein
  misc_feature (51)..(129): NCBI GI NO: 7488069 NR Description: probable carboxyl-terminal proteinase - Arabidopsisthaliana
  misc_feature (57)..(185): NCBI GI NO: 5174741 NR Description: ubiquitin carboxyl-terminal esterase L3
  misc_feature (57)..(185): NCBI GI NO: 17380334 NR Description: Ubiquitin carboxyl-terminal hydrolase isozyme L3
  misc_feature (54)..(185): NCBI GI NO: 5805326 NR Description: ubiquitin carboxyl-terminal hydrolase-6
  misc_feature (57)..(185): NCBI GI NO: 7522621 NR Description: ubiquitin carboxy-terminal hydrolase-6 (EC 3
  misc_feature (57)..(185): NCBI GI NO: 7710106 NR Description: ubiquitin carboxyl-terminal esterase L3
  misc_feature (57)..(185): NCBI GI NO: 27705170 NR Description: similar to ubiqutin carboxyl-terminal hydrolase l3

SEQ ID NO: 23745 - protein, 137 aa, Zea mays subsp. mays; identical to SEQ ID NO: 23444
  peptide (1)..(137): Ceres Seq. ID no. 12373470
  misc_feature (1)..(133): NCBI GI NO: 38346164 NR Description: OSJNBa0079A21.11
  misc_feature (1)..(133): NCBI GI NO: 14140139 NR Description: putative protein [Oryza sativa]
  misc_feature (1)..(133): NCBI GI NO: 15236549 NR Description: carboxyl-terminal proteinase like protein
  misc_feature (1)..(77): NCBI GI NO: 7488069 NR Description: probable carboxyl-terminal proteinase - Arabidopsisthaliana
  misc_feature (5)..(133): NCBI GI NO: 5174741 NR Description: ubiquitin carboxyl-terminal esterase L3
  misc_feature (5)..(133): NCBI GI NO: 17380334 NR Description: Ubiquitin carboxyl-terminal hydrolase isozyme L3
  misc_feature (2)..(133): NCBI GI NO: 5805326 NR Description: ubiquitin carboxyl-terminal hydrolase-6
  misc_feature (5)..(133): NCBI GI NO: 7522621 NR Description: ubiquitin carboxy-terminal hydrolase-6 (EC 3
  misc_feature (5)..(133): NCBI GI NO: 7710106 NR Description: ubiquitin carboxyl-terminal esterase L3
  misc_feature (5)..(133): NCBI GI NO: 27705170 NR Description: similar to ubiqutin carboxyl-terminal hydrolase l3

SEQ ID NO: 23746 - protein, 101 aa, Zea mays subsp. mays; identical to SEQ ID NO: 23445
  peptide (1)..(101): Ceres Seq. ID no. 12373471
  misc_feature (1)..(97): NCBI GI NO: 38346164 NR Description: OSJNBa0079A21.11
  misc_feature (1)..(97): NCBI GI NO: 14140139 NR Description: putative protein [Oryza sativa]
  misc_feature (1)..(97): NCBI GI NO: 15236549 NR Description: carboxyl-terminal proteinase like protein
  misc_feature (1)..(41): NCBI GI NO: 7488069 NR Description: probable carboxyl-terminal proteinase - Arabidopsisthaliana
  misc_feature (1)..(97): NCBI GI NO: 5174741 NR Description: ubiquitin carboxyl-terminal esterase L3
  misc_feature (1)..(97): NCBI GI NO: 17380334 NR Description: Ubiquitin carboxyl-terminal hydrolase isozyme L3
  misc_feature (1)..(97): NCBI GI NO: 5805326 NR Description: ubiquitin carboxyl-terminal hydrolase-6
  misc_feature (1)..(97): NCBI GI NO: 7522621 NR Description: ubiquitin carboxy-terminal hydrolase-6 (EC 3
  misc_feature (1)..(97): NCBI GI NO: 7710106 NR Description: ubiquitin carboxyl-terminal esterase L3
  misc_feature (1)..(97): NCBI GI NO: 27705170 NR Description: similar to ubiqutin carboxyl-terminal hydrolase l3

SEQ ID NO: 23747 - DNA, 1168 bp, Zea mays subsp. mays
  misc_feature (1)..(1168): Ceres Seq. ID no. 13493084
  misc_feature (432)..(432): n is a, c, t, g, unknown, or other
atcgaaaacttcaatgtgcacaatataaactagctgggatcaaatacaggagcacctcgagtctgagagaatggctaacactgctaagggtaaggtctgtgtcactggggcgtctggtttcatcgcctcctggctcgtcaagcggcttcttgagtctgggtaccatgtcctgggaacagtcagagacccagggaatggcaagaaagtagggcacctctggggcctggaaggcgcaaaggaaaggctgcagctcgtgagagctgatctcttggaggaagggagcttcgacgacgctgtgatggcttgcgagggcgtcttccacaccgcatcgcccgtcgtcaccggatctaattccaaggaggagatgcttgattcagcaataaacggcacgatgaacgtgctacgctcgtgcaagaagaacccatcgctcangagggttgtcctgacatcctcgtcgtcgacagtgaggatcaaggacgaagccgacctgccccctaacgtgctgctggacgaatcgtcgtggagctccatcgagttctgcgaaagtctccagatatggtacgccgtcgcaaagatcctcgccgagaaggcagcctgggagttcgccggagagcacaggatcgacctcgtcaccgttcttccgaccttcgttgtcggacctactctgtctcctgagctcggccccaccgcttctgatgtcctcggcctgttccaaggagagacggggaagttcacgacgtacgggaggatggggtacgtccacatcgacgacgtggcgaggtgccacatgctggcgtacgaggccgcgggcgcccgagggaggtacatctgcagcgcggcggtgctggactgcggcgacctcgccgccctgctcgcgcggcggttcccagcgtaccccgtcccgaggagcctgccccgcgcctacggcgagcagtcgtacggcttcgacacgtccaaggcccgcgcgctggggctggcggaattcaagggcgtcgaggagatgttcgacgacgccgtcgcctcgttcataggccatggccatctccccgccgccgaggaacgccggcacgcgtagcctcttggtctgaaactacatgaatgaacgtatcatgtactaattaaattatttaatacttttaactagcatctaatcatgccgtttagtctc

SEQ ID NO: 23748 - protein, 334 aa, Zea mays subsp. mays
  peptide (1)..(334): Ceres Seq. ID no. 13493085
  misc_feature (8)..(265): Pfam Name: Pfam Description:  3-beta hydroxysteroid dehydrogenase/ isomerase family
  misc_feature (1)..(325): NCBI GI NO: 34905082 NR Description: putative dihydroflavonol 4-reductase
  misc_feature (1)..(325): NCBI GI NO: 4581047 NR Description: putative dihydroflavonol reductase [Oryza sativa]
  misc_feature (1)..(325): NCBI GI NO: 14030554 NR Description: dihydro-flavanoid reductase-like protein
  misc_feature (5)..(325): NCBI GI NO: 30690351 NR Description: dihydroflavonol 4-reductase
  misc_feature (3)..(318): NCBI GI NO: 5852203 NR Description: aldehyde reductase [Vigna radiata]
  misc_feature (3)..(325): NCBI GI NO: 7431406 NR Description: probable cinnamyl-alcohol dehydrogenase (EC1
  misc_feature (11)..(325): NCBI GI NO: 15221433 NR Description: oxidoreductase family [Arabidopsis thaliana]
  misc_feature (6)..(334): NCBI GI NO: 30230341 NR Description: putative dihydroflavonol 4-reductase
  misc_feature (9)..(330): NCBI GI NO: 9998901 NR Description: cinnamoyl-CoA reductase
  misc_feature (7)..(326): NCBI GI NO: 25140434 NR Description: cinnamoyl CoA reductase [Solanum tuberosum]
  misc_feature (121)..(121): Xaa is any aa, unknown or other
MANTAKGKVCVTGASGFIASWLVKRLLESGYHVLGTVRDPGNGKKVGHLWGLEGAKERLQLVRADLLEEGSFDDAVMACEGVFHTASPVVTGSNSKEEMLDSAINGTMNVLRSCKKNPSLXRVVLTSSSSTVRIKDEADLPPNVLLDESSWSSIEFCESLQIWYAVAKILAEKAAWEFAGEHRIDLVTVLPTFVVGPTLSPELGPTASDVLGLFQGETGKFTTYGRMGYVHIDDVARCHMLAYEAAGARGRYICSAAVLDCGDLAALLARRFPAYPVPRSLPRAYGEQSYGFDTSKARALGLAEFKGVEEMFDDAVASFIGHGHLPAAEERRHA

SEQ ID NO: 23749 - protein, 258 aa, Zea mays subsp. mays
  peptide (1)..(258): Ceres Seq. ID no. 13493086
  misc_feature (1)..(189): Pfam Name: Pfam Description:  3-beta hydroxysteroid dehydrogenase/ isomerase family
  misc_feature (1)..(249): NCBI GI NO: 34905082 NR Description: putative dihydroflavonol 4-reductase
  misc_feature (1)..(249): NCBI GI NO: 4581047 NR Description: putative dihydroflavonol reductase [Oryza sativa]
  misc_feature (1)..(249): NCBI GI NO: 14030554 NR Description: dihydro-flavanoid reductase-like protein
  misc_feature (1)..(249): NCBI GI NO: 30690351 NR Description: dihydroflavonol 4-reductase
  misc_feature (1)..(242): NCBI GI NO: 5852203 NR Description: aldehyde reductase [Vigna radiata]
  misc_feature (1)..(249): NCBI GI NO: 7431406 NR Description: probable cinnamyl-alcohol dehydrogenase (EC1
  misc_feature (1)..(249): NCBI GI NO: 15221433 NR Description: oxidoreductase family [Arabidopsis thaliana]
  misc_feature (1)..(258): NCBI GI NO: 30230341 NR Description: putative dihydroflavonol 4-reductase
  misc_feature (1)..(254): NCBI GI NO: 9998901 NR Description: cinnamoyl-CoA reductase
  misc_feature (1)..(250): NCBI GI NO: 25140434 NR Description: cinnamoyl CoA reductase [Solanum tuberosum]
  misc_feature (45)..(45): Xaa is any aa, unknown or other
MACEGVFHTASPVVTGSNSKEEMLDSAINGTMNVLRSCKKNPSLXRVVLTSSSSTVRIKDEADLPPNVLLDESSWSSIEFCESLQIWYAVAKILAEKAAWEFAGEHRIDLVTVLPTFVVGPTLSPELGPTASDVLGLFQGETGKFTTYGRMGYVHIDDVARCHMLAYEAAGARGRYICSAAVLDCGDLAALLARRFPAYPVPRSLPRAYGEQSYGFDTSKARALGLAEFKGVEEMFDDAVASFIGHGHLPAAEERRHA

SEQ ID NO: 23750 - protein, 236 aa, Zea mays subsp. mays
  peptide (1)..(236): Ceres Seq. ID no. 13493087
  misc_feature (1)..(167): Pfam Name: Pfam Description:  3-beta hydroxysteroid dehydrogenase/ isomerase family
  misc_feature (1)..(227): NCBI GI NO: 34905082 NR Description: putative dihydroflavonol 4-reductase
  misc_feature (1)..(227): NCBI GI NO: 4581047 NR Description: putative dihydroflavonol reductase [Oryza sativa]
  misc_feature (1)..(227): NCBI GI NO: 14030554 NR Description: dihydro-flavanoid reductase-like protein
  misc_feature (1)..(227): NCBI GI NO: 30690351 NR Description: dihydroflavonol 4-reductase
  misc_feature (1)..(220): NCBI GI NO: 5852203 NR Description: aldehyde reductase [Vigna radiata]
  misc_feature (1)..(227): NCBI GI NO: 7431406 NR Description: probable cinnamyl-alcohol dehydrogenase (EC1
  misc_feature (1)..(227): NCBI GI NO: 15221433 NR Description: oxidoreductase family [Arabidopsis thaliana]
  misc_feature (1)..(236): NCBI GI NO: 30230341 NR Description: putative dihydroflavonol 4-reductase
  misc_feature (1)..(232): NCBI GI NO: 9998901 NR Description: cinnamoyl-CoA reductase
  misc_feature (1)..(228): NCBI GI NO: 25140434 NR Description: cinnamoyl CoA reductase [Solanum tuberosum]
  misc_feature (23)..(23): Xaa is any aa, unknown or other
MLDSAINGTMNVLRSCKKNPSLXRVVLTSSSSTVRIKDEADLPPNVLLDESSWSSIEFCESLQIWYAVAKILAEKAAWEFAGEHRIDLVTVLPTFVVGPTLSPELGPTASDVLGLFQGETGKFTTYGRMGYVHIDDVARCHMLAYEAAGARGRYICSAAVLDCGDLAALLARRFPAYPVPRSLPRAYGEQSYGFDTSKARALGLAEFKGVEEMFDDAVASFIGHGHLPAAEERRHA

SEQ ID NO: 23751 - DNA, 1514 bp, Zea mays subsp. mays
  misc_feature (1)..(1514): Ceres Seq. ID no. 12340715
  misc_feature (245)..(245): n is a, c, t, g, unknown, or other
  misc_feature (48)..(48): n is a, c, t, g, unknown, or other
  misc_feature (200)..(200): n is a, c, t, g, unknown, or other
  misc_feature (149)..(149): n is a, c, t, g, unknown, or other
  misc_feature (203)..(203): n is a, c, t, g, unknown, or other
  misc_feature (261)..(261): n is a, c, t, g, unknown, or other
  misc_feature (248)..(248): n is a, c, t, g, unknown, or other
aaaacagccgcatccctctctccctactacctctccctagcagcgganagcttctctcccagccgcagctcctccctctgtcccctctcccaaaacccctctctctccacgcttctccctcactctcccagccgctgcagccgcgctgncctccgccccggcgcccgtcgcgctgccctcccatctccctccggtgttgngtngtcatttgtcaggtagccgcctcccccccccccccccccctnttnagcttgttctccncggcggcggcggcggcggcttggatcggagcggagggagaagatggtggcatcaatcagggtgcccaagacccaacgcgccaggagggagcttctcaagcacgcgcccaagcttgttgagaccagcaagaagacactgatcctccatggtaccaagactagtgctgtgttgaactctgtgctgtcagatatttaccacctaaagcgtgataatgctgtgaaatataccaagaagaatgacaacattaggccttttgaaagtggtggagaatcttctctggaatttttctccctcaaggcagactgtagccttatagtgtatggttctcattcaaagaagaggcccaacaatctgattttggctagaacgtatgaccaccacatatatgaccttgttgaagtaggagttgagaactacaagtcaatggaatcttatgtttatgataagaagctagcaccattacttggatcgaagcctttctttgctttcataggggaacactttgagagttctgaagagctgaaacatttgaaagaagtgctgcttgatcttttcagaggagaggtcgtagagaatctgaaccttgccggtgtggatcggatctatgtgtgcactgcaatctctcccaccactgtttacatgatgcactgtgctctccgtctaaaaaggtcaggtacatctattcctaggatggagctggtcgaagttggaccttcaatggatctggttgtaaggaggcacagacttccagctgaaagtttgaagaaagaagctatgaagaccgctgaacatgctaagaagatgaaaaatgtcaccaaggatccagtgcagggcaagctgggcaaggtctacatgccagaccagcaggttggaaagttgaccttatcaaacgacgtaaagggactaaagagggagcgccgcgaagccaagaaaaatcaggactcaaagaagcaaaaggtcaaccctgagtaaagagcactgaagtttacctttgtattggatacaggtcaggttaagaaaccctggcttgtatctgtttccaactgctgtgttatccaagtagaagttgctcgctgtcagattagtgccatcttgttaggctaaagatctctgtacgactttcacatcagtattgtgtaccaatccatgttatgacataagcatggaattttgagaatgtgttatcctatcaaatatcaaacgtcttctgaggtctcaagccctgttaaaggaggattgtggtaggcttggcg

SEQ ID NO: 23752 - protein, 309 aa, Zea mays subsp. mays
  peptide (1)..(309): Ceres Seq. ID no. 12340716
  misc_feature (1)..(309): NCBI GI NO: 34914658 NR Description: P0504D03.20
  misc_feature (5)..(309): NCBI GI NO: 18403828 NR Description: expressed protein; protein id: At3g23620
  misc_feature (5)..(309): NCBI GI NO: 21554561 NR Description: unknown [Arabidopsis thaliana]
  misc_feature (5)..(305): NCBI GI NO: 7670547 NR Description: unnamed protein product [Mus musculus]
  misc_feature (8)..(305): NCBI GI NO: 27705690 NR Description: similar to RIKEN cDNA 2810470K21 gene
  misc_feature (8)..(305): NCBI GI NO: 18203123 NR Description: Brix domain containing protein 1
  misc_feature (8)..(305): NCBI GI NO: 39930469 NR Description: brix domain containing 1 [Homo sapiens]
  misc_feature (8)..(305): NCBI GI NO: 31982662 NR Description: RIKEN cDNA 2810470K21 [Mus musculus]
  misc_feature (8)..(305): NCBI GI NO: 12850727 NR Description: unnamed protein product [Mus musculus]
  misc_feature (8)..(307): NCBI GI NO: 28461332 NR Description: Similar to RIKEN cDNA 2810470K21 gene
MVASIRVPKTQRARRELLKHAPKLVETSKKTLILHGTKTSAVLNSVLSDIYHLKRDNAVKYTKKNDNIRPFESGGESSLEFFSLKADCSLIVYGSHSKKRPNNLILARTYDHHIYDLVEVGVENYKSMESYVYDKKLAPLLGSKPFFAFIGEHFESSEELKHLKEVLLDLFRGEVVENLNLAGVDRIYVCTAISPTTVYMMHCALRLKRSGTSIPRMELVEVGPSMDLVVRRHRLPAESLKKEAMKTAEHAKKMKNVTKDPVQGKLGKVYMPDQQVGKLTLSNDVKGLKRERREAKKNQDSKKQKVNPE

SEQ ID NO: 23753 - protein, 182 aa, Zea mays subsp. mays
  peptide (1)..(182): Ceres Seq. ID no. 12340717
  misc_feature (1)..(182): NCBI GI NO: 34914658 NR Description: P0504D03.20
  misc_feature (1)..(182): NCBI GI NO: 18403828 NR Description: expressed protein; protein id: At3g23620
  misc_feature (1)..(182): NCBI GI NO: 21554561 NR Description: unknown [Arabidopsis thaliana]
  misc_feature (1)..(178): NCBI GI NO: 7670547 NR Description: unnamed protein product [Mus musculus]
  misc_feature (1)..(178): NCBI GI NO: 27705690 NR Description: similar to RIKEN cDNA 2810470K21 gene
  misc_feature (1)..(178): NCBI GI NO: 18203123 NR Description: Brix domain containing protein 1
  misc_feature (1)..(178): NCBI GI NO: 39930469 NR Description: brix domain containing 1 [Homo sapiens]
  misc_feature (1)..(178): NCBI GI NO: 31982662 NR Description: RIKEN cDNA 2810470K21 [Mus musculus]
  misc_feature (1)..(178): NCBI GI NO: 12850727 NR Description: unnamed protein product [Mus musculus]
  misc_feature (1)..(180): NCBI GI NO: 28461332 NR Description: Similar to RIKEN cDNA 2810470K21 gene
MESYVYDKKLAPLLGSKPFFAFIGEHFESSEELKHLKEVLLDLFRGEVVENLNLAGVDRIYVCTAISPTTVYMMHCALRLKRSGTSIPRMELVEVGPSMDLVVRRHRLPAESLKKEAMKTAEHAKKMKNVTKDPVQGKLGKVYMPDQQVGKLTLSNDVKGLKRERREAKKNQDSKKQKVNPE

SEQ ID NO: 23754 - DNA, 1370 bp, Zea mays subsp. mays
  misc_feature (1)..(1370): Ceres Seq. ID no. 12377688
acacacatacactcactcgtacgccgtcgcttcctgcggtacgtactctctgtccgcagcgttcctccagctagtagcagtagcagctagctagctagctagcaactggccatcggggctgctagcagcgtacgtacgtggcgcgatggctcctccagctcatgataggctccgccgcctggtgctgctcctcgtcgttgccaccgccgcggcggctttgcttctggcgccgacgacggcggatgctgcgctgccgcgggtgcagcacacgcccaccaaggccgacgggtcgctcgccatcctcgtcgtcggcgactggggccgccgtggacagttcaaccagaccttggttgcccagcagatgggcgtggtggggcagaagctggacatcgacttcgtcatctccaccggcgacaacatctacgacgacggcatcgccaacactagcgaccccctcttcaaggaatcgttctccaatatctacactgccaacagccttcagaagccttggtacctggtccttggtaaccatgactacacgggaaacgcgctcgcgcagctcgaccctgccattcgcaaagtggatagccggtacaccgccattgccaagtccttcattgtcaactcagggattgcggattttttcctcgtcgacacaacgccgttcattgtccactactggaacaacaccaagttcgattggagaggcgtcgctcctcgagacacctacatcgcgaatctcctcaaggacttgaagtgtgcactgacagcgtccaaggctccctggaagatcgtcgtgggtcaccaccccatcagcagcgcctgcgggcatgggaacaacactgagctggaggagttgcttctcccggtcctcaggacacacggggttgacatgtacttgaatggccatgaccactgccttcagcgcgtcagcagcagagacagtcgtcttcagctactaaccagcggcggcgggtccaaggcatgggctggcaagttcaagcccaccctcgacaaagtggagttcctctacgacggccaggggttcatgtcgatgcgcctgagcaggacggaagcccgcctcgcgttcttcgacgtcgctggcagcgtcctgcactgctggaccatgcatgcccaaaaattaaagacgacgacgacgacgaccgctgctgctgctgggcactaaattaagctttgctgggtacgatgagttgatgatgcaattaattatttggttttgtcgtcttttcgtgcgtgagagggaagcaataataattaattgctgctgcttctgttgttgtgtgcacatgcatgtgagggtgtcaagtatgttcagcctcttgcaagataaaatctctcgtcttctgtgg

SEQ ID NO: 23755 - protein, 346 aa, Zea mays subsp. mays
  peptide (1)..(346): Ceres Seq. ID no. 12377689
  misc_feature (50)..(259): Pfam Name: Pfam Description:  Calcineurin-like phosphoesterase
  misc_feature (12)..(340): NCBI GI NO: 37530584 NR Description: putative purple acid phosphatase
  misc_feature (25)..(326): NCBI GI NO: 30683951 NR Description: calcineurin-like phosphoesterase family
  misc_feature (25)..(326): NCBI GI NO: 30911094 NR Description: putative purple acid phosphatase
  misc_feature (12)..(326): NCBI GI NO: 22329781 NR Description: hypothetical protein; protein id: At1g25230
  misc_feature (16)..(336): NCBI GI NO: 18401643 NR Description: acid phosphatase type 5; protein id: At3g17790
  misc_feature (25)..(326): NCBI GI NO: 25752249 NR Description: probable acid phosphatase (EC 3
  misc_feature (7)..(327): NCBI GI NO: 22325419 NR Description: putative purple acid phosphatase
  misc_feature (30)..(326): NCBI GI NO: 7331195 NR Description: putative purple acid phosphatase precursor
  misc_feature (16)..(336): NCBI GI NO: 21536860 NR Description: acid phosphatase type 5 [Arabidopsis thaliana]
  misc_feature (32)..(324): NCBI GI NO: 39918795 NR Description: putative acid phosphatase [Lupinus luteus]
MAPPAHDRLRRLVLLLVVATAAAALLLAPTTADAALPRVQHTPTKADGSLAILVVGDWGRRGQFNQTLVAQQMGVVGQKLDIDFVISTGDNIYDDGIANTSDPLFKESFSNIYTANSLQKPWYLVLGNHDYTGNALAQLDPAIRKVDSRYTAIAKSFIVNSGIADFFLVDTTPFIVHYWNNTKFDWRGVAPRDTYIANLLKDLKCALTASKAPWKIVVGHHPISSACGHGNNTELEELLLPVLRTHGVDMYLNGHDHCLQRVSSRDSRLQLLTSGGGSKAWAGKFKPTLDKVEFLYDGQGFMSMRLSRTEARLAFFDVAGSVLHCWTMHAQKLKTTTTTTAAAAGH

SEQ ID NO: 23756 - protein, 274 aa, Zea mays subsp. mays
  peptide (1)..(274): Ceres Seq. ID no. 12377690
  misc_feature (1)..(187): Pfam Name: Pfam Description:  Calcineurin-like phosphoesterase
  misc_feature (1)..(268): NCBI GI NO: 37530584 NR Description: putative purple acid phosphatase
  misc_feature (1)..(254): NCBI GI NO: 30683951 NR Description: calcineurin-like phosphoesterase family
  misc_feature (1)..(254): NCBI GI NO: 30911094 NR Description: putative purple acid phosphatase
  misc_feature (1)..(254): NCBI GI NO: 22329781 NR Description: hypothetical protein; protein id: At1g25230
  misc_feature (1)..(264): NCBI GI NO: 18401643 NR Description: acid phosphatase type 5; protein id: At3g17790
  misc_feature (1)..(254): NCBI GI NO: 25752249 NR Description: probable acid phosphatase (EC 3
  misc_feature (1)..(255): NCBI GI NO: 22325419 NR Description: putative purple acid phosphatase
  misc_feature (1)..(254): NCBI GI NO: 7331195 NR Description: putative purple acid phosphatase precursor
  misc_feature (1)..(264): NCBI GI NO: 21536860 NR Description: acid phosphatase type 5 [Arabidopsis thaliana]
  misc_feature (1)..(252): NCBI GI NO: 39918795 NR Description: putative acid phosphatase [Lupinus luteus]
MGVVGQKLDIDFVISTGDNIYDDGIANTSDPLFKESFSNIYTANSLQKPWYLVLGNHDYTGNALAQLDPAIRKVDSRYTAIAKSFIVNSGIADFFLVDTTPFIVHYWNNTKFDWRGVAPRDTYIANLLKDLKCALTASKAPWKIVVGHHPISSACGHGNNTELEELLLPVLRTHGVDMYLNGHDHCLQRVSSRDSRLQLLTSGGGSKAWAGKFKPTLDKVEFLYDGQGFMSMRLSRTEARLAFFDVAGSVLHCWTMHAQKLKTTTTTTAAAAGH

SEQ ID NO: 23757 - protein, 197 aa, Zea mays subsp. mays
  peptide (1)..(197): Ceres Seq. ID no. 12377691
  misc_feature (33)..(197): Pfam Name: Pfam Description:  Equine herpesvirus glycoprotein gp2
  misc_feature (35)..(197): NCBI GI NO: 25406831 NR Description: hypothetical protein
  misc_feature (9)..(197): NCBI GI NO: 28574039 NR Description: Salivary gland secretion 1 CG3047-PA
  misc_feature (35)..(197): NCBI GI NO: 13592175 NR Description: ppg3 [Leishmania major]
  misc_feature (42)..(197): NCBI GI NO: 6322611 NR Description: Delayed Anaerobic Gene; Dan4p
  misc_feature (33)..(197): NCBI GI NO: 17221116 NR Description: glycoprotein gp2 [Equine herpesvirus 1]
  misc_feature (35)..(197): NCBI GI NO: 17384256 NR Description: mucin 5 [Homo sapiens]
  misc_feature (42)..(197): NCBI GI NO: 17221116 NR Description: glycoprotein gp2 [Equine herpesvirus 1]
  misc_feature (42)..(197): NCBI GI NO: 9626808 NR Description: membrane glycoprotein [Equine herpesvirus 1]
  misc_feature (35)..(197): NCBI GI NO: 13592175 NR Description: ppg3 [Leishmania major]
  misc_feature (35)..(197): NCBI GI NO: 25011571 NR Description: Unknown [Streptococcus agalactiae NEM316]
MIGSAAWCCSSSLPPPRRLCFWRRRRRMLRCRGCSTRPPRPTGRSPSSSSATGAAVDSSTRPWLPSRWAWWGRSWTSTSSSPPATTSTTTASPTLATPSSRNRSPISTLPTAFRSLGTWSLVTMTTRETRSRSSTLPFAKWIAGTPPLPSPSLSTQGLRIFSSSTQRRSLSTTGTTPSSIGEASLLETPTSRISSRT

SEQ ID NO: 23758 - DNA, 1543 bp, Zea mays subsp. mays
  misc_feature (1)..(1543): Ceres Seq. ID no. 12405173
acggacgtacagaagggacgccgccggccacacaaaccgcaggttcgggagtgctccggaacccgccgccgcatccgcaccgcacgacgccacggctgacgactgggagccccgttcccctccaccgccacctccccgcgtagaagcagagagggaagcttagcagcgagaagccgagaaccctgtcgatctctcctgaagcaatccgctcatgtcgtgagctgaaccctacagttcgtatcacctcctctcgcagcagctgcagaaagagcaagggggatggccaaggacggaggccccgactggaacggcctgttcaagtggagcatcgcccacggagacggcaccaacccgccgcgtgctctcagtgaagaagacagaaaatggtttatggaggctatgcaagccaacacgatagatgttgtgaagaggatgaaggagatcactcgggtgatgagaactccacaagatgtcttgcagtctcagggtgtgaccccagagaacattgaagatatgttggatgagctacacgagcatgttgaatccattgacatggcaaatgatttacattctattggtggcctggatcccctgttcggttacttgaaaaattcaaatgctggcatccgcgcaaaggcagcagaagttgttagtacagtcgcgcagaataatcccaagagtcagcaacttgtcatggaatccaatggtctcgagccactgttgagaaacttcaaatcagatccaagtacaaatgcacgcacaaaagctttaggagccatatcttctataatacgtcataaccagcctggagtttccgcatttcgcctgggaaatggctatgctggattgaaggatgctcctggttctgatgatgccaaacttcaaaggaaagctctcaatctcatacaatacctgctacacaacaacaaggcagacaggagttttgctacagagcttggtcttccaaagctgatgatgcaccttgcggctagcgatgatcccttggtgcgtgaagctgctctaagcggcctccttgagttgtcacaggaccagacatctggtaatgcgctacctgaccaagacaagctgaaaagagatcctgaacctgaagagccgaatcgaaggggtcagtgcgatggactctgacgatctccatgccgcacgcgaggagcggcagctggtggactcactgtggaaggagtgctacagcgagcctcctctcagggagaagagcctcgtcgtgcttcctggagaggatgctccccaacagccgccaccagacgatacagtgaagatgtttgagccaccgctgggtgccctgggcggctgtaagacctgctgaggaaggagattctgattctggctgtggaaagaaggatccaccattgctgctaaagttttgacggtattcaaataccaattccaccactttggcttggtgttgggtgtggaagaaggctgtaagagcagagctgatggatggatggcttttgtcatatattgtatggcgcagtagcgtttctgataatgtgctctgcatttt

SEQ ID NO: 23759 - protein, 288 aa, Zea mays subsp. mays
  peptide (1)..(288): Ceres Seq. ID no. 12405174
  misc_feature (131)..(172): Pfam Name: Pfam Description:  Armadillo/beta-catenin-like repeat
  misc_feature (1)..(271): NCBI GI NO: 34897412 NR Description: putative Hsp70 binding protein
  misc_feature (1)..(272): NCBI GI NO: 21553998 NR Description: unknown [Arabidopsis thaliana]
  misc_feature (1)..(272): NCBI GI NO: 18398480 NR Description: expressed protein; protein id: At3g09350
  misc_feature (31)..(272): NCBI GI NO: 6478927 NR Description: hypothetical protein [Arabidopsis thaliana]
  misc_feature (1)..(30): NCBI GI NO: 6478927 NR Description: hypothetical protein [Arabidopsis thaliana]
  misc_feature (4)..(282): NCBI GI NO: 15232329 NR Description: putative protein; protein id: At3g53800
  misc_feature (4)..(282): NCBI GI NO: 26449490 NR Description: unknown protein [Arabidopsis thaliana]
  misc_feature (1)..(272): NCBI GI NO: 15241689 NR Description: putative protein; protein id: At5g02150.1
  misc_feature (4)..(256): NCBI GI NO: 15231095 NR Description: hypothetical protein; protein id: At3g51980
  misc_feature (11)..(261): NCBI GI NO: 29436427 NR Description: Similar to RIKEN cDNA 1500019G21 gene
MAKDGGPDWNGLFKWSIAHGDGTNPPRALSEEDRKWFMEAMQANTIDVVKRMKEITRVMRTPQDVLQSQGVTPENIEDMLDELHEHVESIDMANDLHSIGGLDPLFGYLKNSNAGIRAKAAEVVSTVAQNNPKSQQLVMESNGLEPLLRNFKSDPSTNARTKALGAISSIIRHNQPGVSAFRLGNGYAGLKDAPGSDDAKLQRKALNLIQYLLHNNKADRSFATELGLPKLMMHLAASDDPLVREAALSGLLELSQDQTSGNALPDQDKLKRDPEPEEPNRRGQCDGL

SEQ ID NO: 23760 - protein, 251 aa, Zea mays subsp. mays
  peptide (1)..(251): Ceres Seq. ID no. 12405175
  misc_feature (94)..(135): Pfam Name: Pfam Description:  Armadillo/beta-catenin-like repeat
  misc_feature (1)..(234): NCBI GI NO: 34897412 NR Description: putative Hsp70 binding protein
  misc_feature (1)..(235): NCBI GI NO: 21553998 NR Description: unknown [Arabidopsis thaliana]
  misc_feature (1)..(235): NCBI GI NO: 18398480 NR Description: expressed protein; protein id: At3g09350
  misc_feature (1)..(235): NCBI GI NO: 6478927 NR Description: hypothetical protein [Arabidopsis thaliana]
  misc_feature (1)..(245): NCBI GI NO: 15232329 NR Description: putative protein; protein id: At3g53800
  misc_feature (1)..(245): NCBI GI NO: 26449490 NR Description: unknown protein [Arabidopsis thaliana]
  misc_feature (1)..(235): NCBI GI NO: 15241689 NR Description: putative protein; protein id: At5g02150.1
  misc_feature (1)..(219): NCBI GI NO: 15231095 NR Description: hypothetical protein; protein id: At3g51980
  misc_feature (1)..(224): NCBI GI NO: 29436427 NR Description: Similar to RIKEN cDNA 1500019G21 gene
  misc_feature (1)..(224): NCBI GI NO: 12850523 NR Description: unnamed protein product [Mus musculus]
MEAMQANTIDVVKRMKEITRVMRTPQDVLQSQGVTPENIEDMLDELHEHVESIDMANDLHSIGGLDPLFGYLKNSNAGIRAKAAEVVSTVAQNNPKSQQLVMESNGLEPLLRNFKSDPSTNARTKALGAISSIIRHNQPGVSAFRLGNGYAGLKDAPGSDDAKLQRKALNLIQYLLHNNKADRSFATELGLPKLMMHLAASDDPLVREAALSGLLELSQDQTSGNALPDQDKLKRDPEPEEPNRRGQCDGL

SEQ ID NO: 23761 - protein, 248 aa, Zea mays subsp. mays
  peptide (1)..(248): Ceres Seq. ID no. 12405176
  misc_feature (91)..(132): Pfam Name: Pfam Description:  Armadillo/beta-catenin-like repeat
  misc_feature (1)..(231): NCBI GI NO: 34897412 NR Description: putative Hsp70 binding protein
  misc_feature (1)..(232): NCBI GI NO: 21553998 NR Description: unknown [Arabidopsis thaliana]
  misc_feature (1)..(232): NCBI GI NO: 18398480 NR Description: expressed protein; protein id: At3g09350
  misc_feature (1)..(232): NCBI GI NO: 6478927 NR Description: hypothetical protein [Arabidopsis thaliana]
  misc_feature (1)..(242): NCBI GI NO: 15232329 NR Description: putative protein; protein id: At3g53800
  misc_feature (1)..(242): NCBI GI NO: 26449490 NR Description: unknown protein [Arabidopsis thaliana]
  misc_feature (1)..(232): NCBI GI NO: 15241689 NR Description: putative protein; protein id: At5g02150.1
  misc_feature (1)..(216): NCBI GI NO: 15231095 NR Description: hypothetical protein; protein id: At3g51980
  misc_feature (1)..(221): NCBI GI NO: 29436427 NR Description: Similar to RIKEN cDNA 1500019G21 gene
  misc_feature (1)..(221): NCBI GI NO: 12850523 NR Description: unnamed protein product [Mus musculus]
MQANTIDVVKRMKEITRVMRTPQDVLQSQGVTPENIEDMLDELHEHVESIDMANDLHSIGGLDPLFGYLKNSNAGIRAKAAEVVSTVAQNNPKSQQLVMESNGLEPLLRNFKSDPSTNARTKALGAISSIIRHNQPGVSAFRLGNGYAGLKDAPGSDDAKLQRKALNLIQYLLHNNKADRSFATELGLPKLMMHLAASDDPLVREAALSGLLELSQDQTSGNALPDQDKLKRDPEPEEPNRRGQCDGL

SEQ ID NO: 23762 - DNA, 1611 bp, Zea mays subsp. mays
  misc_feature (1)..(1611): Ceres Seq. ID no. 12423958
  misc_feature (659)..(659): n is a, c, t, g, unknown, or other
  misc_feature (702)..(702): n is a, c, t, g, unknown, or other
  misc_feature (699)..(699): n is a, c, t, g, unknown, or other
  misc_feature (722)..(722): n is a, c, t, g, unknown, or other
  misc_feature (698)..(698): n is a, c, t, g, unknown, or other
gcacgagaccattacctagaacatcctaatcgaaaaaacaaagcccccaaaaccctacggccacctcgccacccccaacgaaaacccagaccacgagatggcccccggtggagagggcaagccaagcacgggcggcggcggcggcggcgtcaagggtgggaggaagcgcaagttccttccccacgggaagccggtgcggaagggggcctacccgctgcgccccggcgtgcagggcttcttcatcacctgcgacggcggccgcgagcaccaggccacccgcgaggcgctctccctcctcgactccttctatgaagacctggtggatgggaaaggatcggatgagaagcctaaaaacattccagacaagccactgaacaaaaagataaattttgaggactctgattcctcagatgatgaggatgaagacaactctggtgaggaagccgacaatgggaatgtgaatgatgtggagaaaggtgaaaccgctccatctgagaagcaacaggaggtgcttgatacctctaataccgcaagcaaggacaatactgctctatctgagaagaaagaggaggtgcttgatacctctgataccgtgagtaaggacaatgaggaacaagcagtcactgctgatgaaccaagagaaaagaagcaacgagtgnaagatcctccagtttttgagcaggccgtgcaaaaagagnntgntgatgaaccaaaggagtccnctgataaaccaaaggagtccagtgaaaaaaatattgacgatttaattgatgaggacctgaaagaaataggggacaggaaaaagaggctctttgcaagcctcgagacaggctgcaatggatgcatattcattcaaatgcataaaagagcaggagaccctggtccagttgagattgtacaaaacatgatgtcatctgctgcattgactcgtaaacatatgtcaagatttattctgcgagttttgcctgttgaggtggcatgctatgcatctgaagaggaaataacaaaggcaattagtccccttattgaaaagtacttcccaaaagaatgctcctcaggtcataagtttgcagtgttatatgaagcaaggtcaaacacaggaattgatagaatgaaaatcataaacgcagcagcgaaatctgtaccacaacctcataaagttgacctgaagaacccagacaagactattgttgtccagattgcaaagaccatatgcatgattggagttgtggaaaggtacaaagagctctcgaagttcaacctaaggcagctgacctcaccggagtcggagaagtaagcctatgagtgacaaaatcttccaggcaaaacgtggaccaacttaaatcagcagcagcgtcaggtggttaggcgctagcgaattaaattaaggccggccgaacctcactgtcttgaaagattcagatgttctaatgtttaatgctttaccaccagtggttagtggttgctggttcatgcttcccaggttagagtcacgatttttttttttttgaggctgtagaaagatctgacgatacttcatgtgtgctttctctctgacgatggttccatacaggggcttaccaaagacgtagaatctatcgttgcagctcc

SEQ ID NO: 23763 - protein, 399 aa, Zea mays subsp. mays
  peptide (1)..(399): Ceres Seq. ID no. 12423959
  misc_feature (287)..(379): Pfam Name: Pfam Description:  THUMP domain
  misc_feature (22)..(394): NCBI GI NO: 18416857 NR Description: putative protein; protein id: At5g12410.1
  misc_feature (210)..(399): NCBI GI NO: 24657540 NR Description: CG15014-PA [Drosophila melanogaster]
  misc_feature (194)..(399): NCBI GI NO: 38174056 NR Description: Unknown (protein for MGC:75804)
  misc_feature (205)..(392): NCBI GI NO: 21704176 NR Description: RIKEN cDNA 6330575P11
  misc_feature (205)..(392): NCBI GI NO: 34859071 NR Description: similar to RIKEN cDNA 6330575P11
  misc_feature (205)..(396): NCBI GI NO: 12653357 NR Description: hypothetical protein FLJ20274 [Homo sapiens]
  misc_feature (205)..(396): NCBI GI NO: 8923247 NR Description: hypothetical protein FLJ20274 [Homo sapiens]
  misc_feature (205)..(396): NCBI GI NO: 34365206 NR Description: hypothetical protein [Homo sapiens]
  misc_feature (237)..(396): NCBI GI NO: 2988398 NR Description: Unknown gene product [Homo sapiens]
  misc_feature (263)..(399): NCBI GI NO: 3287940 NR Description: Very hypothetical protein C25H2
  misc_feature (188)..(188): Xaa is any aa, unknown or other
  misc_feature (201)..(201): Xaa is any aa, unknown or other
  misc_feature (202)..(202): Xaa is any aa, unknown or other
  misc_feature (209)..(209): Xaa is any aa, unknown or other
MAPGGEGKPSTGGGGGGVKGGRKRKFLPHGKPVRKGAYPLRPGVQGFFITCDGGREHQATREALSLLDSFYEDLVDGKGSDEKPKNIPDKPLNKKINFEDSDSSDDEDEDNSGEEADNGNVNDVEKGETAPSEKQQEVLDTSNTASKDNTALSEKKEEVLDTSDTVSKDNEEQAVTADEPREKKQRVXDPPVFEQAVQKEXXDEPKESXDKPKESSEKNIDDLIDEDLKEIGDRKKRLFASLETGCNGCIFIQMHKRAGDPGPVEIVQNMMSSAALTRKHMSRFILRVLPVEVACYASEEEITKAISPLIEKYFPKECSSGHKFAVLYEARSNTGIDRMKIINAAAKSVPQPHKVDLKNPDKTIVVQIAKTICMIGVVERYKELSKFNLRQLTSPESEK

SEQ ID NO: 23764 - DNA, 1418 bp, Zea mays subsp. mays
  misc_feature (1)..(1418): Ceres Seq. ID no. 12410901
aggcacacacacttagacttagctatagtagctactactgtagtagatatatatgggtatggctgcaacaaggaggacgagagcaagctcaggtaataatgtcctcctcctgctggccatcggccttgtgttctccgcggcatcgacgacgacaccggctgtagcagctgcggcgttgaacggcagcgacgacgacattggtgctgctgccagggcggcgggcctgtccgtggacttccacgcggcgtcgtgcccggacctggacggcatcgtgcgctccgccgttgaggaggcgcggcggtgggacgcccaggtcacggcgggcctcctccgcatcttcttccacgactgcttcccgcagggctgcgacgcgtcgatcctgctgggcaggaaccagggcggcagcgagcaggacgcaccccagaacacgggcctgcagcaggcggcgctggacctcgtcgagaggatccgcggcagggtgcactcccgctgcggcgcctccgtctcctgcgccgacatcctggcgctcgccaccagccacgccgtcaaccaggccggcggccccttcatccctatggagctgggccgcagcgacagcaggggccccgctccaggatgggccgtcaacaggctcccgccccccaccgatggcgtctccgagctcctcggcaacttcggtaacaggggcctcgatggctccgacgtcgtggtgctctccggcgcgcacaccgtgggcgtggcgcgttgctcctcgttccaggaccgtatcgacaagaagaccggcaaggataacttcgagtgggggctcaccggctactgcaacggagacaaggagaagaagcacgcgctggaccgtacgcccttcaacttcgacaacagctacttcgtggagctgcagaacggcagaggggtgctcacctccgaccaggcgctctacagggacggccgcaccaggtggctcgtcgaccgctgcgcctccagccaggacgaattcttcaagcgcttcgtggaatccatgctcaagctcagcaggctcaggggggccgatccgggcccagtgcgcaacaactgcttcgtccgcgccagcttcggcgctagtagcgctaccaaagacgaccttgtcattgacaccaccgccggagacggagacggagacgaggaccttattcttgcagcagctgcatgatcgctgctgctacagtgtacttacatccgatccggccgctatcatatcgtcgtcgtcgtcgaataattaagcagatcaacatgtttgtttatttgcttattagtttctattccgcagtccgcactagctagctagctgctgtagtacctctcgtaatacaatgcatgcatgtaccttgcgtgttttagcgtggcacgcctccttaattcactcggtatttctttgatcatgc

SEQ ID NO: 23765 - protein, 377 aa, Zea mays subsp. mays
  peptide (1)..(377): Ceres Seq. ID no. 12410902
  misc_feature (74)..(310): Pfam Name: Pfam Description:  Peroxidase
  misc_feature (17)..(355): NCBI GI NO: 5777628 NR Description: CAA303716.1 protein [Oryza sativa]
  misc_feature (53)..(341): NCBI GI NO: 38345508 NR Description: OSJNBa0039K24.10
  misc_feature (49)..(355): NCBI GI NO: 38345511 NR Description: OSJNBa0039K24.14
  misc_feature (52)..(355): NCBI GI NO: 5777624 NR Description: CAA303712.1 protein [Oryza sativa]
  misc_feature (36)..(364): NCBI GI NO: 7433075 NR Description: probable peroxidase (EC 1
  misc_feature (37)..(348): NCBI GI NO: 5777627 NR Description: CAA303715.1 protein [Oryza sativa]
  misc_feature (37)..(348): NCBI GI NO: 38345507 NR Description: OSJNBa0039K24.8
  misc_feature (29)..(363): NCBI GI NO: 82410 NR Description: peroxidase (EC 1.11.1.7) BP1 precursor - barley
  misc_feature (55)..(343): NCBI GI NO: 2624498 NR Description: Crystal Structure Of Barley Grain Peroxidase 1
  misc_feature (56)..(355): NCBI GI NO: 38345506 NR Description: OSJNBa0039K24.4
MGMAATRRTRASSGNNVLLLLAIGLVFSAASTTTPAVAAAALNGSDDDIGAAARAAGLSVDFHAASCPDLDGIVRSAVEEARRWDAQVTAGLLRIFFHDCFPQGCDASILLGRNQGGSEQDAPQNTGLQQAALDLVERIRGRVHSRCGASVSCADILALATSHAVNQAGGPFIPMELGRSDSRGPAPGWAVNRLPPPTDGVSELLGNFGNRGLDGSDVVVLSGAHTVGVARCSSFQDRIDKKTGKDNFEWGLTGYCNGDKEKKHALDRTPFNFDNSYFVELQNGRGVLTSDQALYRDGRTRWLVDRCASSQDEFFKRFVESMLKLSRLRGADPGPVRNNCFVRASFGASSATKDDLVIDTTAGDGDGDEDLILAAAA

SEQ ID NO: 23766 - protein, 375 aa, Zea mays subsp. mays
  peptide (1)..(375): Ceres Seq. ID no. 12410903
  misc_feature (72)..(308): Pfam Name: Pfam Description:  Peroxidase
  misc_feature (15)..(353): NCBI GI NO: 5777628 NR Description: CAA303716.1 protein [Oryza sativa]
  misc_feature (51)..(339): NCBI GI NO: 38345508 NR Description: OSJNBa0039K24.10
  misc_feature (47)..(353): NCBI GI NO: 38345511 NR Description: OSJNBa0039K24.14
  misc_feature (50)..(353): NCBI GI NO: 5777624 NR Description: CAA303712.1 protein [Oryza sativa]
  misc_feature (34)..(362): NCBI GI NO: 7433075 NR Description: probable peroxidase (EC 1
  misc_feature (35)..(346): NCBI GI NO: 5777627 NR Description: CAA303715.1 protein [Oryza sativa]
  misc_feature (35)..(346): NCBI GI NO: 38345507 NR Description: OSJNBa0039K24.8
  misc_feature (27)..(361): NCBI GI NO: 82410 NR Description: peroxidase (EC 1.11.1.7) BP1 precursor - barley
  misc_feature (53)..(341): NCBI GI NO: 2624498 NR Description: Crystal Structure Of Barley Grain Peroxidase 1
  misc_feature (54)..(353): NCBI GI NO: 38345506 NR Description: OSJNBa0039K24.4
MAATRRTRASSGNNVLLLLAIGLVFSAASTTTPAVAAAALNGSDDDIGAAARAAGLSVDFHAASCPDLDGIVRSAVEEARRWDAQVTAGLLRIFFHDCFPQGCDASILLGRNQGGSEQDAPQNTGLQQAALDLVERIRGRVHSRCGASVSCADILALATSHAVNQAGGPFIPMELGRSDSRGPAPGWAVNRLPPPTDGVSELLGNFGNRGLDGSDVVVLSGAHTVGVARCSSFQDRIDKKTGKDNFEWGLTGYCNGDKEKKHALDRTPFNFDNSYFVELQNGRGVLTSDQALYRDGRTRWLVDRCASSQDEFFKRFVESMLKLSRLRGADPGPVRNNCFVRASFGASSATKDDLVIDTTAGDGDGDEDLILAAAA

SEQ ID NO: 23767 - protein, 203 aa, Zea mays subsp. mays
  peptide (1)..(203): Ceres Seq. ID no. 12410904
  misc_feature (1)..(136): Pfam Name: Pfam Description:  Peroxidase
  misc_feature (1)..(181): NCBI GI NO: 5777628 NR Description: CAA303716.1 protein [Oryza sativa]
  misc_feature (1)..(167): NCBI GI NO: 38345508 NR Description: OSJNBa0039K24.10
  misc_feature (1)..(181): NCBI GI NO: 38345511 NR Description: OSJNBa0039K24.14
  misc_feature (1)..(181): NCBI GI NO: 5777624 NR Description: CAA303712.1 protein [Oryza sativa]
  misc_feature (1)..(190): NCBI GI NO: 7433075 NR Description: probable peroxidase (EC 1
  misc_feature (1)..(174): NCBI GI NO: 5777627 NR Description: CAA303715.1 protein [Oryza sativa]
  misc_feature (1)..(174): NCBI GI NO: 38345507 NR Description: OSJNBa0039K24.8
  misc_feature (1)..(189): NCBI GI NO: 82410 NR Description: peroxidase (EC 1.11.1.7) BP1 precursor - barley
  misc_feature (1)..(169): NCBI GI NO: 2624498 NR Description: Crystal Structure Of Barley Grain Peroxidase 1
  misc_feature (1)..(181): NCBI GI NO: 38345506 NR Description: OSJNBa0039K24.4
MELGRSDSRGPAPGWAVNRLPPPTDGVSELLGNFGNRGLDGSDVVVLSGAHTVGVARCSSFQDRIDKKTGKDNFEWGLTGYCNGDKEKKHALDRTPFNFDNSYFVELQNGRGVLTSDQALYRDGRTRWLVDRCASSQDEFFKRFVESMLKLSRLRGADPGPVRNNCFVRASFGASSATKDDLVIDTTAGDGDGDEDLILAAAA

SEQ ID NO: 23768 - DNA, 1056 bp, Zea mays subsp. mays
  misc_feature (1)..(1056): Ceres Seq. ID no. 13493663
ctcttattctcattcgattacacacacacacggagagatcaaattgatacactgcgatctcgatcaaacaaatcaaaaaaaaaaaaaaatcttgcgagacattactgaccgatgaagttcggcaagcgcctcaagaagcagatcgaggagagcctgccggagtggcggagccagttcctcaactacaaggagctgaagcggcgcgtgaatgccgtgtcctcccgcgggtcggcggcggatccgtcgtcgtccagcgccgcggaggccgacttcctgacgctcctggacgccgagatcgacaagttcaacgccttcttcctggagcgggaggaggagttcgtgatccggcagagggagctccaggagcgcatcgggcgtgcgggcgggcccgaggccacgctggcgcgcgtccggcgcgaggtggtggacttgcacggcgagatggtgctgctgctcaactacagcagcgtcaactacacgggcctcgccaagatcctcaagaagttcgacaagcgcaccggcggcgtgctccgcctccccgtcatcgcgcgggtgctgcggcagcccttcttcaccaccgacctcatctccgagctggtcagggactgcgaggccgcgatggaggccgtcttcccgcccgccgccagcagggacctccacgggcgccaggcgctggccgtcgccgggcagggcatcttccgcaacaccgtcgccgctctgctcaccatgcaggaggtgcgcagcgggagctccaccgtcggccatttctcgctgccgcccatgcagccgctgccggagtcggactggctcgtccagtccgttgacagcacgccgacggcgtcgcccctcatccccacccagtgactgacgacaccatggtccacttccagttccatggcactacagtgctacaccacagcggcgtattatatagtatgcaatatatataatctacatactgtagtagtggtgctcggtatgcggctgatgtgtacagtagtagtatttttttctctccttttgttgatgagacttgagaggtgtcctttttgctct

SEQ ID NO: 23769 - protein, 250 aa, Zea mays subsp. mays
  peptide (1)..(250): Ceres Seq. ID no. 13493664
  misc_feature (1)..(149): Pfam Name: Pfam Description:  SPX domain
  misc_feature (1)..(241): NCBI GI NO: 37533962 NR Description: hypothetical protein
  misc_feature (1)..(245): NCBI GI NO: 15225414 NR Description: hypothetical protein [Arabidopsis thaliana]
  misc_feature (1)..(233): NCBI GI NO: 23237928 NR Description: ids4-like protein
  misc_feature (1)..(182): NCBI GI NO: 15225770 NR Description: expressed protein [Arabidopsis thaliana]
  misc_feature (197)..(232): NCBI GI NO: 15225770 NR Description: expressed protein [Arabidopsis thaliana]
  misc_feature (1)..(225): NCBI GI NO: 21592813 NR Description: ids4-like protein [Arabidopsis thaliana]
  misc_feature (1)..(225): NCBI GI NO: 15241275 NR Description: ids4-related protein [Arabidopsis thaliana]
  misc_feature (53)..(174): NCBI GI NO: 16506648 NR Description: IDS-4-like protein [Castanea sativa]
  misc_feature (199)..(247): NCBI GI NO: 16506648 NR Description: IDS-4-like protein [Castanea sativa]
  misc_feature (33)..(178): NCBI GI NO: 11358467 NR Description: ids-4 protein-like - Arabidopsis thaliana
MKFGKRLKKQIEESLPEWRSQFLNYKELKRRVNAVSSRGSAADPSSSSAAEADFLTLLDAEIDKFNAFFLEREEEFVIRQRELQERIGRAGGPEATLARVRREVVDLHGEMVLLLNYSSVNYTGLAKILKKFDKRTGGVLRLPVIARVLRQPFFTTDLISELVRDCEAAMEAVFPPAASRDLHGRQALAVAGQGIFRNTVAALLTMQEVRSGSSTVGHFSLPPMQPLPESDWLVQSVDSTPTASPLIPTQ

SEQ ID NO: 23770 - protein, 140 aa, Zea mays subsp. mays
  peptide (1)..(140): Ceres Seq. ID no. 13493665
  misc_feature (1)..(131): NCBI GI NO: 37533962 NR Description: hypothetical protein
  misc_feature (1)..(135): NCBI GI NO: 15225414 NR Description: hypothetical protein [Arabidopsis thaliana]
  misc_feature (1)..(123): NCBI GI NO: 23237928 NR Description: ids4-like protein
  misc_feature (1)..(72): NCBI GI NO: 15225770 NR Description: expressed protein [Arabidopsis thaliana]
  misc_feature (87)..(122): NCBI GI NO: 15225770 NR Description: expressed protein [Arabidopsis thaliana]
  misc_feature (1)..(115): NCBI GI NO: 21592813 NR Description: ids4-like protein [Arabidopsis thaliana]
  misc_feature (1)..(115): NCBI GI NO: 15241275 NR Description: ids4-related protein [Arabidopsis thaliana]
  misc_feature (1)..(64): NCBI GI NO: 16506648 NR Description: IDS-4-like protein [Castanea sativa]
  misc_feature (89)..(137): NCBI GI NO: 16506648 NR Description: IDS-4-like protein [Castanea sativa]
  misc_feature (1)..(68): NCBI GI NO: 11358467 NR Description: ids-4 protein-like - Arabidopsis thaliana
MVLLLNYSSVNYTGLAKILKKFDKRTGGVLRLPVIARVLRQPFFTTDLISELVRDCEAAMEAVFPPAASRDLHGRQALAVAGQGIFRNTVAALLTMQEVRSGSSTVGHFSLPPMQPLPESDWLVQSVDSTPTASPLIPTQ

SEQ ID NO: 23771 - DNA, 1589 bp, Zea mays subsp. mays
  misc_feature (1)..(1589): Ceres Seq. ID no. 12373920
gcacgagaccattacctagaacatcctaatcgaaaaaatccaattcacaaacacacacgggcaatcaattagcagaacccgcgccaccccccttcctcggagtcggagcgagtcgaggaacggctcgtctgcctctcccgttctccttcctctcctccccagaagatccgatccatcatcgaggactcgccgggaagaatcaaggatatatagataatatacaaacaaaggttcctccagagcccagaggagggaagtcaccggccgtcggcggggaggagatgtcggacggcgcgggctcccggacgggcgtcgctggcgcgctgggcctctcggtcacctcgtcggtggccatcgtcatctgcaacaagtacctcatcagcactctaggcttcttcttcggtcacgacgacgctgacgagctggcacctcatggtgaccttcttcacgctgtacgttcgcgcagcggctgcgcttcttcgagccaaagccgatcgacgcgcgcaccgtcatctccttcggcctgctcaacggcatctccattggcctcctcaacctctgcctcgggttcaactctgttggcttctaccagatgaccaagctggccatcatacccttcaccatagtcttggaaaccctctttctgagcaagaagttcagagcatcaaggcctccctcatggttctgctgctgggagtcgggatcgcgtcggtcacggatctccagctcaacctcctcggctcgatcatcgccgtgctcaccatcgctgcgacatgcgtcgggcagattctgaccaaccaaatccagaggaggctgaaggtttcgtcgacgcagctgctgtaccagtcgtcgccgtaccagtccgcggtgctgctcgtcaccgggcctttcgtggacaagctcctcaccaagcgtgacgtcttcgcgttcagctacaccacccaagtcgtggtgttcatcctgctgtcgtgctcgatcgcggtgtgcgtaaacttcagcacgttcctggtgatcggcacgacgtcgcccgtgacgtaccaggtgctgggccacctcaagacgtgtttggtgctctccttcggctacatcatcctcaaagaccccttcagcgcgcgcaacgtggtgggcatcctcatcgccatcttcggcatgggcctctactcctactactccgtcgtcgagagcaggaagaagaccgaggacgctagctcgctgccggtcgccgcgcagatgagcgagaaggactcggcgccactcctcggcgccaagagctcgccgcggacagagaacaaggccgaggaaaccttcgactacatgccgaggacggccaagagcgcgttcaccggccggtgagcgcgtagcttgtaaggagtacgtatctttctagagttgtgggtagacgacgagcaacaaggcgggaatgtgttagtgaaagatgtaacggcggcaagtgacattccaattatcatttttgcgatttctcctctagggtggtctgcgtggtcatggtttaccagagcataaacagcagaatgtgtggtctactggtcttgaccgagcttgaaatagtagattggattggtgataat

SEQ ID NO: 23772 - protein, 306 aa, Zea mays subsp. mays
  peptide (1)..(306): Ceres Seq. ID no. 12373921
  misc_feature (70)..(304): NCBI GI NO: 13384378 NR Description: putative phosphate translocator
  misc_feature (70)..(304): NCBI GI NO: 37535412 NR Description: putative glucose-6-phosphate/phosphate-translocator
  misc_feature (1)..(19): NCBI GI NO: 37535412 NR Description: putative glucose-6-phosphate/phosphate-translocator
  misc_feature (1)..(19): NCBI GI NO: 13384378 NR Description: putative phosphate translocator
  misc_feature (76)..(286): NCBI GI NO: 34896140 NR Description: P0701D05.25
  misc_feature (1)..(19): NCBI GI NO: 34896140 NR Description: P0701D05.25
  misc_feature (70)..(287): NCBI GI NO: 30683853 NR Description: transporter-related [Arabidopsis thaliana]
  misc_feature (76)..(280): NCBI GI NO: 27311731 NR Description: putative integral membrane protein
  misc_feature (76)..(280): NCBI GI NO: 22329373 NR Description: unknown protein; protein id: At1g06890
  misc_feature (76)..(286): NCBI GI NO: 13699188 NR Description: putative glucose-6-phosphate/phosphate-tranlocat or
MVTFFTLYVRAAAALLRAKADRRAHRHLLRPAQRHLHWPPQPLPRVQLCWLLPDDQAGHHTLHHSLGNPLSEQEVQSIKASLMVLLLGVGIASVTDLQLNLLGSIIAVLTIAATCVGQILTNQIQRRLKVSSTQLLYQSSPYQSAVLLVTGPFVDKLLTKRDVFAFSYTTQVVVFILLSCSIAVCVNFSTFLVIGTTSPVTYQVLGHLKTCLVLSFGYIILKDPFSARNVVGILIAIFGMGLYSYYSVVESRKKTEDASSLPVAAQMSEKDSAPLLGAKSSPRTENKAEETFDYMPRTAKSAFTGR

SEQ ID NO: 23773 - protein, 224 aa, Zea mays subsp. mays
  peptide (1)..(224): Ceres Seq. ID no. 12373922
  misc_feature (1)..(222): NCBI GI NO: 13384378 NR Description: putative phosphate translocator
  misc_feature (1)..(222): NCBI GI NO: 37535412 NR Description: putative glucose-6-phosphate/phosphate-translocator
  misc_feature (1)..(204): NCBI GI NO: 34896140 NR Description: P0701D05.25
  misc_feature (1)..(205): NCBI GI NO: 30683853 NR Description: transporter-related [Arabidopsis thaliana]
  misc_feature (1)..(198): NCBI GI NO: 27311731 NR Description: putative integral membrane protein
  misc_feature (1)..(198): NCBI GI NO: 22329373 NR Description: unknown protein; protein id: At1g06890
  misc_feature (1)..(204): NCBI GI NO: 13699188 NR Description: putative glucose-6-phosphate/phosphate-tranlocat or
  misc_feature (1)..(198): NCBI GI NO: 25406945 NR Description: hypothetical protein
  misc_feature (1)..(194): NCBI GI NO: 18411172 NR Description: expressed protein; protein id: At1g76670
  misc_feature (1)..(174): NCBI GI NO: 18394949 NR Description: expressed protein; protein id: At1g21070
MVLLLGVGIASVTDLQLNLLGSIIAVLTIAATCVGQILTNQIQRRLKVSSTQLLYQSSPYQSAVLLVTGPFVDKLLTKRDVFAFSYTTQVVVFILLSCSIAVCVNFSTFLVIGTTSPVTYQVLGHLKTCLVLSFGYIILKDPFSARNVVGILIAIFGMGLYSYYSVVESRKKTEDASSLPVAAQMSEKDSAPLLGAKSSPRTENKAEETFDYMPRTAKSAFTGR

SEQ ID NO: 23774 - DNA, 1732 bp, Zea mays subsp. mays
  misc_feature (1)..(1732): Ceres Seq. ID no. 12341485
aacttcgacccggccggccctatcaaaagctggccccttccacagcgcactccctcaccttcctccacggctccaccatcccctcccctgccctgcccccaccgccccgcttccttccgccttgctccgttgcttcctcccaccacagtccactccactcgccggccctgcagctcagtatttgactgagactggtggtggagctgctagcagcgagcctgctacttcctggtcctgacggtgcgttcagacctcagaccagtgccgacgacgagctgtgaggagagggcaaggaagcaagcctgtgaggaaggcggcgatggagaggtacgaggtgatcaaggacataggatcgggcaacttcggggtggccaagctggtccgggacgtcaggaccaaggagctcttcgccgtcaagttcatcgagcgggggatgaagattgatgagaatgtccaaagggagatcatgaaccacaggtcactgaggcatccaaacatagttaaatttaaggaggttgtgctaactcccacacatttggccatagttatggaatatgctgctggtggtgagctatttgaaaggatctgtaatgctggaagatttagtgaggatgaggcgagatttttcttccaacaactgatttcaggagttagttattgccactcaatgcaaatatgccatagagatttgaaactagaaaacactctcctggatgatagtatagcacctcggctaaagatatgtgattttggttactccaagtcctctgtgttgcactctcaaccaaaatcaactgtcgggacaccagcttacattgctcctgaggtccttgctagaaaggaatatgatggaaaggtcgccgatgtttggtcatgtggagttactctgtatgtgatgcttgttggtgcctatccctttgaggaccccgacgaaccgaagaatttccgcaagacgcttactcggattatcagcgtccagtacgcggttcctgattttgtccgagtttcaatggagtgcaggcatctgctgtctcggatctttgtggcgaaacctgagcaacggataaccatcccagagatcaagaaccacccatggttcttgaagaacctgcccatcgagatgaccgacgagtaccagatgaacctacagctagtcgacatgaatgtcccctcgcaaagcctggaggagatcatgtccatcatactggaggcccggaagcccggcgacgggctgaagcatgcgggacagctccccggccttgggagcatggagctggatgacattgatgttgacgacatagacgttgaggacagtggcgactttgtatgtgccttgtgacgcggttcaggctgtccggcaccgttgctgcggtggactctcccccactctcctggtctttgtgtcttgctgttattccatgttgtttgtttcagcgagctccgagctcccattttgttgttgtaatatcacatgttttgtgtaaccaaggtagtgacgctgtggataaataatagacgttatgtgttgtattcttgctgaattgttgttcagctccttctgtttgccctgtatgaactgggcagtttcatgagtaccacaatgtgtatgttgatggctctgtcttcccttgtctcagcctgatattttgacctgctgcatgtagccaatgtgttttttcttgtatttttgctagaagcaatcttatgagttacgagtactattaccaccctg

SEQ ID NO: 23775 - protein, 339 aa, Zea mays subsp. mays
  peptide (1)..(339): Ceres Seq. ID no. 12341486
  misc_feature (4)..(260): Pfam Name: Pfam Description:  Protein kinase domain
  misc_feature (1)..(339): NCBI GI NO: 29164823 NR Description: abcisic acid-inducible protein kinanase
  misc_feature (1)..(339): NCBI GI NO: 14588571 NR Description: protein kinase HvPKABA1
  misc_feature (11)..(339): NCBI GI NO: 416564 NR Description: Abcisic acid-inducible protein kinase
  misc_feature (1)..(328): NCBI GI NO: 2055374 NR Description: serine-threonine protein kinase
  misc_feature (11)..(339): NCBI GI NO: 11138330 NR Description: putative serine/threonine kinase GDBrPK
  misc_feature (2)..(339): NCBI GI NO: 7446439 NR Description: probable serine/threonine-specific protein kinase
  misc_feature (1)..(339): NCBI GI NO: 481002 NR Description: protein kinase MCPK9 (EC 2
  misc_feature (2)..(339): NCBI GI NO: 18418337 NR Description: protein kinase - like protein
  misc_feature (1)..(331): NCBI GI NO: 15218270 NR Description: serine-threonine protein kinase, putative
  misc_feature (1)..(339): NCBI GI NO: 15240124 NR Description: protein kinase, 41K (EC 2
MERYEVIKDIGSGNFGVAKLVRDVRTKELFAVKFIERGMKIDENVQREIMNHRSLRHPNIVKFKEVVLTPTHLAIVMEYAAGGELFERICNAGRFSEDEARFFFQQLISGVSYCHSMQICHRDLKLENTLLDDSIAPRLKICDFGYSKSSVLHSQPKSTVGTPAYIAPEVLARKEYDGKVADVWSCGVTLYVMLVGAYPFEDPDEPKNFRKTLTRIISVQYAVPDFVRVSMECRHLLSRIFVAKPEQRITIPEIKNHPWFLKNLPIEMTDEYQMNLQLVDMNVPSQSLEEIMSIILEARKPGDGLKHAGQLPGLGSMELDDIDVDDIDVEDSGDFVCAL

SEQ ID NO: 23776 - protein, 301 aa, Zea mays subsp. mays
  peptide (1)..(301): Ceres Seq. ID no. 12341487
  misc_feature (1)..(222): Pfam Name: Pfam Description:  Protein kinase domain
  misc_feature (1)..(301): NCBI GI NO: 29164823 NR Description: abcisic acid-inducible protein kinanase
  misc_feature (1)..(301): NCBI GI NO: 14588571 NR Description: protein kinase HvPKABA1
  misc_feature (1)..(301): NCBI GI NO: 416564 NR Description: Abcisic acid-inducible protein kinase
  misc_feature (1)..(290): NCBI GI NO: 2055374 NR Description: serine-threonine protein kinase
  misc_feature (1)..(301): NCBI GI NO: 11138330 NR Description: putative serine/threonine kinase GDBrPK
  misc_feature (1)..(301): NCBI GI NO: 7446439 NR Description: probable serine/threonine-specific protein kinase
  misc_feature (1)..(301): NCBI GI NO: 481002 NR Description: protein kinase MCPK9 (EC 2
  misc_feature (1)..(301): NCBI GI NO: 18418337 NR Description: protein kinase - like protein
  misc_feature (1)..(293): NCBI GI NO: 15218270 NR Description: serine-threonine protein kinase, putative
  misc_feature (1)..(301): NCBI GI NO: 15240124 NR Description: protein kinase, 41K (EC 2
MKIDENVQREIMNHRSLRHPNIVKFKEVVLTPTHLAIVMEYAAGGELFERICNAGRFSEDEARFFFQQLISGVSYCHSMQICHRDLKLENTLLDDSIAPRLKICDFGYSKSSVLHSQPKSTVGTPAYIAPEVLARKEYDGKVADVWSCGVTLYVMLVGAYPFEDPDEPKNFRKTLTRIISVQYAVPDFVRVSMECRHLLSRIFVAKPEQRITIPEIKNHPWFLKNLPIEMTDEYQMNLQLVDMNVPSQSLEEIMSIILEARKPGDGLKHAGQLPGLGSMELDDIDVDDIDVEDSGDFVCAL

SEQ ID NO: 23777 - protein, 290 aa, Zea mays subsp. mays
  peptide (1)..(290): Ceres Seq. ID no. 12341488
  misc_feature (1)..(211): Pfam Name: Pfam Description:  Protein kinase domain
  misc_feature (1)..(290): NCBI GI NO: 29164823 NR Description: abcisic acid-inducible protein kinanase
  misc_feature (1)..(290): NCBI GI NO: 14588571 NR Description: protein kinase HvPKABA1
  misc_feature (1)..(290): NCBI GI NO: 416564 NR Description: Abcisic acid-inducible protein kinase
  misc_feature (1)..(279): NCBI GI NO: 2055374 NR Description: serine-threonine protein kinase
  misc_feature (1)..(290): NCBI GI NO: 11138330 NR Description: putative serine/threonine kinase GDBrPK
  misc_feature (1)..(290): NCBI GI NO: 7446439 NR Description: probable serine/threonine-specific protein kinase
  misc_feature (1)..(290): NCBI GI NO: 481002 NR Description: protein kinase MCPK9 (EC 2
  misc_feature (1)..(290): NCBI GI NO: 18418337 NR Description: protein kinase - like protein
  misc_feature (1)..(282): NCBI GI NO: 15218270 NR Description: serine-threonine protein kinase, putative
  misc_feature (1)..(290): NCBI GI NO: 15240124 NR Description: protein kinase, 41K (EC 2
MNHRSLRHPNIVKFKEVVLTPTHLAIVMEYAAGGELFERICNAGRFSEDEARFFFQQLISGVSYCHSMQICHRDLKLENTLLDDSIAPRLKICDFGYSKSSVLHSQPKSTVGTPAYIAPEVLARKEYDGKVADVWSCGVTLYVMLVGAYPFEDPDEPKNFRKTLTRIISVQYAVPDFVRVSMECRHLLSRIFVAKPEQRITIPEIKNHPWFLKNLPIEMTDEYQMNLQLVDMNVPSQSLEEIMSIILEARKPGDGLKHAGQLPGLGSMELDDIDVDDIDVEDSGDFVCAL

SEQ ID NO: 23778 - DNA, 878 bp, Zea mays subsp. mays
  misc_feature (1)..(878): Ceres Seq. ID no. 12367342
aaaaaacacgcgaatcgtaccggcacgaacactgagcacgcacgcacgcaaactcaaaggagtgtgaccacggaactgaagccatggcggttacagttgagaagggcgctatgggcgagccggcgctgctgctggagcgcagccgggcgatcaccctgcacggccgtgaccggaagggccgtgccgtcgtcaggatcgtcggcaactattttccagcgcgcgcgctcggcggccgggcggaggaggcgctgcggtcgtacctgcgggagcgcgtcctcccggagatcggggacccgagttcgtggtcgtgtacatgcactcccgcgtggatcgcggccacaacttccccggcgtcggtgcgatccgcggcgcgtacgagacgctgccggccgcggccaaggagaggctgcgcgccgtctacttcgtgcacccggccctccaatccaggatcttcttcgccaccttcgggcgcttcctcttcagctcagggttgtatgagaagctgcgatacatgagccggcttgagtacgtttgggcccacatagacaaggagcagctggaggtccccgactgcgtgcgcgagcacgacgacgagctggagcgccgcccgctgatggactacggcatcgaggcgacggagacccgctgcatgtatgacgccgcgtccatggacacctcggcgtccctgcactcgctccgctgcgtctcctagtcgcctggacacttggacagtggcatcccgattcccgccgccggtacggcgtgctttctgtgttctggttggtaggaggtagctgcatggcttcatagcgcttcggtactgtagtttagctgtgtatttataatggataaagtttggagtaccgagatggcttctg

SEQ ID NO: 23779 - protein, 165 aa, Zea mays subsp. mays
  peptide (1)..(165): Ceres Seq. ID no. 12367343
KKHANRTGTNTEHARTQTQRSVTTELKPWRLQLRRALWASRRCCWSAAGRSPCTAVTGRAVPSSGSSATIFQRARSAAGRRRRCGRTCGSASSRRSGTRVRGRVHALPRGSRPQLPRRRCDPRRVRDAAGRGQGEAARRLLRAPGPPIQDLLRHLRALPLQLRVV

SEQ ID NO: 23780 - protein, 143 aa, Zea mays subsp. mays
  peptide (1)..(143): Ceres Seq. ID no. 12367344
  misc_feature (12)..(69): NCBI GI NO: 15237117 NR Description: putative protein; protein id: At4g35750
  misc_feature (12)..(69): NCBI GI NO: 21553817 NR Description: unknown [Arabidopsis thaliana]
  misc_feature (17)..(64): NCBI GI NO: 21593697 NR Description: unknown [Arabidopsis thaliana]
  misc_feature (17)..(64): NCBI GI NO: 18398797 NR Description: expressed protein; protein id: At3g10210
  misc_feature (9)..(44): NCBI GI NO: 22830926 NR Description: P0466H10.24
  misc_feature (10)..(70): NCBI GI NO: 38345848 NR Description: OSJNBa0084K11.12
MAVTVEKGAMGEPALLLERSRAITLHGRDRKGRAVVRIVGNYFPARALGGRAEEALRSYLRERVLPEIGDPSSWSCTCTPAWIAATTSPASVRSAARTRRCRPRPRRGCAPSTSCTRPSNPGSSSPPSGASSSAQGCMRSCDT

SEQ ID NO: 23781 - protein, 134 aa, Zea mays subsp. mays
  peptide (1)..(134): Ceres Seq. ID no. 12367345
  misc_feature (3)..(60): NCBI GI NO: 15237117 NR Description: putative protein; protein id: At4g35750
  misc_feature (3)..(60): NCBI GI NO: 21553817 NR Description: unknown [Arabidopsis thaliana]
  misc_feature (8)..(55): NCBI GI NO: 21593697 NR Description: unknown [Arabidopsis thaliana]
  misc_feature (8)..(55): NCBI GI NO: 18398797 NR Description: expressed protein; protein id: At3g10210
  misc_feature (1)..(35): NCBI GI NO: 22830926 NR Description: P0466H10.24
  misc_feature (1)..(61): NCBI GI NO: 38345848 NR Description: OSJNBa0084K11.12
MGEPALLLERSRAITLHGRDRKGRAVVRIVGNYFPARALGGRAEEALRSYLRERVLPEIGDPSSWSCTCTPAWIAATTSPASVRSAARTRRCRPRPRRGCAPSTSCTRPSNPGSSSPPSGASSSAQGCMRSCDT

SEQ ID NO: 23782 - protein, 132 aa, Zea mays subsp. mays
  peptide (1)..(132): Ceres Seq. ID no. 12367346
  misc_feature (1)..(132): NCBI GI NO: 38345848 NR Description: OSJNBa0084K11.12
  misc_feature (1)..(132): NCBI GI NO: 15237117 NR Description: putative protein; protein id: At4g35750
  misc_feature (1)..(132): NCBI GI NO: 21553817 NR Description: unknown [Arabidopsis thaliana]
  misc_feature (1)..(132): NCBI GI NO: 21593697 NR Description: unknown [Arabidopsis thaliana]
  misc_feature (1)..(132): NCBI GI NO: 18398797 NR Description: expressed protein; protein id: At3g10210
  misc_feature (1)..(106): NCBI GI NO: 22830926 NR Description: P0466H10.24
MHSRVDRGHNFPGVGAIRGAYETLPAAAKERLRAVYFVHPALQSRIFFATFGRFLFSSGLYEKLRYMSRLEYVWAHIDKEQLEVPDCVREHDDELERRPLMDYGIEATETRCMYDAASMDTSASLHSLRCVS

SEQ ID NO: 23783 - DNA, 1589 bp, Zea mays subsp. mays
  misc_feature (1)..(1589): Ceres Seq. ID no. 12408021
actcacatcactcccagactgcttccacctacgttcattatttccgcaatgtacaaccgagtatgatatgcagtcgtagtatcatggataaccaccttatgtcgtccttcgccatcctactgctttcttcttttgctgcaatggttgcatatcctgctcgcagtgaattacagcctaaccagatgaaaaaccaccattctgtatcatcatacagcccacaaccgaaggattttccaactgagcaactctacagcgcctacctagtaatccagcgattcaagagcaccatcactagcgaccccaagaacgtcaccgccacctggattggtcatgatatctgcggagaaacgacctacgtggggttctactgcggatcgccggccggaggagataagaagttgacagtcacgggggttattttgaatggctatagtctacatgcaccaacgttggaaggtttcgtcaatcagctccctgatctagctcttttccatgctgcttccaacaattttggtggcgatataccccagctaaccgcccttgggtacatgtacgagctcagtgtcgccgctaaagatgtgccattacagactagggatgcggatgattttgtgggggggaggggcatcggtcgcgtgcaattaggtagatgcgtaactgctgattttgacttttcatttaatgtcggaattaataagggtcacaaatttcctggttttacgcatgccaaggctctccttctcaaccgcaacaatttgtccggtccacttccgtcaaacctcggtttctcaaaactgagctaccttgccctcgccaacaacaaactcaccgggccaatcccgccgtcaatcagtaagctggaagactctctcttcgaggtactccttctcaacaaccagctctccggctgcctcccccacgagctcggcatgctcaccaaggcggccgtgattgacgccggcatgaaccagctcaccggcccaatcccgtcatctttctcctgcctaagcagcgtcgagcagctcaacctggccggaaaccgcctctacggtcaggtacccgacgcgctctgcaagcttgctgggcccgctggccgcctcgccaacctcacgctgtccggcaactacttcacatccgccgggccggcatgcgcggcgctgatcaaagacggagtgctggacgtgaagaacaactgcattccggggctcaccaaccagaggcgccccgcggagtgcgcggcgttccagagccaaccaaagacttgcccggcagcgagcgctcaggtgacatgccccgccgccgcagcttccaggaacgcggcggcgccaggggagaggaaggtcaaggattactccagctacgtgacgtacgctactctgcatgactgagccacactggcatgcagtaggagacagaatgccttgctggctatgtgtctcttgtattcagcatgagtgtaccctagcgtgtgttgttgtgattgtgattgctgtctatttgcattattgtacgtgtgttgctgtcacatctagatcatcccattatttgtacgtccaaatccattttatggaaagtactgttggtgtttt

SEQ ID NO: 23784 - protein, 461 aa, Zea mays subsp. mays
  peptide (1)..(461): Ceres Seq. ID no. 12408022
  misc_feature (73)..(460): NCBI GI NO: 32490271 NR Description: OSJNBb0116K07.13
  misc_feature (39)..(422): NCBI GI NO: 30680322 NR Description: extensin-related protein [Arabidopsis thaliana]
  misc_feature (72)..(422): NCBI GI NO: 15230349 NR Description: unknown protein; protein id: At3g19320.1
  misc_feature (71)..(461): NCBI GI NO: 15222811 NR Description: unknown protein; protein id: At1g49750.1
  misc_feature (76)..(437): NCBI GI NO: 15235668 NR Description: extensin-like protein; protein id: At4g13340.1
  misc_feature (77)..(421): NCBI GI NO: 15221178 NR Description: putative extensin; protein id: At1g12040
  misc_feature (77)..(418): NCBI GI NO: 15230120 NR Description: disease resistance protein, putative
  misc_feature (81)..(431): NCBI GI NO: 15228861 NR Description: hypothetical protein; protein id: At3g22800.1
  misc_feature (77)..(421): NCBI GI NO: 7484956 NR Description: extensin homolog F24O1.18 - Arabidopsis thaliana
  misc_feature (77)..(432): NCBI GI NO: 34906174 NR Description: putative extensin-like protein
SHHSQTASTYVHYFRNVQPSMICSRSIMDNHLMSSFAILLLSSFAAMVAYPARSELQPNQMKNHHSVSSYSPQPKDFPTEQLYSAYLVIQRFKSTITSDPKNVTATWIGHDICGETTYVGFYCGSPAGGDKKLTVTGVILNGYSLHAPTLEGFVNQLPDLALFHAASNNFGGDIPQLTALGYMYELSVAAKDVPLQTRDADDFVGGRGIGRVQLGRCVTADFDFSFNVGINKGHKFPGFTHAKALLLNRNNLSGPLPSNLGFSKLSYLALANNKLTGPIPPSISKLEDSLFEVLLLNNQLSGCLPHELGMLTKAAVIDAGMNQLTGPIPSSFSCLSSVEQLNLAGNRLYGQVPDALCKLAGPAGRLANLTLSGNYFTSAGPACAALIKDGVLDVKNNCIPGLTNQRRPAECAAFQSQPKTCPAASAQVTCPAAAASRNAAAPGERKVKDYSSYVTYATLHD

SEQ ID NO: 23785 - protein, 441 aa, Zea mays subsp. mays
  peptide (1)..(441): Ceres Seq. ID no. 12408023
  misc_feature (53)..(440): NCBI GI NO: 32490271 NR Description: OSJNBb0116K07.13
  misc_feature (19)..(402): NCBI GI NO: 30680322 NR Description: extensin-related protein [Arabidopsis thaliana]
  misc_feature (52)..(402): NCBI GI NO: 15230349 NR Description: unknown protein; protein id: At3g19320.1
  misc_feature (51)..(441): NCBI GI NO: 15222811 NR Description: unknown protein; protein id: At1g49750.1
  misc_feature (56)..(417): NCBI GI NO: 15235668 NR Description: extensin-like protein; protein id: At4g13340.1
  misc_feature (57)..(401): NCBI GI NO: 15221178 NR Description: putative extensin; protein id: At1g12040
  misc_feature (57)..(398): NCBI GI NO: 15230120 NR Description: disease resistance protein, putative
  misc_feature (61)..(411): NCBI GI NO: 15228861 NR Description: hypothetical protein; protein id: At3g22800.1
  misc_feature (57)..(401): NCBI GI NO: 7484956 NR Description: extensin homolog F24O1.18 - Arabidopsis thaliana
  misc_feature (57)..(412): NCBI GI NO: 34906174 NR Description: putative extensin-like protein
MICSRSIMDNHLMSSFAILLLSSFAAMVAYPARSELQPNQMKNHHSVSSYSPQPKDFPTEQLYSAYLVIQRFKSTITSDPKNVTATWIGHDICGETTYVGFYCGSPAGGDKKLTVTGVILNGYSLHAPTLEGFVNQLPDLALFHAASNNFGGDIPQLTALGYMYELSVAAKDVPLQTRDADDFVGGRGIGRVQLGRCVTADFDFSFNVGINKGHKFPGFTHAKALLLNRNNLSGPLPSNLGFSKLSYLALANNKLTGPIPPSISKLEDSLFEVLLLNNQLSGCLPHELGMLTKAAVIDAGMNQLTGPIPSSFSCLSSVEQLNLAGNRLYGQVPDALCKLAGPAGRLANLTLSGNYFTSAGPACAALIKDGVLDVKNNCIPGLTNQRRPAECAAFQSQPKTCPAASAQVTCPAAAASRNAAAPGERKVKDYSSYVTYATLHD

SEQ ID NO: 23786 - protein, 434 aa, Zea mays subsp. mays
  peptide (1)..(434): Ceres Seq. ID no. 12408024
  misc_feature (46)..(433): NCBI GI NO: 32490271 NR Description: OSJNBb0116K07.13
  misc_feature (12)..(395): NCBI GI NO: 30680322 NR Description: extensin-related protein [Arabidopsis thaliana]
  misc_feature (45)..(395): NCBI GI NO: 15230349 NR Description: unknown protein; protein id: At3g19320.1
  misc_feature (44)..(434): NCBI GI NO: 15222811 NR Description: unknown protein; protein id: At1g49750.1
  misc_feature (49)..(410): NCBI GI NO: 15235668 NR Description: extensin-like protein; protein id: At4g13340.1
  misc_feature (50)..(394): NCBI GI NO: 15221178 NR Description: putative extensin; protein id: At1g12040
  misc_feature (50)..(391): NCBI GI NO: 15230120 NR Description: disease resistance protein, putative
  misc_feature (54)..(404): NCBI GI NO: 15228861 NR Description: hypothetical protein; protein id: At3g22800.1
  misc_feature (50)..(394): NCBI GI NO: 7484956 NR Description: extensin homolog F24O1.18 - Arabidopsis thaliana
  misc_feature (50)..(405): NCBI GI NO: 34906174 NR Description: putative extensin-like protein
MDNHLMSSFAILLLSSFAAMVAYPARSELQPNQMKNHHSVSSYSPQPKDFPTEQLYSAYLVIQRFKSTITSDPKNVTATWIGHDICGETTYVGFYCGSPAGGDKKLTVTGVILNGYSLHAPTLEGFVNQLPDLALFHAASNNFGGDIPQLTALGYMYELSVAAKDVPLQTRDADDFVGGRGIGRVQLGRCVTADFDFSFNVGINKGHKFPGFTHAKALLLNRNNLSGPLPSNLGFSKLSYLALANNKLTGPIPPSISKLEDSLFEVLLLNNQLSGCLPHELGMLTKAAVIDAGMNQLTGPIPSSFSCLSSVEQLNLAGNRLYGQVPDALCKLAGPAGRLANLTLSGNYFTSAGPACAALIKDGVLDVKNNCIPGLTNQRRPAECAAFQSQPKTCPAASAQVTCPAAAASRNAAAPGERKVKDYSSYVTYATLHD

SEQ ID NO: 23787 - DNA, 866 bp, Zea mays subsp. mays
  misc_feature (1)..(866): Ceres Seq. ID no. 12351502
aaaaaaatccagtcgcatctccctctccgaaatcaaggtagcgtacaccgctgcagtttctagagccctctctgccactcgtgatcccactagtcacaatgcctgccctcgccaagcccgcctcccgcaccgccaagcccgccgcggctccgaagccgaagcctgccgccgccaagccgaaggcggccaccgctggtgcctcccacccgccttacttcgagatgatcaaggaggctatcacggcgctcaaggagaggaccggctccagctcgcaagcgatcgccaagtatgtgggggacaagcacggcgcgtctctgccggccaacttcaagaagatgctttccatccagctccgtgggtccgcagccaagggcaagctcgtgaaggtcaaggcttcgtacaagctctcggacgccgccaagaaggcatcccccaagaccaaggctaagccggcaaaggccgccgctgccaagaccaccgcccccaagccggccaaggccgccgccgccaagtcaaagaaggcagcggctgccaagccaaagaaggccgctgctgctgggaccaagcgcaaagtgcccgagaagaaggtcgtggcgaagccgaagaagtcccccgccgccaaggccaaggccaagccgaagaccgtgaagtcccctgcctccaagaaggcacggaaggcctccgcatgagatgggttgctttaggtctaagctctgattgtggttggtgtcagttaggtactgtacaaactaagtgtgtgcccaaagtgtctcaggcggtgtgttatgtgcttagcaagttctatctatcagagtgttttagtttaacaatggttttacctctggcttttgtagtcaggtttctgg

SEQ ID NO: 23788 - protein, 196 aa, Zea mays subsp. mays
  peptide (1)..(196): Ceres Seq. ID no. 12351503
  misc_feature (35)..(105): Pfam Name: Pfam Description:  linker histone H1 and H5 family
  misc_feature (1)..(196): NCBI GI NO: 22135471 NR Description: histone H1-like protein HON101 [Zea mays]
  misc_feature (1)..(196): NCBI GI NO: 5230785 NR Description: histone H1 WH1B.1 [Triticum aestivum]
  misc_feature (1)..(193): NCBI GI NO: 729668 NR Description: Histone H1
  misc_feature (1)..(193): NCBI GI NO: 7439658 NR Description: histone H1, stress-inducible - tomato
  misc_feature (1)..(196): NCBI GI NO: 121950 NR Description: HISTONE H1
  misc_feature (1)..(194): NCBI GI NO: 2623960 NR Description: histone H1 [Apium graveolens]
  misc_feature (1)..(196): NCBI GI NO: 5726575 NR Description: histone H1C [Nicotiana tabacum]
  misc_feature (8)..(193): NCBI GI NO: 7595978 NR Description: histone H1 variant [Lycopersicon chilense]
  misc_feature (5)..(196): NCBI GI NO: 7439660 NR Description: histone H1 (clone TH32) - wheat
  misc_feature (1)..(195): NCBI GI NO: 21465093 NR Description: histone H1 [Lathyrus aphaca]
MPALAKPASRTAKPAAAPKPKPAAAKPKAATAGASHPPYFEMIKEAITALKERTGSSSQAIAKYVGDKHGASLPANFKKMLSIQLRGSAAKGKLVKVKASYKLSDAAKKASPKTKAKPAKAAAAKTTAPKPAKAAAAKSKKAAAAKPKKAAAAGTKRKVPEKKVVAKPKKSPAAKAKAKPKTVKSPASKKARKASA

SEQ ID NO: 23789 - protein, 155 aa, Zea mays subsp. mays
  peptide (1)..(155): Ceres Seq. ID no. 12351504
  misc_feature (1)..(64): Pfam Name: Pfam Description:  linker histone H1 and H5 family
  misc_feature (1)..(155): NCBI GI NO: 22135471 NR Description: histone H1-like protein HON101 [Zea mays]
  misc_feature (1)..(155): NCBI GI NO: 5230785 NR Description: histone H1 WH1B.1 [Triticum aestivum]
  misc_feature (1)..(152): NCBI GI NO: 729668 NR Description: Histone H1
  misc_feature (1)..(152): NCBI GI NO: 7439658 NR Description: histone H1, stress-inducible - tomato
  misc_feature (1)..(155): NCBI GI NO: 121950 NR Description: HISTONE H1
  misc_feature (1)..(153): NCBI GI NO: 2623960 NR Description: histone H1 [Apium graveolens]
  misc_feature (1)..(155): NCBI GI NO: 5726575 NR Description: histone H1C [Nicotiana tabacum]
  misc_feature (1)..(152): NCBI GI NO: 7595978 NR Description: histone H1 variant [Lycopersicon chilense]
  misc_feature (1)..(155): NCBI GI NO: 7439660 NR Description: histone H1 (clone TH32) - wheat
  misc_feature (1)..(154): NCBI GI NO: 21465093 NR Description: histone H1 [Lathyrus aphaca]
MIKEAITALKERTGSSSQAIAKYVGDKHGASLPANFKKMLSIQLRGSAAKGKLVKVKASYKLSDAAKKASPKTKAKPAKAAAAKTTAPKPAKAAAAKSKKAAAAKPKKAAAAGTKRKVPEKKVVAKPKKSPAAKAKAKPKTVKSPASKKARKASA

SEQ ID NO: 23790 - protein, 148 aa, Zea mays subsp. mays
  peptide (1)..(148): Ceres Seq. ID no. 12351505
KKSSRISLSEIKVAYTAAVSRALSATRDPTSHNACPRQARLPHRQARRGSEAEACRRQAEGGHRWCLPPALLRDDQGGYHGAQGEDRLQLASDRQVCGGQARRVSAGQLQEDAFHPAPWVRSQGQAREGQGFVQALGRRQEGIPQDQG

SEQ ID NO: 23791 - DNA, 1387 bp, Zea mays subsp. mays
  misc_feature (1)..(1387): Ceres Seq. ID no. 12374463
acccgtctggtggccggcctatctggtgcggtgcggcgcggctcgatccggcccgacgattccgatcccctcccgtcccgtccatcccgtctcgtctcgcctcgccctccacgccggcgaccggagaaggggccgtgcagcgcaggcgacgcccacaacgaatccgtccccccgcgccggcttcgcccagccccgcggcgacgcaccaggattgaaggaggcatgagaaggtggacatcattgctatagcgatttgattactggagatggtgttggtggtaaagcagcaccgctgcacacactctgcgagctgcgtttgcatcaagggccacctcagtgaggatgctctgttcctcgtcttccgccacatgaactggaacccgaggctgattgctatcttgtcgtgtgtgtgcaagtggtttgacgaggttgccaagcaggtgctgtggaaggagttctgtcatgcaagggctccaaagatgatgctggatttgcattcaggtggcagccacattgttgatgggaactggaaggcactggggaagctgctcatctattgcaatggctgcacaaaaggggggctgtttaataacattcacgttccaggccattttgtgttcaggacacgcttttctaggactgcgggcaggagtttcctgcctctgccatgtaagtcggatgtcctgtatgtgtcagatccatgcgagcatcttgatcagggggaagaaggcgacataggtttcttccgaggcatctttatgtcatttgccacttcaagggtaaagaagatgttgattgagaagcgggcgaggtttcatccaagggagttgtgcccttattgtaaggccaagctatggaacatgtttcaggaaaatatgatcccaaggagtgcttccgcaaggctgggtgcctatgatgactctgtggagtattttgtatgcctgaatggacatgttattggactcggtaccctactaccactctcagactcagaggaggcagcagatgagtgatcatcaagaacatgaatcaggtttagaagattgaagcccagggcttgtgaaatggtactgaatcttggttgtgactagcagataatgacattggttctgcaaactgttgcacgacaggaacctgtgatgggatctgcatcgaactgcagctgtgttcttcagggggtgccttgcatcagattgaaaaaaagagctactttatagtgcctctcctttatttattgatatgtcactacttgtttttgtaactgcaatcaagatactgggacgctacccgcttgcctgtttagacatgttcacatcatgtgtagtgaggtgttttatttaacgagatgttaaatttgtgctcatgatattcatgtgctgttatcttc

SEQ ID NO: 23792 - protein, 248 aa, Zea mays subsp. mays
  peptide (1)..(248): Ceres Seq. ID no. 12374464
  misc_feature (1)..(248): NCBI GI NO: 34393587 NR Description: unknown protein
  misc_feature (2)..(247): NCBI GI NO: 15241717 NR Description: putative protein; protein id: At5g39360
  misc_feature (2)..(245): NCBI GI NO: 15242296 NR Description: putative protein; protein id: At5g15440.1
  misc_feature (21)..(243): NCBI GI NO: 14210079 NR Description: circadian clock coupling factor ZGT
  misc_feature (21)..(247): NCBI GI NO: 34908976 NR Description: putative circadian clock coupling factor ZGT
  misc_feature (24)..(244): NCBI GI NO: 11281127 NR Description: hypothetical protein T20O10
  misc_feature (24)..(244): NCBI GI NO: 18412596 NR Description: putative protein; protein id: At3g63060
MVLVVKQHRCTHSASCVCIKGHLSEDALFLVFRHMNWNPRLIAILSCVCKWFDEVAKQVLWKEFCHARAPKMMLDLHSGGSHIVDGNWKALGKLLIYCNGCTKGGLFNNIHVPGHFVFRTRFSRTAGRSFLPLPCKSDVLYVSDPCEHLDQGEEGDIGFFRGIFMSFATSRVKKMLIEKRARFHPRELCPYCKAKLWNMFQENMIPRSASARLGAYDDSVEYFVCLNGHVIGLGTLLPLSDSEEAADE

SEQ ID NO: 23793 - protein, 214 aa, Zea mays subsp. mays
  peptide (1)..(214): Ceres Seq. ID no. 12374465
  misc_feature (1)..(214): NCBI GI NO: 34393587 NR Description: unknown protein
  misc_feature (1)..(213): NCBI GI NO: 15241717 NR Description: putative protein; protein id: At5g39360
  misc_feature (1)..(211): NCBI GI NO: 15242296 NR Description: putative protein; protein id: At5g15440.1
  misc_feature (1)..(209): NCBI GI NO: 14210079 NR Description: circadian clock coupling factor ZGT
  misc_feature (1)..(213): NCBI GI NO: 34908976 NR Description: putative circadian clock coupling factor ZGT
  misc_feature (1)..(210): NCBI GI NO: 11281127 NR Description: hypothetical protein T20O10
  misc_feature (1)..(210): NCBI GI NO: 18412596 NR Description: putative protein; protein id: At3g63060
MNWNPRLIAILSCVCKWFDEVAKQVLWKEFCHARAPKMMLDLHSGGSHIVDGNWKALGKLLIYCNGCTKGGLFNNIHVPGHFVFRTRFSRTAGRSFLPLPCKSDVLYVSDPCEHLDQGEEGDIGFFRGIFMSFATSRVKKMLIEKRARFHPRELCPYCKAKLWNMFQENMIPRSASARLGAYDDSVEYFVCLNGHVIGLGTLLPLSDSEEAADE

SEQ ID NO: 23794 - protein, 177 aa, Zea mays subsp. mays
  peptide (1)..(177): Ceres Seq. ID no. 12374466
  misc_feature (1)..(177): NCBI GI NO: 34393587 NR Description: unknown protein
  misc_feature (1)..(176): NCBI GI NO: 15241717 NR Description: putative protein; protein id: At5g39360
  misc_feature (1)..(174): NCBI GI NO: 15242296 NR Description: putative protein; protein id: At5g15440.1
  misc_feature (1)..(172): NCBI GI NO: 14210079 NR Description: circadian clock coupling factor ZGT
  misc_feature (1)..(176): NCBI GI NO: 34908976 NR Description: putative circadian clock coupling factor ZGT
  misc_feature (1)..(173): NCBI GI NO: 11281127 NR Description: hypothetical protein T20O10
  misc_feature (1)..(173): NCBI GI NO: 18412596 NR Description: putative protein; protein id: At3g63060
MMLDLHSGGSHIVDGNWKALGKLLIYCNGCTKGGLFNNIHVPGHFVFRTRFSRTAGRSFLPLPCKSDVLYVSDPCEHLDQGEEGDIGFFRGIFMSFATSRVKKMLIEKRARFHPRELCPYCKAKLWNMFQENMIPRSASARLGAYDDSVEYFVCLNGHVIGLGTLLPLSDSEEAADE

SEQ ID NO: 23795 - DNA, 1772 bp, Zea mays subsp. mays
  misc_feature (1)..(1772): Ceres Seq. ID no. 12355987
actagacttgttttttccgtccatcgtttcgtttgttccacctgcgcaactgcgacggggataagtacgtcttccagatgacgacggcggcatggccgcggccacgcttcctcgtcctcccccagcctggattcctccgctcggtctgccacggcctctgctcccgctgtctcttctgcttcctgctgctcctcgccttcgcctgcagctccagctccgggcgggtggtggtcactagcttgcctggcttcgacggcgacctccccttccacctcgaaacagggtacgtggaggtggaggaggacgccggcgtggagctcttctactacttcgtccaggccgagtccggcgccgccgccgccgccgatgacacccctttcctcttctggctcaccggcggcgaccgctgctccgtcttcagcggcctcgcctacgagatcggtcccatcagattcgtcctggaaccctacaacggcaccctgccgcgcctgcgatacaaccacaactcgtggtcaaaggtgtcacatatcctcttcgtcgattcaccggttggagctggattttccttctcgagagatcccaaaggctacgatgtcggagacatctcggcctcactgcagctacaggaattcctcatcaagtggttcagtgatcatcccgagtacctcgcgaatcctttctacattggcggggactcctatgtcggaaaaatcgtgccgttcctcgggcagatgatttcagaaggtattgaacttggaagaagacccttccctaacctcaagggctatctggtgggtaacccaatcacgggcgaaagtatagatttcacttccagagtgccctacgctcatggagtcggtatcatatcagatcaattgtatgagacgatattggggcattgccaaggagaggactacactagtcctgcaaacgctctgtgtgctcaggctctggacactttcaacaatctcatcaacgaagtccagaacgcccagatcttactggacacgtgcgtctacgcgtctcctgcgccaaacgttctcagcagaccggtggacggtggtagaaggatcctgagggcggcggggatgggaggaggggcgacgctgaaccatccgccagctcgtcctcggtttggctgcatcacctacggctactacctgtcgtatttctgggcgaacgatgaacgcactcgaacagctcttgggatcaagaagggaacagtggacgagtgggtgaggtgtcacgacgcagacctgccgtacacgatcgacctcaagagcgccatcaagtaccaccggaacctgacgtccagaggctaccgcgccctggtgtacagcggcgaccatgacctgctggtgccacacctgggcacccaggcatgggtcaggtccctcaacttccccgtcgtcgacgactggagggcgtggcatctcggtggccaagccgccgggttcacgataaattactcaaacaacatgacgtttgcgacgatcaaaggtggcgggcacacggcgccggagtacgagccggagaggtgtttcgccatgttcagccgctggatactcgaccgtccactctaatctccactcgtacattgccggattcttgcaccatgaccatgattgatggactgtgtggattgcagttcataggtggaataaaatggatgatttctgtgaatggataggtctgccaactaggcaactttgtgtaaattaactaggtctgtgtcagcgcgctttaacgtaatatatgcggggataaatcgt

SEQ ID NO: 23796 - protein, 501 aa, Zea mays subsp. mays
  peptide (1)..(501): Ceres Seq. ID no. 12355988
  misc_feature (56)..(496): Pfam Name: Pfam Description:  Serine carboxypeptidase
  misc_feature (239)..(501): NCBI GI NO: 28273379 NR Description: putative serine carboxypeptidase I
  misc_feature (31)..(282): NCBI GI NO: 28273379 NR Description: putative serine carboxypeptidase I
  misc_feature (235)..(496): NCBI GI NO: 28273383 NR Description: putative serine carboxypeptidase
  misc_feature (32)..(211): NCBI GI NO: 28273383 NR Description: putative serine carboxypeptidase
  misc_feature (35)..(501): NCBI GI NO: 30682773 NR Description: serine carboxypeptidase -related
  misc_feature (35)..(501): NCBI GI NO: 15418807 NR Description: sinapoylglucose:choline sinapoyltransferase
  misc_feature (30)..(271): NCBI GI NO: 37530314 NR Description: putative serine carboxypeptidase
  misc_feature (342)..(501): NCBI GI NO: 37530314 NR Description: putative serine carboxypeptidase
  misc_feature (36)..(317): NCBI GI NO: 15228300 NR Description: putative glucose acyltransferase
  misc_feature (355)..(501): NCBI GI NO: 15228300 NR Description: putative glucose acyltransferase
MTTAAWPRPRFLVLPQPGFLRSVCHGLCSRCLFCFLLLLAFACSSSSGRVVVTSLPGFDGDLPFHLETGYVEVEEDAGVELFYYFVQAESGAAAAADDTPFLFWLTGGDRCSVFSGLAYEIGPIRFVLEPYNGTLPRLRYNHNSWSKVSHILFVDSPVGAGFSFSRDPKGYDVGDISASLQLQEFLIKWFSDHPEYLANPFYIGGDSYVGKIVPFLGQMISEGIELGRRPFPNLKGYLVGNPITGESIDFTSRVPYAHGVGIISDQLYETILGHCQGEDYTSPANALCAQALDTFNNLINEVQNAQILLDTCVYASPAPNVLSRPVDGGRRILRAAGMGGGATLNHPPARPRFGCITYGYYLSYFWANDERTRTALGIKKGTVDEWVRCHDADLPYTIDLKSAIKYHRNLTSRGYRALVYSGDHDLLVPHLGTQAWVRSLNFPVVDDWRAWHLGGQAAGFTINYSNNMTFATIKGGGHTAPEYEPERCFAMFSRWILDRPL

SEQ ID NO: 23797 - protein, 283 aa, Zea mays subsp. mays
  peptide (1)..(283): Ceres Seq. ID no. 12355989
  misc_feature (1)..(278): Pfam Name: Pfam Description:  Serine carboxypeptidase
  misc_feature (21)..(283): NCBI GI NO: 28273379 NR Description: putative serine carboxypeptidase I
  misc_feature (1)..(64): NCBI GI NO: 28273379 NR Description: putative serine carboxypeptidase I
  misc_feature (17)..(278): NCBI GI NO: 28273383 NR Description: putative serine carboxypeptidase
  misc_feature (1)..(283): NCBI GI NO: 30682773 NR Description: serine carboxypeptidase -related
  misc_feature (1)..(283): NCBI GI NO: 15418807 NR Description: sinapoylglucose:choline sinapoyltransferase
  misc_feature (1)..(53): NCBI GI NO: 37530314 NR Description: putative serine carboxypeptidase
  misc_feature (124)..(283): NCBI GI NO: 37530314 NR Description: putative serine carboxypeptidase
  misc_feature (1)..(99): NCBI GI NO: 15228300 NR Description: putative glucose acyltransferase
  misc_feature (137)..(283): NCBI GI NO: 15228300 NR Description: putative glucose acyltransferase
  misc_feature (1)..(278): NCBI GI NO: 37361927 NR Description: 1-O-sinapoylglucose:choline sinapoyltransferase
MISEGIELGRRPFPNLKGYLVGNPITGESIDFTSRVPYAHGVGIISDQLYETILGHCQGEDYTSPANALCAQALDTFNNLINEVQNAQILLDTCVYASPAPNVLSRPVDGGRRILRAAGMGGGATLNHPPARPRFGCITYGYYLSYFWANDERTRTALGIKKGTVDEWVRCHDADLPYTIDLKSAIKYHRNLTSRGYRALVYSGDHDLLVPHLGTQAWVRSLNFPVVDDWRAWHLGGQAAGFTINYSNNMTFATIKGGGHTAPEYEPERCFAMFSRWILDRPL

SEQ ID NO: 23798 - DNA, 1201 bp, Zea mays subsp. mays
  misc_feature (1)..(1201): Ceres Seq. ID no. 13498951
aaatcaacccaacacggcgtccccgtcccgagtcaccaccgacccaagcaaaaccgcacgcaccctgccagcggccccccaactcccaacccaacccctactccggctagctcgcggcggcggcccagcggccatggccttccggctgagcaacaacctgatcggggtcctaaacttcgtcaccttcctgctctccgtcccgatcctgggcgcgggcatctggctgggccaccgcgccgacggcaccgagtgcgagcgctacctctcggcgcccgtcatcgcgctgggggccttcctcctcgccgtctccctggcgggcctcgtcggcgcctgctgccgcgtcacctggctgctctgggcctacctcctcgccatgttcgtcctcatcctcgtcctcttctgcttcaccgtcttcgccttcgtcgtcaccaacaggggcgccggcgaggccgtctccggccgcggatacaaggagtaccgcctcggggactactccaactggctgcagaagcgcgtcgagaacaccaggaactgggaccggatcaggagctgcctccaggactccaaggtctgcaagagcctgcaggacaagaacgagaccgtcgcccagttcatgagttccagcctctcccccatcgagtctggctgctgcaagccccccaccagctgcggctacacctacgtcggcggcacggactggacgccggtgaccaccaactcgacggacccggactgcaagacctggagcaacgacgcctcggcgctctgctacaactgccagtcgtgcaaggccggcgtggtggccacgttccagcggaactggaagcgcgtcgccgtcgtctgcatcgtcttcctcgtcttcatcatcatcgtctactccgtcggctgctgcgccttcaggaacaaccgcagagacaacgcctaccgcggcgggtggaagggcgggtacgcttgatccaccatcgcgtcgtttaggagcggagccatgcacgcgcgctcggtgctctgctctgctccctgcccgccgctgtcgtcgtacgtacatgtttagtaggctcgttgtagctctgtacaggtgatggagatcgttgttgcggattcttatcgtcttcctggttacatacttacattattgttatgatctgatcagcggtaggttttgtatacgctgctcattgattcgtctgcctgctattttcgt

SEQ ID NO: 23799 - protein, 324 aa, Zea mays subsp. mays
  peptide (1)..(324): Ceres Seq. ID no. 13498952
KSTQHGVPVPSHHRPKQNRTHPASGPPTPNPTPTPASSRRRPSGHGLPAEQQPDRGPKLRHLPALRPDPGRGHLAGPPRRRHRVRALPLGARHRAGGLPPRRLPGGPRRRLLPRHLAALGLPPRHVRPHPRPLLLHRLRLRRHQQGRRRGRLRPRIQGVPPRGLLQLAAEARREHQELGPDQELPPGLQGLQEPAGQERDRRPVHEFQPLPHRVWLLQAPHQLRLHLRRRHGLDAGDHQLDGPGLQDLEQRRLGALLQLPVVQGRRGGHVPAELEARRRRLHRLPRLHHHRLLRRLLRLQEQPQRQRLPRRVEGRVRLIHHRVV

SEQ ID NO: 23800 - protein, 317 aa, Zea mays subsp. mays
  peptide (1)..(317): Ceres Seq. ID no. 13498953
  misc_feature (50)..(288): Pfam Name: Pfam Description:  Tetraspanin family
  misc_feature (45)..(317): NCBI GI NO: 29367553 NR Description: senescence-associated protein-like protein
  misc_feature (47)..(314): NCBI GI NO: 3551954 NR Description: senescence-associated protein 5
  misc_feature (48)..(308): NCBI GI NO: 20197174 NR Description: hypothetical protein [Arabidopsis thaliana]
  misc_feature (50)..(304): NCBI GI NO: 15234374 NR Description: senescence-associated protein, putative
  misc_feature (48)..(316): NCBI GI NO: 15234743 NR Description: senescence-associated protein family
  misc_feature (48)..(316): NCBI GI NO: 21537169 NR Description: senescence-associated protein-like protein
  misc_feature (48)..(304): NCBI GI NO: 15238641 NR Description: senescence-associated protein family
  misc_feature (48)..(306): NCBI GI NO: 15231187 NR Description: senescence-associated protein family
  misc_feature (49)..(316): NCBI GI NO: 17979386 NR Description: putative senescence-associated protein 5
  misc_feature (49)..(316): NCBI GI NO: 15237490 NR Description: senescence-associated protein, putative
NQPNTASPSRVTTDPSKTARTLPAAPQLPTQPLLRLARGGGPAAMAFRLSNNLIGVLNFVTFLLSVPILGAGIWLGHRADGTECERYLSAPVIALGAFLLAVSLAGLVGACCRVTWLLWAYLLAMFVLILVLFCFTVFAFVVTNRGAGEAVSGRGYKEYRLGDYSNWLQKRVENTRNWDRIRSCLQDSKVCKSLQDKNETVAQFMSSSLSPIESGCCKPPTSCGYTYVGGTDWTPVTTNSTDPDCKTWSNDASALCYNCQSCKAGVVATFQRNWKRVAVVCIVFLVFIIIVYSVGCCAFRNNRRDNAYRGGWKGGYA

SEQ ID NO: 23801 - protein, 273 aa, Zea mays subsp. mays
  peptide (1)..(273): Ceres Seq. ID no. 13498954
  misc_feature (6)..(244): Pfam Name: Pfam Description:  Tetraspanin family
  misc_feature (1)..(273): NCBI GI NO: 29367553 NR Description: senescence-associated protein-like protein
  misc_feature (3)..(270): NCBI GI NO: 3551954 NR Description: senescence-associated protein 5
  misc_feature (4)..(264): NCBI GI NO: 20197174 NR Description: hypothetical protein [Arabidopsis thaliana]
  misc_feature (6)..(260): NCBI GI NO: 15234374 NR Description: senescence-associated protein, putative
  misc_feature (4)..(272): NCBI GI NO: 15234743 NR Description: senescence-associated protein family
  misc_feature (4)..(272): NCBI GI NO: 21537169 NR Description: senescence-associated protein-like protein
  misc_feature (4)..(260): NCBI GI NO: 15238641 NR Description: senescence-associated protein family
  misc_feature (4)..(262): NCBI GI NO: 15231187 NR Description: senescence-associated protein family
  misc_feature (5)..(272): NCBI GI NO: 17979386 NR Description: putative senescence-associated protein 5
  misc_feature (5)..(272): NCBI GI NO: 15237490 NR Description: senescence-associated protein, putative
MAFRLSNNLIGVLNFVTFLLSVPILGAGIWLGHRADGTECERYLSAPVIALGAFLLAVSLAGLVGACCRVTWLLWAYLLAMFVLILVLFCFTVFAFVVTNRGAGEAVSGRGYKEYRLGDYSNWLQKRVENTRNWDRIRSCLQDSKVCKSLQDKNETVAQFMSSSLSPIESGCCKPPTSCGYTYVGGTDWTPVTTNSTDPDCKTWSNDASALCYNCQSCKAGVVATFQRNWKRVAVVCIVFLVFIIIVYSVGCCAFRNNRRDNAYRGGWKGGYA

SEQ ID NO: 23802 - DNA, 1780 bp, Zea mays subsp. mays
  misc_feature (1)..(1780): Ceres Seq. ID no. 12367347
ataaataggccagcatttgcaatccaactttagctgccatctgtttctgaaccatggatccatttgttctctccatcctcttatgctcatcgatctttgttgtagtgtactggagaaggctgaacagcatgaggctaagacttccaccgggacctccaacatggccaattttcggcaatcttctccagttgagccctcttccccacaaagactttgcccaattttgcaccaaatatggccctctcgtctatcttcgcctgggaaccatcgatgccatcaccactgatgaccccgaagtgatccgtgaaatactcatccggcaagatgaggtctttgcttcgcggcctcggacactggctgccgtccatctcgcctatgggtgtggtgatgtggctctagctccactgggacccaactggaaaaggatgaggagagtttgcatggagcacttgctgacgaccaggcggctcgagtctttcgctgctcaccgagctcaggaggccgagcacctctgccagtttgtgtgggctaaatctcagtccgggaagcccgtgaacctcagagaggttctcggtgccttctcgatgaacaacgtcacgcggatgctgctggggaagcagtactttgggatccagtcggcaggccccggcgaggcaatggagttcatgcacatcacccacgagctgttcttcctgctgggcctgatctatctcggggactacttgccggcttggaggtgggtcgacccgtacgggtgtgagaagaggatgagggaggtggagaagaaggtggacgacttccaccagaagatcattgatgagcacaggagagctagggaggccaggaagagtcgttcctccgttgaggaagatggcggcaacggcaaagatgagatggacttcgtcgatgtgctgttatctttgcctggtgagaacgggaaggagcacatggacgacatggagatcaaagcgttgatgcaggacatgatcgctgctgctactgatacttcatcggtgacgaacgagtgggtgatggcggaggtaatcaagaacccgcgcgtgctccggcgcgtccaggaggagctggacgcggtggtggggcgcgaccggatggtggcggagtcggacctggcccacctcccctacctccggtgcgtggtgcgcgagtcattccggatgcacccggcggggccgttccttatcccgcacgagtcgctgaaggcgacgaccatcatggggtaccacgtgccggcgcgcacgcgcgtgttcatcaacacgcacgcgctggggcggaacccgcgcgtgtgggactcccgtgggcgagttccggccggagcggcacctgccggcggaggagggggcgcgggtggagatcagccacctgccggacttcaagatcctgccgttcagcgccgggaagcgcaagtgccccggcgcgccgctgggcgtggcgctggtgctcatggcgctcgccaggctcttccactgcttcgactggtccccgcccgacggcctccgccccgaggacgtggacacccgggaggtgtacggcatgaccatgcccaaggccacgcccctcgtcgccgtcgccactccgcgcctgccgccgcacttgtacggcggcggcggcggcagctcggctccttagttcgatgacactttgacgcacgtgcgctgcactgccagtctcattagtcattatacgcatgatgtacttccctccatatacaatacaccgcataaaccaaacgatgaatgaaatgtagtcgttctatggtttc

SEQ ID NO: 23803 - protein, 533 aa, Zea mays subsp. mays
  peptide (1)..(533): Ceres Seq. ID no. 12367348
  misc_feature (1)..(419): NCBI GI NO: 18481718 NR Description: cytochrome P450 protein [Sorghum bicolor]
  misc_feature (3)..(420): NCBI GI NO: 11249497 NR Description: cytochrome P450 CYP703A1 - garden petunia
  misc_feature (5)..(419): NCBI GI NO: 15223365 NR Description: cytochrome p450 family; protein id: At1g01280.1
  misc_feature (5)..(432): NCBI GI NO: 12231882 NR Description: flavonoid 3',5'-hydroxylase
  misc_feature (1)..(419): NCBI GI NO: 18148451 NR Description: flavonoid 3'-hydroxylase [Glycine max]
  misc_feature (1)..(432): NCBI GI NO: 12231886 NR Description: flavonoid 3'-hydroxylase [Matthiola incana]
  misc_feature (13)..(419): NCBI GI NO: 14423327 NR Description: elicitor-inducible cytochrome P450
  misc_feature (5)..(418): NCBI GI NO: 27151498 NR Description: Flavonoid 3'-monooxygenase
  misc_feature (1)..(418): NCBI GI NO: 12231880 NR Description: putative flavonoid 3'-hydroxylase
  misc_feature (5)..(420): NCBI GI NO: 25282608 NR Description: cytochrome P-450LXXIA1 [similarity] - avocado
MDPFVLSILLCSSIFVVVYWRRLNSMRLRLPPGPPTWPIFGNLLQLSPLPHKDFAQFCTKYGPLVYLRLGTIDAITTDDPEVIREILIRQDEVFASRPRTLAAVHLAYGCGDVALAPLGPNWKRMRRVCMEHLLTTRRLESFAAHRAQEAEHLCQFVWAKSQSGKPVNLREVLGAFSMNNVTRMLLGKQYFGIQSAGPGEAMEFMHITHELFFLLGLIYLGDYLPAWRWVDPYGCEKRMREVEKKVDDFHQKIIDEHRRAREARKSRSSVEEDGGNGKDEMDFVDVLLSLPGENGKEHMDDMEIKALMQDMIAAATDTSSVTNEWVMAEVIKNPRVLRRVQEELDAVVGRDRMVAESDLAHLPYLRCVVRESFRMHPAGPFLIPHESLKATTIMGYHVPARTRVFINTHALGRNPRVWDSRGRVPAGAAPAGGGGGAGGDQPPAGLQDPAVQRREAQVPRRAAGRGAGAHGARQALPLLRLVPARRPPPRGRGHPGGVRHDHAQGHAPRRRRHSAPAAALVRRRRRQLGSLVR

SEQ ID NO: 23804 - protein, 508 aa, Zea mays subsp. mays
  peptide (1)..(508): Ceres Seq. ID no. 12367349
  misc_feature (1)..(394): NCBI GI NO: 18481718 NR Description: cytochrome P450 protein [Sorghum bicolor]
  misc_feature (1)..(395): NCBI GI NO: 11249497 NR Description: cytochrome P450 CYP703A1 - garden petunia
  misc_feature (1)..(394): NCBI GI NO: 15223365 NR Description: cytochrome p450 family; protein id: At1g01280.1
  misc_feature (1)..(407): NCBI GI NO: 12231882 NR Description: flavonoid 3',5'-hydroxylase
  misc_feature (1)..(394): NCBI GI NO: 18148451 NR Description: flavonoid 3'-hydroxylase [Glycine max]
  misc_feature (1)..(407): NCBI GI NO: 12231886 NR Description: flavonoid 3'-hydroxylase [Matthiola incana]
  misc_feature (1)..(394): NCBI GI NO: 14423327 NR Description: elicitor-inducible cytochrome P450
  misc_feature (1)..(393): NCBI GI NO: 27151498 NR Description: Flavonoid 3'-monooxygenase
  misc_feature (1)..(393): NCBI GI NO: 12231880 NR Description: putative flavonoid 3'-hydroxylase
  misc_feature (1)..(395): NCBI GI NO: 25282608 NR Description: cytochrome P-450LXXIA1 [similarity] - avocado
MRLRLPPGPPTWPIFGNLLQLSPLPHKDFAQFCTKYGPLVYLRLGTIDAITTDDPEVIREILIRQDEVFASRPRTLAAVHLAYGCGDVALAPLGPNWKRMRRVCMEHLLTTRRLESFAAHRAQEAEHLCQFVWAKSQSGKPVNLREVLGAFSMNNVTRMLLGKQYFGIQSAGPGEAMEFMHITHELFFLLGLIYLGDYLPAWRWVDPYGCEKRMREVEKKVDDFHQKIIDEHRRAREARKSRSSVEEDGGNGKDEMDFVDVLLSLPGENGKEHMDDMEIKALMQDMIAAATDTSSVTNEWVMAEVIKNPRVLRRVQEELDAVVGRDRMVAESDLAHLPYLRCVVRESFRMHPAGPFLIPHESLKATTIMGYHVPARTRVFINTHALGRNPRVWDSRGRVPAGAAPAGGGGGAGGDQPPAGLQDPAVQRREAQVPRRAAGRGAGAHGARQALPLLRLVPARRPPPRGRGHPGGVRHDHAQGHAPRRRRHSAPAAALVRRRRRQLGSLVR

SEQ ID NO: 23805 - protein, 409 aa, Zea mays subsp. mays
  peptide (1)..(409): Ceres Seq. ID no. 12367350
  misc_feature (1)..(295): NCBI GI NO: 18481718 NR Description: cytochrome P450 protein [Sorghum bicolor]
  misc_feature (1)..(296): NCBI GI NO: 11249497 NR Description: cytochrome P450 CYP703A1 - garden petunia
  misc_feature (1)..(295): NCBI GI NO: 15223365 NR Description: cytochrome p450 family; protein id: At1g01280.1
  misc_feature (1)..(308): NCBI GI NO: 12231882 NR Description: flavonoid 3',5'-hydroxylase
  misc_feature (1)..(295): NCBI GI NO: 18148451 NR Description: flavonoid 3'-hydroxylase [Glycine max]
  misc_feature (1)..(308): NCBI GI NO: 12231886 NR Description: flavonoid 3'-hydroxylase [Matthiola incana]
  misc_feature (1)..(295): NCBI GI NO: 14423327 NR Description: elicitor-inducible cytochrome P450
  misc_feature (1)..(294): NCBI GI NO: 27151498 NR Description: Flavonoid 3'-monooxygenase
  misc_feature (1)..(294): NCBI GI NO: 12231880 NR Description: putative flavonoid 3'-hydroxylase
  misc_feature (1)..(296): NCBI GI NO: 25282608 NR Description: cytochrome P-450LXXIA1 [similarity] - avocado
MRRVCMEHLLTTRRLESFAAHRAQEAEHLCQFVWAKSQSGKPVNLREVLGAFSMNNVTRMLLGKQYFGIQSAGPGEAMEFMHITHELFFLLGLIYLGDYLPAWRWVDPYGCEKRMREVEKKVDDFHQKIIDEHRRAREARKSRSSVEEDGGNGKDEMDFVDVLLSLPGENGKEHMDDMEIKALMQDMIAAATDTSSVTNEWVMAEVIKNPRVLRRVQEELDAVVGRDRMVAESDLAHLPYLRCVVRESFRMHPAGPFLIPHESLKATTIMGYHVPARTRVFINTHALGRNPRVWDSRGRVPAGAAPAGGGGGAGGDQPPAGLQDPAVQRREAQVPRRAAGRGAGAHGARQALPLLRLVPARRPPPRGRGHPGGVRHDHAQGHAPRRRRHSAPAAALVRRRRRQLGSLVR

SEQ ID NO: 23806 - DNA, 1081 bp, Zea mays subsp. mays
  misc_feature (1)..(1081): Ceres Seq. ID no. 12373916
aaaccgcgtcaccccctcccccaatcgtctcgctcgcaagtcgcatcgcacgtacggtctcaggcgcatcggcctcgccgctgcacaacgccggagacgagacgacggcggctgcgggatgacggtcttccacttcctcaactgcgccttcctcaccttcggccctcacgtcgtctactactccgccacgcccctgtcagagtatgatacaatcggcacttctataaaagcagctgctgtttatcttggaactgcgcttgtaaagcttgtttgcttggcaacattgctcaaagtacctgagaatgatagctttgacccctatcaggagttaatgaaagtttttattggattcatagatgtagctggactgtattttgctttgacccagctgacccacagaaacatctctcagaatcataagttccaggctgttggtcttggttgggcttttgctgattcagttttgcaccgactggcacctctctggattggggcaagagggcttgaatttacatgggagtacatatttcaaggacttgaagcgaatgctaatcttgtgatgaccctctcccttgctgcattggggtccttgatgtggcttaggaagaacaagcctaggactttggttccaataatttatgcatgtgctctgctcttggcaacaatgccatctatcaccagctacttgaggaggtcattggagtggcagacaccaaaggtggttggcttcgagctcttctcctcccttgttatggctttcatcagctggcagctgttctcggcttgtcagagaccgatgtaacaagacatccataccactgccaattttacgtgcaatttgaagctcctgcagatgctcctgagtacgtcagaagaattaggaagatcctttgaactttgagctacaactcttcttcttggcgttcggttacagaacattttacttagaacatctgttgtaacttgtgagctgtagagcagaaacacatgcctgaaatgagttattctataacagatgctcatgtaggcgtttgatctgaaacatttgtttattattattgcggtgtgcatttcagatgct

SEQ ID NO: 23807 - protein, 266 aa, Zea mays subsp. mays
  peptide (1)..(266): Ceres Seq. ID no. 12373917
  misc_feature (40)..(265): NCBI GI NO: 18401831 NR Description: expressed protein; protein id: At1g47640
  misc_feature (148)..(211): NCBI GI NO: 15220273 NR Description: cytochrome P450, putative; protein id: At1g47630.1
  misc_feature (209)..(265): NCBI GI NO: 15220273 NR Description: cytochrome P450, putative; protein id: At1g47630.1
  misc_feature (40)..(261): NCBI GI NO: 17556931 NR Description: Seven transmembrane domain protein like (25.0 kD)
  misc_feature (40)..(261): NCBI GI NO: 39593965 NR Description: Hypothetical protein CBG16516
  misc_feature (40)..(212): NCBI GI NO: 7511137 NR Description: hypothetical protein ZK418
  misc_feature (40)..(185): NCBI GI NO: 3550427 NR Description: seven transmembrane domain protein [Homo sapiens]
  misc_feature (40)..(186): NCBI GI NO: 12841501 NR Description: unnamed protein product [Mus musculus]
  misc_feature (40)..(186): NCBI GI NO: 14249166 NR Description: seven transmembrane domain protein [Homo sapiens]
  misc_feature (40)..(186): NCBI GI NO: 21312420 NR Description: RIKEN cDNA 2010004E11 [Mus musculus]
NRVTPSPNRLARKSHRTYGLRRIGLAAAQRRRRDDGGCGMTVFHFLNCAFLTFGPHVVYYSATPLSEYDTIGTSIKAAAVYLGTALVKLVCLATLLKVPENDSFDPYQELMKVFIGFIDVAGLYFALTQLTHRNISQNHKFQAVGLGWAFADSVLHRLAPLWIGARGLEFTWEYIFQGLEANANLVMTLSLAALGSLMWLRKNKPRTLVPIIYACALLLATMPSITSYLRRSLEWQTPKVVGFELFSSLVMAFISWQLFSACQRPM

SEQ ID NO: 23808 - protein, 227 aa, Zea mays subsp. mays
  peptide (1)..(227): Ceres Seq. ID no. 12373918
  misc_feature (1)..(226): NCBI GI NO: 18401831 NR Description: expressed protein; protein id: At1g47640
  misc_feature (109)..(172): NCBI GI NO: 15220273 NR Description: cytochrome P450, putative; protein id: At1g47630.1
  misc_feature (170)..(226): NCBI GI NO: 15220273 NR Description: cytochrome P450, putative; protein id: At1g47630.1
  misc_feature (1)..(222): NCBI GI NO: 17556931 NR Description: Seven transmembrane domain protein like (25.0 kD)
  misc_feature (1)..(222): NCBI GI NO: 39593965 NR Description: Hypothetical protein CBG16516
  misc_feature (1)..(173): NCBI GI NO: 7511137 NR Description: hypothetical protein ZK418
  misc_feature (1)..(146): NCBI GI NO: 3550427 NR Description: seven transmembrane domain protein [Homo sapiens]
  misc_feature (1)..(147): NCBI GI NO: 12841501 NR Description: unnamed protein product [Mus musculus]
  misc_feature (1)..(147): NCBI GI NO: 27731097 NR Description: similar to seven transmembrane domain protein
  misc_feature (1)..(147): NCBI GI NO: 21312420 NR Description: RIKEN cDNA 2010004E11 [Mus musculus]
MTVFHFLNCAFLTFGPHVVYYSATPLSEYDTIGTSIKAAAVYLGTALVKLVCLATLLKVPENDSFDPYQELMKVFIGFIDVAGLYFALTQLTHRNISQNHKFQAVGLGWAFADSVLHRLAPLWIGARGLEFTWEYIFQGLEANANLVMTLSLAALGSLMWLRKNKPRTLVPIIYACALLLATMPSITSYLRRSLEWQTPKVVGFELFSSLVMAFISWQLFSACQRPM

SEQ ID NO: 23809 - protein, 156 aa, Zea mays subsp. mays
  peptide (1)..(156): Ceres Seq. ID no. 12373919
  misc_feature (1)..(155): NCBI GI NO: 18401831 NR Description: expressed protein; protein id: At1g47640
  misc_feature (38)..(101): NCBI GI NO: 15220273 NR Description: cytochrome P450, putative; protein id: At1g47630.1
  misc_feature (99)..(155): NCBI GI NO: 15220273 NR Description: cytochrome P450, putative; protein id: At1g47630.1
  misc_feature (1)..(151): NCBI GI NO: 17556931 NR Description: Seven transmembrane domain protein like (25.0 kD)
  misc_feature (1)..(151): NCBI GI NO: 39593965 NR Description: Hypothetical protein CBG16516
  misc_feature (1)..(102): NCBI GI NO: 7511137 NR Description: hypothetical protein ZK418
  misc_feature (1)..(75): NCBI GI NO: 3550427 NR Description: seven transmembrane domain protein [Homo sapiens]
  misc_feature (1)..(76): NCBI GI NO: 12841501 NR Description: unnamed protein product [Mus musculus]
  misc_feature (1)..(76): NCBI GI NO: 21312420 NR Description: RIKEN cDNA 2010004E11 [Mus musculus]
  misc_feature (1)..(76): NCBI GI NO: 27731097 NR Description: similar to seven transmembrane domain protein
MKVFIGFIDVAGLYFALTQLTHRNISQNHKFQAVGLGWAFADSVLHRLAPLWIGARGLEFTWEYIFQGLEANANLVMTLSLAALGSLMWLRKNKPRTLVPIIYACALLLATMPSITSYLRRSLEWQTPKVVGFELFSSLVMAFISWQLFSACQRPM

SEQ ID NO: 23810 - DNA, 1137 bp, Zea mays subsp. mays
  misc_feature (1)..(1137): Ceres Seq. ID no. 12359692
acccagcaccgcagagctctcatctcctctctctctctctctctctctctctctcgcgctcgctttgcttcctcgtcgaggtccagttcctgcattgatggcgaccgaggtggctgagactcccgcgccgttggcggaggcggtccccgagacccccgcggaggcaccggcggcgcccgccgccgaggcgaattctaccaaggccaagaaggcctctgcgcccaagaagcgtgccaacccgacccacccgccgtacgccgagatgatctcggaggctgtcacgtcgctcaaggagcggacggggtccagccagtacgcgatcgccaagttcgtcgaggacaagcacaaggacaagctcccgcccaacttccgcaagctcctgctcggccagctcaagaagctcgtcgccgccggcaagctcaccaaggtgaagaactcctacaagctgcccgcacgcgccccggccgccgccaagccgaagcccaagtccaagaccgctgtgaagaagcccaaggccggggcgaagaagcccaaggccgccaccaagcccaagcccaaggccaaggccaagtcccccgctaaggcgaagcccgctgcaaagcccaaggcagccgcgaagccgaaacccgcagcagccaagcccaaggcggccgccaagccgaaggccaagccagctgccaaggctaagccgaaggctgtcgctgccaagccgaagccagctgccaagaaggccggccgccctgccaaggccgccaagacgtcagccaaggacacgcccgggaagaaagcggcgcccgccaagaagcccgctgctgcggccaagaaggcccctgccaagaaggccgccccagccaagaaggctcccaccccgtcgcggaaggtgccgtcgcgtaaggcgaagaagtagagcggtggtcttggcaggaatctagggtttcatgctccttcgattttagatgtttactcgtttttgctctagttgtgggtggtgtgcggggtgggttactaggttgtaaatttgatgccggaggctggggtacacatgggcattctgtaccagcggtggaagggcggaggcgccggcgacgatgacgaaccagtgtgtgttattattagaagacgaagttgtatttctgc

SEQ ID NO: 23811 - protein, 301 aa, Zea mays subsp. mays
  peptide (1)..(301): Ceres Seq. ID no. 12359693
  misc_feature (81)..(149): Pfam Name: Pfam Description:  linker histone H1 and H5 family
  misc_feature (33)..(287): NCBI GI NO: 121950 NR Description: HISTONE H1
  misc_feature (33)..(299): NCBI GI NO: 34897182 NR Description: histone-like protein
  misc_feature (28)..(301): NCBI GI NO: 7439660 NR Description: histone H1 (clone TH32) - wheat
  misc_feature (34)..(301): NCBI GI NO: 5230785 NR Description: histone H1 WH1B.1 [Triticum aestivum]
  misc_feature (28)..(301): NCBI GI NO: 7439656 NR Description: histone H1 (clone TH315) - wheat
  misc_feature (30)..(301): NCBI GI NO: 13540401 NR Description: histone H1 [Lens culinaris]
  misc_feature (28)..(299): NCBI GI NO: 2623960 NR Description: histone H1 [Apium graveolens]
  misc_feature (30)..(301): NCBI GI NO: 30420970 NR Description: histone H1 [Vicia faba]
  misc_feature (33)..(301): NCBI GI NO: 585241 NR Description: HISTONE H1
  misc_feature (30)..(301): NCBI GI NO: 13540393 NR Description: histone H1 [Pisum sativum]
PSTAELSSPLSLSLSLSLALALLPRRGPVPALMATEVAETPAPLAEAVPETPAEAPAAPAAEANSTKAKKASAPKKRANPTHPPYAEMISEAVTSLKERTGSSQYAIAKFVEDKHKDKLPPNFRKLLLGQLKKLVAAGKLTKVKNSYKLPARAPAAAKPKPKSKTAVKKPKAGAKKPKAATKPKPKAKAKSPAKAKPAAKPKAAAKPKPAAAKPKAAAKPKAKPAAKAKPKAVAAKPKPAAKKAGRPAKAAKTSAKDTPGKKAAPAKKPAAAAKKAPAKKAAPAKKAPTPSRKVPSRKAKK

SEQ ID NO: 23812 - protein, 269 aa, Zea mays subsp. mays
  peptide (1)..(269): Ceres Seq. ID no. 12359694
  misc_feature (49)..(117): Pfam Name: Pfam Description:  linker histone H1 and H5 family
  misc_feature (1)..(255): NCBI GI NO: 121950 NR Description: HISTONE H1
  misc_feature (1)..(267): NCBI GI NO: 34897182 NR Description: histone-like protein
  misc_feature (1)..(269): NCBI GI NO: 7439660 NR Description: histone H1 (clone TH32) - wheat
  misc_feature (2)..(269): NCBI GI NO: 5230785 NR Description: histone H1 WH1B.1 [Triticum aestivum]
  misc_feature (1)..(269): NCBI GI NO: 7439656 NR Description: histone H1 (clone TH315) - wheat
  misc_feature (1)..(269): NCBI GI NO: 13540401 NR Description: histone H1 [Lens culinaris]
  misc_feature (1)..(267): NCBI GI NO: 2623960 NR Description: histone H1 [Apium graveolens]
  misc_feature (1)..(269): NCBI GI NO: 30420970 NR Description: histone H1 [Vicia faba]
  misc_feature (1)..(269): NCBI GI NO: 585241 NR Description: HISTONE H1
  misc_feature (1)..(269): NCBI GI NO: 13540393 NR Description: histone H1 [Pisum sativum]
MATEVAETPAPLAEAVPETPAEAPAAPAAEANSTKAKKASAPKKRANPTHPPYAEMISEAVTSLKERTGSSQYAIAKFVEDKHKDKLPPNFRKLLLGQLKKLVAAGKLTKVKNSYKLPARAPAAAKPKPKSKTAVKKPKAGAKKPKAATKPKPKAKAKSPAKAKPAAKPKAAAKPKPAAAKPKAAAKPKAKPAAKAKPKAVAAKPKPAAKKAGRPAKAAKTSAKDTPGKKAAPAKKPAAAAKKAPAKKAAPAKKAPTPSRKVPSRKAKK

SEQ ID NO: 23813 - protein, 214 aa, Zea mays subsp. mays
  peptide (1)..(214): Ceres Seq. ID no. 12359695
  misc_feature (1)..(62): Pfam Name: Pfam Description:  linker histone H1 and H5 family
  misc_feature (1)..(200): NCBI GI NO: 121950 NR Description: HISTONE H1
  misc_feature (1)..(212): NCBI GI NO: 34897182 NR Description: histone-like protein
  misc_feature (1)..(214): NCBI GI NO: 7439660 NR Description: histone H1 (clone TH32) - wheat
  misc_feature (1)..(214): NCBI GI NO: 5230785 NR Description: histone H1 WH1B.1 [Triticum aestivum]
  misc_feature (1)..(214): NCBI GI NO: 7439656 NR Description: histone H1 (clone TH315) - wheat
  misc_feature (1)..(214): NCBI GI NO: 13540401 NR Description: histone H1 [Lens culinaris]
  misc_feature (1)..(212): NCBI GI NO: 2623960 NR Description: histone H1 [Apium graveolens]
  misc_feature (1)..(214): NCBI GI NO: 30420970 NR Description: histone H1 [Vicia faba]
  misc_feature (1)..(214): NCBI GI NO: 585241 NR Description: HISTONE H1
  misc_feature (1)..(214): NCBI GI NO: 13540393 NR Description: histone H1 [Pisum sativum]
MISEAVTSLKERTGSSQYAIAKFVEDKHKDKLPPNFRKLLLGQLKKLVAAGKLTKVKNSYKLPARAPAAAKPKPKSKTAVKKPKAGAKKPKAATKPKPKAKAKSPAKAKPAAKPKAAAKPKPAAAKPKAAAKPKAKPAAKAKPKAVAAKPKPAAKKAGRPAKAAKTSAKDTPGKKAAPAKKPAAAAKKAPAKKAAPAKKAPTPSRKVPSRKAKK

SEQ ID NO: 23814 - DNA, 1605 bp, Zea mays subsp. mays
  misc_feature (1)..(1605): Ceres Seq. ID no. 12341578
atttataaacactgccaattagtccgcgccggacctccaacccgcccccacggcccacgccatcctccacaccccccacgccggacaaccggggctcgccgcgccgctacgctcccaagccggaactccgaactcgccgcgccgttctcactgtggcaccagagctgctcgatctgccccgccctcgcccctcgcccctcgcccccttgccggaggggcgcgaactcgcaaaaattattgggtgtgcatttatacacccatgttctttgctgaccctgtctggtagcagattaaggtttggttgcggaaaatattggtgggttgtccaccatgacgagtccgccaagggtgagcatggagatcaccgacgacatgctcaagagcatggaggtcggcctagctttccgggactataatggtagaattagttctatggattttcacagcaaggctaccaactatcttgtgacagctagcgacgatgaatcaatccgcctatacgacactcaaaatgcagtatgtttgaagactattaatagcaaaaaatatggggtcgaactagtgtgcttcactgataacccaaatattgtcttatattcatcaaaaaatggctgggatgaatctctgcgtctactctcactgaatgataatcggtttcttagatattttaaaggtcaccttgacagggttgtctgcatctcattttgctctgagaaagaaaattttctctctggttcacttgaccgtactgttctcttatgggatcaacgggctgaaaaatcacagggcttactgcgtgtgcaagggaggcctgcagtttcatatgacgatcagggcatggtatttgcagttgcctatggtggtcacataaggatgtttgatgctcgaaaatttgaaaaggggccttttgagatcttctctgttggtaataacgattcagaggcccatgtcataaagttcagcagtgatggcaggcggattctgttaaccactaaagctggacgtgtccatgtgctagattcattccatggcaatagcattgcgtcgtgcaatgtgaagccagtggtaaccaactcaacactggaggcgtcgttcagccctgatggaaaccatatcatatctggctccggtgacggtagtgtttatgcttggaatgttaggagtggaaaggtcgcgcgctggggaagcacagacgacgaaccgccgctggtaaggtgggctccaggatccttgatgttcgtgacaggatcatcagaactgtcatgctgggttccggacctgtctaagctgggatcctttaccattagcaagtaggtgaaaatgatgagaggtggactgcccttgcaaaccctgttcgtccctgtatggtatgtcgtgtggctggttgaagcgactcatcctttagccaggtggccgtggtaaacttgcaacctgttacaattgaatgacttgtatagagcatcggctgtggcgatctggcttctgaagccagcggctagacaatgaagatggatccatgctttagttctgtaaaccggagattgtagctgagtattgctgtatctctttgtttctggaaggcgtcttggctcgtaaagattctgg

SEQ ID NO: 23815 - protein, 327 aa, Zea mays subsp. mays
  peptide (1)..(327): Ceres Seq. ID no. 12341579
  misc_feature (7)..(327): NCBI GI NO: 28564824 NR Description: OSJNBb0005G07.13
  misc_feature (6)..(327): NCBI GI NO: 18425050 NR Description: WD repeat protein-like; protein id: At5g66240
  misc_feature (6)..(327): NCBI GI NO: 30698206 NR Description: transducin / WD-40 repeat protein family
  misc_feature (6)..(327): NCBI GI NO: 21536827 NR Description: WD repeat protein-like [Arabidopsis thaliana]
  misc_feature (10)..(316): NCBI GI NO: 15241434 NR Description: putative protein; protein id: At5g14530
  misc_feature (9)..(317): NCBI GI NO: 28277563 NR Description: Similar to RIKEN cDNA 9430077D24 gene
  misc_feature (9)..(315): NCBI GI NO: 31232763 NR Description: ENSANGP00000013183 [Anopheles gambiae]
  misc_feature (7)..(315): NCBI GI NO: 19920938 NR Description: CG17293-PA [Drosophila melanogaster]
  misc_feature (16)..(317): NCBI GI NO: 21618713 NR Description: RIKEN cDNA 9430077D24 gene [Mus musculus]
  misc_feature (45)..(317): NCBI GI NO: 34877546 NR Description: similar to CG17293-PA [Rattus norvegicus]
MTSPPRVSMEITDDMLKSMEVGLAFRDYNGRISSMDFHSKATNYLVTASDDESIRLYDTQNAVCLKTINSKKYGVELVCFTDNPNIVLYSSKNGWDESLRLLSLNDNRFLRYFKGHLDRVVCISFCSEKENFLSGSLDRTVLLWDQRAEKSQGLLRVQGRPAVSYDDQGMVFAVAYGGHIRMFDARKFEKGPFEIFSVGNNDSEAHVIKFSSDGRRILLTTKAGRVHVLDSFHGNSIASCNVKPVVTNSTLEASFSPDGNHIISGSGDGSVYAWNVRSGKVARWGSTDDEPPLVRWAPGSLMFVTGSSELSCWVPDLSKLGSFTISK

SEQ ID NO: 23816 - protein, 319 aa, Zea mays subsp. mays
  peptide (1)..(319): Ceres Seq. ID no. 12341580
  misc_feature (1)..(319): NCBI GI NO: 28564824 NR Description: OSJNBb0005G07.13
  misc_feature (1)..(319): NCBI GI NO: 18425050 NR Description: WD repeat protein-like; protein id: At5g66240
  misc_feature (1)..(319): NCBI GI NO: 30698206 NR Description: transducin / WD-40 repeat protein family
  misc_feature (1)..(319): NCBI GI NO: 21536827 NR Description: WD repeat protein-like [Arabidopsis thaliana]
  misc_feature (2)..(308): NCBI GI NO: 15241434 NR Description: putative protein; protein id: At5g14530
  misc_feature (1)..(309): NCBI GI NO: 28277563 NR Description: Similar to RIKEN cDNA 9430077D24 gene
  misc_feature (1)..(307): NCBI GI NO: 31232763 NR Description: ENSANGP00000013183 [Anopheles gambiae]
  misc_feature (1)..(307): NCBI GI NO: 19920938 NR Description: CG17293-PA [Drosophila melanogaster]
  misc_feature (8)..(309): NCBI GI NO: 21618713 NR Description: RIKEN cDNA 9430077D24 gene [Mus musculus]
  misc_feature (37)..(309): NCBI GI NO: 34877546 NR Description: similar to CG17293-PA [Rattus norvegicus]
MEITDDMLKSMEVGLAFRDYNGRISSMDFHSKATNYLVTASDDESIRLYDTQNAVCLKTINSKKYGVELVCFTDNPNIVLYSSKNGWDESLRLLSLNDNRFLRYFKGHLDRVVCISFCSEKENFLSGSLDRTVLLWDQRAEKSQGLLRVQGRPAVSYDDQGMVFAVAYGGHIRMFDARKFEKGPFEIFSVGNNDSEAHVIKFSSDGRRILLTTKAGRVHVLDSFHGNSIASCNVKPVVTNSTLEASFSPDGNHIISGSGDGSVYAWNVRSGKVARWGSTDDEPPLVRWAPGSLMFVTGSSELSCWVPDLSKLGSFTISK

SEQ ID NO: 23817 - protein, 313 aa, Zea mays subsp. mays
  peptide (1)..(313): Ceres Seq. ID no. 12341581
  misc_feature (1)..(313): NCBI GI NO: 28564824 NR Description: OSJNBb0005G07.13
  misc_feature (1)..(313): NCBI GI NO: 18425050 NR Description: WD repeat protein-like; protein id: At5g66240
  misc_feature (1)..(313): NCBI GI NO: 30698206 NR Description: transducin / WD-40 repeat protein family
  misc_feature (1)..(313): NCBI GI NO: 21536827 NR Description: WD repeat protein-like [Arabidopsis thaliana]
  misc_feature (1)..(302): NCBI GI NO: 15241434 NR Description: putative protein; protein id: At5g14530
  misc_feature (1)..(303): NCBI GI NO: 28277563 NR Description: Similar to RIKEN cDNA 9430077D24 gene
  misc_feature (1)..(301): NCBI GI NO: 31232763 NR Description: ENSANGP00000013183 [Anopheles gambiae]
  misc_feature (1)..(301): NCBI GI NO: 19920938 NR Description: CG17293-PA [Drosophila melanogaster]
  misc_feature (2)..(303): NCBI GI NO: 21618713 NR Description: RIKEN cDNA 9430077D24 gene [Mus musculus]
  misc_feature (31)..(303): NCBI GI NO: 34877546 NR Description: similar to CG17293-PA [Rattus norvegicus]
MLKSMEVGLAFRDYNGRISSMDFHSKATNYLVTASDDESIRLYDTQNAVCLKTINSKKYGVELVCFTDNPNIVLYSSKNGWDESLRLLSLNDNRFLRYFKGHLDRVVCISFCSEKENFLSGSLDRTVLLWDQRAEKSQGLLRVQGRPAVSYDDQGMVFAVAYGGHIRMFDARKFEKGPFEIFSVGNNDSEAHVIKFSSDGRRILLTTKAGRVHVLDSFHGNSIASCNVKPVVTNSTLEASFSPDGNHIISGSGDGSVYAWNVRSGKVARWGSTDDEPPLVRWAPGSLMFVTGSSELSCWVPDLSKLGSFTISK

SEQ ID NO: 23818 - DNA, 481 bp, Zea mays subsp. mays
  misc_feature (1)..(481): Ceres Seq. ID no. 12633478
  misc_feature (301)..(301): n is a, c, t, g, unknown, or other
  misc_feature (305)..(305): n is a, c, t, g, unknown, or other
  misc_feature (302)..(302): n is a, c, t, g, unknown, or other
gcttctgctctcacctgtttcgctgctcgcccgatctcgcgctgccgatctgagatcgagcgamkaagctttttcatcgagatggtgcttgtactgcatgctaacagtggtaacaaaaatgcattcaaaacactaattgccgcagaatacagcggtgtcaaggttgagttggtgaaggactttcaaatgggtgtctccaacaaaactccagagttcctcaagatgaaccctattgggaagattcctgtcctggagactcctgatggtcctgtttttgagagcaatgcaattsaagatatgnnacncgcttgaaggctgataacccactttatggatcttcactgattgattatgcccatattgagcaatggattgactttgctgcaacagagattgatgcaaacattggaaagtggttgtacccacggatggggttttatccccatgctggtgtggtagaagaatcaactattgctgcctt

SEQ ID NO: 23819 - protein, 103 aa, Zea mays subsp. mays
  peptide (1)..(103): Ceres Seq. ID no. 12633479
  misc_feature (28)..(97): NCBI GI NO: 13626515 NR Description: Elongation factor 1-gamma
  misc_feature (37)..(97): NCBI GI NO: 29367403 NR Description: elongation factor 1 gamma-like protein
  misc_feature (31)..(97): NCBI GI NO: 29367381 NR Description: elongation factor 1 gamma-like protein
  misc_feature (28)..(97): NCBI GI NO: 13626392 NR Description: Elongation factor 1-gamma
  misc_feature (30)..(97): NCBI GI NO: 18958499 NR Description: elongation factor 1-gamma [Glycine max]
  misc_feature (28)..(97): NCBI GI NO: 14334818 NR Description: putative elongation factor 1B gamma
  misc_feature (28)..(97): NCBI GI NO: 15223649 NR Description: elongation factor 1B-gamma, putative
  misc_feature (28)..(97): NCBI GI NO: 18391048 NR Description: elongation factor 1B-gamma, putative
  misc_feature (32)..(97): NCBI GI NO: 119164 NR Description: Elongation factor 1-gamma
  misc_feature (51)..(97): NCBI GI NO: 28630336 NR Description: eukaryotic translation elongation factor 1 gamma
  misc_feature (22)..(22): Xaa is any aa, unknown or other
  misc_feature (98)..(98): Xaa is any aa, unknown or other
  misc_feature (101)..(101): Xaa is any aa, unknown or other
  misc_feature (102)..(102): Xaa is any aa, unknown or other
ASALTCFAARPISRCRSEIERXSFFIEMVLVLHANSGNKNAFKTLIAAEYSGVKVELVKDFQMGVSNKTPEFLKMNPIGKIPVLETPDGPVFESNAIXDMXXA

SEQ ID NO: 23820 - protein, 76 aa, Zea mays subsp. mays
  peptide (1)..(76): Ceres Seq. ID no. 12633480
  misc_feature (1)..(70): NCBI GI NO: 13626515 NR Description: Elongation factor 1-gamma
  misc_feature (10)..(70): NCBI GI NO: 29367403 NR Description: elongation factor 1 gamma-like protein
  misc_feature (4)..(70): NCBI GI NO: 29367381 NR Description: elongation factor 1 gamma-like protein
  misc_feature (1)..(70): NCBI GI NO: 13626392 NR Description: Elongation factor 1-gamma
  misc_feature (3)..(70): NCBI GI NO: 18958499 NR Description: elongation factor 1-gamma [Glycine max]
  misc_feature (1)..(70): NCBI GI NO: 14334818 NR Description: putative elongation factor 1B gamma
  misc_feature (1)..(70): NCBI GI NO: 15223649 NR Description: elongation factor 1B-gamma, putative
  misc_feature (1)..(70): NCBI GI NO: 18391048 NR Description: elongation factor 1B-gamma, putative
  misc_feature (5)..(70): NCBI GI NO: 119164 NR Description: Elongation factor 1-gamma
  misc_feature (24)..(70): NCBI GI NO: 28630336 NR Description: eukaryotic translation elongation factor 1 gamma
  misc_feature (71)..(71): Xaa is any aa, unknown or other
  misc_feature (74)..(74): Xaa is any aa, unknown or other
  misc_feature (75)..(75): Xaa is any aa, unknown or other
MVLVLHANSGNKNAFKTLIAAEYSGVKVELVKDFQMGVSNKTPEFLKMNPIGKIPVLETPDGPVFESNAIXDMXXA

SEQ ID NO: 23821 - DNA, 1378 bp, Zea mays subsp. mays
  misc_feature (1)..(1378): Ceres Seq. ID no. 12410879
aacacggatggaattggcgcgggcggcgggctggcagttgcgcagcaataactcccgctgcccaccggctcacctgtccttcatccgccccgatccgaccccaaatcaattccaaattcaatccggtctcagtggttggcccgccgctgccagtgccagatcgaatcggactctcggctcgtgtgcagcccaccggcgagacgccgaagctatatttttatgcccatctgatccgatgcgtggtgtggcgtcgtctccgcttttactagatcatcagtagccagctcaggagccgagcctggtcagggtagccaagcccatcccggtcctctcccggcgtcttctccctccgcaccgcggctccgggcgatggcgggcgtcggctccgcgctgcgtcggctctacctctccgtctacaactgggtcgtcttcttcggatgggcgcaggtgctgtactacgcggtcctgacgctgcgtttgagcgggcacaaggccgtctacgccgccgtcgagaggccgctgcagttcgcgcagacagccgccatcatggagatcgttcatgggctcgtagggttggtgaggtctccggtctctgcaactcttccacagattggatccaggttgttccttacgtggggtgtcttgtggagttttcctgagacccagtcacaccttcttgttactaccctggtcataagctggtctatcactgagatcatcagatactctttctttggaacgaaggaggcatttggctttgcgccttcctggttattatggcttaggtacagcacctttatgttgttgtatcctactggcatctctagtgaagttggtctgatctacattgccttgccttacatgaaggcatcggagaaatactgtattaggatgcccaacaaatggaacttctcatacgattacttctattcatctgtccttgccctcctgatctatgttccaggaagcccacacatgtaccgttacatgctctcccagaggaagaaggcgctatcaaaggccaaagcggcgtgatgatgccgcgcaagcaagggaatcggtggactggtttgcgtgatggatgtcggaacgtgttcaagttttcgacatccccagtagaatctagtggtcgggggatatatattactagaatggggctcttcatatgaactgccccgtatgcgtaatgtgttgtaccggagtcatcatttcagatatcagctgttgcgtggttaaatcgtagtttgcttccggatcacccatcagttggggggtggatttccatgttgattatatatggcaatgcgttccgcatccttccctcaactggtgctgtgctctcttgtttctagcgtacaatgtatgatggattttatcc

SEQ ID NO: 23822 - protein, 221 aa, Zea mays subsp. mays
  peptide (1)..(221): Ceres Seq. ID no. 12410880
  misc_feature (59)..(219): Pfam Name: Pfam Description:  Protein tyrosine phosphatase-like protein
  misc_feature (1)..(221): NCBI GI NO: 38344078 NR Description: OSJNBb0056F09.1
  misc_feature (1)..(219): NCBI GI NO: 22326707 NR Description: putative protein phosphatase; protein id:At5g10480
  misc_feature (4)..(219): NCBI GI NO: 34895862 NR Description: P0009G03.11
  misc_feature (59)..(221): NCBI GI NO: 34895852 NR Description: P0009G03.5
  misc_feature (1)..(202): NCBI GI NO: 34895856 NR Description: P0009G03.7
  misc_feature (1)..(193): NCBI GI NO: 34895854 NR Description: P0009G03.6
  misc_feature (1)..(200): NCBI GI NO: 11358666 NR Description: probable protein phosphatase - Arabidopsis thaliana
  misc_feature (1)..(216): NCBI GI NO: 20892371 NR Description: similar to protein tyrosine phosphatase-likeprotein PTPLB
  misc_feature (1)..(216): NCBI GI NO: 34869216 NR Description: similar to protein tyrosine phosphatase-likeprotein PTPLB
  misc_feature (8)..(215): NCBI GI NO: 7305421 NR Description: protein tyrosine phosphatase-like
MAGVGSALRRLYLSVYNWVVFFGWAQVLYYAVLTLRLSGHKAVYAAVERPLQFAQTAAIMEIVHGLVGLVRSPVSATLPQIGSRLFLTWGVLWSFPETQSHLLVTTLVISWSITEIIRYSFFGTKEAFGFAPSWLLWLRYSTFMLLYPTGISSEVGLIYIALPYMKASEKYCIRMPNKWNFSYDYFYSSVLALLIYVPGSPHMYRYMLSQRKKALSKAKAA

SEQ ID NO: 23823 - protein, 162 aa, Zea mays subsp. mays
  peptide (1)..(162): Ceres Seq. ID no. 12410881
  misc_feature (1)..(160): Pfam Name: Pfam Description:  Protein tyrosine phosphatase-like protein
  misc_feature (1)..(162): NCBI GI NO: 38344078 NR Description: OSJNBb0056F09.1
  misc_feature (1)..(160): NCBI GI NO: 22326707 NR Description: putative protein phosphatase; protein id:At5g10480
  misc_feature (1)..(160): NCBI GI NO: 34895862 NR Description: P0009G03.11
  misc_feature (1)..(162): NCBI GI NO: 34895852 NR Description: P0009G03.5
  misc_feature (1)..(143): NCBI GI NO: 34895856 NR Description: P0009G03.7
  misc_feature (1)..(134): NCBI GI NO: 34895854 NR Description: P0009G03.6
  misc_feature (1)..(141): NCBI GI NO: 11358666 NR Description: probable protein phosphatase - Arabidopsis thaliana
  misc_feature (1)..(157): NCBI GI NO: 20892371 NR Description: similar to protein tyrosine phosphatase-likeprotein PTPLB
  misc_feature (1)..(157): NCBI GI NO: 34869216 NR Description: similar to protein tyrosine phosphatase-likeprotein PTPLB
  misc_feature (1)..(156): NCBI GI NO: 7305421 NR Description: protein tyrosine phosphatase-like
MEIVHGLVGLVRSPVSATLPQIGSRLFLTWGVLWSFPETQSHLLVTTLVISWSITEIIRYSFFGTKEAFGFAPSWLLWLRYSTFMLLYPTGISSEVGLIYIALPYMKASEKYCIRMPNKWNFSYDYFYSSVLALLIYVPGSPHMYRYMLSQRKKALSKAKAA

SEQ ID NO: 23824 - DNA, 1455 bp, Zea mays subsp. mays
  misc_feature (1)..(1455): Ceres Seq. ID no. 12373785
gaaatttccgatttctgccagatccaatcgcggctaccatcatggcagaagcggccggcggcggacccctgctccccgaggaactcattatctgggagatcctaacccgtctgccggcgaagcccctcctccgatgccgcgctgtctgcctctcctggtgccgccgactcacctccgacgccaaattcctcctcgcccaccaccgtcgccagccctcgctcccgctcctcactgaaggggacaggagcaccgaggagaggaggatcgacgccctggactaccgcaccggcgagcggcgccccatcgcgcggacaacaggccggaccgccgccaacggggacgacctgaacgtgctggcttcctgcgaaggcctcctcatcctcctcgccaacggcggcctccagatctgcaacccggcgacccgccagcgcgcgccactcactcttctccacggcgcctattgcatctccgcgctttaccctcacatcccgtccaggtcgtaccgtgtgctctgctgcttcgagagagccgaggacggccacgccgtgtaccacgtgcacaccgtcgggtcgcgcgagctcaggtgcgtcggagaacctcccgcgccgtgggcgtccggggatatggtaatggcgatgccgatgatggtgtaccttcacccgcacgtcgtggcagacagcaggatctactggcagccggtaaagctgcccgtcggcaacggcaaggtcaacaacatgctcgtgttcgacacaatgaccgagtccttccagcaactgctgtcgcccgtggagggcccctttcttgaactgtttcagatgaacagcggcgcccttggattgtaccactgccgcagcggcaaggttgatctttgggtgttacaggatcacgggagctggtcctggtcgatgaaccaccggatcaaattggacgtgatgtttttctccctgctgccggtgctggacccggaaggagatgtgctagtgctttctaaaagaggggaaacaggcatcctgtggcaacatctgcatcacatctctggtgtcaatggcagtttgctggccctgtatcaatggagcgcttatctgaagcttagcaggcataggctcaaagaaagtctagtccaccatgacttcttctcgatggaaggtaatgagggtggtgtggatgaaaaaccattgttcgatggcttgtcaactgtggcattgcttcgtgatgataattctgagccacattgagaaacaaaggtattactcaagctgtttcatctcatcaggatggagtcactcctgcctagtaataacagcactgcagattagtaataacctgaaactatacctcgagtctgatttttcccttttcacatgagtcataaacactgttatgactggtattttattttcccttttcacgtgagtcatgaacactgttattactggtattttattttccattttc

SEQ ID NO: 23825 - protein, 410 aa, Zea mays subsp. mays
  peptide (1)..(410): Ceres Seq. ID no. 12373786
  misc_feature (20)..(67): Pfam Name: Pfam Description:  F-box domain
  misc_feature (20)..(380): NCBI GI NO: 37533944 NR Description: hypothetical protein
  misc_feature (14)..(380): NCBI GI NO: 38346045 NR Description: OSJNBa0059D20.17
  misc_feature (24)..(380): NCBI GI NO: 38346536 NR Description: OSJNBa0040D17.11
  misc_feature (17)..(396): NCBI GI NO: 38344215 NR Description: OSJNBb0026E15.3
  misc_feature (6)..(384): NCBI GI NO: 37530720 NR Description: unknown protein
  misc_feature (24)..(380): NCBI GI NO: 38346527 NR Description: OSJNBa0040D17.2
  misc_feature (6)..(310): NCBI GI NO: 34905158 NR Description: P0700D12.24
  misc_feature (267)..(337): NCBI GI NO: 25553615 NR Description: OJ1046_F10.9
  misc_feature (23)..(76): NCBI GI NO: 25553615 NR Description: OJ1046_F10.9
NFRFLPDPIAATIMAEAAGGGPLLPEELIIWEILTRLPAKPLLRCRAVCLSWCRRLTSDAKFLLAHHRRQPSLPLLTEGDRSTEERRIDALDYRTGERRPIARTTGRTAANGDDLNVLASCEGLLILLANGGLQICNPATRQRAPLTLLHGAYCISALYPHIPSRSYRVLCCFERAEDGHAVYHVHTVGSRELRCVGEPPAPWASGDMVMAMPMMVYLHPHVVADSRIYWQPVKLPVGNGKVNNMLVFDTMTESFQQLLSPVEGPFLELFQMNSGALGLYHCRSGKVDLWVLQDHGSWSWSMNHRIKLDVMFFSLLPVLDPEGDVLVLSKRGETGILWQHLHHISGVNGSLLALYQWSAYLKLSRHRLKESLVHHDFFSMEGNEGGVDEKPLFDGLSTVALLRDDNSEPH

SEQ ID NO: 23826 - protein, 397 aa, Zea mays subsp. mays
  peptide (1)..(397): Ceres Seq. ID no. 12373787
  misc_feature (7)..(54): Pfam Name: Pfam Description:  F-box domain
  misc_feature (7)..(367): NCBI GI NO: 37533944 NR Description: hypothetical protein
  misc_feature (1)..(367): NCBI GI NO: 38346045 NR Description: OSJNBa0059D20.17
  misc_feature (11)..(367): NCBI GI NO: 38346536 NR Description: OSJNBa0040D17.11
  misc_feature (4)..(383): NCBI GI NO: 38344215 NR Description: OSJNBb0026E15.3
  misc_feature (1)..(371): NCBI GI NO: 37530720 NR Description: unknown protein
  misc_feature (11)..(367): NCBI GI NO: 38346527 NR Description: OSJNBa0040D17.2
  misc_feature (1)..(297): NCBI GI NO: 34905158 NR Description: P0700D12.24
  misc_feature (254)..(324): NCBI GI NO: 25553615 NR Description: OJ1046_F10.9
  misc_feature (10)..(63): NCBI GI NO: 25553615 NR Description: OJ1046_F10.9
MAEAAGGGPLLPEELIIWEILTRLPAKPLLRCRAVCLSWCRRLTSDAKFLLAHHRRQPSLPLLTEGDRSTEERRIDALDYRTGERRPIARTTGRTAANGDDLNVLASCEGLLILLANGGLQICNPATRQRAPLTLLHGAYCISALYPHIPSRSYRVLCCFERAEDGHAVYHVHTVGSRELRCVGEPPAPWASGDMVMAMPMMVYLHPHVVADSRIYWQPVKLPVGNGKVNNMLVFDTMTESFQQLLSPVEGPFLELFQMNSGALGLYHCRSGKVDLWVLQDHGSWSWSMNHRIKLDVMFFSLLPVLDPEGDVLVLSKRGETGILWQHLHHISGVNGSLLALYQWSAYLKLSRHRLKESLVHHDFFSMEGNEGGVDEKPLFDGLSTVALLRDDNSEPH

SEQ ID NO: 23827 - DNA, 1149 bp, Zea mays subsp. mays
  misc_feature (1)..(1149): Ceres Seq. ID no. 12406482
aacaaatagggttttatcattttgggaaggagcagatcaggatccattaacacccctacgtacgcctttcctctggaaacccttctctcgcctgcctctcccccgccgcgccgccacttcccctctcccgtcaactccggcttccgcgcgaggtcgagctagcgtttggagttctcgagacctgctgtgatggcgacagagcaagcggcggagaactacacggtggaggacctcgtggccctgaacccctacaaccccgacatcctcaacgacctcgagaagttcgtcaatgagcaggtctcatctcagacatataacttggatgcaaatctcagccttcttcgcttgtaccagtttgagccagaaaggatgagcatacagattgtggcccacatactgattaaggctctcatggcaatgccagcccctgacttcagtttgtgcttattcttaatccctgaacatgtgcaaatggaggagcaattcaaggtattgatagttctttctcactacctagagactgctaggttcagtcaattttgggatgaagcagcaaagaaccgccacatatcggaagcagtgccaggtttcgaacaagcaatccaatcctatgcgattcatgtactttccttgacataccagaaagttccaaggcctattcttgtagaggcaatcaacatcgaaggtctcgcgttggacaagtttcttgagtaccatgccgcgaactcaggttgggtgattgagaagggtgggcagtctcaagtgattgttcttccgcgtaatgagttcaatcacccagagctcaagaagaacacagccgatatccttccgtttgaacacgtaacacgcatattccctgtccttggctgattcaggcgtgctgagagatctatacaaaactcagcgagtgaagcttctcttagtcattgcatcttcagtttgtagtgtaccctattgagattatctcggtataccagtcctttttatgccggagttggtttctgcaacctatggttattgttattactataacgaaatgctcagatatgagattggtcttgtccttcgaaggaggctgtcaggtccattgtttgagaacgtgtgttgtgaatggtgtgtgctgggaatgagtctcattagctatcgccg

SEQ ID NO: 23828 - protein, 226 aa, Zea mays subsp. mays
  peptide (1)..(226): Ceres Seq. ID no. 12406483
  misc_feature (1)..(225): Pfam Name: eIF-3 p25 Pfam Description: Eukaryotic translation initiation factor 3 subunit 11
  misc_feature (1)..(225): NCBI GI NO: 23396617 NR Description: Eukaryotic translation initiation factor 3 subunit11
  misc_feature (5)..(226): NCBI GI NO: 15234123 NR Description: putative protein; protein id: At4g33250
  misc_feature (15)..(221): NCBI GI NO: 21312044 NR Description: RIKEN cDNA 1200009C21 [Mus musculus]
  misc_feature (15)..(221): NCBI GI NO: 27730981 NR Description: similar to RIKEN cDNA 1200009C21
  misc_feature (15)..(221): NCBI GI NO: 10801345 NR Description: muscle specific gene [Homo sapiens]
  misc_feature (15)..(221): NCBI GI NO: 5114051 NR Description: HSPC029 [Homo sapiens]
  misc_feature (8)..(218): NCBI GI NO: 19922704 NR Description: CG10306-PA [Drosophila melanogaster]
  misc_feature (8)..(182): NCBI GI NO: 38047673 NR Description: similar to Drosophila melanogaster CG10306
  misc_feature (54)..(221): NCBI GI NO: 20380678 NR Description: Similar to RIKEN cDNA 1200009C21 gene
  misc_feature (164)..(226): NCBI GI NO: 20453126 NR Description: AT4g33250/F17M5_10 [Arabidopsis thaliana]
MATEQAAENYTVEDLVALNPYNPDILNDLEKFVNEQVSSQTYNLDANLSLLRLYQFEPERMSIQIVAHILIKALMAMPAPDFSLCLFLIPEHVQMEEQFKVLIVLSHYLETARFSQFWDEAAKNRHISEAVPGFEQAIQSYAIHVLSLTYQKVPRPILVEAINIEGLALDKFLEYHAANSGWVIEKGGQSQVIVLPRNEFNHPELKKNTADILPFEHVTRIFPVLG

SEQ ID NO: 23829 - protein, 166 aa, Zea mays subsp. mays
  peptide (1)..(166): Ceres Seq. ID no. 12406484
  misc_feature (1)..(165): Pfam Name: eIF-3 p25 Pfam Description: Eukaryotic translation initiation factor 3 subunit 11
  misc_feature (1)..(165): NCBI GI NO: 23396617 NR Description: Eukaryotic translation initiation factor 3 subunit11
  misc_feature (1)..(166): NCBI GI NO: 15234123 NR Description: putative protein; protein id: At4g33250
  misc_feature (1)..(161): NCBI GI NO: 21312044 NR Description: RIKEN cDNA 1200009C21 [Mus musculus]
  misc_feature (1)..(161): NCBI GI NO: 27730981 NR Description: similar to RIKEN cDNA 1200009C21
  misc_feature (1)..(161): NCBI GI NO: 10801345 NR Description: muscle specific gene [Homo sapiens]
  misc_feature (1)..(161): NCBI GI NO: 5114051 NR Description: HSPC029 [Homo sapiens]
  misc_feature (1)..(158): NCBI GI NO: 19922704 NR Description: CG10306-PA [Drosophila melanogaster]
  misc_feature (1)..(122): NCBI GI NO: 38047673 NR Description: similar to Drosophila melanogaster CG10306
  misc_feature (1)..(161): NCBI GI NO: 20380678 NR Description: Similar to RIKEN cDNA 1200009C21 gene
  misc_feature (104)..(166): NCBI GI NO: 20453126 NR Description: AT4g33250/F17M5_10 [Arabidopsis thaliana]
MSIQIVAHILIKALMAMPAPDFSLCLFLIPEHVQMEEQFKVLIVLSHYLETARFSQFWDEAAKNRHISEAVPGFEQAIQSYAIHVLSLTYQKVPRPILVEAINIEGLALDKFLEYHAANSGWVIEKGGQSQVIVLPRNEFNHPELKKNTADILPFEHVTRIFPVLG

SEQ ID NO: 23830 - protein, 152 aa, Zea mays subsp. mays
  peptide (1)..(152): Ceres Seq. ID no. 12406485
  misc_feature (1)..(151): Pfam Name: eIF-3 p25 Pfam Description: Eukaryotic translation initiation factor 3 subunit 11
  misc_feature (1)..(151): NCBI GI NO: 23396617 NR Description: Eukaryotic translation initiation factor 3 subunit11
  misc_feature (1)..(152): NCBI GI NO: 15234123 NR Description: putative protein; protein id: At4g33250
  misc_feature (1)..(147): NCBI GI NO: 21312044 NR Description: RIKEN cDNA 1200009C21 [Mus musculus]
  misc_feature (1)..(147): NCBI GI NO: 27730981 NR Description: similar to RIKEN cDNA 1200009C21
  misc_feature (1)..(147): NCBI GI NO: 10801345 NR Description: muscle specific gene [Homo sapiens]
  misc_feature (1)..(147): NCBI GI NO: 5114051 NR Description: HSPC029 [Homo sapiens]
  misc_feature (1)..(144): NCBI GI NO: 19922704 NR Description: CG10306-PA [Drosophila melanogaster]
  misc_feature (1)..(108): NCBI GI NO: 38047673 NR Description: similar to Drosophila melanogaster CG10306
  misc_feature (1)..(147): NCBI GI NO: 20380678 NR Description: Similar to RIKEN cDNA 1200009C21 gene
  misc_feature (90)..(152): NCBI GI NO: 20453126 NR Description: AT4g33250/F17M5_10 [Arabidopsis thaliana]
MAMPAPDFSLCLFLIPEHVQMEEQFKVLIVLSHYLETARFSQFWDEAAKNRHISEAVPGFEQAIQSYAIHVLSLTYQKVPRPILVEAINIEGLALDKFLEYHAANSGWVIEKGGQSQVIVLPRNEFNHPELKKNTADILPFEHVTRIFPVLG

SEQ ID NO: 23831 - DNA, 1731 bp, Zea mays subsp. mays
  misc_feature (1)..(1731): Ceres Seq. ID no. 12345243
aagaattgttcggttacattttgcctgtttgctgtttttttcgtcggttcgcctcgtcttctccgcctggcccgagactcacactcaattcggtcgttttctgcattaacggagtcaggcccaggcctaacctcagtacatcagagcagccgaacacgcccgcggcaaccgccgccattctaccccaggtcggacggacccttgccggagacgagcacacgccacagcaggaattatcgggcgtagagcagcgcgaagcgagagatccaatggcggcggcggaggggcagtgggtgctcatggcaacggggcggacgccgaccaacattgcggtgatcaagtactgggggaagcgggacgaggcgctcatcctccccatcaacgacagcatcagcgtaacgctcgaccccgaccatctctccgccaccaccactgtcgccgtcagcccctcattcccttccgaccgcatgtggctcaatggcaaggagatctcgctattaggaggaaggtttcagagctgcctcagagaaatcagaaagcgtgctcgtgactttgaggacaaggagaagggcgtcaagatcaagaaagaggactgggacaagttgcatgttcacatagcctcgtacaacaacttccccactgctgctggtttggcctcttcagctgctggccttgcctgtttcgttttcacccttggaaagctgatgaatgcgaaagaagattatggagaactttcttcaatagcaaggcagggatctgggagtgcatgccgcagtatatatggtggttttgtgaaatggtgcatgggagaaaaagatgatggaagtgacagtattgccgtgcagcttgctgacgaaacacactggaatgatcttgtaattattattgcagtggtcagttcaaagcagaaggaaaccagtagcaccagtgggatgcgagatagtgttgaaacaagtcctctcttgcagtacagggcccagacagtggtgccaggtcgggtgttgaaaatggaagaagctatcaagaaccgtgactttgaatcctttgccaaattaacttgtgcggatagcaaccagtttcatgctgtatgcttagacacgagccctcctatcttctatatgaatgacacgtcacaccgaataattagccttgtggaaaaatggaaccactcagaaggaaccccacaggtcgcttacaccttcgatgctgggccaaacgctgttctaatcgcacaaaaccgtaaaactgcagcacatctcctccagaagctcctatactatttccctccacaggataatgatttgagcagctatctggttggcgataaatcgattctaggtgtcgccggattgcattccatgaaagacgtcgaggctcttccagcacctccagagacgaagataccggatcagaaattcaagggcgatgttagctacttcatctgcagcaggcttggcgctggtccaaaggttgtttctgacgaaggtcaagcattgatcgattcagtcaccggacttccaaaaggcgtgtagttctagatttaggttggaataatggtttaagctggggattaaagacaatggtatcatacaagcaacctgggccgggaagatacattaggctcgtgtcacgttggtttcgtgctgattgacttgacggtgtattggtcatgtattatgcatttgcgctggtgttcgttgctgtccaataaagatagaacacgttctcgcc

SEQ ID NO: 23832 - protein, 509 aa, Zea mays subsp. mays
  peptide (1)..(509): Ceres Seq. ID no. 12345244
  misc_feature (97)..(507): NCBI GI NO: 16417950 NR Description: mevalonate disphosphate decarboxylase
  misc_feature (93)..(507): NCBI GI NO: 18410026 NR Description: DIPHOSPHOMEVALONATE DECARBOXYLASE - like protein
  misc_feature (93)..(507): NCBI GI NO: 21593243 NR Description: diphosphomevalonate decarboxylase-like protein
  misc_feature (93)..(507): NCBI GI NO: 15224931 NR Description: mevalonate diphosphate decarboxylase
  misc_feature (93)..(507): NCBI GI NO: 11281655 NR Description: diphosphomevalonate decarboxylase (EC 4
  misc_feature (100)..(507): NCBI GI NO: 21593039 NR Description: mevalonate diphosphate decarboxylase
  misc_feature (92)..(507): NCBI GI NO: 20149736 NR Description: mevalonate
  misc_feature (92)..(507): NCBI GI NO: 26354448 NR Description: unnamed protein product [Mus musculus]
  misc_feature (92)..(507): NCBI GI NO: 23814095 NR Description: Diphosphomevalonate decarboxylase
  misc_feature (92)..(507): NCBI GI NO: 13592005 NR Description: mevalonate pyrophosphate decarboxylase
ELFGYILPVCCFFRRFASSSPPGPRLTLNSVVFCINGVRPRPNLSTSEQPNTPAATAAILPQVGRTLAGDEHTPQQELSGVEQREARDPMAAAEGQWVLMATGRTPTNIAVIKYWGKRDEALILPINDSISVTLDPDHLSATTTVAVSPSFPSDRMWLNGKEISLLGGRFQSCLREIRKRARDFEDKEKGVKIKKEDWDKLHVHIASYNNFPTAAGLASSAAGLACFVFTLGKLMNAKEDYGELSSIARQGSGSACRSIYGGFVKWCMGEKDDGSDSIAVQLADETHWNDLVIIIAVVSSKQKETSSTSGMRDSVETSPLLQYRAQTVVPGRVLKMEEAIKNRDFESFAKLTCADSNQFHAVCLDTSPPIFYMNDTSHRIISLVEKWNHSEGTPQVAYTFDAGPNAVLIAQNRKTAAHLLQKLLYYFPPQDNDLSSYLVGDKSILGVAGLHSMKDVEALPAPPETKIPDQKFKGDVSYFICSRLGAGPKVVSDEGQALIDSVTGLPKGV

SEQ ID NO: 23833 - protein, 420 aa, Zea mays subsp. mays
  peptide (1)..(420): Ceres Seq. ID no. 12345245
  misc_feature (8)..(418): NCBI GI NO: 16417950 NR Description: mevalonate disphosphate decarboxylase
  misc_feature (4)..(418): NCBI GI NO: 18410026 NR Description: DIPHOSPHOMEVALONATE DECARBOXYLASE - like protein
  misc_feature (4)..(418): NCBI GI NO: 21593243 NR Description: diphosphomevalonate decarboxylase-like protein
  misc_feature (4)..(418): NCBI GI NO: 15224931 NR Description: mevalonate diphosphate decarboxylase
  misc_feature (4)..(418): NCBI GI NO: 11281655 NR Description: diphosphomevalonate decarboxylase (EC 4
  misc_feature (11)..(418): NCBI GI NO: 21593039 NR Description: mevalonate diphosphate decarboxylase
  misc_feature (3)..(418): NCBI GI NO: 20149736 NR Description: mevalonate
  misc_feature (3)..(418): NCBI GI NO: 26354448 NR Description: unnamed protein product [Mus musculus]
  misc_feature (3)..(418): NCBI GI NO: 23814095 NR Description: Diphosphomevalonate decarboxylase
  misc_feature (3)..(418): NCBI GI NO: 13592005 NR Description: mevalonate pyrophosphate decarboxylase
MAAAEGQWVLMATGRTPTNIAVIKYWGKRDEALILPINDSISVTLDPDHLSATTTVAVSPSFPSDRMWLNGKEISLLGGRFQSCLREIRKRARDFEDKEKGVKIKKEDWDKLHVHIASYNNFPTAAGLASSAAGLACFVFTLGKLMNAKEDYGELSSIARQGSGSACRSIYGGFVKWCMGEKDDGSDSIAVQLADETHWNDLVIIIAVVSSKQKETSSTSGMRDSVETSPLLQYRAQTVVPGRVLKMEEAIKNRDFESFAKLTCADSNQFHAVCLDTSPPIFYMNDTSHRIISLVEKWNHSEGTPQVAYTFDAGPNAVLIAQNRKTAAHLLQKLLYYFPPQDNDLSSYLVGDKSILGVAGLHSMKDVEALPAPPETKIPDQKFKGDVSYFICSRLGAGPKVVSDEGQALIDSVTGLPKGV

SEQ ID NO: 23834 - protein, 410 aa, Zea mays subsp. mays
  peptide (1)..(410): Ceres Seq. ID no. 12345246
  misc_feature (1)..(408): NCBI GI NO: 16417950 NR Description: mevalonate disphosphate decarboxylase
  misc_feature (1)..(408): NCBI GI NO: 18410026 NR Description: DIPHOSPHOMEVALONATE DECARBOXYLASE - like protein
  misc_feature (1)..(408): NCBI GI NO: 21593243 NR Description: diphosphomevalonate decarboxylase-like protein
  misc_feature (1)..(408): NCBI GI NO: 15224931 NR Description: mevalonate diphosphate decarboxylase
  misc_feature (1)..(408): NCBI GI NO: 11281655 NR Description: diphosphomevalonate decarboxylase (EC 4
  misc_feature (1)..(408): NCBI GI NO: 21593039 NR Description: mevalonate diphosphate decarboxylase
  misc_feature (1)..(408): NCBI GI NO: 20149736 NR Description: mevalonate
  misc_feature (1)..(408): NCBI GI NO: 26354448 NR Description: unnamed protein product [Mus musculus]
  misc_feature (1)..(408): NCBI GI NO: 23814095 NR Description: Diphosphomevalonate decarboxylase
  misc_feature (1)..(408): NCBI GI NO: 13592005 NR Description: mevalonate pyrophosphate decarboxylase
MATGRTPTNIAVIKYWGKRDEALILPINDSISVTLDPDHLSATTTVAVSPSFPSDRMWLNGKEISLLGGRFQSCLREIRKRARDFEDKEKGVKIKKEDWDKLHVHIASYNNFPTAAGLASSAAGLACFVFTLGKLMNAKEDYGELSSIARQGSGSACRSIYGGFVKWCMGEKDDGSDSIAVQLADETHWNDLVIIIAVVSSKQKETSSTSGMRDSVETSPLLQYRAQTVVPGRVLKMEEAIKNRDFESFAKLTCADSNQFHAVCLDTSPPIFYMNDTSHRIISLVEKWNHSEGTPQVAYTFDAGPNAVLIAQNRKTAAHLLQKLLYYFPPQDNDLSSYLVGDKSILGVAGLHSMKDVEALPAPPETKIPDQKFKGDVSYFICSRLGAGPKVVSDEGQALIDSVTGLPKGV

SEQ ID NO: 23835 - DNA, 1984 bp, Zea mays subsp. mays
  misc_feature (1)..(1984): Ceres Seq. ID no. 12595533
agaagtttcagatcctcgcatcgtccgcaccttatcctctcgactttacagtacctgctctcagctcctccctatctcaatggcatccgcgaatgccatctccaccgcctcccccttccggcccctctctcagggcagggcgacgaggtcacagcggttcgtggtgcgtgcgaacgccaaagacattgcctttgaccagaaatccagggcagcgctgcaggccggcgtcgagaagctcgcaaacgccgtcggtgtcaccctcgggccacgagggaggaatgtggtgctcgatgagtacggcaaccccaaagttgtgaatgatggagtcactattgcccgtgctattgagctgtatgatccaatggaaaatgctggtgcagcattgattcgtgaggttgctagcaagaccaatgattcagctggtgatgggactacaactgcatgcgtccttgctcgtgaaatcatcaagctaggccttctgagtgtaacatctggtgcaaatcctgtatcactaaagaaaggaatagacaaaactgtgcagggcctaattcaggagcttgagaataagtctagaccaatcaagggtggtggtgatatcaaagctgttgcatctatctctgctggcaatgatgaatttatcggatccatgattgctgaagcaattgacaaagtggggcctgatggtgttctatcaattgaatcctcctcgtcttttgagaccactgttgaagttgaagaaggaatggagattgaccgcggttatatttccccacaatttgtgacaaaccttgagaaatcaattgtggagtttgagaattgtaaggttcttattactgatcagaagatcacaagcataaaggaaatccttccgattttggagaagaccacacagctgagagcccctctgttcattattgctgaggacattactggtgaagctttggcaactcttgttgttaacaagcttcgaggaattctcaatgttgcagcgattaaggctccaagttttggtgagcggcggaaggctgtacttcaggacattgccatcgtcacaggtgctgagttcctagcaaaagatcttggtttgttggttgaaaatgctacagaggaacaacttggcacagcaaggaaagtcacgatacatcagactacaacaaccctcatagcagatgcagccagtaaagatgagatccaggcgagaattgcacaactgaagaaggagcttgctgagactgattcagtttatgatactgagaaattggccgagagaattgctaagcttgccggtggtgttgctgttatcaaggttggagctgcaactgagactgagcttgaggaccgccagctaagaattgaggatgcaaaaaatgccacttttgcagctatagaggagggcattgttccaggaggtggtgcggcatatgtgcacctatctacggttgtccctaagatcaaagaagcaattgaggaccctgatgagcgtcttggcgctgatattattcaaaaggcattggtagcacctgcttcattgattgcacacaatgctggagtagagggtgaagtagttgtcgagaagatcaaggacagcgattgggaggtgggctacaatgcaatgactgacaagtacgagaacctgatggaggctggtgtgatcgaccctgccaaggtgaccaggtgtgcgctccagaatgcggcctcagtagctggaatggtcctaaccacacaggccattgttgttgagaagccaaagccgaagcctcaagtggcagagccaccggagggagcccttaccgtttaaaacttaacgttcttgaggctgctgtccagacggttcagatcagttgagagggtagaactttggtttgagaattttggttcagatccactgggagttatagagtaggattgctatttttcagacgaagagtaattttactctggtctgaacttatccgaatcgaagacatttgcatcaccatttttt

SEQ ID NO: 23836 - protein, 598 aa, Zea mays subsp. mays
  peptide (1)..(598): Ceres Seq. ID no. 12595534
  misc_feature (79)..(582): Pfam Name: Pfam Description:  TCP-1/cpn60 chaperonin family
  misc_feature (57)..(598): NCBI GI NO: 134102 NR Description: RuBisCO subunit binding-protein alpha subunit
  misc_feature (54)..(598): NCBI GI NO: 31193919 NR Description: putative rubisco subunit binding-protein alphasubunit precursor
  misc_feature (27)..(598): NCBI GI NO: 1710807 NR Description: RuBisCO subunit binding-protein alpha subunit
  misc_feature (52)..(596): NCBI GI NO: 1351030 NR Description: RuBisCO subunit binding-protein alpha subunit
  misc_feature (27)..(596): NCBI GI NO: 15226314 NR Description: putative rubisco subunit binding-protein alphasubunit
  misc_feature (27)..(596): NCBI GI NO: 21554572 NR Description: putative rubisco subunit binding-protein alphasubunit
  misc_feature (27)..(598): NCBI GI NO: 3790441 NR Description: chaperonin 60 alpha subunit [Canavalia lineata]
  misc_feature (51)..(596): NCBI GI NO: 99801 NR Description: chaperonine 60K alpha chain - rape (fragment)
  misc_feature (27)..(596): NCBI GI NO: 464727 NR Description: RuBisCO subunit binding-protein alpha subunit
  misc_feature (69)..(564): NCBI GI NO: 5650721 NR Description: rubisco subunit binding-protein alpha subunit
EVSDPRIVRTLSSRLYSTCSQLLPISMASANAISTASPFRPLSQGRATRSQRFVVRANAKDIAFDQKSRAALQAGVEKLANAVGVTLGPRGRNVVLDEYGNPKVVNDGVTIARAIELYDPMENAGAALIREVASKTNDSAGDGTTTACVLAREIIKLGLLSVTSGANPVSLKKGIDKTVQGLIQELENKSRPIKGGGDIKAVASISAGNDEFIGSMIAEAIDKVGPDGVLSIESSSSFETTVEVEEGMEIDRGYISPQFVTNLEKSIVEFENCKVLITDQKITSIKEILPILEKTTQLRAPLFIIAEDITGEALATLVVNKLRGILNVAAIKAPSFGERRKAVLQDIAIVTGAEFLAKDLGLLVENATEEQLGTARKVTIHQTTTTLIADAASKDEIQARIAQLKKELAETDSVYDTEKLAERIAKLAGGVAVIKVGAATETELEDRQLRIEDAKNATFAAIEEGIVPGGGAAYVHLSTVVPKIKEAIEDPDERLGADIIQKALVAPASLIAHNAGVEGEVVVEKIKDSDWEVGYNAMTDKYENLMEAGVIDPAKVTRCALQNAASVAGMVLTTQAIVVEKPKPKPQVAEPPEGALTV

SEQ ID NO: 23837 - protein, 572 aa, Zea mays subsp. mays
  peptide (1)..(572): Ceres Seq. ID no. 12595535
  misc_feature (53)..(556): Pfam Name: Pfam Description:  TCP-1/cpn60 chaperonin family
  misc_feature (31)..(572): NCBI GI NO: 134102 NR Description: RuBisCO subunit binding-protein alpha subunit
  misc_feature (28)..(572): NCBI GI NO: 31193919 NR Description: putative rubisco subunit binding-protein alphasubunit precursor
  misc_feature (1)..(572): NCBI GI NO: 1710807 NR Description: RuBisCO subunit binding-protein alpha subunit
  misc_feature (26)..(570): NCBI GI NO: 1351030 NR Description: RuBisCO subunit binding-protein alpha subunit
  misc_feature (1)..(570): NCBI GI NO: 15226314 NR Description: putative rubisco subunit binding-protein alphasubunit
  misc_feature (1)..(570): NCBI GI NO: 21554572 NR Description: putative rubisco subunit binding-protein alphasubunit
  misc_feature (1)..(572): NCBI GI NO: 3790441 NR Description: chaperonin 60 alpha subunit [Canavalia lineata]
  misc_feature (25)..(570): NCBI GI NO: 99801 NR Description: chaperonine 60K alpha chain - rape (fragment)
  misc_feature (1)..(570): NCBI GI NO: 464727 NR Description: RuBisCO subunit binding-protein alpha subunit
  misc_feature (43)..(538): NCBI GI NO: 5650721 NR Description: rubisco subunit binding-protein alpha subunit
MASANAISTASPFRPLSQGRATRSQRFVVRANAKDIAFDQKSRAALQAGVEKLANAVGVTLGPRGRNVVLDEYGNPKVVNDGVTIARAIELYDPMENAGAALIREVASKTNDSAGDGTTTACVLAREIIKLGLLSVTSGANPVSLKKGIDKTVQGLIQELENKSRPIKGGGDIKAVASISAGNDEFIGSMIAEAIDKVGPDGVLSIESSSSFETTVEVEEGMEIDRGYISPQFVTNLEKSIVEFENCKVLITDQKITSIKEILPILEKTTQLRAPLFIIAEDITGEALATLVVNKLRGILNVAAIKAPSFGERRKAVLQDIAIVTGAEFLAKDLGLLVENATEEQLGTARKVTIHQTTTTLIADAASKDEIQARIAQLKKELAETDSVYDTEKLAERIAKLAGGVAVIKVGAATETELEDRQLRIEDAKNATFAAIEEGIVPGGGAAYVHLSTVVPKIKEAIEDPDERLGADIIQKALVAPASLIAHNAGVEGEVVVEKIKDSDWEVGYNAMTDKYENLMEAGVIDPAKVTRCALQNAASVAGMVLTTQAIVVEKPKPKPQVAEPPEGALTV

SEQ ID NO: 23838 - protein, 478 aa, Zea mays subsp. mays
  peptide (1)..(478): Ceres Seq. ID no. 12595536
  misc_feature (1)..(462): Pfam Name: Pfam Description:  TCP-1/cpn60 chaperonin family
  misc_feature (1)..(478): NCBI GI NO: 134102 NR Description: RuBisCO subunit binding-protein alpha subunit
  misc_feature (1)..(478): NCBI GI NO: 31193919 NR Description: putative rubisco subunit binding-protein alphasubunit precursor
  misc_feature (1)..(478): NCBI GI NO: 1710807 NR Description: RuBisCO subunit binding-protein alpha subunit
  misc_feature (1)..(476): NCBI GI NO: 1351030 NR Description: RuBisCO subunit binding-protein alpha subunit
  misc_feature (1)..(476): NCBI GI NO: 15226314 NR Description: putative rubisco subunit binding-protein alphasubunit
  misc_feature (1)..(476): NCBI GI NO: 21554572 NR Description: putative rubisco subunit binding-protein alphasubunit
  misc_feature (1)..(478): NCBI GI NO: 3790441 NR Description: chaperonin 60 alpha subunit [Canavalia lineata]
  misc_feature (1)..(476): NCBI GI NO: 99801 NR Description: chaperonine 60K alpha chain - rape (fragment)
  misc_feature (1)..(476): NCBI GI NO: 464727 NR Description: RuBisCO subunit binding-protein alpha subunit
  misc_feature (1)..(444): NCBI GI NO: 5650721 NR Description: rubisco subunit binding-protein alpha subunit
MENAGAALIREVASKTNDSAGDGTTTACVLAREIIKLGLLSVTSGANPVSLKKGIDKTVQGLIQELENKSRPIKGGGDIKAVASISAGNDEFIGSMIAEAIDKVGPDGVLSIESSSSFETTVEVEEGMEIDRGYISPQFVTNLEKSIVEFENCKVLITDQKITSIKEILPILEKTTQLRAPLFIIAEDITGEALATLVVNKLRGILNVAAIKAPSFGERRKAVLQDIAIVTGAEFLAKDLGLLVENATEEQLGTARKVTIHQTTTTLIADAASKDEIQARIAQLKKELAETDSVYDTEKLAERIAKLAGGVAVIKVGAATETELEDRQLRIEDAKNATFAAIEEGIVPGGGAAYVHLSTVVPKIKEAIEDPDERLGADIIQKALVAPASLIAHNAGVEGEVVVEKIKDSDWEVGYNAMTDKYENLMEAGVIDPAKVTRCALQNAASVAGMVLTTQAIVVEKPKPKPQVAEPPEGALTV

SEQ ID NO: 23839 - DNA, 1320 bp, Zea mays subsp. mays
  misc_feature (1)..(1320): Ceres Seq. ID no. 12365213
gtcaggacccggaccaaaccaatcagggcggctcgggcgcggcggcgacacagggcaaggaggccgaacgttggggggaccggggctcgacgccagccgtggatcgcctgcggagggggacaagcgtctgcctcatgtcccgcgacggcggggaatagggcgacggcgtcggcggcggggatcggttgcggcggcgtgacgaggcggctacggcggcggctcgggagggaggcggcaccatgtctgcggtagtctgtggcaagaggtcctcctccatcttcgccgacgagctcctcccgccgtctccttcctcccctcactcctcccaccagccggcggccaagaggtcccgccgctccccctcgcaccgcggcggctccgacggactccgaccggaggcgctcgtcgactatctacttgccctcttccccgacatggatccacagttacttgaaaaagctctggaagcatctggagatgacttggattctgcgataaaaagtttgaatttgctgcgcttagagtcagcagaagctatcttgtcatcgactggtttcaaacctgaaaattgtctgcaaacagccaattcagccttctcttgaaggtattcctaatggtggtgtggatacggttacagaacatccgcctagcgtagataattaccagacaagttataatggctctgaatgggttgagctattagtcacagagatgagaaatgcttctgacataaacgatgcacgggctcgtgcgtcaagagctctggaggctttggagaaaacgattgtagagcgtgcaggagctgaagctacacaaaacctgcataaggaaaacatgatgctcaaggagcagttgactgttgttctgcgagagaactccgtgctgaagcgggcagtcgccattcagcacgagcgccaaaaggagttcgacgagaggtctcacgaggtccagaacttgaagcaacttgttctgcagtaccaggagcaagttaggactctagagatgaacaactacgccctcacaatgcatctcaagcaggctcaacagaacagctccatacctgggcgtttcaaccctgatgttttctaagcgtagtagctgctgaacggtccgccccagattaataagctatgtatgaatatatcttgttctaccaactgctcctgagatggggatatccgataggtggattcaccgcccaagggtccagaattttcaagtcactatggttttgatttcgatatactccgtatttatttaaacgtgttgctttcatgcaattggctatccgatatattgtgtgcgcccacttttccgggc

SEQ ID NO: 23840 - protein, 125 aa, Zea mays subsp. mays
  peptide (1)..(125): Ceres Seq. ID no. 12365214
  misc_feature (1)..(125): NCBI GI NO: 18421340 NR Description: putative protein; protein id: At5g32440
  misc_feature (1)..(125): NCBI GI NO: 13877755 NR Description: unknown protein [Arabidopsis thaliana]
  misc_feature (1)..(125): NCBI GI NO: 34015166 NR Description: hypothetical protein OSJNBa0017M13.20
  misc_feature (1)..(125): NCBI GI NO: 18412607 NR Description: expressed protein; protein id: At1g80040
  misc_feature (1)..(125): NCBI GI NO: 15241851 NR Description: putative protein; protein id: At5g02510.1
  misc_feature (65)..(125): NCBI GI NO: 35215036 NR Description: hypothetical protein
  misc_feature (1)..(92): NCBI GI NO: 35215036 NR Description: hypothetical protein
MRNASDINDARARASRALEALEKTIVERAGAEATQNLHKENMMLKEQLTVVLRENSVLKRAVAIQHERQKEFDERSHEVQNLKQLVLQYQEQVRTLEMNNYALTMHLKQAQQNSSIPGRFNPDVF

SEQ ID NO: 23841 - protein, 120 aa, Zea mays subsp. mays
  peptide (1)..(120): Ceres Seq. ID no. 12365215
  misc_feature (1)..(97): NCBI GI NO: 18421340 NR Description: putative protein; protein id: At5g32440
  misc_feature (1)..(97): NCBI GI NO: 13877755 NR Description: unknown protein [Arabidopsis thaliana]
  misc_feature (1)..(108): NCBI GI NO: 34015166 NR Description: hypothetical protein OSJNBa0017M13.20
  misc_feature (1)..(89): NCBI GI NO: 18412607 NR Description: expressed protein; protein id: At1g80040
  misc_feature (1)..(108): NCBI GI NO: 35215037 NR Description: hypothetical protein
MSAVVCGKRSSSIFADELLPPSPSSPHSSHQPAAKRSRRSPSHRGGSDGLRPEALVDYLLALFPDMDPQLLEKALEASGDDLDSAIKSLNLLRLESAEAILSSTGFKPENCLQTANSAFS

SEQ ID NO: 23842 - protein, 84 aa, Zea mays subsp. mays
  peptide (1)..(84): Ceres Seq. ID no. 12365216
  misc_feature (1)..(84): NCBI GI NO: 18421340 NR Description: putative protein; protein id: At5g32440
  misc_feature (1)..(84): NCBI GI NO: 13877755 NR Description: unknown protein [Arabidopsis thaliana]
  misc_feature (1)..(84): NCBI GI NO: 34015166 NR Description: hypothetical protein OSJNBa0017M13.20
  misc_feature (1)..(84): NCBI GI NO: 18412607 NR Description: expressed protein; protein id: At1g80040
  misc_feature (1)..(84): NCBI GI NO: 15241851 NR Description: putative protein; protein id: At5g02510.1
  misc_feature (24)..(84): NCBI GI NO: 35215036 NR Description: hypothetical protein
  misc_feature (1)..(51): NCBI GI NO: 35215036 NR Description: hypothetical protein
MMLKEQLTVVLRENSVLKRAVAIQHERQKEFDERSHEVQNLKQLVLQYQEQVRTLEMNNYALTMHLKQAQQNSSIPGRFNPDVF

SEQ ID NO: 23843 - DNA, 1345 bp, Zea mays subsp. mays
  misc_feature (1)..(1345): Ceres Seq. ID no. 12341582
gcgcgactagactagccttcagccttctccagttctcctctcctcctcgttttttcccctcctcaacgcctggacggaactgaagccagccagcctgcccagccaaggtgaccggagacaagtaaaaatctcgccggtcttctcacagaccacaaacattgcgcttgctgcccagctataagtactcgccggactaggcggccaactcatcccatcccatttcatccatctcggagcagaggcaacgcaatccggcaaaaaggcgcttctttcttgccctgttcgggacaggacacagacacagagccaggagacggaaccgtcggaggctaagcttcttcttcgtctttcctgggcgcgctcaagtggcgatggcatttgcggtctccgacgagctgctgggcaccttcgtgccgattgcggtgtactggctctactcggggctctacgtcgtcctggacgggctcgggatggacgactacaggctccatcccaagggggaggaggaggccaagaacatcgtttccaggtccacggtcgtcaggggcgtccttgttcagcaggcgtttcaaatcgctgtctcccttcttctcttcacggttcttggtgatgagaatgaggctgcgaggaagcaacctccggctctggtgttggcattgcaatttatcgttgcaatgttcgtcatggacacatggcagtatttcatgcacagatacatgcacatcaacaagttcttgtacaagcacgtccactctaagcaccacacccttgtcgtcccctacgcttttggagctctgtacaaccaccccctggagggactcatcctggacaccatcggtggcgcgctctcgttcctcatctctggcatgaccccgaggactggcatattcttcttctcgttcgcgaccatcaagaccgtcgacgaccactgtggtctgtggcttcctgggaacatcctccatgtattcttcagcaacaacagcgcttaccatgacatccaccatcagctctacggcaacaagtacaacttctctcagcccttctttgtcatgtgggacaagatccttggaacatacatgccttacactctggagacccgcaagggaggtggtctcgaggcgcgcccggttaagctcaaccaagcacagcagaccaaggctgattgagcagtgtggtttctcctgtttatctactacttcccctgattttttccccttctgactgcatttgtactgtagaagtatttcctgtccatatagtaaaatcatttaggcaaatgccatgttgtacccaacagatatagcaaataaaacatcttgttaatggagatccattgatgtttgtt

SEQ ID NO: 23844 - protein, 264 aa, Zea mays subsp. mays
  peptide (1)..(264): Ceres Seq. ID no. 12341583
  misc_feature (1)..(254): NCBI GI NO: 22330531 NR Description: acid phosphatase, putative; protein id:At1g69640
  misc_feature (1)..(254): NCBI GI NO: 25404823 NR Description: probable sterol desaturase T6C23.16
  misc_feature (1)..(257): NCBI GI NO: 18394095 NR Description: acid phosphatase, putative; protein id:At1g14290
  misc_feature (1)..(257): NCBI GI NO: 25511716 NR Description: F14L17.5 protein - Arabidopsis thaliana
  misc_feature (10)..(254): NCBI GI NO: 34913184 NR Description: similar to acid phosphatase
  misc_feature (31)..(199): NCBI GI NO: 5360721 NR Description: acid phosphatase [Lupinus albus]
  misc_feature (92)..(253): NCBI GI NO: 34911990 NR Description: P0694A04.28
  misc_feature (1)..(85): NCBI GI NO: 34911990 NR Description: P0694A04.28
  misc_feature (92)..(242): NCBI GI NO: 19113281 NR Description: hypothetical integral membrane protein
  misc_feature (95)..(264): NCBI GI NO: 40746027 NR Description: hypothetical protein AN0640.2
MAFAVSDELLGTFVPIAVYWLYSGLYVVLDGLGMDDYRLHPKGEEEAKNIVSRSTVVRGVLVQQAFQIAVSLLLFTVLGDENEAARKQPPALVLALQFIVAMFVMDTWQYFMHRYMHINKFLYKHVHSKHHTLVVPYAFGALYNHPLEGLILDTIGGALSFLISGMTPRTGIFFFSFATIKTVDDHCGLWLPGNILHVFFSNNSAYHDIHHQLYGNKYNFSQPFFVMWDKILGTYMPYTLETRKGGGLEARPVKLNQAQQTKAD

SEQ ID NO: 23845 - protein, 231 aa, Zea mays subsp. mays
  peptide (1)..(231): Ceres Seq. ID no. 12341584
  misc_feature (1)..(221): NCBI GI NO: 22330531 NR Description: acid phosphatase, putative; protein id:At1g69640
  misc_feature (1)..(221): NCBI GI NO: 25404823 NR Description: probable sterol desaturase T6C23.16
  misc_feature (1)..(224): NCBI GI NO: 18394095 NR Description: acid phosphatase, putative; protein id:At1g14290
  misc_feature (1)..(224): NCBI GI NO: 25511716 NR Description: F14L17.5 protein - Arabidopsis thaliana
  misc_feature (1)..(221): NCBI GI NO: 34913184 NR Description: similar to acid phosphatase
  misc_feature (1)..(166): NCBI GI NO: 5360721 NR Description: acid phosphatase [Lupinus albus]
  misc_feature (59)..(220): NCBI GI NO: 34911990 NR Description: P0694A04.28
  misc_feature (1)..(52): NCBI GI NO: 34911990 NR Description: P0694A04.28
  misc_feature (59)..(209): NCBI GI NO: 19113281 NR Description: hypothetical integral membrane protein
  misc_feature (62)..(231): NCBI GI NO: 40746027 NR Description: hypothetical protein AN0640.2
MDDYRLHPKGEEEAKNIVSRSTVVRGVLVQQAFQIAVSLLLFTVLGDENEAARKQPPALVLALQFIVAMFVMDTWQYFMHRYMHINKFLYKHVHSKHHTLVVPYAFGALYNHPLEGLILDTIGGALSFLISGMTPRTGIFFFSFATIKTVDDHCGLWLPGNILHVFFSNNSAYHDIHHQLYGNKYNFSQPFFVMWDKILGTYMPYTLETRKGGGLEARPVKLNQAQQTKAD

SEQ ID NO: 23846 - protein, 163 aa, Zea mays subsp. mays
  peptide (1)..(163): Ceres Seq. ID no. 12341585
  misc_feature (1)..(153): NCBI GI NO: 22330531 NR Description: acid phosphatase, putative; protein id:At1g69640
  misc_feature (1)..(153): NCBI GI NO: 25404823 NR Description: probable sterol desaturase T6C23.16
  misc_feature (1)..(156): NCBI GI NO: 18394095 NR Description: acid phosphatase, putative; protein id:At1g14290
  misc_feature (1)..(156): NCBI GI NO: 25511716 NR Description: F14L17.5 protein - Arabidopsis thaliana
  misc_feature (1)..(153): NCBI GI NO: 34913184 NR Description: similar to acid phosphatase
  misc_feature (1)..(98): NCBI GI NO: 5360721 NR Description: acid phosphatase [Lupinus albus]
  misc_feature (1)..(152): NCBI GI NO: 34911990 NR Description: P0694A04.28
  misc_feature (1)..(141): NCBI GI NO: 19113281 NR Description: hypothetical integral membrane protein
  misc_feature (1)..(163): NCBI GI NO: 40746027 NR Description: hypothetical protein AN0640.2
  misc_feature (1)..(163): NCBI GI NO: 32411679 NR Description: hypothetical protein [Neurospora crassa]
MFVMDTWQYFMHRYMHINKFLYKHVHSKHHTLVVPYAFGALYNHPLEGLILDTIGGALSFLISGMTPRTGIFFFSFATIKTVDDHCGLWLPGNILHVFFSNNSAYHDIHHQLYGNKYNFSQPFFVMWDKILGTYMPYTLETRKGGGLEARPVKLNQAQQTKAD

SEQ ID NO: 23847 - DNA, 1721 bp, Zea mays subsp. mays
  misc_feature (1)..(1721): Ceres Seq. ID no. 12372921
ataattccatagtctaacctgccaaccacttccaccgccaccgccgagcgcggtggcaccgacacgacacacgtagctgcagacctgcagtgccagcacggctgccaatccctgctggcgctgttcccggctccgagatcatttggactcggcactcggcagggatggggatggggacggaatggccgccgacgcctgcgcagcagaggaaagcggtggtgagcgccgggtcggcgctgaagctggtactgttcgtgattctcgcgggcctcgcactgcggctgctggtggggcccccagcctacctcctgccgcccaccgccgcgccagagggggccgctcgtcttttcgcggtgccggagagggaaagaaccgccggcggcggcggcggcggataccttccgtcgaaacggatgatgcggtttttactttgaccgattcagaacctctaacagctttaggcaagaaggaaggttccacaaaaccagaagaaagttgtgatcttttccatggcgagtgggttcccaattcatcaggaccagcttatactaatgcaagctgccgcttcattgagtctcctcagaactgtatgacaaatggaagacctgacacagattatctcaattggagatggaagccatatggttgtgaggtatcaccatttgacggcaagaagtttttggatggcatgaaaggcaagcattgggcactcattggtgattccatccttcgcaaccacgtccagtcattgctttgtcttctttccaaggtcgaagatgctactgaggtttaccacgacgatacattcagatccagaagatggcacttcccttcgtacaattttacgatctcccttgtctgggcaccattcctggtcaaagctaaaatatttgaggacgacgatggagtttctactgctgatctccagctgcaccttgacgttctcgagacagactggactagtcaatgggagaagttcgattacgcggtgatatccacgggccaatggttcttcaagactgcagtgtactgggagaatggagctgcgattggctgccactcctgccagaacaaaaccctggaagagaggcctccggagtactccttccgcagggcactcagggtggccttccagttcatcacatcctcacctcacaagccagtagtcttctacagaacgtgggctccctcgcattttgagaacggcgagtggttcagcggcgggacttgcaacaggacggccccattcaagccaggggaggccggtgacagagaatgggacaatagtatgtggaggattgagagagaagagtttcacaacgcggtgcctatcggtggtgaccgtctgaaactgctcgatacatttgagctctctctcctcaggcctgatggtcatccagggccttatagagcataccatccttacgagaagggcgtgacagccaaagtccagaatgactgcctccactggtgcttgcctgggcctattgatgcgtggaacgatgtaattatgaagatggtggcaaaggactgaagcattatcaggtggtagtgtggtaccctaggcatggcatctgatctgaacaccagtattgtctcaagtctcattttcatacatatgtatgtttctgggcattgcatggcgtctcctctatctggtgtcaagaaactcaagtagattcggacttctcttcatggtgggtatgatttttttttatgtt

SEQ ID NO: 23848 - protein, 450 aa, Zea mays subsp. mays
  peptide (1)..(450): Ceres Seq. ID no. 12372922
  misc_feature (277)..(445): Pfam Name: Pfam Description:  Arabidopsis proteins of unknown function
  misc_feature (104)..(447): NCBI GI NO: 15237044 NR Description: putative protein; protein id: At4g11090.1
  misc_feature (90)..(447): NCBI GI NO: 30678135 NR Description: expressed protein [Arabidopsis thaliana]
  misc_feature (104)..(447): NCBI GI NO: 7486743 NR Description: hypothetical protein F9D16
  misc_feature (104)..(447): NCBI GI NO: 30686312 NR Description: expressed protein [Arabidopsis thaliana]
  misc_feature (106)..(445): NCBI GI NO: 15234058 NR Description: hypothetical protein; protein id: At4g01080.1
  misc_feature (106)..(445): NCBI GI NO: 28393189 NR Description: unknown protein [Arabidopsis thaliana]
  misc_feature (72)..(447): NCBI GI NO: 25518737 NR Description: hypothetical protein F6F3.23
  misc_feature (87)..(450): NCBI GI NO: 15237211 NR Description: putative protein; protein id: At5g15890.1
  misc_feature (78)..(450): NCBI GI NO: 15237213 NR Description: putative protein; protein id: At5g15900.1
  misc_feature (103)..(449): NCBI GI NO: 15223079 NR Description: unknown protein; protein id: At1g70230
MAADACAAEESGGERRVGAEAGTVRDSRGPRTAAAGGAPSLPPAAHRRARGGRSSFRGAGEGKNRRRRRRRIPSVETDDAVFTLTDSEPLTALGKKEGSTKPEESCDLFHGEWVPNSSGPAYTNASCRFIESPQNCMTNGRPDTDYLNWRWKPYGCEVSPFDGKKFLDGMKGKHWALIGDSILRNHVQSLLCLLSKVEDATEVYHDDTFRSRRWHFPSYNFTISLVWAPFLVKAKIFEDDDGVSTADLQLHLDVLETDWTSQWEKFDYAVISTGQWFFKTAVYWENGAAIGCHSCQNKTLEERPPEYSFRRALRVAFQFITSSPHKPVVFYRTWAPSHFENGEWFSGGTCNRTAPFKPGEAGDREWDNSMWRIEREEFHNAVPIGGDRLKLLDTFELSLLRPDGHPGPYRAYHPYEKGVTAKVQNDCLHWCLPGPIDAWNDVIMKMVAKD

SEQ ID NO: 23849 - protein, 314 aa, Zea mays subsp. mays
  peptide (1)..(314): Ceres Seq. ID no. 12372923
  misc_feature (141)..(309): Pfam Name: Pfam Description:  Arabidopsis proteins of unknown function
  misc_feature (1)..(311): NCBI GI NO: 15237044 NR Description: putative protein; protein id: At4g11090.1
  misc_feature (1)..(311): NCBI GI NO: 30678135 NR Description: expressed protein [Arabidopsis thaliana]
  misc_feature (1)..(311): NCBI GI NO: 7486743 NR Description: hypothetical protein F9D16
  misc_feature (1)..(311): NCBI GI NO: 30686312 NR Description: expressed protein [Arabidopsis thaliana]
  misc_feature (1)..(309): NCBI GI NO: 15234058 NR Description: hypothetical protein; protein id: At4g01080.1
  misc_feature (1)..(309): NCBI GI NO: 28393189 NR Description: unknown protein [Arabidopsis thaliana]
  misc_feature (1)..(311): NCBI GI NO: 25518737 NR Description: hypothetical protein F6F3.23
  misc_feature (1)..(314): NCBI GI NO: 15237211 NR Description: putative protein; protein id: At5g15890.1
  misc_feature (1)..(314): NCBI GI NO: 15237213 NR Description: putative protein; protein id: At5g15900.1
  misc_feature (1)..(313): NCBI GI NO: 15223079 NR Description: unknown protein; protein id: At1g70230
MTNGRPDTDYLNWRWKPYGCEVSPFDGKKFLDGMKGKHWALIGDSILRNHVQSLLCLLSKVEDATEVYHDDTFRSRRWHFPSYNFTISLVWAPFLVKAKIFEDDDGVSTADLQLHLDVLETDWTSQWEKFDYAVISTGQWFFKTAVYWENGAAIGCHSCQNKTLEERPPEYSFRRALRVAFQFITSSPHKPVVFYRTWAPSHFENGEWFSGGTCNRTAPFKPGEAGDREWDNSMWRIEREEFHNAVPIGGDRLKLLDTFELSLLRPDGHPGPYRAYHPYEKGVTAKVQNDCLHWCLPGPIDAWNDVIMKMVAKD

SEQ ID NO: 23850 - protein, 281 aa, Zea mays subsp. mays
  peptide (1)..(281): Ceres Seq. ID no. 12372924
  misc_feature (108)..(276): Pfam Name: Pfam Description:  Arabidopsis proteins of unknown function
  misc_feature (1)..(278): NCBI GI NO: 15237044 NR Description: putative protein; protein id: At4g11090.1
  misc_feature (1)..(278): NCBI GI NO: 30678135 NR Description: expressed protein [Arabidopsis thaliana]
  misc_feature (1)..(278): NCBI GI NO: 7486743 NR Description: hypothetical protein F9D16
  misc_feature (1)..(278): NCBI GI NO: 30686312 NR Description: expressed protein [Arabidopsis thaliana]
  misc_feature (1)..(276): NCBI GI NO: 15234058 NR Description: hypothetical protein; protein id: At4g01080.1
  misc_feature (1)..(276): NCBI GI NO: 28393189 NR Description: unknown protein [Arabidopsis thaliana]
  misc_feature (1)..(278): NCBI GI NO: 25518737 NR Description: hypothetical protein F6F3.23
  misc_feature (1)..(281): NCBI GI NO: 15237211 NR Description: putative protein; protein id: At5g15890.1
  misc_feature (1)..(281): NCBI GI NO: 15237213 NR Description: putative protein; protein id: At5g15900.1
  misc_feature (1)..(280): NCBI GI NO: 15223079 NR Description: unknown protein; protein id: At1g70230
MKGKHWALIGDSILRNHVQSLLCLLSKVEDATEVYHDDTFRSRRWHFPSYNFTISLVWAPFLVKAKIFEDDDGVSTADLQLHLDVLETDWTSQWEKFDYAVISTGQWFFKTAVYWENGAAIGCHSCQNKTLEERPPEYSFRRALRVAFQFITSSPHKPVVFYRTWAPSHFENGEWFSGGTCNRTAPFKPGEAGDREWDNSMWRIEREEFHNAVPIGGDRLKLLDTFELSLLRPDGHPGPYRAYHPYEKGVTAKVQNDCLHWCLPGPIDAWNDVIMKMVAKD

SEQ ID NO: 23851 - DNA, 1372 bp, Zea mays subsp. mays
  misc_feature (1)..(1372): Ceres Seq. ID no. 12365191
atcatcctcaacgccatggccgtgctgatgctcccgctctacctcttcgccacccctatcctgcgcttcttccaccaggacgccgagattgccgcgctcgccggccgcctagcgctctacatgatcccgcagctcttcgcctacgccttcaacttccccatccagaagttcctgcaggcgcagagcaaggtgatggccatggcggtcgtgtcggtggcggcgctgctgctccacgtcgccatcagctggctcctcatggggcccatggggatggggatcgtcggcctggccgtcgcgctcaacgcgtcttggtggctcgtcgtgctgggccagctcgcctacattctcatgggctactgccccggcgcctggaacggattcgactggctcgccttctccgacctctccggcttcgcgcgcctgtcgcttggctccgccgtcatgctctgcctggagttctggttctacatgttcctgatcgtcatcgtcggcaacctggagaacgctcaggtcgccgttgctgcagtctccatttgcacgaacctgttcgggtggcagatcatggtgttcttcggattcaacgcggccatcagcgtgcgggtgtcgaacgagctgggcgccgggcggccccgcgcggccaagttcgcgatcctggtggtgctcatgtcttcggtggccatcgggttggccttcttcgtcctcgtcctggccttccgcgacgtgtacggcgcgcccttcacggaaagccccgaggtggtgcgcgccgtgggccagcctcggcgtcgtcttcgccttctcgctgctcctcaacagcgtgcagccggtgctgtcgggcgttgccgtcggggccggctggcagtggctggtggcgtacatcaacctcggctgctactacctcgttggcatccccgtcgggtacatcatcgccttcccgctgcgcggcggggtgcaggggatgtggggcggcatgctcacgggcgtcggcctgcagaccctcatcctggtcgccatcacgctgcgcaccaactgggacaaggaggccagcgaggcccattccaggatacagaaatggggtggatcggcggcggccaaagtttcacatgcatgactagtctgaatgacgcgcgccaccatgagaatacaatacaacagatgccatgcgagcagaatggcatgctgcggtgcgtaagcttgattgtacgtgcaggttgcgttttgggctgcttaagtagttggagacaaagtcatacttaggttgttttgtttccagcagatatatgcttgtaaaacacgtattgtgccatagactgcatgattcttagcagagtttgaaatagaaaataatatatctctactactacttaattacctg

SEQ ID NO: 23852 - protein, 417 aa, Zea mays subsp. mays
  peptide (1)..(417): Ceres Seq. ID no. 12365192
  misc_feature (1)..(255): NCBI GI NO: 15220246 NR Description: unknown protein; protein id: At1g47530
  misc_feature (1)..(255): NCBI GI NO: 16604505 NR Description: At1g47530/F16N3_20 [Arabidopsis thaliana]
  misc_feature (1)..(252): NCBI GI NO: 15220701 NR Description: conserved hypothetical protein
  misc_feature (1)..(256): NCBI GI NO: 15240824 NR Description: putative transmembrane protein
  misc_feature (1)..(256): NCBI GI NO: 15222119 NR Description: unknown protein; protein id: At1g12950.1
  misc_feature (1)..(253): NCBI GI NO: 15231577 NR Description: integral membrane protein, putative
  misc_feature (1)..(258): NCBI GI NO: 30686958 NR Description: MATE efflux protein family [Arabidopsis thaliana]
  misc_feature (1)..(256): NCBI GI NO: 33867697 NR Description: putative anthocyanin permease
  misc_feature (1)..(252): NCBI GI NO: 25402978 NR Description: protein F26F24.14
  misc_feature (1)..(254): NCBI GI NO: 16924114 NR Description: putative multidrug efflux protein [Oryza sativa]
IILNAMAVLMLPLYLFATPILRFFHQDAEIAALAGRLALYMIPQLFAYAFNFPIQKFLQAQSKVMAMAVVSVAALLLHVAISWLLMGPMGMGIVGLAVALNASWWLVVLGQLAYILMGYCPGAWNGFDWLAFSDLSGFARLSLGSAVMLCLEFWFYMFLIVIVGNLENAQVAVAAVSICTNLFGWQIMVFFGFNAAISVRVSNELGAGRPRAAKFAILVVLMSSVAIGLAFFVLVLAFRDVYGAPFTESPEVVRAVGQPRRRLRLLAAPQQRAAGAVGRCRRGRLAVAGGVHQPRLLLPRWHPRRVHHRLPAARRGAGDVGRHAHGRRPADPHPGRHHAAHQLGQGGQRGPFQDTEMGWIGGGQSFTCMTSLNDARHHENTIQQMPCEQNGMLRCVSLIVRAGCVLGCLSSWRQSHT

SEQ ID NO: 23853 - protein, 412 aa, Zea mays subsp. mays
  peptide (1)..(412): Ceres Seq. ID no. 12365193
  misc_feature (1)..(250): NCBI GI NO: 15220246 NR Description: unknown protein; protein id: At1g47530
  misc_feature (1)..(250): NCBI GI NO: 16604505 NR Description: At1g47530/F16N3_20 [Arabidopsis thaliana]
  misc_feature (1)..(247): NCBI GI NO: 15220701 NR Description: conserved hypothetical protein
  misc_feature (1)..(251): NCBI GI NO: 15240824 NR Description: putative transmembrane protein
  misc_feature (1)..(251): NCBI GI NO: 15222119 NR Description: unknown protein; protein id: At1g12950.1
  misc_feature (1)..(248): NCBI GI NO: 15231577 NR Description: integral membrane protein, putative
  misc_feature (1)..(253): NCBI GI NO: 30686958 NR Description: MATE efflux protein family [Arabidopsis thaliana]
  misc_feature (1)..(251): NCBI GI NO: 33867697 NR Description: putative anthocyanin permease
  misc_feature (1)..(247): NCBI GI NO: 25402978 NR Description: protein F26F24.14
  misc_feature (1)..(249): NCBI GI NO: 16924114 NR Description: putative multidrug efflux protein [Oryza sativa]
MAVLMLPLYLFATPILRFFHQDAEIAALAGRLALYMIPQLFAYAFNFPIQKFLQAQSKVMAMAVVSVAALLLHVAISWLLMGPMGMGIVGLAVALNASWWLVVLGQLAYILMGYCPGAWNGFDWLAFSDLSGFARLSLGSAVMLCLEFWFYMFLIVIVGNLENAQVAVAAVSICTNLFGWQIMVFFGFNAAISVRVSNELGAGRPRAAKFAILVVLMSSVAIGLAFFVLVLAFRDVYGAPFTESPEVVRAVGQPRRRLRLLAAPQQRAAGAVGRCRRGRLAVAGGVHQPRLLLPRWHPRRVHHRLPAARRGAGDVGRHAHGRRPADPHPGRHHAAHQLGQGGQRGPFQDTEMGWIGGGQSFTCMTSLNDARHHENTIQQMPCEQNGMLRCVSLIVRAGCVLGCLSSWRQSHT

SEQ ID NO: 23854 - protein, 408 aa, Zea mays subsp. mays
  peptide (1)..(408): Ceres Seq. ID no. 12365194
  misc_feature (1)..(246): NCBI GI NO: 15220246 NR Description: unknown protein; protein id: At1g47530
  misc_feature (1)..(246): NCBI GI NO: 16604505 NR Description: At1g47530/F16N3_20 [Arabidopsis thaliana]
  misc_feature (1)..(243): NCBI GI NO: 15220701 NR Description: conserved hypothetical protein
  misc_feature (1)..(247): NCBI GI NO: 15240824 NR Description: putative transmembrane protein
  misc_feature (1)..(247): NCBI GI NO: 15222119 NR Description: unknown protein; protein id: At1g12950.1
  misc_feature (1)..(244): NCBI GI NO: 15231577 NR Description: integral membrane protein, putative
  misc_feature (1)..(249): NCBI GI NO: 30686958 NR Description: MATE efflux protein family [Arabidopsis thaliana]
  misc_feature (1)..(247): NCBI GI NO: 33867697 NR Description: putative anthocyanin permease
  misc_feature (1)..(243): NCBI GI NO: 25402978 NR Description: protein F26F24.14
  misc_feature (1)..(245): NCBI GI NO: 16924114 NR Description: putative multidrug efflux protein [Oryza sativa]
MLPLYLFATPILRFFHQDAEIAALAGRLALYMIPQLFAYAFNFPIQKFLQAQSKVMAMAVVSVAALLLHVAISWLLMGPMGMGIVGLAVALNASWWLVVLGQLAYILMGYCPGAWNGFDWLAFSDLSGFARLSLGSAVMLCLEFWFYMFLIVIVGNLENAQVAVAAVSICTNLFGWQIMVFFGFNAAISVRVSNELGAGRPRAAKFAILVVLMSSVAIGLAFFVLVLAFRDVYGAPFTESPEVVRAVGQPRRRLRLLAAPQQRAAGAVGRCRRGRLAVAGGVHQPRLLLPRWHPRRVHHRLPAARRGAGDVGRHAHGRRPADPHPGRHHAAHQLGQGGQRGPFQDTEMGWIGGGQSFTCMTSLNDARHHENTIQQMPCEQNGMLRCVSLIVRAGCVLGCLSSWRQSHT

SEQ ID NO: 23855 - DNA, 1377 bp, Zea mays subsp. mays
  misc_feature (1)..(1377): Ceres Seq. ID no. 12355901
aaaaccgcaaatatcttcttaccccaacgccggcacgccgcccaaaaacccttgcggcgtcgcactcacactagcgaccaacccccaaccccagaccttcctctccggcggcggccggcgcgcgcgcgcgagggagatggaccgcccttccggcacatcgtaccagcgctttccccgcgttcggatccgcgagctcaaggacgactacgccaagttcgaactccgcgacaccgacgctagcatggccaacgccctccgccgcgtcatgatcgccgaagtcccaactgtcgccatcgatctcgtagagatcgaggttaactcctccgtcctcaacgacgagttcatcgcccaccgtctggggctcatcccgctcacctccgccgccgccatgcaaatgcgcttctctcgggactgcgacgcttgcgacggcgacggctcctgcgagtactgctccgtcgagtttcacctctccgtgcacgccaccgactctgaccagacgctcgaggtcacatccaacgacctgagatccatggaccccaaggtctgcccagtcgaccaagcacgcgcctaccagcacgcgctcggaggcaccgacccctttggagccaatgcctcgaacgaaaacaggggcatacttattgtaaagctgcgtcggggacaagaactaaggcttcgtgccatagctaggaaaggaattggcaaggaccatgccaaatggtcaccagctgctaccgtgactttcatgtatgagcctgacatacgtatcaatgaagaactaatggaaacattgacggtggaagagagaataagcttgattgaaagcagccctacaaaagtatttgagcttgattctgccaatcaggtggtggtgaaaaacgcggaggcatacacctacgacgacgaggtgatcaagcacgccgaggccatcgggaagccaggcttggtggagatcaccgccaaggaggacagcttcgtcttcaccgtagaaacaaccggtgccatcacagcctacgagctgatcatgaacgcgatcacggtgctgaggcagaagctggatgccgtccgccttcaggacgacgacggcgaccttggcgagctcggcgcccaccttggtgggccttaggagctttgagcaagaaggaatcgccctgtggcctccctccctcccactgcctacgtaggcctatctaactgccgtgcgtgctagtcgatcgatcgaaaccgaacggttctgataaaccttatggtgtctaaagctccagatttatggattgccaaacacccagcaccgaattccagtttaatttccttgcccgccttgttttcgtgcgggtgacatctgcgccgtgaatttgcatgcttgtgcgtcttgttatt

SEQ ID NO: 23856 - protein, 373 aa, Zea mays subsp. mays
  peptide (1)..(373): Ceres Seq. ID no. 12355902
  misc_feature (101)..(240): Pfam Name: Pfam Description:  RNA polymerase Rpb3/RpoA insert domain
  misc_feature (51)..(372): NCBI GI NO: 15226523 NR Description: DNA-directed RNA polymerase II
  misc_feature (51)..(372): NCBI GI NO: 21593370 NR Description: DNA-directed RNA polymerase II
  misc_feature (51)..(370): NCBI GI NO: 15226509 NR Description: DNA-directed RNA polymerase II
  misc_feature (51)..(370): NCBI GI NO: 2129725 NR Description: DNA-directed RNA polymerase (EC 2
  misc_feature (59)..(367): NCBI GI NO: 116575 NR Description: Conjugation stage-specific protein
  misc_feature (54)..(252): NCBI GI NO: 28278474 NR Description: Similar to polymerase
  misc_feature (54)..(252): NCBI GI NO: 40645083 NR Description: homologue of DNA-directed RNA polymerase II subunit
  misc_feature (40)..(252): NCBI GI NO: 34851240 NR Description: similar to Polymerase
  misc_feature (54)..(252): NCBI GI NO: 38511942 NR Description: Polymerase (RNA) II (DNA directed) polypeptide C
  misc_feature (54)..(252): NCBI GI NO: 12837765 NR Description: unnamed protein product [Mus musculus]
KPQISSYPNAGTPPKNPCGVALTLATNPQPQTFLSGGGRRARAREMDRPSGTSYQRFPRVRIRELKDDYAKFELRDTDASMANALRRVMIAEVPTVAIDLVEIEVNSSVLNDEFIAHRLGLIPLTSAAAMQMRFSRDCDACDGDGSCEYCSVEFHLSVHATDSDQTLEVTSNDLRSMDPKVCPVDQARAYQHALGGTDPFGANASNENRGILIVKLRRGQELRLRAIARKGIGKDHAKWSPAATVTFMYEPDIRINEELMETLTVEERISLIESSPTKVFELDSANQVVVKNAEAYTYDDEVIKHAEAIGKPGLVEITAKEDSFVFTVETTGAITAYELIMNAITVLRQKLDAVRLQDDDGDLGELGAHLGGP

SEQ ID NO: 23857 - protein, 328 aa, Zea mays subsp. mays
  peptide (1)..(328): Ceres Seq. ID no. 12355903
  misc_feature (56)..(195): Pfam Name: Pfam Description:  RNA polymerase Rpb3/RpoA insert domain
  misc_feature (6)..(327): NCBI GI NO: 15226523 NR Description: DNA-directed RNA polymerase II
  misc_feature (6)..(327): NCBI GI NO: 21593370 NR Description: DNA-directed RNA polymerase II
  misc_feature (6)..(325): NCBI GI NO: 15226509 NR Description: DNA-directed RNA polymerase II
  misc_feature (6)..(325): NCBI GI NO: 2129725 NR Description: DNA-directed RNA polymerase (EC 2
  misc_feature (14)..(322): NCBI GI NO: 116575 NR Description: Conjugation stage-specific protein
  misc_feature (9)..(207): NCBI GI NO: 28278474 NR Description: Similar to polymerase
  misc_feature (9)..(207): NCBI GI NO: 40645083 NR Description: homologue of DNA-directed RNA polymerase II subunit
  misc_feature (1)..(207): NCBI GI NO: 34851240 NR Description: similar to Polymerase
  misc_feature (9)..(207): NCBI GI NO: 38511942 NR Description: Polymerase (RNA) II (DNA directed) polypeptide C
  misc_feature (9)..(207): NCBI GI NO: 12837765 NR Description: unnamed protein product [Mus musculus]
MDRPSGTSYQRFPRVRIRELKDDYAKFELRDTDASMANALRRVMIAEVPTVAIDLVEIEVNSSVLNDEFIAHRLGLIPLTSAAAMQMRFSRDCDACDGDGSCEYCSVEFHLSVHATDSDQTLEVTSNDLRSMDPKVCPVDQARAYQHALGGTDPFGANASNENRGILIVKLRRGQELRLRAIARKGIGKDHAKWSPAATVTFMYEPDIRINEELMETLTVEERISLIESSPTKVFELDSANQVVVKNAEAYTYDDEVIKHAEAIGKPGLVEITAKEDSFVFTVETTGAITAYELIMNAITVLRQKLDAVRLQDDDGDLGELGAHLGGP

SEQ ID NO: 23858 - protein, 293 aa, Zea mays subsp. mays
  peptide (1)..(293): Ceres Seq. ID no. 12355904
  misc_feature (21)..(160): Pfam Name: Pfam Description:  RNA polymerase Rpb3/RpoA insert domain
  misc_feature (1)..(292): NCBI GI NO: 15226523 NR Description: DNA-directed RNA polymerase II
  misc_feature (1)..(292): NCBI GI NO: 21593370 NR Description: DNA-directed RNA polymerase II
  misc_feature (1)..(290): NCBI GI NO: 15226509 NR Description: DNA-directed RNA polymerase II
  misc_feature (1)..(290): NCBI GI NO: 2129725 NR Description: DNA-directed RNA polymerase (EC 2
  misc_feature (1)..(287): NCBI GI NO: 116575 NR Description: Conjugation stage-specific protein
  misc_feature (1)..(172): NCBI GI NO: 28278474 NR Description: Similar to polymerase
  misc_feature (1)..(172): NCBI GI NO: 40645083 NR Description: homologue of DNA-directed RNA polymerase II subunit
  misc_feature (1)..(172): NCBI GI NO: 34851240 NR Description: similar to Polymerase
  misc_feature (1)..(172): NCBI GI NO: 38511942 NR Description: Polymerase (RNA) II (DNA directed) polypeptide C
  misc_feature (1)..(172): NCBI GI NO: 12837765 NR Description: unnamed protein product [Mus musculus]
MANALRRVMIAEVPTVAIDLVEIEVNSSVLNDEFIAHRLGLIPLTSAAAMQMRFSRDCDACDGDGSCEYCSVEFHLSVHATDSDQTLEVTSNDLRSMDPKVCPVDQARAYQHALGGTDPFGANASNENRGILIVKLRRGQELRLRAIARKGIGKDHAKWSPAATVTFMYEPDIRINEELMETLTVEERISLIESSPTKVFELDSANQVVVKNAEAYTYDDEVIKHAEAIGKPGLVEITAKEDSFVFTVETTGAITAYELIMNAITVLRQKLDAVRLQDDDGDLGELGAHLGGP

SEQ ID NO: 23859 - DNA, 747 bp, Zea mays subsp. mays
  misc_feature (1)..(747): Ceres Seq. ID no. 13492760
gccgtgtgcatagcagcaaatagtggtcggcctgttggtactctatatcgtcccttccagtgtacccgtcctccagcccattatacatcatacttgctccagataagaccaagagcatcatggccaacgccttgcctctcatcgtcgcgctggtcgccgccgccgggtgcgcggcgctggcttcggccacgtcgtacaccgtcggcgactcgcagggctggacgaccaccggcgtcgactacagcagctgggccagccgcaacactttcgtcgtcggagacacactagtgttcaactacgtgagcaaggcgcacacggtgacggaggtgagcaaggccggctacgacgcctgctccggcgccaacgcgctcagcgacgacgacaccggctccaccaccatcacgctccagaccccgggcacgcactatttcatctgcaacgtccccggccactgcgccagcggcatgaagctagcggtcgccgtctccgcctcgccctcgggcacggccccttccaccggagccctgcaggttccggcgatggcatccgtcgtcgccgcggccgcgggcgctgccatcaagctcgcgctcttctgacggagcacggccgggtcgtctcaggggagagacagtgcatgcagactacgttcttggcggttgatagtttcccgctggcgattgttcgccgcgcagttcatgtacgtatgtatgtgtgtatgctactctgcggtggcgaatgctttttctg

SEQ ID NO: 23860 - protein, 158 aa, Zea mays subsp. mays
  peptide (1)..(158): Ceres Seq. ID no. 13492761
  misc_feature (34)..(108): Pfam Name: Pfam Description:  Plastocyanin-like domain
  misc_feature (1)..(108): NCBI GI NO: 3747044 NR Description: blue copper protein [Zea mays]
  misc_feature (1)..(140): NCBI GI NO: 38346158 NR Description: OSJNBa0079A21.5
  misc_feature (2)..(132): NCBI GI NO: 2493318 NR Description: Blue copper protein precursor
  misc_feature (1)..(157): NCBI GI NO: 38636838 NR Description: putative blue copper binding protein
  misc_feature (4)..(143): NCBI GI NO: 14140127 NR Description: uclacyanin 3-like protein [Oryza sativa]
  misc_feature (8)..(143): NCBI GI NO: 34915492 NR Description: contains ESTsD24614
  misc_feature (2)..(140): NCBI GI NO: 38636764 NR Description: putative blue copper binding protein
  misc_feature (9)..(158): NCBI GI NO: 4104058 NR Description: blue copper-binding protein homolog
  misc_feature (9)..(140): NCBI GI NO: 34908748 NR Description: uclacyanin-like protein
  misc_feature (7)..(156): NCBI GI NO: 38636763 NR Description: putative blue copper binding protein
MANALPLIVALVAAAGCAALASATSYTVGDSQGWTTTGVDYSSWASRNTFVVGDTLVFNYVSKAHTVTEVSKAGYDACSGANALSDDDTGSTTITLQTPGTHYFICNVPGHCASGMKLAVAVSASPSGTAPSTGALQVPAMASVVAAAAGAAIKLALF

SEQ ID NO: 23861 - protein, 95 aa, Zea mays subsp. mays
  peptide (1)..(95): Ceres Seq. ID no. 13492762
  misc_feature (13)..(95): NCBI GI NO: 15807127 NR Description: conserved hypothetical protein
  misc_feature (72)..(95): NCBI GI NO: 1076211 NR Description: hypothetical protein VSP-3 - Chlamydomonasreinhardtii
AVCIAANSGRPVGTLYRPFQCTRPPAHYTSYLLQIRPRASWPTPCLSSSRWSPPPGARRWLRPRRTPSATRRAGRPPASTTAAGPAATLSSSETH

SEQ ID NO: 23862 - DNA, 1553 bp, Zea mays subsp. mays
  misc_feature (1)..(1553): Ceres Seq. ID no. 12407344
gcgtgcgtccacctccttggtcttctcttcccttccttctgtgcgaaaagcgagcacccaaaccctatcttactatttgtattcggatctgagctactggatgcgcccctgatctggggcagtattcctcatatttggccaaagaggaatataatacttcccctgatttccagcagcttccggaactttgtaaagaaacgaaagaaaagtttaacacagcgcgcgcgcgcgatcctttccgacaggacagtatagcggatggcttcgtcggtgcgggcgccatcggggtcggtgatcgccgtggcatcgtcctcttcctcagcagccttggccggggtgtgcggcacgggctcgccgtgcgccgcgtgcaagttcctgcgtcgcaagtgccagccggactgcgtgttcgcgccctacttcccaccggacaacccgcagaagttcgtgcgcgtgcaccgcgtcttcggcgcgagcaacgtgaccaagctgatgaacgaaatccacccgttgcagcgcgaggacgccatgaactcgctcgcctacgaggccgacatgcgaattcgcgaccccgtctacggctgcgtgggcgtcatctccatcctccagcacaacctacggcagctccagcaggacctcgcccgcgccaagtacgagctctccaagtaccaggcggcagcggcggcagcatccgcgtcgacggcgccgaccgggccgcaggcgatggcagagttcatcggcagcgcgatgccgaacggcgccgcgcacaacttcatcaaccttggacactcggcggcgctcggctccctcggaggctccaccgccatgttcgggcagcaggagcagttcggcagcaacgcgcagatgctgtccaggagctacgacggcggcgagcccatcgcgaggatagggatgaacaacggcggctacgagttcggttactcgagcgcgacgacgatgggcgggtctgcaggcgctgtctctggcggcctcgggacgctcggcatcagcagcccgccgttcttgaagtctggaaccgccggcggcgacgagaagcccagcggcggtcagtaggcggttccatccgtgtgaccgatccttctatccatccatccatccatcagtcttgtcaggttactgacgcgatgaagaaacggggaggaaaaaaatatccatgaaacgcgtgcaaggacttatcctagacgtccgccgttgtcaggagggggctaatttccagacgattttacatggaaaaagtgcgtcgcttgcgtgcgtgcgtgcttgcttttgttgctagattcattgcttgtttgttaattaccacgctatctaccctccccatccacatcatccacgagatcgtcagatattccatgccagcgtccacagagtggcctatgttcttgttattagttgctgtactgcgaagggagggggacaaaatgcatgcttgtccggcccggacctttttttttaccccactcggaagactagcgcccatttgtactccatgtattattgctaggttggctgtaatatatgaagttgaccttttg

SEQ ID NO: 23863 - protein, 270 aa, Zea mays subsp. mays
  peptide (1)..(270): Ceres Seq. ID no. 12407345
  misc_feature (33)..(133): Pfam Name: Pfam Description:  Protein of unknown function DUF260
  misc_feature (2)..(270): NCBI GI NO: 34907508 NR Description: B1099D03.24
  misc_feature (30)..(210): NCBI GI NO: 15218746 NR Description: unknown protein; protein id: At1g65620
  misc_feature (1)..(164): NCBI GI NO: 34896184 NR Description: contains ESTs C98868
  misc_feature (27)..(204): NCBI GI NO: 15240110 NR Description: putative protein; protein id: At5g66870.1
  misc_feature (32)..(145): NCBI GI NO: 15242624 NR Description: putative protein; protein id: At5g63090
  misc_feature (32)..(261): NCBI GI NO: 15227870 NR Description: hypothetical protein; protein id: At2g23660.1
  misc_feature (30)..(146): NCBI GI NO: 9294470 NR Description: gb|AAB60912
  misc_feature (30)..(146): NCBI GI NO: 29427827 NR Description: LOB domain protein 25
  misc_feature (30)..(146): NCBI GI NO: 18405472 NR Description: expressed protein; protein id: At3g27650
  misc_feature (30)..(146): NCBI GI NO: 21618134 NR Description: unknown [Arabidopsis thaliana]
MASSVRAPSGSVIAVASSSSSAALAGVCGTGSPCAACKFLRRKCQPDCVFAPYFPPDNPQKFVRVHRVFGASNVTKLMNEIHPLQREDAMNSLAYEADMRIRDPVYGCVGVISILQHNLRQLQQDLARAKYELSKYQAAAAAASASTAPTGPQAMAEFIGSAMPNGAAHNFINLGHSAALGSLGGSTAMFGQQEQFGSNAQMLSRSYDGGEPIARIGMNNGGYEFGYSSATTMGGSAGAVSGGLGTLGISSPPFLKSGTAGGDEKPSGGQ

SEQ ID NO: 23864 - protein, 193 aa, Zea mays subsp. mays
  peptide (1)..(193): Ceres Seq. ID no. 12407346
  misc_feature (1)..(56): Pfam Name: Pfam Description:  Protein of unknown function DUF260
  misc_feature (1)..(193): NCBI GI NO: 34907508 NR Description: B1099D03.24
  misc_feature (1)..(133): NCBI GI NO: 15218746 NR Description: unknown protein; protein id: At1g65620
  misc_feature (1)..(87): NCBI GI NO: 34896184 NR Description: contains ESTs C98868
  misc_feature (1)..(127): NCBI GI NO: 15240110 NR Description: putative protein; protein id: At5g66870.1
  misc_feature (1)..(68): NCBI GI NO: 15242624 NR Description: putative protein; protein id: At5g63090
  misc_feature (1)..(184): NCBI GI NO: 15227870 NR Description: hypothetical protein; protein id: At2g23660.1
  misc_feature (1)..(69): NCBI GI NO: 9294470 NR Description: gb|AAB60912
  misc_feature (1)..(69): NCBI GI NO: 21618134 NR Description: unknown [Arabidopsis thaliana]
  misc_feature (1)..(69): NCBI GI NO: 29427827 NR Description: LOB domain protein 25
  misc_feature (1)..(69): NCBI GI NO: 18405472 NR Description: expressed protein; protein id: At3g27650
MNEIHPLQREDAMNSLAYEADMRIRDPVYGCVGVISILQHNLRQLQQDLARAKYELSKYQAAAAAASASTAPTGPQAMAEFIGSAMPNGAAHNFINLGHSAALGSLGGSTAMFGQQEQFGSNAQMLSRSYDGGEPIARIGMNNGGYEFGYSSATTMGGSAGAVSGGLGTLGISSPPFLKSGTAGGDEKPSGGQ

SEQ ID NO: 23865 - protein, 181 aa, Zea mays subsp. mays
  peptide (1)..(181): Ceres Seq. ID no. 12407347
  misc_feature (1)..(181): NCBI GI NO: 34907508 NR Description: B1099D03.24
  misc_feature (1)..(121): NCBI GI NO: 15218746 NR Description: unknown protein; protein id: At1g65620
  misc_feature (1)..(75): NCBI GI NO: 34896184 NR Description: contains ESTs C98868
  misc_feature (1)..(115): NCBI GI NO: 15240110 NR Description: putative protein; protein id: At5g66870.1
  misc_feature (1)..(56): NCBI GI NO: 15242624 NR Description: putative protein; protein id: At5g63090
  misc_feature (1)..(172): NCBI GI NO: 15227870 NR Description: hypothetical protein; protein id: At2g23660.1
  misc_feature (1)..(57): NCBI GI NO: 9294470 NR Description: gb|AAB60912
  misc_feature (1)..(57): NCBI GI NO: 21618134 NR Description: unknown [Arabidopsis thaliana]
  misc_feature (1)..(57): NCBI GI NO: 29427827 NR Description: LOB domain protein 25
  misc_feature (1)..(57): NCBI GI NO: 18405472 NR Description: expressed protein; protein id: At3g27650
MNSLAYEADMRIRDPVYGCVGVISILQHNLRQLQQDLARAKYELSKYQAAAAAASASTAPTGPQAMAEFIGSAMPNGAAHNFINLGHSAALGSLGGSTAMFGQQEQFGSNAQMLSRSYDGGEPIARIGMNNGGYEFGYSSATTMGGSAGAVSGGLGTLGISSPPFLKSGTAGGDEKPSGGQ

SEQ ID NO: 23866 - DNA, 1413 bp, Zea mays subsp. mays
  misc_feature (1)..(1413): Ceres Seq. ID no. 12410874
atccattgcgatacttgagacgcttcgctctctctcttgttcttctcgccttctgcccgagtgatggccagcctcaccgacctcgtcaacctcgacctgagtgactgcaccgacaggatcatcgccgagtacatctggattggaggaaccgggatagacctcaggagcaaagcgaggacggtgaaaggccccatcaccgacccgatccagctgccgaaatggaactacgacggctccagcaccgggcaggctcccggagaggacagcgaagtcatcctctaccctcaagccattttcaaggacccgttcaggaagggtaaccacatccttgtgatgtgtgactgctacacgccacaaggcgagccaatccccaccaacaagaggtacagcgccgccaaggttttcagccaccccgacgtcgcagctgaggtgccgtggtacggtattgagcaggagtacaccctccttcagaaggacgtgagctggcccctcggctggcccgttggtggataccctggtccccagggaccatactactgcgccgccggtgccgacaaggcctttgggcgcgacgtggttgacgcccactacaaggcctgcctctacgccggcatcaacatcagcggcatcaacggcgaagtcatgcctggacagtgggagttccaagtggggccgtccgttgggatctctgccggcgacgagatatgggtcgcccgctacattctcgagaggatcaccgagatggccggaatcgtcctctccctcgacccgaagccgatcaagggcgactggaacggcgccggcgcccacaccaactacagcaccaagtcgatgagggaggccgggggatacgaggtcatcaaggcggcgatcgacaagctggggaagaggcacaaggagcacatcgccgcgtacggcgagggcaacgagcgccgcctcacgggccgccacgagaccgccgacatcaacaccttcaaatggggcgtggcgaaccgcggcgcgtccatccgcgtcggccgcgacaccgagagggagggcaagggctacttcgaggaccgcaggccggcgtccaacatggacccctacgtcgtcaccggcatgatcgccgagaccaccatcctgtggaatggaaactgatcaagcatgtgcattctcgagggagcccactgtttttcttctgcacaacgcatccgccgtggtgtcgctttggttttgaaatttagattccgttgtcctaaaatttatcactacggtctccagtgtattgctcgggaacgaatgaataacgactgcgatgtttgtttttttttttgctggcgtagtagatgtacgtttggctgtgcttccagtttattgggtaaatgaaaaaatgtaatggtctaccggtcttaaaatagtagtcattttagctct

SEQ ID NO: 23867 - protein, 357 aa, Zea mays subsp. mays
  peptide (1)..(357): Ceres Seq. ID no. 12410875
  misc_feature (103)..(355): Pfam Name: Pfam Description:  Glutamine synthetase, catalytic domain
  misc_feature (1)..(357): NCBI GI NO: 585201 NR Description: GLUTAMINE SYNTHETASE ROOT ISOZYME 1
  misc_feature (1)..(357): NCBI GI NO: 699623 NR Description: glutamine synthetase [Zea mays]
  misc_feature (1)..(357): NCBI GI NO: 699621 NR Description: glutamine synthetase [Zea mays]
  misc_feature (1)..(357): NCBI GI NO: 1169926 NR Description: GLUTAMINE SYNTHETASE ROOT ISOZYME 5
  misc_feature (1)..(357): NCBI GI NO: 121332 NR Description: GLUTAMINE SYNTHETASE ROOT ISOZYME
  misc_feature (1)..(355): NCBI GI NO: 1076474 NR Description: Gln 1.2 protein - radish
  misc_feature (1)..(354): NCBI GI NO: 13924490 NR Description: cytosolic glutamine synthetase
  misc_feature (1)..(354): NCBI GI NO: 121368 NR Description: Glutamine synthetase, cytosolic isozyme
  misc_feature (1)..(354): NCBI GI NO: 10946357 NR Description: cytosolic glutamine synthetase GSbeta1
  misc_feature (1)..(354): NCBI GI NO: 417060 NR Description: Glutamine synthetase nodule isozyme
MASLTDLVNLDLSDCTDRIIAEYIWIGGTGIDLRSKARTVKGPITDPIQLPKWNYDGSSTGQAPGEDSEVILYPQAIFKDPFRKGNHILVMCDCYTPQGEPIPTNKRYSAAKVFSHPDVAAEVPWYGIEQEYTLLQKDVSWPLGWPVGGYPGPQGPYYCAAGADKAFGRDVVDAHYKACLYAGINISGINGEVMPGQWEFQVGPSVGISAGDEIWVARYILERITEMAGIVLSLDPKPIKGDWNGAGAHTNYSTKSMREAGGYEVIKAAIDKLGKRHKEHIAAYGEGNERRLTGRHETADINTFKWGVANRGASIRVGRDTEREGKGYFEDRRPASNMDPYVVTGMIAETTILWNGN

SEQ ID NO: 23868 - protein, 267 aa, Zea mays subsp. mays
  peptide (1)..(267): Ceres Seq. ID no. 12410876
  misc_feature (13)..(265): Pfam Name: Pfam Description:  Glutamine synthetase, catalytic domain
  misc_feature (1)..(267): NCBI GI NO: 585201 NR Description: GLUTAMINE SYNTHETASE ROOT ISOZYME 1
  misc_feature (1)..(267): NCBI GI NO: 699623 NR Description: glutamine synthetase [Zea mays]
  misc_feature (1)..(267): NCBI GI NO: 699621 NR Description: glutamine synthetase [Zea mays]
  misc_feature (1)..(267): NCBI GI NO: 1169926 NR Description: GLUTAMINE SYNTHETASE ROOT ISOZYME 5
  misc_feature (1)..(267): NCBI GI NO: 121332 NR Description: GLUTAMINE SYNTHETASE ROOT ISOZYME
  misc_feature (1)..(265): NCBI GI NO: 1076474 NR Description: Gln 1.2 protein - radish
  misc_feature (1)..(264): NCBI GI NO: 13924490 NR Description: cytosolic glutamine synthetase
  misc_feature (1)..(264): NCBI GI NO: 121368 NR Description: Glutamine synthetase, cytosolic isozyme
  misc_feature (1)..(264): NCBI GI NO: 10946357 NR Description: cytosolic glutamine synthetase GSbeta1
  misc_feature (1)..(264): NCBI GI NO: 417060 NR Description: Glutamine synthetase nodule isozyme
MCDCYTPQGEPIPTNKRYSAAKVFSHPDVAAEVPWYGIEQEYTLLQKDVSWPLGWPVGGYPGPQGPYYCAAGADKAFGRDVVDAHYKACLYAGINISGINGEVMPGQWEFQVGPSVGISAGDEIWVARYILERITEMAGIVLSLDPKPIKGDWNGAGAHTNYSTKSMREAGGYEVIKAAIDKLGKRHKEHIAAYGEGNERRLTGRHETADINTFKWGVANRGASIRVGRDTEREGKGYFEDRRPASNMDPYVVTGMIAETTILWNGN

SEQ ID NO: 23869 - DNA, 1829 bp, Zea mays subsp. mays
  misc_feature (1)..(1829): Ceres Seq. ID no. 12365195
ttcttctcccccagatctctctcttcttctcttgcgaagtcgccaaggccagtccccaatccccatccagccagaccgccggcgatgacggaccaccgcgacgtgatgttgcccttgtccctccaatacatagccacccgtgccctcctcctgctcgtcatcgcgtccgccgtttcctgctcttccttgccgccggaggacggcatccgggtcgtctctgcagagaaaagaatcgacctcacgggtcccatcgtcaaagtcttcctaacattgaaggttgagaatgctcccacggcctctgaagcatcacgagttctcctcgccttcacgcccacagagtttcaacatctctctattgtcaaggccacaagagcggaggggaagcgcaagaagaaggcattcgtacccctctcggtccaagcctctgagctcgccaccaccgctcccgacgcccctcgcctctactctgttctgctcagcactcctctgaaaccgggcgatgcaaccactctagaagtgctatacatgctcactcactctttagagcccttccccgctgagattagccagtcagagtcccagttggtttactaccgtgacagtgcggtgcttctctcgccctaccatgtcctggagcaggttacctacatcaaaatgccaagcaataggatcgaatccttcacaagggtcgatcctaccacacgagctggttctgaagtgaaatatggcacatacagtaaccagatgccaaactcctatttgccagttcttgtgcattatgagaataaccgcccatttgctgttgttgaggagcttgtacgcaaggtggagatttctcactggggaaacatccaaatcaccgagcagtataaactgaaacacggtggtgctcgtcacaaaggagtcttttccaggcttgagtatcaatctaggccatctatcagtggagcttcgtcctttaagaatcttcttgcaaggctgccacctcgggttcattcagtttactatcgtgatgagattggtaacatctcctcatcccatctgcgcactgattcacacaagtccgatctagaaattgagcccagatatccgttatttggtgggtggcactgcacgttcaccattggctatggtcttccattgcaagattttgtctttgagtcagttgatggccggcgctacatcaaccttacttttggttgccctctattggatactgtggttgacgatcttacagttaaagttgtgcttcctgaaggatcaaaaaatccagagcatgtagttccttttgtgacagagaaacatcttgagactagttattcataccttgacgttgttggaaggacgacggttgtactgaagaagaaaaatgttgtaggggagcacaacgttcctttccaggtgtactatgaattcaatccgatcttcatgctggcggaaccattgatgctgatatctgcagtgttgctgtttttcgttgccttcattgcgtatcttcacatggatctttccatcagaaaatcatcataggcctgttggcaattctgtccaccacagtattttttgaggcacatgttctgctaactgtgattgatgaagtaacaatccttgttctagcgcactagttgaactgtttatcagtgcaccatccccaatggagaaggacgatgtttttttttttgtgtgtgtgtgggtggaatatgattgcttcatgtagggctcacaacgatcagaaacgatatcatctataggaaaacgattgcctagaaatttagctggtttcataattaatcaacgtggtgactacaatacgatattgatatatgttc

SEQ ID NO: 23870 - protein, 509 aa, Zea mays subsp. mays
  peptide (1)..(509): Ceres Seq. ID no. 12365196
  misc_feature (69)..(500): Pfam Name: Pfam Description:  Ribophorin I
  misc_feature (44)..(507): NCBI GI NO: 15226341 NR Description: putative ribophorin I; protein id: At2g01720.1
  misc_feature (49)..(509): NCBI GI NO: 7489438 NR Description: ribophorin I homolog - barley (fragment)
  misc_feature (49)..(509): NCBI GI NO: 15223039 NR Description: putative ribophorin I
  misc_feature (48)..(507): NCBI GI NO: 28277278 NR Description: Similar to ribophorin I [Xenopus laevis]
  misc_feature (52)..(507): NCBI GI NO: 40674542 NR Description: Unknown (protein for MGC:76266)
  misc_feature (50)..(507): NCBI GI NO: 28175644 NR Description: Similar to ribophorin I [Xenopus laevis]
  misc_feature (49)..(507): NCBI GI NO: 9857227 NR Description: ribophorin I [Sus scrofa]
  misc_feature (49)..(507): NCBI GI NO: 4506675 NR Description: ribophorin I [Homo sapiens]
  misc_feature (78)..(507): NCBI GI NO: 14124942 NR Description: Similar to ribophorin I [Homo sapiens]
  misc_feature (49)..(507): NCBI GI NO: 38512106 NR Description: Ribophorin I [Rattus norvegicus]
FFSPRSLSSSLAKSPRPVPNPHPARPPAMTDHRDVMLPLSLQYIATRALLLLVIASAVSCSSLPPEDGIRVVSAEKRIDLTGPIVKVFLTLKVENAPTASEASRVLLAFTPTEFQHLSIVKATRAEGKRKKKAFVPLSVQASELATTAPDAPRLYSVLLSTPLKPGDATTLEVLYMLTHSLEPFPAEISQSESQLVYYRDSAVLLSPYHVLEQVTYIKMPSNRIESFTRVDPTTRAGSEVKYGTYSNQMPNSYLPVLVHYENNRPFAVVEELVRKVEISHWGNIQITEQYKLKHGGARHKGVFSRLEYQSRPSISGASSFKNLLARLPPRVHSVYYRDEIGNISSSHLRTDSHKSDLEIEPRYPLFGGWHCTFTIGYGLPLQDFVFESVDGRRYINLTFGCPLLDTVVDDLTVKVVLPEGSKNPEHVVPFVTEKHLETSYSYLDVVGRTTVVLKKKNVVGEHNVPFQVYYEFNPIFMLAEPLMLISAVLLFFVAFIAYLHMDLSIRKSS

SEQ ID NO: 23871 - protein, 481 aa, Zea mays subsp. mays
  peptide (1)..(481): Ceres Seq. ID no. 12365197
  misc_feature (41)..(472): Pfam Name: Pfam Description:  Ribophorin I
  misc_feature (16)..(479): NCBI GI NO: 15226341 NR Description: putative ribophorin I; protein id: At2g01720.1
  misc_feature (21)..(481): NCBI GI NO: 7489438 NR Description: ribophorin I homolog - barley (fragment)
  misc_feature (21)..(481): NCBI GI NO: 15223039 NR Description: putative ribophorin I
  misc_feature (20)..(479): NCBI GI NO: 28277278 NR Description: Similar to ribophorin I [Xenopus laevis]
  misc_feature (24)..(479): NCBI GI NO: 40674542 NR Description: Unknown (protein for MGC:76266)
  misc_feature (22)..(479): NCBI GI NO: 28175644 NR Description: Similar to ribophorin I [Xenopus laevis]
  misc_feature (21)..(479): NCBI GI NO: 9857227 NR Description: ribophorin I [Sus scrofa]
  misc_feature (21)..(479): NCBI GI NO: 4506675 NR Description: ribophorin I [Homo sapiens]
  misc_feature (50)..(479): NCBI GI NO: 14124942 NR Description: Similar to ribophorin I [Homo sapiens]
  misc_feature (21)..(479): NCBI GI NO: 38512106 NR Description: Ribophorin I [Rattus norvegicus]
MTDHRDVMLPLSLQYIATRALLLLVIASAVSCSSLPPEDGIRVVSAEKRIDLTGPIVKVFLTLKVENAPTASEASRVLLAFTPTEFQHLSIVKATRAEGKRKKKAFVPLSVQASELATTAPDAPRLYSVLLSTPLKPGDATTLEVLYMLTHSLEPFPAEISQSESQLVYYRDSAVLLSPYHVLEQVTYIKMPSNRIESFTRVDPTTRAGSEVKYGTYSNQMPNSYLPVLVHYENNRPFAVVEELVRKVEISHWGNIQITEQYKLKHGGARHKGVFSRLEYQSRPSISGASSFKNLLARLPPRVHSVYYRDEIGNISSSHLRTDSHKSDLEIEPRYPLFGGWHCTFTIGYGLPLQDFVFESVDGRRYINLTFGCPLLDTVVDDLTVKVVLPEGSKNPEHVVPFVTEKHLETSYSYLDVVGRTTVVLKKKNVVGEHNVPFQVYYEFNPIFMLAEPLMLISAVLLFFVAFIAYLHMDLSIRKSS

SEQ ID NO: 23872 - protein, 474 aa, Zea mays subsp. mays
  peptide (1)..(474): Ceres Seq. ID no. 12365198
  misc_feature (34)..(465): Pfam Name: Pfam Description:  Ribophorin I
  misc_feature (9)..(472): NCBI GI NO: 15226341 NR Description: putative ribophorin I; protein id: At2g01720.1
  misc_feature (14)..(474): NCBI GI NO: 7489438 NR Description: ribophorin I homolog - barley (fragment)
  misc_feature (14)..(474): NCBI GI NO: 15223039 NR Description: putative ribophorin I
  misc_feature (13)..(472): NCBI GI NO: 28277278 NR Description: Similar to ribophorin I [Xenopus laevis]
  misc_feature (17)..(472): NCBI GI NO: 40674542 NR Description: Unknown (protein for MGC:76266)
  misc_feature (15)..(472): NCBI GI NO: 28175644 NR Description: Similar to ribophorin I [Xenopus laevis]
  misc_feature (14)..(472): NCBI GI NO: 9857227 NR Description: ribophorin I [Sus scrofa]
  misc_feature (14)..(472): NCBI GI NO: 4506675 NR Description: ribophorin I [Homo sapiens]
  misc_feature (43)..(472): NCBI GI NO: 14124942 NR Description: Similar to ribophorin I [Homo sapiens]
  misc_feature (14)..(472): NCBI GI NO: 38512106 NR Description: Ribophorin I [Rattus norvegicus]
MLPLSLQYIATRALLLLVIASAVSCSSLPPEDGIRVVSAEKRIDLTGPIVKVFLTLKVENAPTASEASRVLLAFTPTEFQHLSIVKATRAEGKRKKKAFVPLSVQASELATTAPDAPRLYSVLLSTPLKPGDATTLEVLYMLTHSLEPFPAEISQSESQLVYYRDSAVLLSPYHVLEQVTYIKMPSNRIESFTRVDPTTRAGSEVKYGTYSNQMPNSYLPVLVHYENNRPFAVVEELVRKVEISHWGNIQITEQYKLKHGGARHKGVFSRLEYQSRPSISGASSFKNLLARLPPRVHSVYYRDEIGNISSSHLRTDSHKSDLEIEPRYPLFGGWHCTFTIGYGLPLQDFVFESVDGRRYINLTFGCPLLDTVVDDLTVKVVLPEGSKNPEHVVPFVTEKHLETSYSYLDVVGRTTVVLKKKNVVGEHNVPFQVYYEFNPIFMLAEPLMLISAVLLFFVAFIAYLHMDLSIRKSS

SEQ ID NO: 23873 - DNA, 1484 bp, Zea mays subsp. mays
  misc_feature (1)..(1484): Ceres Seq. ID no. 12410870
agtatccagactctctctcgggcctctcggctctcctctccccgatttccttccccacccgctgtcagtctcactccccccgcgcgcgctctctctttcctcgccttcgccgccggcgacgagcttgagctcgagctggttcctcgtatagaagacgacggccgcggtatggagcccatgaacgtagacaacggcggctgcggaggccttgacgcgcagatcgaacagctgatgcagtgccgcccgctcgccgagcaagaggttaaggcactgtgcgagaaggccaaggagatattgatggaggaaagcaacgttcagcctgtcaagagtccagtgacaatatgtggtgatatacatggacaattccatgatcttgtagagcttttccgaattggcgggaagtgtccagacaccaattacttatttatgggagattatgtagatcgtggctactattctgttgagactgtcacgatgctagtagcactaaaagtgaggtatccacatcgaattacaatccttcgtggaaaccacgagagtcggcagatcacacaggtgtatggattctacgacgaatgcctacgaaagtatggcaatgcaaatgtatggaagacatttacggatctttttgattattttcctctgacagctctggtggaatctgagattttctgccttcacggtggtctatctccatcaattgaaaatcttgatagtgtgcgcagcttagatcgagtccaagaggttccccatgagggacctatgtgcgatctcttatggtcagatccagacgaccgatgtggttggggcatctcccctcgcggtgctggctacactttcgggcaggacatatcagagcagtttaatcacacaaacaatctcaaactcgtagctcgggctcatcaattagttatggagggatataactgggctcatgagcaaaaggttgtcaccatattcagtgctccaaattactgctatcgatgcggcaatatggcatccattttggaagttgacgactgcaacagccacacattcatccagtttgaaccagcccctaggagaggtgagccagatgtgacgcgaagaacaccggattatttcctttgagctgtcgatgttaccgtttcccagcctgtgtcgtgataatcgatgccaacgtctgctggatcaagggccagacagaaataacaggggaatgccgaagcactatgcccagagtttcacccttttcaggcgacagagaagggcggccatccacctacaactctggccgccctctgttttatgcactttttacagagtcgtggaactggccaaaaagaccggagtaccatttgcacctgtgtagcgtaagcttgtactacaaataggcgtgtgctaatctgtatcaccattcatcaattgcaacgaactgttgaactccttccatcagtaaagtaaattttggtaaaagaacggcttacagtgtcggtaatgacact

SEQ ID NO: 23874 - protein, 369 aa, Zea mays subsp. mays
  peptide (1)..(369): Ceres Seq. ID no. 12410871
  misc_feature (110)..(305): Pfam Name: Pfam Description:  Calcineurin-like phosphoesterase
  misc_feature (107)..(369): NCBI GI NO: 19071628 NR Description: serine/threonine protein phosphatase PP2A-4catalytic subunit
  misc_feature (57)..(113): NCBI GI NO: 19071628 NR Description: serine/threonine protein phosphatase PP2A-4catalytic subunit
  misc_feature (64)..(369): NCBI GI NO: 11134154 NR Description: Serine/threonine protein phosphatase PP2A-4catalytic subunit
  misc_feature (68)..(369): NCBI GI NO: 11134218 NR Description: Serine/threonine protein phosphatase PP2A-2catalytic subunit
  misc_feature (70)..(369): NCBI GI NO: 18410971 NR Description: protein phosphatase PP2A catalytic subunit
  misc_feature (70)..(369): NCBI GI NO: 418777 NR Description: phosphoprotein phosphatase (EC 3
  misc_feature (70)..(369): NCBI GI NO: 18405985 NR Description: protein phosphatase 2A
  misc_feature (57)..(369): NCBI GI NO: 11133821 NR Description: Serine/threonine protein phosphatase PP2A catalytic subunit
  misc_feature (70)..(369): NCBI GI NO: 548441 NR Description: SERINE/THREONINE PROTEIN PHOSPHATASE PP2A CATALYTICSUBUNIT
  misc_feature (70)..(369): NCBI GI NO: 7248363 NR Description: type 2A protein phosphatase-3 [Vicia faba]
SIQTLSRASRLSSPRFPSPPAVSLTPPARALSFLAFAAGDELELELVPRIEDDGRGMEPMNVDNGGCGGLDAQIEQLMQCRPLAEQEVKALCEKAKEILMEESNVQPVKSPVTICGDIHGQFHDLVELFRIGGKCPDTNYLFMGDYVDRGYYSVETVTMLVALKVRYPHRITILRGNHESRQITQVYGFYDECLRKYGNANVWKTFTDLFDYFPLTALVESEIFCLHGGLSPSIENLDSVRSLDRVQEVPHEGPMCDLLWSDPDDRCGWGISPRGAGYTFGQDISEQFNHTNNLKLVARAHQLVMEGYNWAHEQKVVTIFSAPNYCYRCGNMASILEVDDCNSHTFIQFEPAPRRGEPDVTRRTPDYFL

SEQ ID NO: 23875 - protein, 313 aa, Zea mays subsp. mays
  peptide (1)..(313): Ceres Seq. ID no. 12410872
  misc_feature (54)..(249): Pfam Name: Pfam Description:  Calcineurin-like phosphoesterase
  misc_feature (51)..(313): NCBI GI NO: 19071628 NR Description: serine/threonine protein phosphatase PP2A-4catalytic subunit
  misc_feature (1)..(57): NCBI GI NO: 19071628 NR Description: serine/threonine protein phosphatase PP2A-4catalytic subunit
  misc_feature (8)..(313): NCBI GI NO: 11134154 NR Description: Serine/threonine protein phosphatase PP2A-4catalytic subunit
  misc_feature (12)..(313): NCBI GI NO: 11134218 NR Description: Serine/threonine protein phosphatase PP2A-2catalytic subunit
  misc_feature (14)..(313): NCBI GI NO: 18410971 NR Description: protein phosphatase PP2A catalytic subunit
  misc_feature (14)..(313): NCBI GI NO: 418777 NR Description: phosphoprotein phosphatase (EC 3
  misc_feature (14)..(313): NCBI GI NO: 18405985 NR Description: protein phosphatase 2A
  misc_feature (1)..(313): NCBI GI NO: 11133821 NR Description: Serine/threonine protein phosphatase PP2A catalytic subunit
  misc_feature (14)..(313): NCBI GI NO: 548441 NR Description: SERINE/THREONINE PROTEIN PHOSPHATASE PP2A CATALYTICSUBUNIT
  misc_feature (14)..(313): NCBI GI NO: 7248363 NR Description: type 2A protein phosphatase-3 [Vicia faba]
MEPMNVDNGGCGGLDAQIEQLMQCRPLAEQEVKALCEKAKEILMEESNVQPVKSPVTICGDIHGQFHDLVELFRIGGKCPDTNYLFMGDYVDRGYYSVETVTMLVALKVRYPHRITILRGNHESRQITQVYGFYDECLRKYGNANVWKTFTDLFDYFPLTALVESEIFCLHGGLSPSIENLDSVRSLDRVQEVPHEGPMCDLLWSDPDDRCGWGISPRGAGYTFGQDISEQFNHTNNLKLVARAHQLVMEGYNWAHEQKVVTIFSAPNYCYRCGNMASILEVDDCNSHTFIQFEPAPRRGEPDVTRRTPDYFL

SEQ ID NO: 23876 - protein, 310 aa, Zea mays subsp. mays
  peptide (1)..(310): Ceres Seq. ID no. 12410873
  misc_feature (51)..(246): Pfam Name: Pfam Description:  Calcineurin-like phosphoesterase
  misc_feature (48)..(310): NCBI GI NO: 19071628 NR Description: serine/threonine protein phosphatase PP2A-4catalytic subunit
  misc_feature (1)..(54): NCBI GI NO: 19071628 NR Description: serine/threonine protein phosphatase PP2A-4catalytic subunit
  misc_feature (5)..(310): NCBI GI NO: 11134154 NR Description: Serine/threonine protein phosphatase PP2A-4catalytic subunit
  misc_feature (9)..(310): NCBI GI NO: 11134218 NR Description: Serine/threonine protein phosphatase PP2A-2catalytic subunit
  misc_feature (11)..(310): NCBI GI NO: 18410971 NR Description: protein phosphatase PP2A catalytic subunit
  misc_feature (11)..(310): NCBI GI NO: 418777 NR Description: phosphoprotein phosphatase (EC 3
  misc_feature (11)..(310): NCBI GI NO: 18405985 NR Description: protein phosphatase 2A
  misc_feature (1)..(310): NCBI GI NO: 11133821 NR Description: Serine/threonine protein phosphatase PP2A catalytic subunit
  misc_feature (11)..(310): NCBI GI NO: 548441 NR Description: SERINE/THREONINE PROTEIN PHOSPHATASE PP2A CATALYTICSUBUNIT
  misc_feature (11)..(310): NCBI GI NO: 7248363 NR Description: type 2A protein phosphatase-3 [Vicia faba]
MNVDNGGCGGLDAQIEQLMQCRPLAEQEVKALCEKAKEILMEESNVQPVKSPVTICGDIHGQFHDLVELFRIGGKCPDTNYLFMGDYVDRGYYSVETVTMLVALKVRYPHRITILRGNHESRQITQVYGFYDECLRKYGNANVWKTFTDLFDYFPLTALVESEIFCLHGGLSPSIENLDSVRSLDRVQEVPHEGPMCDLLWSDPDDRCGWGISPRGAGYTFGQDISEQFNHTNNLKLVARAHQLVMEGYNWAHEQKVVTIFSAPNYCYRCGNMASILEVDDCNSHTFIQFEPAPRRGEPDVTRRTPDYFL

SEQ ID NO: 23877 - DNA, 1102 bp, Zea mays subsp. mays
  misc_feature (1)..(1102): Ceres Seq. ID no. 12412419
actgtgtgttccttctccggggaaaccacgaatccaagtactgcacgtcagtatatggtttcgagaaggaggtaatgactaaatacaaagatcagggccctcaaatttaccggaagtttttaagatgttttgaggaccttcctctggcgacaataatagcaggatgtgtgtacactgcacacggcggtatcttccgtggaacaattgtagtgccatcaaagaaatcaaaaaagggaaagaagggtcacaaatacaaggcgaattttactgttgatctgacttccatgaaacttggatccttggatgagttattgaaagcaaggagaactgttctcgaccctccttgggaaggctcaaatttgatccctggggatgtgctgtggtctgacccttccttgcagatgggtctttctccgaataaagaacgaggcataggtttgctttggggtcctgatatcactcagcagtttctgaggacaaatcatttgaagctaatcatcaggtcacatgaaaggtccagacgcgagagacaaagcgacacgatctcttaggaatggataaaggatatacgattgatcatgaagtagaatgtgggaaactaattactctcttcagtgctccggactacccacagtttcaggcttcagaggagcgatacaacaatcgtggagcatatattgtccttagtccacctgattttgctacccctgttttccatagcttcggagctgtaaagcctcgacctgcggcccatccgttctatgattttgaacaagtgatcgactcagatgaagaattggatttaatcgccatggacagcggcacgtcgagcctgtcatgacgactcgccatgtaccttttgcacttagggttgtatttattattatcgctccaattgttgccatggaagcgtggcatcaaggttttttgctgtcgttgttgtaagctaatgccaacgtagtaacgttgcaggtttctggatggcctgagtcctgacatgcacacgccaaatctgatctgttggtttggttgaggttgatttgtatctaaaactaagtgagcgtgagatgtcatctaaaggctgaaggaagtcagcggttgc

SEQ ID NO: 23878 - protein, 182 aa, Zea mays subsp. mays
  peptide (1)..(182): Ceres Seq. ID no. 12412420
  misc_feature (2)..(170): Pfam Name: Pfam Description:  Calcineurin-like phosphoesterase
  misc_feature (2)..(178): NCBI GI NO: 11358619 NR Description: phosphoprotein phosphatase (EC 3.1.3.16) PP7
  misc_feature (2)..(178): NCBI GI NO: 30697908 NR Description: ser/thr protein phosphatase catalytic subunit
  misc_feature (2)..(175): NCBI GI NO: 15221080 NR Description: serine/threonine phosphatase PP7, putative
  misc_feature (2)..(175): NCBI GI NO: 25405918 NR Description: protein F21D18.16
  misc_feature (2)..(164): NCBI GI NO: 18424758 NR Description: ser/thr protein phosphatase catalytic subunit
  misc_feature (94)..(182): NCBI GI NO: 15238894 NR Description: serine/threonine protein phosphatase
  misc_feature (2)..(65): NCBI GI NO: 15238894 NR Description: serine/threonine protein phosphatase
  misc_feature (88)..(170): NCBI GI NO: 19347799 NR Description: putative phosphoprotein phosphatase
  misc_feature (2)..(64): NCBI GI NO: 19347799 NR Description: putative phosphoprotein phosphatase
  misc_feature (2)..(170): NCBI GI NO: 39586060 NR Description: Hypothetical protein CBG15166
CVFLLRGNHESKYCTSVYGFEKEVMTKYKDQGPQIYRKFLRCFEDLPLATIIAGCVYTAHGGIFRGTIVVPSKKSKKGKKGHKYKANFTVDLTSMKLGSLDELLKARRTVLDPPWEGSNLIPGDVLWSDPSLQMGLSPNKERGIGLLWGPDITQQFLRTNHLKLIIRSHERSRRERQSDTIS

SEQ ID NO: 23879 - protein, 158 aa, Zea mays subsp. mays
  peptide (1)..(158): Ceres Seq. ID no. 12412421
  misc_feature (1)..(146): Pfam Name: Pfam Description:  Calcineurin-like phosphoesterase
  misc_feature (1)..(154): NCBI GI NO: 11358619 NR Description: phosphoprotein phosphatase (EC 3.1.3.16) PP7
  misc_feature (1)..(154): NCBI GI NO: 30697908 NR Description: ser/thr protein phosphatase catalytic subunit
  misc_feature (1)..(151): NCBI GI NO: 15221080 NR Description: serine/threonine phosphatase PP7, putative
  misc_feature (1)..(151): NCBI GI NO: 25405918 NR Description: protein F21D18.16
  misc_feature (1)..(140): NCBI GI NO: 18424758 NR Description: ser/thr protein phosphatase catalytic subunit
  misc_feature (70)..(158): NCBI GI NO: 15238894 NR Description: serine/threonine protein phosphatase
  misc_feature (1)..(41): NCBI GI NO: 15238894 NR Description: serine/threonine protein phosphatase
  misc_feature (64)..(146): NCBI GI NO: 19347799 NR Description: putative phosphoprotein phosphatase
  misc_feature (1)..(40): NCBI GI NO: 19347799 NR Description: putative phosphoprotein phosphatase
  misc_feature (1)..(146): NCBI GI NO: 39586060 NR Description: Hypothetical protein CBG15166
MTKYKDQGPQIYRKFLRCFEDLPLATIIAGCVYTAHGGIFRGTIVVPSKKSKKGKKGHKYKANFTVDLTSMKLGSLDELLKARRTVLDPPWEGSNLIPGDVLWSDPSLQMGLSPNKERGIGLLWGPDITQQFLRTNHLKLIIRSHERSRRERQSDTIS

SEQ ID NO: 23880 - protein, 95 aa, Zea mays subsp. mays
  peptide (1)..(95): Ceres Seq. ID no. 12412422
  misc_feature (1)..(89): NCBI GI NO: 11358619 NR Description: phosphoprotein phosphatase (EC 3.1.3.16) PP7
  misc_feature (1)..(89): NCBI GI NO: 30697908 NR Description: ser/thr protein phosphatase catalytic subunit
  misc_feature (1)..(82): NCBI GI NO: 15221080 NR Description: serine/threonine phosphatase PP7, putative
  misc_feature (1)..(82): NCBI GI NO: 25405918 NR Description: protein F21D18.16
  misc_feature (1)..(57): NCBI GI NO: 15238894 NR Description: serine/threonine protein phosphatase
MDKGYTIDHEVECGKLITLFSAPDYPQFQASEERYNNRGAYIVLSPPDFATPVFHSFGAVKPRPAAHPFYDFEQVIDSDEELDLIAMDSGTSSLS

SEQ ID NO: 23881 - DNA, 950 bp, Zea mays subsp. mays
  misc_feature (1)..(950): Ceres Seq. ID no. 12352680
gccgcaatacacactactgttcctccgattaacggaccggccggcgacgtgcatagcaggtacgcagcagctctagctagcaatggcgcctccccgccggccgagcatggggcggcagaagatcgagatccggcgcatagagagcgacgaggcgcggcaggtgtgcttctcgaagcgccgcgcggggctgttcaagaaggccagcgagctgtccatcctctgcggcgccgacgtggccgccgtcgtcttctcccccgccggcaaggccttctccttcggccacccgtccgtggagtccgtcgtcgagcgcttcctcgcctcgtcgtccccctcgcctgccggtgccggtgccggccactccgccagcggcggcgaggaccgcgcggtctcggagctgaaccgccagcacggcgagctgcgcgcgcagctggacgccgtgaaggcgaggcaggagcgcgcggacgaggcgatccggaaggagcgcgaggcggggagcccggcgatggcgtggatcgacgcggaactgagcgggggcgcgatggggcacgacgacctggtcgcgttctgggccgcgcttgcgggcgtgcaggccgccgtggcggccagcgccgaccggctgctgcgcgacgcgctgctcgtcgggcgcaggggccggcagcagcagcagccggcccagcttgccgggggtggtggcgtggcctttgacgtcggcgcgtttggcggcgttggcgtgcaggtgcagccgcctccgggattcgccggcgtcgtcgacctgcaggggttcggggggcaggctgcggccatcctcggcgccggcggtccctcatgagtgatcgaatgcgtgtgtgcatacttcactcaagttgtttggagataacgtcgcaaataaatttgcgacaaatgttttggttaatttgttcgtatgcattgttcgttctcaccttgctctc

SEQ ID NO: 23882 - protein, 248 aa, Zea mays subsp. mays
  peptide (1)..(248): Ceres Seq. ID no. 12352681
  misc_feature (17)..(67): Pfam Name: DNA-binding and dimerisationdomain Pfam Description: SRF-type transcription factor
  misc_feature (2)..(189): NCBI GI NO: 34906076 NR Description: P0459B04.16
  misc_feature (1)..(143): NCBI GI NO: 30682571 NR Description: MADS-box protein [Arabidopsis thaliana]
  misc_feature (5)..(143): NCBI GI NO: 25412255 NR Description: probable MADS-box protein
  misc_feature (6)..(181): NCBI GI NO: 15239333 NR Description: MADS-box protein; protein id: At5g60440.1
  misc_feature (6)..(85): NCBI GI NO: 32402436 NR Description: MADS-box protein AGL62 [Arabidopsis thaliana]
  misc_feature (9)..(130): NCBI GI NO: 15226309 NR Description: MADS-box protein; protein id: At2g34440.1
  misc_feature (6)..(135): NCBI GI NO: 15234456 NR Description: MADS-box protein; protein id: At4g36590
  misc_feature (6)..(221): NCBI GI NO: 15218647 NR Description: MADS-box protein; protein id: At1g65360.1
  misc_feature (9)..(128): NCBI GI NO: 34015383 NR Description: putative transcription factor
  misc_feature (9)..(135): NCBI GI NO: 3253153 NR Description: MADS-box protein [Ceratopteris richardii]
MAPPRRPSMGRQKIEIRRIESDEARQVCFSKRRAGLFKKASELSILCGADVAAVVFSPAGKAFSFGHPSVESVVERFLASSSPSPAGAGAGHSASGGEDRAVSELNRQHGELRAQLDAVKARQERADEAIRKEREAGSPAMAWIDAELSGGAMGHDDLVAFWAALAGVQAAVAASADRLLRDALLVGRRGRQQQQPAQLAGGGGVAFDVGAFGGVGVQVQPPPGFAGVVDLQGFGGQAAAILGAGGPS

SEQ ID NO: 23883 - protein, 240 aa, Zea mays subsp. mays
  peptide (1)..(240): Ceres Seq. ID no. 12352682
  misc_feature (9)..(59): Pfam Name: DNA-binding and dimerisationdomain Pfam Description: SRF-type transcription factor
  misc_feature (1)..(181): NCBI GI NO: 34906076 NR Description: P0459B04.16
  misc_feature (1)..(135): NCBI GI NO: 30682571 NR Description: MADS-box protein [Arabidopsis thaliana]
  misc_feature (1)..(135): NCBI GI NO: 25412255 NR Description: probable MADS-box protein
  misc_feature (1)..(173): NCBI GI NO: 15239333 NR Description: MADS-box protein; protein id: At5g60440.1
  misc_feature (1)..(77): NCBI GI NO: 32402436 NR Description: MADS-box protein AGL62 [Arabidopsis thaliana]
  misc_feature (1)..(122): NCBI GI NO: 15226309 NR Description: MADS-box protein; protein id: At2g34440.1
  misc_feature (1)..(127): NCBI GI NO: 15234456 NR Description: MADS-box protein; protein id: At4g36590
  misc_feature (1)..(213): NCBI GI NO: 15218647 NR Description: MADS-box protein; protein id: At1g65360.1
  misc_feature (1)..(120): NCBI GI NO: 34015383 NR Description: putative transcription factor
  misc_feature (1)..(127): NCBI GI NO: 3253153 NR Description: MADS-box protein [Ceratopteris richardii]
MGRQKIEIRRIESDEARQVCFSKRRAGLFKKASELSILCGADVAAVVFSPAGKAFSFGHPSVESVVERFLASSSPSPAGAGAGHSASGGEDRAVSELNRQHGELRAQLDAVKARQERADEAIRKEREAGSPAMAWIDAELSGGAMGHDDLVAFWAALAGVQAAVAASADRLLRDALLVGRRGRQQQQPAQLAGGGGVAFDVGAFGGVGVQVQPPPGFAGVVDLQGFGGQAAAILGAGGPS

SEQ ID NO: 23884 - protein, 234 aa, Zea mays subsp. mays
  peptide (1)..(234): Ceres Seq. ID no. 12352683
  misc_feature (76)..(218): Pfam Name: Pfam Description:  HlyD family secretion protein
AAIHTTVPPINGPAGDVHSRYAAALASNGASPPAEHGAAEDRDPAHRERRGAAGVLLEAPRGAVQEGQRAVHPLRRRRGRRRLLPRRQGLLLRPPVRGVRRRALPRLVVPLACRCRCRPLRQRRRGPRGLGAEPPARRAARAAGRREGEAGARGRGDPEGARGGEPGDGVDRRGTERGRDGARRPGRVLGRACGRAGRRGGQRRPAAARRAARRAQGPAAAAAGPACRGWWRGL

SEQ ID NO: 23885 - DNA, 1232 bp, Zea mays subsp. mays
  misc_feature (1)..(1232): Ceres Seq. ID no. 13635672
  misc_feature (258)..(258): n is a, c, t, g, unknown, or other
gcacgagaccattacctagaacatcctaatcaaaaaacaagtagatctcgcggtgttattcctcccgagtcgcctccccctcaagttccacaaacgcaagccccaatctcgccgtcaccacctcaatccagcaaacgcaaaccccatctcgccgccgccgcgatgtctcgccgctatgacagccgcacgacgatcttctcgccggaggggcgtctctaccaggtggagtacgcgatggaggcgatcggcaacgccggngtcagccctcgggatcctagcggccgacggcgtggtcctcgtcggcgagaagaaggtgacctccaagctcctccagacctcgcgctccgccgagaagatgtacaagatcgactcccacctggcgtgcgccgtggccgggatcatgtccgacgccaacatcctcatcaacaccgcccgcctccacgcccaacgctacgcgctctcctaccaggaacccatccccgtcgagcagctcgtccagtccctctgcgacaccaagcaggggtacacccagttcggaggcctccgccccttcggggtctccttcctattcgctgggtgggacaagcaccacggcttccagctctacatgagcgacccatccgggaactacggcgggtggaaggccgccgctgttggggccaacagccaggccgcgcagtccatgctcaagcaggactacaaggacggcttgacccgcgaggaggccgtcgccctcgcgcttaaggtcctcagcaagaccatggactccaccagcctgactgccgagaagctggagctggccgaggtgtttctgcagccgggctccggggaggtacagtaccaggtgtgctctcctgaagcgctggggaagctgcttgcaaagtccggcctgacacagccaacacccgaggcataatgctctgttttgctgtggcttgtgatgcctactactgctcttagacatggtttaagcatttgtgcttctgttgtgtgaacttgaatattcgacgattatgtggtctaattttatgttgagcatcctagatacgttaatgtttcatctgtaactgtggattgccttgaactggttgcaaattggtgatttctatctgctctgcttgattattgtcgtgattagggagcatgtgggataatggaacaggcaaaattaggtttggttctaacgcatctggatgataccgactgtatttagtgaccatggcaaaattttc

SEQ ID NO: 23886 - protein, 247 aa, Zea mays subsp. mays
  peptide (1)..(247): Ceres Seq. ID no. 15220349
  misc_feature (55)..(86): NCBI GI NO: 34898416 NR Description: ESTs AU058081
  misc_feature (55)..(86): NCBI GI NO: 34898458 NR Description: ESTs AU058081
  misc_feature (55)..(86): NCBI GI NO: 1709761 NR Description: Proteasome subunit alpha type 4
  misc_feature (55)..(86): NCBI GI NO: 15233268 NR Description: 20S proteasome alpha subunit C (PAC1)
  misc_feature (55)..(86): NCBI GI NO: 2511584 NR Description: multicatalytic endopeptidase
  misc_feature (55)..(86): NCBI GI NO: 12229904 NR Description: Proteasome subunit alpha type 4
  misc_feature (63)..(88): NCBI GI NO: 6984140 NR Description: proteasome 27 kDa subunit [Euphorbia esula]
  misc_feature (55)..(86): NCBI GI NO: 23394356 NR Description: proteasome subunit [Phytophthora infestans]
  misc_feature (55)..(88): NCBI GI NO: 32410633 NR Description: hypothetical protein [Neurospora crassa]
  misc_feature (55)..(88): NCBI GI NO: 40744887 NR Description: conserved hypothetical protein
  misc_feature (86)..(86): Xaa is any aa, unknown or other
ARDHYLEHPNQKTSRSRGVIPPESPPPQVPQTQAPISPSPPQSSKRKPHLAAAAMSRRYDSRTTIFSPEGRLYQVEYAMEAIGNAXVSPRDPSGRRRGPRRREEGDLQAPPDLALRREDVQDRLPPGVRRGRDHVRRQHPHQHRPPPRPTLRALLPGTHPRRAARPVPLRHQAGVHPVRRPPPLRGLLPIRWVGQAPRLPALHERPIRELRRVEGRRCWGQQPGRAVHAQAGLQGRLDPRGGRRPRA

SEQ ID NO: 23887 - protein, 246 aa, Zea mays subsp. mays
  peptide (1)..(246): Ceres Seq. ID no. 15220350
  misc_feature (29)..(211): Pfam Name: Pfam Description:  Proteasome A-type and B-type
  misc_feature (29)..(246): NCBI GI NO: 34898416 NR Description: ESTs AU058081
  misc_feature (29)..(246): NCBI GI NO: 34898458 NR Description: ESTs AU058081
  misc_feature (29)..(245): NCBI GI NO: 1709761 NR Description: Proteasome subunit alpha type 4
  misc_feature (29)..(245): NCBI GI NO: 15233268 NR Description: 20S proteasome alpha subunit C (PAC1)
  misc_feature (29)..(245): NCBI GI NO: 2511584 NR Description: multicatalytic endopeptidase
  misc_feature (29)..(245): NCBI GI NO: 12229904 NR Description: Proteasome subunit alpha type 4
  misc_feature (29)..(246): NCBI GI NO: 6984140 NR Description: proteasome 27 kDa subunit [Euphorbia esula]
  misc_feature (55)..(246): NCBI GI NO: 14039743 NR Description: 20S proteasome subunit alpha 3 [Lolium perenne]
  misc_feature (29)..(237): NCBI GI NO: 23394356 NR Description: proteasome subunit [Phytophthora infestans]
  misc_feature (29)..(241): NCBI GI NO: 32410633 NR Description: hypothetical protein [Neurospora crassa]
  misc_feature (28)..(28): Xaa is any aa, unknown or other
MTAARRSSRRRGVSTRWSTRWRRSATPXSALGILAADGVVLVGEKKVTSKLLQTSRSAEKMYKIDSHLACAVAGIMSDANILINTARLHAQRYALSYQEPIPVEQLVQSLCDTKQGYTQFGGLRPFGVSFLFAGWDKHHGFQLYMSDPSGNYGGWKAAAVGANSQAAQSMLKQDYKDGLTREEAVALALKVLSKTMDSTSLTAEKLELAEVFLQPGSGEVQYQVCSPEALGKLLAKSGLTQPTPEA

SEQ ID NO: 23888 - protein, 193 aa, Zea mays subsp. mays
  peptide (1)..(193): Ceres Seq. ID no. 15220351
  misc_feature (1)..(32): NCBI GI NO: 34898416 NR Description: ESTs AU058081
  misc_feature (1)..(32): NCBI GI NO: 34898458 NR Description: ESTs AU058081
  misc_feature (1)..(32): NCBI GI NO: 1709761 NR Description: Proteasome subunit alpha type 4
  misc_feature (1)..(32): NCBI GI NO: 15233268 NR Description: 20S proteasome alpha subunit C (PAC1)
  misc_feature (1)..(32): NCBI GI NO: 2511584 NR Description: multicatalytic endopeptidase
  misc_feature (1)..(32): NCBI GI NO: 12229904 NR Description: Proteasome subunit alpha type 4
  misc_feature (9)..(34): NCBI GI NO: 6984140 NR Description: proteasome 27 kDa subunit [Euphorbia esula]
  misc_feature (1)..(32): NCBI GI NO: 23394356 NR Description: proteasome subunit [Phytophthora infestans]
  misc_feature (1)..(34): NCBI GI NO: 32410633 NR Description: hypothetical protein [Neurospora crassa]
  misc_feature (1)..(34): NCBI GI NO: 40744887 NR Description: conserved hypothetical protein
  misc_feature (32)..(32): Xaa is any aa, unknown or other
MSRRYDSRTTIFSPEGRLYQVEYAMEAIGNAXVSPRDPSGRRRGPRRREEGDLQAPPDLALRREDVQDRLPPGVRRGRDHVRRQHPHQHRPPPRPTLRALLPGTHPRRAARPVPLRHQAGVHPVRRPPPLRGLLPIRWVGQAPRLPALHERPIRELRRVEGRRCWGQQPGRAVHAQAGLQGRLDPRGGRRPRA

SEQ ID NO: 23889 - DNA, 1856 bp, Zea mays subsp. mays
  misc_feature (1)..(1856): Ceres Seq. ID no. 12373912
cttcttccgtctgtccgcttctccctctctccctccctcccccaccccgcgagaccgccggcgaatttgttgcagtgcactgaagccaacagctgcaggacaggaggaggaggaggagctgtttcaacaattatcccccgcgcgcccaggccagccccgcccccgcccgcccactctcccgaggtgagcaacccctttcctccagcggctgtctgtttaatttgggtctacagctcttccccccctcgtggtctcgtctatggaattcccggttcaatttggacttgggctcctcccttgtttactgtaaccgtgtgcttgctactgtatcgaagaaatcccagcgtcaatcatgctgctgcgcgaggtctctcgatgatggatgacagataatgatggttgttgtatgatgatgatggcgcatggcggctgccaacgcctgtttttccccgctgcagtacctttgcttcactgatattagcaacctctatccaggattccaggttctcaacacaacagacaacaccgctcaccgcatatatatatatatagatgggttccgaggggccttctcccgtcaccgtccacgtcaccggattcaagaggttccatggagtcgccgagaacccgacggagaggatcgtgcgcggtctccagccattcatggagacgagagggttgcccaagggccttgttctcgggagctgcaccgtccttgaggccgccgggcagggcgcgcttggcccgctgtatgaactgctggagtcgaccgtctccggccgggaacgtcaggagcgagtaattctgctccattttggcgccaacagtggttcacataggtttgctcttgagaatcaagctgttaatgaagctactttccgttgccctgatgagctaggatggaaaccacagaggacacctatcatatcgtcagatggaagcatcttacacgcaagacaggtatattttaacagttactacctcgataaatcattgagaatctctaagcatcctacttggaagactagtatttcatattatgctgcttacctactgacttactgtcctacatatcctccgttttaatgaacatgctgtcagtcgattgaatccttttcgtttccaacagtagaaacagagtatcgattttccatcattaaacttagatgtaatactttcgatacaccactctcattaaccactgtgcatacagattcgtcctccttaaaaggtcttcgagtaaggaggtttccccaaggaaatactgcgattgatctctaatgttctccagcttctagatcaatgattaatttgcacagctgcctgtattctgtcagttatcttgtcatgtgcatcatctgctgaactacgttttgtttcataataaccaagcagactacactgccagtggaggagataagcaagtctctccaacagatgggatacgacgtggtgccttcagacgacgctggtcgatttgtgtgcaactacgtctactaccactcactcaagtttgcagagaagcatgggatcgggtctctgtttgtccatttccccctcttcctggcaatcgacgaggaagtccagatgcagtttgtcgcttcccttctagaggtcctcgcttccttgaacttccagtgaacctagtggtagatctaccacttcccggtggtgtattgttcccagattatttgggaaaggtttaagttgttcccaacttacctgtggagaataagatcgaggaatcattcgtggaattatgtgtgtggttcaaaatgtgtaggggaacaaaaacaagtcttctcaaagaacatgtacatgcagtccagatgttaatatcccaagcggtttatatg

SEQ ID NO: 23890 - protein, 177 aa, Zea mays subsp. mays
  peptide (1)..(177): Ceres Seq. ID no. 12373913
  misc_feature (11)..(149): Pfam Name: Pfam Description:  Pyroglutamyl peptidase
  misc_feature (1)..(149): NCBI GI NO: 12039349 NR Description: putative pyrrolidone carboxyl peptidase
  misc_feature (1)..(149): NCBI GI NO: 38175741 NR Description: pyrrolidone carboxyl peptidase-like protein
  misc_feature (1)..(148): NCBI GI NO: 18405940 NR Description: expressed protein; protein id: At1g56700
  misc_feature (1)..(136): NCBI GI NO: 13430708 NR Description: unknown protein [Arabidopsis thaliana]
  misc_feature (1)..(85): NCBI GI NO: 8778575 NR Description: F28C11.8 [Arabidopsis thaliana]
  misc_feature (88)..(136): NCBI GI NO: 8778575 NR Description: F28C11.8 [Arabidopsis thaliana]
  misc_feature (86)..(136): NCBI GI NO: 15220753 NR Description: hypothetical protein; protein id: At1g23440.1
  misc_feature (1)..(85): NCBI GI NO: 9295697 NR Description: F26F24.31 [Arabidopsis thaliana]
  misc_feature (1)..(85): NCBI GI NO: 15220751 NR Description: hypothetical protein; protein id: At1g23430.1
MGSEGPSPVTVHVTGFKRFHGVAENPTERIVRGLQPFMETRGLPKGLVLGSCTVLEAAGQGALGPLYELLESTVSGRERQERVILLHFGANSGSHRFALENQAVNEATFRCPDELGWKPQRTPIISSDGSILHARQVYFNSYYLDKSLRISKHPTWKTSISYYAAYLLTYCPTYPPF

SEQ ID NO: 23891 - protein, 140 aa, Zea mays subsp. mays
  peptide (1)..(140): Ceres Seq. ID no. 12373914
  misc_feature (1)..(112): Pfam Name: Pfam Description:  Pyroglutamyl peptidase
  misc_feature (1)..(112): NCBI GI NO: 12039349 NR Description: putative pyrrolidone carboxyl peptidase
  misc_feature (1)..(112): NCBI GI NO: 38175741 NR Description: pyrrolidone carboxyl peptidase-like protein
  misc_feature (1)..(111): NCBI GI NO: 18405940 NR Description: expressed protein; protein id: At1g56700
  misc_feature (1)..(99): NCBI GI NO: 13430708 NR Description: unknown protein [Arabidopsis thaliana]
  misc_feature (1)..(48): NCBI GI NO: 8778575 NR Description: F28C11.8 [Arabidopsis thaliana]
  misc_feature (51)..(99): NCBI GI NO: 8778575 NR Description: F28C11.8 [Arabidopsis thaliana]
  misc_feature (49)..(99): NCBI GI NO: 15220753 NR Description: hypothetical protein; protein id: At1g23440.1
  misc_feature (1)..(48): NCBI GI NO: 9295697 NR Description: F26F24.31 [Arabidopsis thaliana]
  misc_feature (1)..(48): NCBI GI NO: 15220751 NR Description: hypothetical protein; protein id: At1g23430.1
METRGLPKGLVLGSCTVLEAAGQGALGPLYELLESTVSGRERQERVILLHFGANSGSHRFALENQAVNEATFRCPDELGWKPQRTPIISSDGSILHARQVYFNSYYLDKSLRISKHPTWKTSISYYAAYLLTYCPTYPPF

SEQ ID NO: 23892 - protein, 130 aa, Zea mays subsp. mays
  peptide (1)..(130): Ceres Seq. ID no. 12373915
LLPSVRFSLSPSLPHPARPPANLLQCTEANSCRTGGGGGAVSTIIPRAPRPAPPPPAHSPEVSNPFPPAAVCLIWVYSSSPPRGLVYGIPGSIWTWAPPLFTVTVCLLLYRRNPSVNHAAARGLSMMDDR

SEQ ID NO: 23893 - DNA, 1469 bp, Zea mays subsp. mays
  misc_feature (1)..(1469): Ceres Seq. ID no. 12405815
aggcgcgcgtgccgcctctctcgctcgctcctccggttaatcccccatcgccaggagcccaggactcgcagccagcccttcacattattcgcgcgcgcgcgaacggccgtagcgtgtgggtggcgtcgccgtgcggtctcttggtgccggtgcgggccgcgtgacggtgtgtgagtgtgtgacgcccacgcggaggaggtcgttctgttggttggttggtccgcggccatgatggcggtacgcggccggagaggcggtctccgtagcgctcctcttctccctcgttttcttctggcgcccgcttcctgctcgacctcctcgtctacaagccattggcagtctaccttttcaacactaaagcttctaagttgatgagtgatgaggccaggcaagcaaagattgtcaaattctcggagtccatttggaaacttacatactatgcttctgttcaagcatgggtcctcatgataataaagcaagaaccatggtcgttggatatggtgcagtactttgatggctggccaaatcaacccatcgtgtcctcgttgatgcttttctatatgtgccagtgtggattttatatctacagcattggtgctcttgttgcttgggaaacccgcagaaaagattttgctgtaatgatgtctcatcatgtaataacatctactcttattggagtttcatatctgacaggattttttcgaattgggaccatcgttcttgctcttcatgatacaagtgatgtgtttcttgagactgccaaattgtgcaagtacacagaaaaggagttgggggctagcttgtttttcggtctcttcgctatctcctggcttctattgcgtttgatttacttcccgttttggataatcaaagcctctagctatcattccatcacattctggaggaagctggatgaattccctacagctttgtactatatcttcaatacaatgcttctcacattgcttgtattccatatgtactggtggaaactcatatgtttgatgataatgagacaattgaataataaaggacaggttacagatgatgttcgatctgattctgaggatgacgagtaatgggggagattcattctttgacatctgcaatgtgtcatttcttcgccaatacttatctacgcctgcttccagaattgattgttttgatcgtggcaagtctcgggcatggataggaaagtttatcctctgtatattgccttgtgatatcaaacatggctagaacgagaatggagcaggtcctatacattacgggtatagctagcaagcttacttgaaggttccttcaaaaaattttggttcaccttttctgatatatggggaaagatatgagagggcgtacagcttttttcctgaaacttacagaacccctctgtaccatgttcagtatacttcactcgtgagtagatttagttctaattgacggtaataaactgattctttttgactggg

SEQ ID NO: 23894 - protein, 235 aa, Zea mays subsp. mays; identical to SEQ ID NO: 23682
  peptide (1)..(235): Ceres Seq. ID no. 12405816
  misc_feature (31)..(235): Pfam Name: LAG1 Pfam Description: Longevity-assurance protein
  misc_feature (1)..(235): NCBI GI NO: 34901974 NR Description: unknown protein
  misc_feature (1)..(235): NCBI GI NO: 15230323 NR Description: longevity factor-like protein
  misc_feature (1)..(235): NCBI GI NO: 7658241 NR Description: LAG1 homolog 2 [Arabidopsis thaliana]
  misc_feature (1)..(235): NCBI GI NO: 25518747 NR Description: hypothetical protein F13B4
  misc_feature (1)..(235): NCBI GI NO: 18404559 NR Description: expressed protein; protein id: At3g25540
  misc_feature (1)..(234): NCBI GI NO: 16974114 NR Description: putative resistance protein
  misc_feature (1)..(235): NCBI GI NO: 7688742 NR Description: ASC1 [Lycopersicon esculentum]
  misc_feature (1)..(171): NCBI GI NO: 30683361 NR Description: longevity assurance protein -related
  misc_feature (3)..(235): NCBI GI NO: 27769146 NR Description: Similar to RIKEN cDNA 0610013I17 gene
  misc_feature (1)..(233): NCBI GI NO: 21358551 NR Description: Longevity assurance gene 1 CG3576-PB

SEQ ID NO: 23895 - protein, 204 aa, Zea mays subsp. mays; identical to SEQ ID NO: 23683
  peptide (1)..(204): Ceres Seq. ID no. 12405817
  misc_feature (1)..(204): Pfam Name: LAG1 Pfam Description: Longevity-assurance protein
  misc_feature (1)..(204): NCBI GI NO: 34901974 NR Description: unknown protein
  misc_feature (1)..(204): NCBI GI NO: 15230323 NR Description: longevity factor-like protein
  misc_feature (1)..(204): NCBI GI NO: 7658241 NR Description: LAG1 homolog 2 [Arabidopsis thaliana]
  misc_feature (1)..(204): NCBI GI NO: 25518747 NR Description: hypothetical protein F13B4
  misc_feature (1)..(204): NCBI GI NO: 18404559 NR Description: expressed protein; protein id: At3g25540
  misc_feature (1)..(203): NCBI GI NO: 16974114 NR Description: putative resistance protein
  misc_feature (1)..(204): NCBI GI NO: 7688742 NR Description: ASC1 [Lycopersicon esculentum]
  misc_feature (1)..(140): NCBI GI NO: 30683361 NR Description: longevity assurance protein -related
  misc_feature (1)..(204): NCBI GI NO: 27769146 NR Description: Similar to RIKEN cDNA 0610013I17 gene
  misc_feature (1)..(202): NCBI GI NO: 21358551 NR Description: Longevity assurance gene 1 CG3576-PB

SEQ ID NO: 23896 - protein, 193 aa, Zea mays subsp. mays
  peptide (1)..(193): Ceres Seq. ID no. 12405818
  misc_feature (1)..(193): Pfam Name: LAG1 Pfam Description: Longevity-assurance protein
  misc_feature (1)..(193): NCBI GI NO: 34901974 NR Description: unknown protein
  misc_feature (1)..(193): NCBI GI NO: 15230323 NR Description: longevity factor-like protein
  misc_feature (1)..(193): NCBI GI NO: 7658241 NR Description: LAG1 homolog 2 [Arabidopsis thaliana]
  misc_feature (1)..(193): NCBI GI NO: 25518747 NR Description: hypothetical protein F13B4
  misc_feature (1)..(193): NCBI GI NO: 18404559 NR Description: expressed protein; protein id: At3g25540
  misc_feature (1)..(192): NCBI GI NO: 16974114 NR Description: putative resistance protein
  misc_feature (1)..(193): NCBI GI NO: 7688742 NR Description: ASC1 [Lycopersicon esculentum]
  misc_feature (1)..(129): NCBI GI NO: 30683361 NR Description: longevity assurance protein -related
  misc_feature (1)..(193): NCBI GI NO: 27769146 NR Description: Similar to RIKEN cDNA 0610013I17 gene
  misc_feature (1)..(191): NCBI GI NO: 21358551 NR Description: Longevity assurance gene 1 CG3576-PB
MVQYFDGWPNQPIVSSLMLFYMCQCGFYIYSIGALVAWETRRKDFAVMMSHHVITSTLIGVSYLTGFFRIGTIVLALHDTSDVFLETAKLCKYTEKELGASLFFGLFAISWLLLRLIYFPFWIIKASSYHSITFWRKLDEFPTALYYIFNTMLLTLLVFHMYWWKLICLMIMRQLNNKGQVTDDVRSDSEDDE

SEQ ID NO: 23897 - DNA, 1136 bp, Zea mays subsp. mays
  misc_feature (1)..(1136): Ceres Seq. ID no. 12355990
gcaccttgctttgctttgctgatcgctgattttgcccgacctaccctacgctagtactttgaagtagtaggagctagcgagatctccatatatataaagcgaccttctttgcactcagctcgtagatccacacctgcagctgccacagcgggtggtgcttagcttaggctagcctagctgcgcctgcgcatgctcgtgaccaatggcgtccagcaaggtgccactgttcctcgtcctcaacctcctgctcttcgcggcggccaacgcctgcccttactgcccgggcaacaatggccacggtagcagcgggcaccatggcggcagtgggcatggcggcggtggcaccggcggttccggtggcggcagcgggccaggtgggggcagcagcggcggagggtacggtccgatcggtggtggtggtggcagcggcggcggaggagggtacggtccgatcggtgatggtggcagcggcggtgggatcggacccatcggaggcggcagcggggggatcggacccataggaggtggcagcggtggtgggtacggccccatcggtggcggtggcggtggaggtgggagcggtggcggtggcggtggcaacgatggcacgagcggctggtacggccattgcccgacaaacgcgctgaagctcggcgtgtgcgccaacgtgctggatctgatcaaggccaaggtcggcgtgccggtgaacgagccgtgctgcccgctgctgaacgggctcgtggagctcgaagccgccgtgtgcctctgcacggccatcaaggccaacgtgctggggctcaacctcaacatccccgtcaacctcagcctcgtcctcaacttctgcggcaagggcgtccccacgggcttcaagtgcctttaaccatgcatgcacatcatgtgtgcgtgcgtgccgtacgtacgtagtatccaagaccacgcgatgcgtgagtatgacgaagaatacgcgcgtgcgccatgcttgccggccggggatacggtgtttgtggtaatgctgttagtttcgtttcttcagtgtagtatgtagccagggcatgcatgtgtccaagtccaagttcgactttgggttgcttgtacttctccatttcataattgaaatcatatttcagatttgagtc

SEQ ID NO: 23898 - protein, 225 aa, Zea mays subsp. mays
  peptide (1)..(225): Ceres Seq. ID no. 12355991
  misc_feature (143)..(224): Pfam Name: Pfam Description:  Protease inhibitor/seed storage/LTP family
  misc_feature (3)..(224): NCBI GI NO: 7489011 NR Description: glycine-rich protein Tfm5 - tomato
  misc_feature (88)..(224): NCBI GI NO: 7489138 NR Description: glycine-rich protein 16K - common tobacco
  misc_feature (68)..(224): NCBI GI NO: 21693573 NR Description: extensin-like protein [Glycine max]
  misc_feature (86)..(224): NCBI GI NO: 7959089 NR Description: glycine-rich protein [Nicotiana tabacum]
  misc_feature (136)..(224): NCBI GI NO: 38345485 NR Description: OSJNBa0010H02.23
  misc_feature (136)..(224): NCBI GI NO: 1084461 NR Description: root-specific protein RCc3 - rice
  misc_feature (136)..(224): NCBI GI NO: 38345484 NR Description: OSJNBa0010H02.22
  misc_feature (86)..(216): NCBI GI NO: 7489211 NR Description: tumor related protein HR4 - common tobacco
  misc_feature (113)..(224): NCBI GI NO: 15221483 NR Description: putative proline-rich cell wall protein
  misc_feature (73)..(115): NCBI GI NO: 15221483 NR Description: putative proline-rich cell wall protein
MASSKVPLFLVLNLLLFAAANACPYCPGNNGHGSSGHHGGSGHGGGGTGGSGGGSGPGGGSSGGGYGPIGGGGGSGGGGGYGPIGDGGSGGGIGPIGGGSGGIGPIGGGSGGGYGPIGGGGGGGGSGGGGGGNDGTSGWYGHCPTNALKLGVCANVLDLIKAKVGVPVNEPCCPLLNGLVELEAAVCLCTAIKANVLGLNLNIPVNLSLVLNFCGKGVPTGFKCL

SEQ ID NO: 23899 - DNA, 1800 bp, Zea mays subsp. mays
  misc_feature (1)..(1800): Ceres Seq. ID no. 12351993
atctagacggcgccacacgactgacggcttcatccgattggtgtggcctatttatctcccagtcccccactcgagctctccaccagctttccccttctctccggtccgggaatcggaagctcagggcagaagaatcaacctgaacaagaagagactggacaaggaagctttgactgctgcgaaattggcgaagaaggagagccaccttcgaaggtctgtgggtgctgaccagtatctcagtgcctcaactgatgacatagtccctttggacaactacctggacacccagtactttggacagatcagcatcggcacgccaccacagaacttcacagtgatattcgacactggaagctccaacttgtgggttccctcatccaagtgctacttttcgatagcgtgctacttacaccacagatacaagtcaaccaagtcgaagacttacacaaagaatggagaatcttgtacgataacatatggttctgggcaaatcgctggcttcttcagtgaggacaatgtgttggttggtaaccttgttgtgcaaaatcagaaatttattgagacaactcgagaaaccagccctactttcatcattgggaagtttgatggaattcttggtctcggatttcctgaaatttctgtaggaggagcccctccaatttggcagagcatgaaacagcagaaactggtcgcaaaggatgtcttctctttctggcttaatcgtgaccctgatgcatctgctggaggcgagcttgtctttggtggtgttgacccaaaacactacaaaggggaccatacatatgttcctgttacacgcaaaggctactggcagtttgacatgggagatcttattattggtggccactcaactggtttctgtgctggtggctgtgctgctattgtggactcagggacttcattgcttgctggtccaactaccatagtggctcaagtcaatcatgcaattggggctgagggaatcatcagtacagaatgcaaagaagtggtgagcgagtatggagagatgatccttgagttgctcatatcgcagacaagcccacagaaagtgtgcactcagattggtctctgtgtatttgatggtgcccattctgtcagcaatccaattgaatctgttgttgagaaacagaagcgtggttctgatcttttctgtactgcttgtgagatggctgttgtctggatacagaatcagctccgtgaaaacaagacaaaagaactcattttgaattatgctaatcagctctgtgagcgtctccctagccccaatggcgagtcaactgttgattgccatcagatctcaaagatgccaaatcttgcattcaccatagcaaacaagactttcaccttaacaccagagcagtacatagtgaagctggagcaagcaggacaaactatctgcatcagtgggtttatggcatttgacgtaccgcctcctcgtggtcctctctggatacttggtgatgtttttatgggtgcctaccacactgtttttgacttcggcgagaacaggattgggtttgccaaatctgcatgaggactggagttctgcgctttagtagcatgtccagtttgttatcccagtattgtacatatatatgttgccaactggtgtaatccgcagtgtttaatagtatatattcatgcagaaatctagaagattgtggcatgatatgtgtttgcaaatggagctatgctatgtatggagctccaggacctagagttttatgtaaagggagacgatgaggattagggcttttaacctattctcatcacgttattgtc

SEQ ID NO: 23900 - protein, 516 aa, Zea mays subsp. mays
  peptide (1)..(516): Ceres Seq. ID no. 12351994
  misc_feature (44)..(371): Pfam Name: Pfam Description:  Eukaryotic aspartyl protease
  misc_feature (44)..(516): NCBI GI NO: 1168537 NR Description: Aspartic proteinase precursor
  misc_feature (44)..(516): NCBI GI NO: 7435839 NR Description: aspartic proteinase precursor
  misc_feature (44)..(516): NCBI GI NO: 21616051 NR Description: aspartic proteinase [Theobroma cacao]
  misc_feature (38)..(516): NCBI GI NO: 1168536 NR Description: Phytepsin precursor (Aspartic proteinase)
  misc_feature (33)..(516): NCBI GI NO: 12231174 NR Description: aspartic proteinase 2 [Nepenthes alata]
  misc_feature (44)..(516): NCBI GI NO: 2499819 NR Description: Aspartic proteinase oryzasin 1 precursor
  misc_feature (44)..(516): NCBI GI NO: 5822248 NR Description: Chain A
  misc_feature (34)..(516): NCBI GI NO: 13897888 NR Description: putative aspartic protease [Ipomoea batatas]
  misc_feature (32)..(516): NCBI GI NO: 15221141 NR Description: putative aspartic proteinase; protein id:At1g11910
  misc_feature (30)..(516): NCBI GI NO: 1076696 NR Description: cyprosin (EC 3.4.23.-) - cardoon
SRRRHTTDGFIRLVWPIYLPVPHSSSPPAFPFSPVRESEAQGRRINLNKKRLDKEALTAAKLAKKESHLRRSVGADQYLSASTDDIVPLDNYLDTQYFGQISIGTPPQNFTVIFDTGSSNLWVPSSKCYFSIACYLHHRYKSTKSKTYTKNGESCTITYGSGQIAGFFSEDNVLVGNLVVQNQKFIETTRETSPTFIIGKFDGILGLGFPEISVGGAPPIWQSMKQQKLVAKDVFSFWLNRDPDASAGGELVFGGVDPKHYKGDHTYVPVTRKGYWQFDMGDLIIGGHSTGFCAGGCAAIVDSGTSLLAGPTTIVAQVNHAIGAEGIISTECKEVVSEYGEMILELLISQTSPQKVCTQIGLCVFDGAHSVSNPIESVVEKQKRGSDLFCTACEMAVVWIQNQLRENKTKELILNYANQLCERLPSPNGESTVDCHQISKMPNLAFTIANKTFTLTPEQYIVKLEQAGQTICISGFMAFDVPPPRGPLWILGDVFMGAYHTVFDFGENRIGFAKSA

SEQ ID NO: 23901 - protein, 293 aa, Zea mays subsp. mays
  peptide (1)..(293): Ceres Seq. ID no. 12351995
  misc_feature (1)..(148): Pfam Name: Pfam Description:  Eukaryotic aspartyl protease
  misc_feature (1)..(293): NCBI GI NO: 1168537 NR Description: Aspartic proteinase precursor
  misc_feature (1)..(293): NCBI GI NO: 7435839 NR Description: aspartic proteinase precursor
  misc_feature (1)..(293): NCBI GI NO: 21616051 NR Description: aspartic proteinase [Theobroma cacao]
  misc_feature (1)..(293): NCBI GI NO: 1168536 NR Description: Phytepsin precursor (Aspartic proteinase)
  misc_feature (1)..(293): NCBI GI NO: 12231174 NR Description: aspartic proteinase 2 [Nepenthes alata]
  misc_feature (1)..(293): NCBI GI NO: 2499819 NR Description: Aspartic proteinase oryzasin 1 precursor
  misc_feature (1)..(293): NCBI GI NO: 5822248 NR Description: Chain A
  misc_feature (1)..(293): NCBI GI NO: 13897888 NR Description: putative aspartic protease [Ipomoea batatas]
  misc_feature (1)..(293): NCBI GI NO: 15221141 NR Description: putative aspartic proteinase; protein id:At1g11910
  misc_feature (1)..(293): NCBI GI NO: 1076696 NR Description: cyprosin (EC 3.4.23.-) - cardoon
MKQQKLVAKDVFSFWLNRDPDASAGGELVFGGVDPKHYKGDHTYVPVTRKGYWQFDMGDLIIGGHSTGFCAGGCAAIVDSGTSLLAGPTTIVAQVNHAIGAEGIISTECKEVVSEYGEMILELLISQTSPQKVCTQIGLCVFDGAHSVSNPIESVVEKQKRGSDLFCTACEMAVVWIQNQLRENKTKELILNYANQLCERLPSPNGESTVDCHQISKMPNLAFTIANKTFTLTPEQYIVKLEQAGQTICISGFMAFDVPPPRGPLWILGDVFMGAYHTVFDFGENRIGFAKSA

SEQ ID NO: 23902 - DNA, 1408 bp, Zea mays subsp. mays
  misc_feature (1)..(1408): Ceres Seq. ID no. 12358591
gcttttggattctggtttctctcgtctttctcctccctctcctgacttttcttctagacatctcgcgggtcttatcgactccaacaagaacacactacacaccagccagcgagatagcgaacgctaggaacccagtggccatctttggagcggccatgacgctggatcagaaccatgccatgccgatgcagcccccggccctgcagcccggaagagcatatggagcagagggcagtgctgtggtgcatggttccatcagaacagtaggaagaagcgacctcgcagatcacgagatgggcctacgtcagtggcagctgtcatccagcggtgggctgagcgcaacaagcatttggagtatgaggaatctgaggaggcaaagcgaccaagaaaagcacctggcaaagggttcaaagaagggctgtatgaagggaaaaggggggcctgacaatactcaatgtggataccgtggagtgaggcagcgtacttgggggaagtgggttgctgaaataagagagccaaatcgtgtcgacagactctggctgggtaccttcccaaccgcggaggatgcagctagggcctatgatgaggcagccagagcgatgtatggagacttggcacggactaacttccccggacaggatgcaacaacctctgcccaagctgctctatcatcgacctctgcccaggctgctccaacagctgttgaagctcttcagactggcacgtcatgcgagtcgacaacgacatcaaatcactcggacatcgcatccacctcacacaagcttgaagcctctgacatctcgagctacctaaaggaaaaatgtccagctggatcatgtggtatccaagacggcacacccattgtagctgacaaggaggtctttgggccgttggagcctatcacaaatcttccagatggtggtgatggttttgatatcggtgagatgctgaggatgatggaaagcgatccacataatgcaggtggagccgacgctggcatgggacagccctggtatcttgatgagctggattcgagtgtcttagagagcatgctccagccggagccggagccagagccagagccattcctgatgtctgaagaaccggacatgtttcttgctggcttcgaaagcgctggtttcgtcgagggtctggagcggctaaactgaatttctgatgtttgaccgttgatcctcatcccacttcatgtctgagcttgtgaattcggaggcaaacattggcagaacttataagctctagcaattctaggctttacattcctctgtgatagttctctatgcatgggaactgggtttgcttcacaatttttgtaagaccagaagtgatgtaaatagttcccaccttgtggaaggacaagaaaaaaataaataaaaagagtgcttgcttt

SEQ ID NO: 23903 - protein, 388 aa, Zea mays subsp. mays
  peptide (1)..(388): Ceres Seq. ID no. 12358592
  misc_feature (151)..(215): Pfam Name: Pfam Description:  AP2 domain
  misc_feature (133)..(323): NCBI GI NO: 27960760 NR Description: dehydration-responsive AP2 domain transcriptionalactivator
  misc_feature (133)..(323): NCBI GI NO: 30313898 NR Description: AP2 transcriptional activator DRF1.1
  misc_feature (61)..(138): NCBI GI NO: 30313898 NR Description: AP2 transcriptional activator DRF1.1
  misc_feature (133)..(306): NCBI GI NO: 27960757 NR Description: AP2 domain protein [Hordeum vulgare]
  misc_feature (133)..(245): NCBI GI NO: 15239107 NR Description: DRE binding protein (DREB2A); protein id:At5g05410
  misc_feature (107)..(265): NCBI GI NO: 38099059 NR Description: dehydration-responsive element binding protein 2
  misc_feature (117)..(267): NCBI GI NO: 15488459 NR Description: AP2-containing protein [Triticum aestivum]
  misc_feature (125)..(258): NCBI GI NO: 15228427 NR Description: DRE binding protein (DREB2B); protein id:At3g11020
  misc_feature (117)..(224): NCBI GI NO: 22594971 NR Description: DRE binding protein 2 [Oryza sativa]
  misc_feature (117)..(224): NCBI GI NO: 25989383 NR Description: DREB1 [Oryza sativa]
FWILVSLVFLLPLLTFLLDISRVLSTPTRTHYTPASEIANARNPVAIFGAAMTLDQNHAMPMQPPALQPGRAYGAEGSAVVHGSIRTVGRSDLADHEMGLRQWQLSSSGGLSATSIWSMRNLRRQSDQEKHLAKGSKKGCMKGKGGPDNTQCGYRGVRQRTWGKWVAEIREPNRVDRLWLGTFPTAEDAARAYDEAARAMYGDLARTNFPGQDATTSAQAALSSTSAQAAPTAVEALQTGTSCESTTTSNHSDIASTSHKLEASDISSYLKEKCPAGSCGIQDGTPIVADKEVFGPLEPITNLPDGGDGFDIGEMLRMMESDPHNAGGADAGMGQPWYLDELDSSVLESMLQPEPEPEPEPFLMSEEPDMFLAGFESAGFVEGLERLN

SEQ ID NO: 23904 - protein, 337 aa, Zea mays subsp. mays
  peptide (1)..(337): Ceres Seq. ID no. 12358593
  misc_feature (100)..(164): Pfam Name: Pfam Description:  AP2 domain
  misc_feature (82)..(272): NCBI GI NO: 27960760 NR Description: dehydration-responsive AP2 domain transcriptionalactivator
  misc_feature (82)..(272): NCBI GI NO: 30313898 NR Description: AP2 transcriptional activator DRF1.1
  misc_feature (10)..(87): NCBI GI NO: 30313898 NR Description: AP2 transcriptional activator DRF1.1
  misc_feature (82)..(255): NCBI GI NO: 27960757 NR Description: AP2 domain protein [Hordeum vulgare]
  misc_feature (82)..(194): NCBI GI NO: 15239107 NR Description: DRE binding protein (DREB2A); protein id:At5g05410
  misc_feature (56)..(214): NCBI GI NO: 38099059 NR Description: dehydration-responsive element binding protein 2
  misc_feature (66)..(216): NCBI GI NO: 15488459 NR Description: AP2-containing protein [Triticum aestivum]
  misc_feature (74)..(207): NCBI GI NO: 15228427 NR Description: DRE binding protein (DREB2B); protein id:At3g11020
  misc_feature (66)..(173): NCBI GI NO: 22594971 NR Description: DRE binding protein 2 [Oryza sativa]
  misc_feature (66)..(173): NCBI GI NO: 25989383 NR Description: DREB1 [Oryza sativa]
MTLDQNHAMPMQPPALQPGRAYGAEGSAVVHGSIRTVGRSDLADHEMGLRQWQLSSSGGLSATSIWSMRNLRRQSDQEKHLAKGSKKGCMKGKGGPDNTQCGYRGVRQRTWGKWVAEIREPNRVDRLWLGTFPTAEDAARAYDEAARAMYGDLARTNFPGQDATTSAQAALSSTSAQAAPTAVEALQTGTSCESTTTSNHSDIASTSHKLEASDISSYLKEKCPAGSCGIQDGTPIVADKEVFGPLEPITNLPDGGDGFDIGEMLRMMESDPHNAGGADAGMGQPWYLDELDSSVLESMLQPEPEPEPEPFLMSEEPDMFLAGFESAGFVEGLERLN

SEQ ID NO: 23905 - protein, 329 aa, Zea mays subsp. mays
  peptide (1)..(329): Ceres Seq. ID no. 12358594
  misc_feature (92)..(156): Pfam Name: Pfam Description:  AP2 domain
  misc_feature (74)..(264): NCBI GI NO: 27960760 NR Description: dehydration-responsive AP2 domain transcriptionalactivator
  misc_feature (74)..(264): NCBI GI NO: 30313898 NR Description: AP2 transcriptional activator DRF1.1
  misc_feature (2)..(79): NCBI GI NO: 30313898 NR Description: AP2 transcriptional activator DRF1.1
  misc_feature (74)..(247): NCBI GI NO: 27960757 NR Description: AP2 domain protein [Hordeum vulgare]
  misc_feature (74)..(186): NCBI GI NO: 15239107 NR Description: DRE binding protein (DREB2A); protein id:At5g05410
  misc_feature (48)..(206): NCBI GI NO: 38099059 NR Description: dehydration-responsive element binding protein 2
  misc_feature (58)..(208): NCBI GI NO: 15488459 NR Description: AP2-containing protein [Triticum aestivum]
  misc_feature (66)..(199): NCBI GI NO: 15228427 NR Description: DRE binding protein (DREB2B); protein id:At3g11020
  misc_feature (58)..(165): NCBI GI NO: 22594971 NR Description: DRE binding protein 2 [Oryza sativa]
  misc_feature (58)..(165): NCBI GI NO: 25989383 NR Description: DREB1 [Oryza sativa]
MPMQPPALQPGRAYGAEGSAVVHGSIRTVGRSDLADHEMGLRQWQLSSSGGLSATSIWSMRNLRRQSDQEKHLAKGSKKGCMKGKGGPDNTQCGYRGVRQRTWGKWVAEIREPNRVDRLWLGTFPTAEDAARAYDEAARAMYGDLARTNFPGQDATTSAQAALSSTSAQAAPTAVEALQTGTSCESTTTSNHSDIASTSHKLEASDISSYLKEKCPAGSCGIQDGTPIVADKEVFGPLEPITNLPDGGDGFDIGEMLRMMESDPHNAGGADAGMGQPWYLDELDSSVLESMLQPEPEPEPEPFLMSEEPDMFLAGFESAGFVEGLERLN

SEQ ID NO: 23906 - DNA, 1133 bp, Zea mays subsp. mays
  misc_feature (1)..(1133): Ceres Seq. ID no. 12384197
  misc_feature (932)..(932): n is a, c, t, g, unknown, or other
  misc_feature (929)..(929): n is a, c, t, g, unknown, or other
  misc_feature (937)..(937): n is a, c, t, g, unknown, or other
  misc_feature (930)..(930): n is a, c, t, g, unknown, or other
atctagtataatccgtccgcaaccgttctctgccttctccatcctaaaccctcctagtcctctccatccccatcccctccaatggcggcgactgccacgtccttcgccactctcgccgtcgcgcgctcggcagggcagcggttcctccttgcctccaaggccgccccctcgccgctcctctccctccgcggcgcccgcctcccctcgcagggcgtctccttatctgggggcctcgcggcgtcgccctctcatagccgcgcgcgcttcgccacatcagccagcgccgaacccaaggaagcagaacttcagtctaaaatcacaaacaaggtgtactttgacataagcattgggaaccctgtgggcaagaatgttgggaggatcgtcatcggcttgtacggggatgatgttccacagacaacagagaacttccgtgctctttgcactggagagaaagggtttggatacaagggatccagtttccatcgtgtcatcagcgactttatgattcagggtggagattttgacaagggcaatggtaccggtgggaagagcatatatggacgcaccttcaaagatgagaacttcaaattggttcacactggacctggagtggtcagcatggctaatgctgggccgaacaccaatggcagccagttctttatttgcactgtcaagacaccttggttggacggaaggcatgtcgtgtttggccaggtcctggaagggatggatgtcgtaagtctgatcgagtcgcaggagaccgacagaggtgaccgcccgaagaagaaagtagtcatcagcgagtgtggggagcttccagtggtctaagtgttactcatctgttgtcggtcttacctaacctcggatggatggcgatatttcccccacctgaacttgtcgtgctaccctcccccccccccccccacccnnancctgntagttatagagaatatttcgaattgaagtaaggtcccaaatctgagggcatactgttgcttctctgctggaataaatgtgctcctttcccctgccttgttaagggaaagggttttgttcacgatgttaccttgtaaccttgtacttatgtttcatacttggaatgaaggttcatggaacaaaaatattctgctgcg

SEQ ID NO: 23907 - protein, 248 aa, Zea mays subsp. mays
  peptide (1)..(248): Ceres Seq. ID no. 12384198
  misc_feature (1)..(248): NCBI GI NO: 37788312 NR Description: cyclophilin-like protein [Triticum aestivum]
  misc_feature (1)..(248): NCBI GI NO: 37788308 NR Description: cyclophilin-like protein [Triticum aestivum]
  misc_feature (62)..(247): NCBI GI NO: 15240008 NR Description: peptidyl-prolyl isomerase protein
  misc_feature (62)..(247): NCBI GI NO: 21593963 NR Description: peptidylprolyl isomerase-like protein
  misc_feature (74)..(247): NCBI GI NO: 9955556 NR Description: peptidylprolyl isomerase-like protein
  misc_feature (71)..(219): NCBI GI NO: 9945069 NR Description: similar to Arabidopsis thaliana Peptidyl-prolylcis-trans isomerase
  misc_feature (32)..(247): NCBI GI NO: 34902534 NR Description: putative peptidyl-prolyl cis-trans isomerase
  misc_feature (50)..(247): NCBI GI NO: 15228674 NR Description: peptidylprolyl isomerase ROC4
  misc_feature (50)..(247): NCBI GI NO: 21555831 NR Description: peptidylprolyl isomerase ROC4
  misc_feature (50)..(247): NCBI GI NO: 11762200 NR Description: AT3g62030 [Arabidopsis thaliana]
MAATATSFATLAVARSAGQRFLLASKAAPSPLLSLRGARLPSQGVSLSGGLAASPSHSRARFATSASAEPKEAELQSKITNKVYFDISIGNPVGKNVGRIVIGLYGDDVPQTTENFRALCTGEKGFGYKGSSFHRVISDFMIQGGDFDKGNGTGGKSIYGRTFKDENFKLVHTGPGVVSMANAGPNTNGSQFFICTVKTPWLDGRHVVFGQVLEGMDVVSLIESQETDRGDRPKKKVVISECGELPVV

SEQ ID NO: 23908 - DNA, 1978 bp, Zea mays subsp. mays
  misc_feature (1)..(1978): Ceres Seq. ID no. 12556346
ccatcccaagaagagccgccctacctattccttctcccagccgtcgagctgcccaacccagagcaccagcagccctcaccttcttcctctcggccggtccttcaaacgagcccgctcgtcttggagccgccgccggtctcgttctggacgaacgttcaaggagattgcatttgtggatgctctaatggagtcgaaaggtggcaagaagtctagtagtagtagtagtaatttcatgtacgaagctccccttggctacaagatcgaggacgttcgcccagccggaggaatcaagaagttccagactgctgcttattccaactgcgtccgccagccatcctgatatcgcctcacatgcaattcgcggtagagtaggattttaattcagttttcctcttgtgtcggtagttttccgttggctctggctgccttcctctgcttctgagattccaacttgtcttgcccatctctccttttcctctctcatcctctctttcttgcaacacgtcatccagtggcgatgtcttcagcagattcttgtgtctcttctcctgcctcccctattggctttgagggctatgagaagcgcctcgagatcacgttctctgacgcgcctgtctttgaggacccttgtggtcgtggcctgcgcgccctctcccgtgagcagatcgactcgtttctggatctcgcacggtgcaccatagtgtcacagctctccaacgagagcttcgactcatatgttctgtccgagtccagcctctttgtgtatccccacaaggttgttctgaagacctgtgggacgacgaagctgctgctcgccattcctcgcatccttgagcttgctgcagggctgtcactgcctcttctttcagcgaagtactctcgtgggaccttcatcttccccggcgcgcagcccgcgccacaccgcagcttctcggaggaggtatctgtgctgaacgctttctttggtaacctcaagtccggtggcaatgcctacctgatcggtgaaccgttcaagcccaacaagaagtggcatgtctactacgccacagaggagcctgagcgtcctatggtgacgcttgagatgtgcatgacagagcttgacgttaagaaagctgctgtgttcttcaagaactccactggtggcagctgcacttcagctaaagagatgacgaagctctcggggattcatgagatcattcccgagatggagatctgtgactttgagtttgacccctgtgggtactcgatgaatggcgtcttcgggcctgcagcctccaccatccacgtgacacccgaggaaggtttcagctacgcaagctacgaagctatgaacttcgaccccagctcactggtctacagcgatgtgatcaggagggtcctggcaggcttctctccttcggacttctcggtcgcagttaccatctttggtggccgtgggttcgccaaatcatgggcgacgggtgcagacatcgattcctacatgtgcggtgatcctgtagagcaagagcttcctggtggcggtctgctgatgtaccagagctttactgctgttccctctggctctgtatcgccgaggtcgaccttgcagacggatggctggagcagcgatggaatggagatggcctcaaatgacgagatgtgtattggctgctggaatgcggtgaagaaggtggtgaagaaagatttggatgcttaaagatttggataacttaggtggttcttcacctaagttatgaagaagtctgagacctctgtctctctgttcttttggtttcagttaagcagttagctgggctaccggcaatttgtttgcttaatatttttcctgttcaataagtactctggatggcttgctgcgtctgccatagtgagctgcatattgttgtttagtcatattgtttctgctgccgatgcccttgtggggagaatgatcttgtaacagacttgcctattcccgcaatatattggaaattttggc

SEQ ID NO: 23909 - protein, 392 aa, Zea mays subsp. mays
  peptide (1)..(392): Ceres Seq. ID no. 12556347
  misc_feature (13)..(344): Pfam Name: Pfam Description:  Adenosylmethionine decarboxylase
  misc_feature (1)..(385): NCBI GI NO: 6646868 NR Description: S-adenosylmethionine decarboxylase 2
  misc_feature (1)..(360): NCBI GI NO: 3913427 NR Description: S-adenosylmethionine decarboxylase proenzyme
  misc_feature (1)..(356): NCBI GI NO: 19855056 NR Description: S-adenosylmethionine decarboxylase proenzyme
  misc_feature (1)..(356): NCBI GI NO: 3929545 NR Description: S-adenosylmethionine decarboxylase [Oryza sativa]
  misc_feature (8)..(354): NCBI GI NO: 4325045 NR Description: S-adenosylmethionine decarboxylase precursor
  misc_feature (8)..(392): NCBI GI NO: 3913438 NR Description: S-adenosylmethionine decarboxylase proenzyme
  misc_feature (1)..(356): NCBI GI NO: 7436593 NR Description: adenosylmethionine decarboxylase homolog
  misc_feature (13)..(375): NCBI GI NO: 16226063 NR Description: S-adenosyl-L-methionine decarboxylase
  misc_feature (13)..(367): NCBI GI NO: 28566348 NR Description: S-adenosylmethionine decarboxylase
  misc_feature (13)..(373): NCBI GI NO: 38261497 NR Description: S-adenosyl-L-methionine decarboxylase
MSSADSCVSSPASPIGFEGYEKRLEITFSDAPVFEDPCGRGLRALSREQIDSFLDLARCTIVSQLSNESFDSYVLSESSLFVYPHKVVLKTCGTTKLLLAIPRILELAAGLSLPLLSAKYSRGTFIFPGAQPAPHRSFSEEVSVLNAFFGNLKSGGNAYLIGEPFKPNKKWHVYYATEEPERPMVTLEMCMTELDVKKAAVFFKNSTGGSCTSAKEMTKLSGIHEIIPEMEICDFEFDPCGYSMNGVFGPAASTIHVTPEEGFSYASYEAMNFDPSSLVYSDVIRRVLAGFSPSDFSVAVTIFGGRGFAKSWATGADIDSYMCGDPVEQELPGGGLLMYQSFTAVPSGSVSPRSTLQTDGWSSDGMEMASNDEMCIGCWNAVKKVVKKDLDA

SEQ ID NO: 23910 - protein, 209 aa, Zea mays subsp. mays
  peptide (1)..(209): Ceres Seq. ID no. 12556348
  misc_feature (1)..(161): Pfam Name: Pfam Description:  Adenosylmethionine decarboxylase
  misc_feature (1)..(202): NCBI GI NO: 6646868 NR Description: S-adenosylmethionine decarboxylase 2
  misc_feature (1)..(177): NCBI GI NO: 3913427 NR Description: S-adenosylmethionine decarboxylase proenzyme
  misc_feature (1)..(173): NCBI GI NO: 19855056 NR Description: S-adenosylmethionine decarboxylase proenzyme
  misc_feature (1)..(173): NCBI GI NO: 3929545 NR Description: S-adenosylmethionine decarboxylase [Oryza sativa]
  misc_feature (1)..(171): NCBI GI NO: 4325045 NR Description: S-adenosylmethionine decarboxylase precursor
  misc_feature (1)..(209): NCBI GI NO: 3913438 NR Description: S-adenosylmethionine decarboxylase proenzyme
  misc_feature (1)..(173): NCBI GI NO: 7436593 NR Description: adenosylmethionine decarboxylase homolog
  misc_feature (1)..(192): NCBI GI NO: 16226063 NR Description: S-adenosyl-L-methionine decarboxylase
  misc_feature (1)..(184): NCBI GI NO: 28566348 NR Description: S-adenosylmethionine decarboxylase
  misc_feature (1)..(190): NCBI GI NO: 38261497 NR Description: S-adenosyl-L-methionine decarboxylase
MVTLEMCMTELDVKKAAVFFKNSTGGSCTSAKEMTKLSGIHEIIPEMEICDFEFDPCGYSMNGVFGPAASTIHVTPEEGFSYASYEAMNFDPSSLVYSDVIRRVLAGFSPSDFSVAVTIFGGRGFAKSWATGADIDSYMCGDPVEQELPGGGLLMYQSFTAVPSGSVSPRSTLQTDGWSSDGMEMASNDEMCIGCWNAVKKVVKKDLDA

SEQ ID NO: 23911 - protein, 204 aa, Zea mays subsp. mays
  peptide (1)..(204): Ceres Seq. ID no. 12556349
  misc_feature (1)..(156): Pfam Name: Pfam Description:  Adenosylmethionine decarboxylase
  misc_feature (1)..(197): NCBI GI NO: 6646868 NR Description: S-adenosylmethionine decarboxylase 2
  misc_feature (1)..(172): NCBI GI NO: 3913427 NR Description: S-adenosylmethionine decarboxylase proenzyme
  misc_feature (1)..(168): NCBI GI NO: 19855056 NR Description: S-adenosylmethionine decarboxylase proenzyme
  misc_feature (1)..(168): NCBI GI NO: 3929545 NR Description: S-adenosylmethionine decarboxylase [Oryza sativa]
  misc_feature (1)..(166): NCBI GI NO: 4325045 NR Description: S-adenosylmethionine decarboxylase precursor
  misc_feature (1)..(204): NCBI GI NO: 3913438 NR Description: S-adenosylmethionine decarboxylase proenzyme
  misc_feature (1)..(168): NCBI GI NO: 7436593 NR Description: adenosylmethionine decarboxylase homolog
  misc_feature (1)..(187): NCBI GI NO: 16226063 NR Description: S-adenosyl-L-methionine decarboxylase
  misc_feature (1)..(179): NCBI GI NO: 28566348 NR Description: S-adenosylmethionine decarboxylase
  misc_feature (1)..(185): NCBI GI NO: 38261497 NR Description: S-adenosyl-L-methionine decarboxylase
MCMTELDVKKAAVFFKNSTGGSCTSAKEMTKLSGIHEIIPEMEICDFEFDPCGYSMNGVFGPAASTIHVTPEEGFSYASYEAMNFDPSSLVYSDVIRRVLAGFSPSDFSVAVTIFGGRGFAKSWATGADIDSYMCGDPVEQELPGGGLLMYQSFTAVPSGSVSPRSTLQTDGWSSDGMEMASNDEMCIGCWNAVKKVVKKDLDA

SEQ ID NO: 23912 - DNA, 852 bp, Zea mays subsp. mays
  misc_feature (1)..(852): Ceres Seq. ID no. 12407882
  misc_feature (744)..(744): n is a, c, t, g, unknown, or other
aaaacacgcgaatcgtaccggtacgaacactgagcacgcacgcacgcaaactcaaaggagtgtgaccacggaactgaagccatggcggttacagttgaaaagggcgctatgggcgagccggcgctgctgctggagcgcagccgggcgatcacccttcagggccgtgaccggaagggccgtgccgtcgtcaggatcgtcggcaactactttccagcgcgcgcgctgggcggccgggcggaggaggcgctgcggtcgtacctgcgggagcgcgtcctcccggagatcggggaccgcgagttcgtggtcgtgtacatgcactcccgcgtggatcgcggccacaacttccccggcgtcggtgcgatccgcggcgcgtacgagacgctgccggccgcggccaaggagaggctgcgcgccgtctacttcgtgcacccggccctccagtccaggatcttcttcgccaccttcgggcgcttcctcttcagctcagggttgtatgagaagctgcgatacatgagccggcttgagtacgtttgggcccacatagacaaggagcagctggaggtccccgaatgcgtgcgcgagcacgacgacgagctggagcgccgcccgctgatggactacggcatcgaggcgaccgagacccgctgcatgtatgacgccgcgtccatggacacctcggcgtccctgcactcgctccgctgcgtctactagtcgcctggacagtggcatcccgattcccgccgncggtaacggcgtgctttctgtgttctggttggtaggaggttagctgcatggcttcatagcgcttcggtactgtagtttagctgtgtatttataatggataaagtttgg

SEQ ID NO: 23913 - protein, 209 aa, Zea mays subsp. mays
  peptide (1)..(209): Ceres Seq. ID no. 12407883
  misc_feature (10)..(207): NCBI GI NO: 38345848 NR Description: OSJNBa0084K11.12
  misc_feature (12)..(208): NCBI GI NO: 15237117 NR Description: putative protein; protein id: At4g35750
  misc_feature (12)..(208): NCBI GI NO: 21553817 NR Description: unknown [Arabidopsis thaliana]
  misc_feature (17)..(183): NCBI GI NO: 21593697 NR Description: unknown [Arabidopsis thaliana]
  misc_feature (17)..(183): NCBI GI NO: 18398797 NR Description: expressed protein; protein id: At3g10210
  misc_feature (9)..(183): NCBI GI NO: 22830926 NR Description: P0466H10.24
  misc_feature (27)..(169): NCBI GI NO: 24586355 NR Description: CG18812-PB [Drosophila melanogaster]
  misc_feature (27)..(169): NCBI GI NO: 24586357 NR Description: CG18812-PA [Drosophila melanogaster]
  misc_feature (27)..(169): NCBI GI NO: 24586353 NR Description: CG18812-PC [Drosophila melanogaster]
  misc_feature (29)..(169): NCBI GI NO: 39597272 NR Description: Hypothetical protein CBG02886
MAVTVEKGAMGEPALLLERSRAITLQGRDRKGRAVVRIVGNYFPARALGGRAEEALRSYLRERVLPEIGDREFVVVYMHSRVDRGHNFPGVGAIRGAYETLPAAAKERLRAVYFVHPALQSRIFFATFGRFLFSSGLYEKLRYMSRLEYVWAHIDKEQLEVPECVREHDDELERRPLMDYGIEATETRCMYDAASMDTSASLHSLRCVY

SEQ ID NO: 23914 - protein, 200 aa, Zea mays subsp. mays
  peptide (1)..(200): Ceres Seq. ID no. 12407884
  misc_feature (1)..(198): NCBI GI NO: 38345848 NR Description: OSJNBa0084K11.12
  misc_feature (3)..(199): NCBI GI NO: 15237117 NR Description: putative protein; protein id: At4g35750
  misc_feature (3)..(199): NCBI GI NO: 21553817 NR Description: unknown [Arabidopsis thaliana]
  misc_feature (8)..(174): NCBI GI NO: 21593697 NR Description: unknown [Arabidopsis thaliana]
  misc_feature (8)..(174): NCBI GI NO: 18398797 NR Description: expressed protein; protein id: At3g10210
  misc_feature (1)..(174): NCBI GI NO: 22830926 NR Description: P0466H10.24
  misc_feature (18)..(160): NCBI GI NO: 24586355 NR Description: CG18812-PB [Drosophila melanogaster]
  misc_feature (18)..(160): NCBI GI NO: 24586357 NR Description: CG18812-PA [Drosophila melanogaster]
  misc_feature (18)..(160): NCBI GI NO: 24586353 NR Description: CG18812-PC [Drosophila melanogaster]
  misc_feature (20)..(160): NCBI GI NO: 39597272 NR Description: Hypothetical protein CBG02886
MGEPALLLERSRAITLQGRDRKGRAVVRIVGNYFPARALGGRAEEALRSYLRERVLPEIGDREFVVVYMHSRVDRGHNFPGVGAIRGAYETLPAAAKERLRAVYFVHPALQSRIFFATFGRFLFSSGLYEKLRYMSRLEYVWAHIDKEQLEVPECVREHDDELERRPLMDYGIEATETRCMYDAASMDTSASLHSLRCVY

SEQ ID NO: 23915 - protein, 170 aa, Zea mays subsp. mays
  peptide (1)..(170): Ceres Seq. ID no. 12407885
KHANRTGTNTEHARTQTQRSVTTELKPWRLQLKRALWASRRCCWSAAGRSPFRAVTGRAVPSSGSSATTFQRARWAAGRRRRCGRTCGSASSRRSGTASSWSCTCTPAWIAATTSPASVRSAARTRRCRPRPRRGCAPSTSCTRPSSPGSSSPPSGASSSAQGCMRSCDT

SEQ ID NO: 23916 - DNA, 1338 bp, Zea mays subsp. mays
  misc_feature (1)..(1338): Ceres Seq. ID no. 12352000
  misc_feature (398)..(398): n is a, c, t, g, unknown, or other
atcattcattccctcacccccttcccttagaagctgcaggtgcagtgcatgcaaggagacaggccacgatactgtctgagatggaaggggccatgacgacgagaagcaagcatcgtcgtcatgaggaggaccaggagatgacgatggtggagctgaggagaggcccctggacgctcgaggaagacaacctcctcatgaactacattgcttgccacggcgagggccgctggaatctcctggcccgctgctccgggctgaagaggaccggcaagagctgccggctgaggtggctcaactacctcaagccggacatcaagcgcggcaacctggcgccggaggagcagctcctcatcctggagctccactccaagtgggggaaccggtggtccaggatagcncagcacctgccggggcggaccgacaacgagatcaagaactactggcggacgcgcctgctcgagaagacgatggcggccgccgcggcatccacgtccggcgaagtgctgctgccgccgctaccgccgccgccgcaactgcacccctcgcgcgtcgccggcttattggcctcttcctcctcgtcgccagtccagcgggacaccagcgacagcgactacctgccgcagcggtaccaccaccaccccgtcgacccgagcccgagcgcgtcgtcgacggtttcctcgtcggccgcgctcgcgccggtgccctgcttctccgaactgagctgggtcgaccagtacgggtacggcccttattacagttacggcgccaacctcgacgacggcgccggcgtgttcgacgactcggcagcgctggaggaaggcctcggcctggacgcgctggacctgggtccggccgacgacagcgacgtcgcccactcggacgcgacgctgctggactacctcaactccgcgtgcgccggcggcggcaccatgatgatggctgtgacgggcggcggcggcggcgtccaaagcagcggctgcggcgccacgggaggtgccgacgccgactaccggccgtcgccgtgcacgtggcggacggacgagctcggcgatcctcgtcagcatcaatggggaggaggaatctagaagcaatcaaagagagcttgcttctcggcacgtctctctctctctctctccctctccctctccctcccaaagcgacgatcgatcgatcgagatgtcacactagttaattagtggatcggagctagatagcaggtagcaagatgcgtgagtggcgataaaaaaacattaggggccggggccgggcatattctgctgttaattcgaccgatcattcgttcgatcgtgtagtagagagatgtgtggtttgatgtcg

SEQ ID NO: 23917 - protein, 360 aa, Zea mays subsp. mays
  peptide (1)..(360): Ceres Seq. ID no. 12352001
  misc_feature (53)..(100): Pfam Name: Pfam Description:  Myb-like DNA-binding domain
  misc_feature (119)..(360): NCBI GI NO: 34895506 NR Description: putative myb-related transcription factor
  misc_feature (38)..(151): NCBI GI NO: 34895506 NR Description: putative myb-related transcription factor
  misc_feature (27)..(273): NCBI GI NO: 15221373 NR Description: myb family transcription factor
  misc_feature (50)..(151): NCBI GI NO: 34898110 NR Description: putative typical P-type R2R3 Myb protein
  misc_feature (50)..(151): NCBI GI NO: 19073328 NR Description: typical P-type R2R3 Myb protein [Sorghum bicolor]
  misc_feature (31)..(151): NCBI GI NO: 19073334 NR Description: typical P-type R2R3 Myb protein [Sorghum bicolor]
  misc_feature (27)..(151): NCBI GI NO: 13177578 NR Description: Myb transcription factor JAMyb [Oryza sativa]
  misc_feature (24)..(151): NCBI GI NO: 7446185 NR Description: dehydration-induced myb-related protein Cpm7 -Craterostigma plantagineum
  misc_feature (44)..(238): NCBI GI NO: 15240518 NR Description: myb family transcription factor
  misc_feature (49)..(151): NCBI GI NO: 40643882 NR Description: MYB8 protein [Gerbera hybrid cv. 'Terra Regina']
  misc_feature (132)..(132): Xaa is any aa, unknown or other
HSFPHPLPLEAAGAVHARRQATILSEMEGAMTTRSKHRRHEEDQEMTMVELRRGPWTLEEDNLLMNYIACHGEGRWNLLARCSGLKRTGKSCRLRWLNYLKPDIKRGNLAPEEQLLILELHSKWGNRWSRIXQHLPGRTDNEIKNYWRTRLLEKTMAAAAASTSGEVLLPPLPPPPQLHPSRVAGLLASSSSSPVQRDTSDSDYLPQRYHHHPVDPSPSASSTVSSSAALAPVPCFSELSWVDQYGYGPYYSYGANLDDGAGVFDDSAALEEGLGLDALDLGPADDSDVAHSDATLLDYLNSACAGGGTMMMAVTGGGGGVQSSGCGATGGADADYRPSPCTWRTDELGDPRQHQWGGGI

SEQ ID NO: 23918 - protein, 334 aa, Zea mays subsp. mays
  peptide (1)..(334): Ceres Seq. ID no. 12352002
  misc_feature (27)..(74): Pfam Name: Pfam Description:  Myb-like DNA-binding domain
  misc_feature (93)..(334): NCBI GI NO: 34895506 NR Description: putative myb-related transcription factor
  misc_feature (12)..(125): NCBI GI NO: 34895506 NR Description: putative myb-related transcription factor
  misc_feature (1)..(247): NCBI GI NO: 15221373 NR Description: myb family transcription factor
  misc_feature (24)..(125): NCBI GI NO: 34898110 NR Description: putative typical P-type R2R3 Myb protein
  misc_feature (24)..(125): NCBI GI NO: 19073328 NR Description: typical P-type R2R3 Myb protein [Sorghum bicolor]
  misc_feature (5)..(125): NCBI GI NO: 19073334 NR Description: typical P-type R2R3 Myb protein [Sorghum bicolor]
  misc_feature (1)..(125): NCBI GI NO: 13177578 NR Description: Myb transcription factor JAMyb [Oryza sativa]
  misc_feature (1)..(125): NCBI GI NO: 7446185 NR Description: dehydration-induced myb-related protein Cpm7 -Craterostigma plantagineum
  misc_feature (18)..(212): NCBI GI NO: 15240518 NR Description: myb family transcription factor
  misc_feature (23)..(125): NCBI GI NO: 40643882 NR Description: MYB8 protein [Gerbera hybrid cv. 'Terra Regina']
  misc_feature (106)..(106): Xaa is any aa, unknown or other
MEGAMTTRSKHRRHEEDQEMTMVELRRGPWTLEEDNLLMNYIACHGEGRWNLLARCSGLKRTGKSCRLRWLNYLKPDIKRGNLAPEEQLLILELHSKWGNRWSRIXQHLPGRTDNEIKNYWRTRLLEKTMAAAAASTSGEVLLPPLPPPPQLHPSRVAGLLASSSSSPVQRDTSDSDYLPQRYHHHPVDPSPSASSTVSSSAALAPVPCFSELSWVDQYGYGPYYSYGANLDDGAGVFDDSAALEEGLGLDALDLGPADDSDVAHSDATLLDYLNSACAGGGTMMMAVTGGGGGVQSSGCGATGGADADYRPSPCTWRTDELGDPRQHQWGGGI

SEQ ID NO: 23919 - protein, 330 aa, Zea mays subsp. mays
  peptide (1)..(330): Ceres Seq. ID no. 12352003
  misc_feature (23)..(70): Pfam Name: Pfam Description:  Myb-like DNA-binding domain
  misc_feature (89)..(330): NCBI GI NO: 34895506 NR Description: putative myb-related transcription factor
  misc_feature (8)..(121): NCBI GI NO: 34895506 NR Description: putative myb-related transcription factor
  misc_feature (1)..(243): NCBI GI NO: 15221373 NR Description: myb family transcription factor
  misc_feature (20)..(121): NCBI GI NO: 34898110 NR Description: putative typical P-type R2R3 Myb protein
  misc_feature (20)..(121): NCBI GI NO: 19073328 NR Description: typical P-type R2R3 Myb protein [Sorghum bicolor]
  misc_feature (1)..(121): NCBI GI NO: 19073334 NR Description: typical P-type R2R3 Myb protein [Sorghum bicolor]
  misc_feature (1)..(121): NCBI GI NO: 13177578 NR Description: Myb transcription factor JAMyb [Oryza sativa]
  misc_feature (1)..(121): NCBI GI NO: 7446185 NR Description: dehydration-induced myb-related protein Cpm7 -Craterostigma plantagineum
  misc_feature (14)..(208): NCBI GI NO: 15240518 NR Description: myb family transcription factor
  misc_feature (19)..(121): NCBI GI NO: 40643882 NR Description: MYB8 protein [Gerbera hybrid cv. 'Terra Regina']
  misc_feature (102)..(102): Xaa is any aa, unknown or other
MTTRSKHRRHEEDQEMTMVELRRGPWTLEEDNLLMNYIACHGEGRWNLLARCSGLKRTGKSCRLRWLNYLKPDIKRGNLAPEEQLLILELHSKWGNRWSRIXQHLPGRTDNEIKNYWRTRLLEKTMAAAAASTSGEVLLPPLPPPPQLHPSRVAGLLASSSSSPVQRDTSDSDYLPQRYHHHPVDPSPSASSTVSSSAALAPVPCFSELSWVDQYGYGPYYSYGANLDDGAGVFDDSAALEEGLGLDALDLGPADDSDVAHSDATLLDYLNSACAGGGTMMMAVTGGGGGVQSSGCGATGGADADYRPSPCTWRTDELGDPRQHQWGGGI

SEQ ID NO: 23920 - DNA, 1608 bp, Zea mays subsp. mays
  misc_feature (1)..(1608): Ceres Seq. ID no. 12352004
aacaaaatctctccttagtttccccaacctgcttctgtttaccgaattcctaaatccaatccccttgccaagctctctctttgctgcgggaggtcgaggccggagaggtattccgggatgggatcaagaaaggggtggttccccgtggccctcctgctgttggccgcctctgccctctggccgccggtcgccgccgccgccgccggaggcggcgaggccgaacacgccgttcagcagcatagcgagcgcatctcagggagtgctggtgatgtgttagaagataatcctgtgggtaggttgaaggtcttcatttatgacttaccaaggaagtacaacaagaagatggtcaccaaggattcacggtgcctcagtcacatgtttgccgctgaaattttcatgcatcgtttcttgctctcgagtgctgtccggacactaaatcccaaggaagctgattggttctatacaccagtttacactacttgcgatttaactaacgctggactgcccttgccgtttaagtcaccacgggtgatgaggagcgcgatccaatatatttcaaacaaatggcccttctggaataggactgatggagcagatcatttcttcgttgttccgcatgattttgcagcatgcttccactatcaggaagaaaaagctatcgagcgtggaattcttccattgctgcgacgtgctacattggtccaaacctttggacaggagaatcatgtttgcctgaaggagggttccatcattattccaccctatgctcctccgcagaaaatgcaagctcacttgatttccccagacactccacgctcaatcttcgtttacttccggggacttttttatgacacggggaatgaccccgagggcggatactatgcaagaggtgcgcgagcttcgctatgggagaacttcaagagcaaccctctgtttgacatttccacagaccaccctgccacttactatgaagacatgcagcgcgctgtcttctgcctgtgcccattgggctgggcaccgtggagccctaggttggttgaggctgtggtctttggctgcattccagtcatcatagctgatgacatcgtgcttccatttgcagacgcgatcccatgggaggaaatcggcgtctttgtcgaggagaaggatgtcccaaagcttgacacgatcctcacgtcgatgcctatagatgacatcttaaggaagcaaaggttactcgcaaatccatcgatgaagcaggcaatgttgttcccacagccagcgcaaccaagggacgcgttccaccaaatcttgaacggccttgctcggaagctcccgcacccagagggtacgttcttacaacctggcgatcagcgcctcaactggaccgctggtcctgtgggagatctgaagccgtggtagagaagaatagctatcttcttctttgataatccaagctttgccacgagcaccccttaggactaatgcacgcttcatgagatgttatgtaatcaatatgctgtgcgtgctttaggtgcaaaatacaccttggccgtgcttagtccttatgaacgccatgtaacttattgatttcccatggaaatgaaatggtatatttatcttgctgtc

SEQ ID NO: 23921 - protein, 427 aa, Zea mays subsp. mays
  peptide (1)..(427): Ceres Seq. ID no. 12352005
  misc_feature (63)..(367): Pfam Name: Pfam Description:  Exostosin family
  misc_feature (1)..(427): NCBI GI NO: 38347167 NR Description: OSJNBa0039C07.13
  misc_feature (40)..(427): NCBI GI NO: 34907046 NR Description: contains EST D39982
  misc_feature (31)..(427): NCBI GI NO: 34907048 NR Description: contains EST D24978
  misc_feature (40)..(427): NCBI GI NO: 18424516 NR Description: putative protein; protein id: At5g61840
  misc_feature (40)..(427): NCBI GI NO: 21592991 NR Description: unknown [Arabidopsis thaliana]
  misc_feature (34)..(427): NCBI GI NO: 15223522 NR Description: unknown protein; protein id: At1g27440.1
  misc_feature (10)..(427): NCBI GI NO: 34907044 NR Description: hypothetical protein~similar to Arabidopsisthaliana chromosome 1
  misc_feature (52)..(427): NCBI GI NO: 37531708 NR Description: unknown protein
  misc_feature (87)..(427): NCBI GI NO: 23821292 NR Description: pectin-glucuronyltransferase
  misc_feature (52)..(427): NCBI GI NO: 18642697 NR Description: Unknown protein [Oryza sativa]
MGSRKGWFPVALLLLAASALWPPVAAAAAGGGEAEHAVQQHSERISGSAGDVLEDNPVGRLKVFIYDLPRKYNKKMVTKDSRCLSHMFAAEIFMHRFLLSSAVRTLNPKEADWFYTPVYTTCDLTNAGLPLPFKSPRVMRSAIQYISNKWPFWNRTDGADHFFVVPHDFAACFHYQEEKAIERGILPLLRRATLVQTFGQENHVCLKEGSIIIPPYAPPQKMQAHLISPDTPRSIFVYFRGLFYDTGNDPEGGYYARGARASLWENFKSNPLFDISTDHPATYYEDMQRAVFCLCPLGWAPWSPRLVEAVVFGCIPVIIADDIVLPFADAIPWEEIGVFVEEKDVPKLDTILTSMPIDDILRKQRLLANPSMKQAMLFPQPAQPRDAFHQILNGLARKLPHPEGTFLQPGDQRLNWTAGPVGDLKPW

SEQ ID NO: 23922 - protein, 352 aa, Zea mays subsp. mays
  peptide (1)..(352): Ceres Seq. ID no. 12352006
  misc_feature (1)..(292): Pfam Name: Pfam Description:  Exostosin family
  misc_feature (1)..(352): NCBI GI NO: 38347167 NR Description: OSJNBa0039C07.13
  misc_feature (1)..(352): NCBI GI NO: 34907046 NR Description: contains EST D39982
  misc_feature (1)..(352): NCBI GI NO: 34907048 NR Description: contains EST D24978
  misc_feature (1)..(352): NCBI GI NO: 18424516 NR Description: putative protein; protein id: At5g61840
  misc_feature (1)..(352): NCBI GI NO: 21592991 NR Description: unknown [Arabidopsis thaliana]
  misc_feature (1)..(352): NCBI GI NO: 15223522 NR Description: unknown protein; protein id: At1g27440.1
  misc_feature (1)..(352): NCBI GI NO: 34907044 NR Description: hypothetical protein~similar to Arabidopsisthaliana chromosome 1
  misc_feature (1)..(352): NCBI GI NO: 37531708 NR Description: unknown protein
  misc_feature (12)..(352): NCBI GI NO: 23821292 NR Description: pectin-glucuronyltransferase
  misc_feature (1)..(352): NCBI GI NO: 18642697 NR Description: Unknown protein [Oryza sativa]
MVTKDSRCLSHMFAAEIFMHRFLLSSAVRTLNPKEADWFYTPVYTTCDLTNAGLPLPFKSPRVMRSAIQYISNKWPFWNRTDGADHFFVVPHDFAACFHYQEEKAIERGILPLLRRATLVQTFGQENHVCLKEGSIIIPPYAPPQKMQAHLISPDTPRSIFVYFRGLFYDTGNDPEGGYYARGARASLWENFKSNPLFDISTDHPATYYEDMQRAVFCLCPLGWAPWSPRLVEAVVFGCIPVIIADDIVLPFADAIPWEEIGVFVEEKDVPKLDTILTSMPIDDILRKQRLLANPSMKQAMLFPQPAQPRDAFHQILNGLARKLPHPEGTFLQPGDQRLNWTAGPVGDLKPW

SEQ ID NO: 23923 - protein, 341 aa, Zea mays subsp. mays
  peptide (1)..(341): Ceres Seq. ID no. 12352007
  misc_feature (1)..(281): Pfam Name: Pfam Description:  Exostosin family
  misc_feature (1)..(341): NCBI GI NO: 38347167 NR Description: OSJNBa0039C07.13
  misc_feature (1)..(341): NCBI GI NO: 34907046 NR Description: contains EST D39982
  misc_feature (1)..(341): NCBI GI NO: 34907048 NR Description: contains EST D24978
  misc_feature (1)..(341): NCBI GI NO: 18424516 NR Description: putative protein; protein id: At5g61840
  misc_feature (1)..(341): NCBI GI NO: 21592991 NR Description: unknown [Arabidopsis thaliana]
  misc_feature (1)..(341): NCBI GI NO: 15223522 NR Description: unknown protein; protein id: At1g27440.1
  misc_feature (1)..(341): NCBI GI NO: 34907044 NR Description: hypothetical protein~similar to Arabidopsisthaliana chromosome 1
  misc_feature (1)..(341): NCBI GI NO: 37531708 NR Description: unknown protein
  misc_feature (1)..(341): NCBI GI NO: 23821292 NR Description: pectin-glucuronyltransferase
  misc_feature (1)..(341): NCBI GI NO: 18642697 NR Description: Unknown protein [Oryza sativa]
MFAAEIFMHRFLLSSAVRTLNPKEADWFYTPVYTTCDLTNAGLPLPFKSPRVMRSAIQYISNKWPFWNRTDGADHFFVVPHDFAACFHYQEEKAIERGILPLLRRATLVQTFGQENHVCLKEGSIIIPPYAPPQKMQAHLISPDTPRSIFVYFRGLFYDTGNDPEGGYYARGARASLWENFKSNPLFDISTDHPATYYEDMQRAVFCLCPLGWAPWSPRLVEAVVFGCIPVIIADDIVLPFADAIPWEEIGVFVEEKDVPKLDTILTSMPIDDILRKQRLLANPSMKQAMLFPQPAQPRDAFHQILNGLARKLPHPEGTFLQPGDQRLNWTAGPVGDLKPW

SEQ ID NO: 23924 - DNA, 1446 bp, Zea mays subsp. mays
  misc_feature (1)..(1446): Ceres Seq. ID no. 12366876
gcacgagaccattacctagaacatcctaatcgaaaaaaaaaagcttcccttccttccctggaacggcaacgagacgtgggagctgggacgggcaagtagtagaaaccttctctccttccccagccaggacgccatacagaatccgacgcgatccagaagaagccaaggcctcttcagatcctcccgcctccctctgcgaggttcccagaccgagccatcgccggcgctaggctcggggatcttgtcgggtcccgtcccgtcctaccacttcgccggcgctgcgtcgccgtcactcgtcagtcaggactcaggatccccaagatggcttcttcaaacggtgaggctgagcaacaatggatagagaatatcaagtcaggaggaacagttccctgtctaccacctgaaaactgtcctaatggctgggctactcctcccggtgattcatttatggtcagaggcccagaatatcttacaaacaaggtaaaaataccaggtggagagtatcttctgaagcctctcggctttgattggatcaaaggaccagcaaaaatctgtgagatcctgaaagacagtaaccatcgagttagaaaagctatcgacgaggaggtttcacgtggtaaccggccttttgtctgggcattcaacttgcaactgcccaaggacaacttcagtgcaatattctacttcgtgtcgctggaggctatacctgaaggctcgcttatggaccagttcttgaaaggagatgatgccttccgaaactccaggcttaagttaatagcgaatattgtcaaggggccctggattgtccggacggctgtgggtgaacaggccatctgtatactggggagagccctctcatgcaagtatgttcaaggatcaaacttcatcgaagttgatgtggatatcgggtcttctatagttgcaaatgcgatcgttcatttggcatttggctatatcacaacgctaactgtagatttggcctttctcattgagagtcaaaccgagtcggagctccctgagagacttcttggagcagtaaggttttctgagttaaatccaggatcagctggtttgtttgaaaggcggtctgaagagcatcaggaaagcactcagtctcggcctgtaggattttggcagggtttctctcaactgttgaacaaccaaggcaatacaagggagccatcccctaatttacagaatactaatggaactttgcgcaaagaagaagcaaatgaggatgccaaatgattcagacccctaccattgtttcggggacaatttatcagtagatcacggcgttacaatttaccagatagtcccagggctttgtttctttgccctcacatctgctgtaaaaattataactttggccacagacaaactgcataactttgtacataaactgaatgcttcctaaatatttgttcccttatatagttatatgtg

SEQ ID NO: 23925 - protein, 308 aa, Zea mays subsp. mays
  peptide (1)..(308): Ceres Seq. ID no. 12366877
  misc_feature (1)..(302): NCBI GI NO: 18390605 NR Description: expressed protein; protein id: At1g06050
  misc_feature (1)..(302): NCBI GI NO: 25406892 NR Description: hypothetical protein
  misc_feature (1)..(302): NCBI GI NO: 21618178 NR Description: unknown [Arabidopsis thaliana]
  misc_feature (3)..(249): NCBI GI NO: 21592409 NR Description: unknown [Arabidopsis thaliana]
  misc_feature (1)..(249): NCBI GI NO: 15238248 NR Description: putative protein; protein id: At5g10750
  misc_feature (1)..(249): NCBI GI NO: 22655107 NR Description: putative protein [Arabidopsis thaliana]
  misc_feature (11)..(266): NCBI GI NO: 15238672 NR Description: putative protein; protein id: At5g24990
  misc_feature (11)..(253): NCBI GI NO: 15238674 NR Description: putative protein; protein id: At5g25010.1
  misc_feature (28)..(249): NCBI GI NO: 22327599 NR Description: putative protein; protein id: At5g45560
  misc_feature (110)..(249): NCBI GI NO: 34897970 NR Description: hypothetical protein~similar to Arabidopsisthaliana chromosome 5
MASSNGEAEQQWIENIKSGGTVPCLPPENCPNGWATPPGDSFMVRGPEYLTNKVKIPGGEYLLKPLGFDWIKGPAKICEILKDSNHRVRKAIDEEVSRGNRPFVWAFNLQLPKDNFSAIFYFVSLEAIPEGSLMDQFLKGDDAFRNSRLKLIANIVKGPWIVRTAVGEQAICILGRALSCKYVQGSNFIEVDVDIGSSIVANAIVHLAFGYITTLTVDLAFLIESQTESELPERLLGAVRFSELNPGSAGLFERRSEEHQESTQSRPVGFWQGFSQLLNNQGNTREPSPNLQNTNGTLRKEEANEDAK

SEQ ID NO: 23926 - protein, 266 aa, Zea mays subsp. mays
  peptide (1)..(266): Ceres Seq. ID no. 12366878
  misc_feature (1)..(260): NCBI GI NO: 18390605 NR Description: expressed protein; protein id: At1g06050
  misc_feature (1)..(260): NCBI GI NO: 25406892 NR Description: hypothetical protein
  misc_feature (1)..(260): NCBI GI NO: 21618178 NR Description: unknown [Arabidopsis thaliana]
  misc_feature (1)..(207): NCBI GI NO: 21592409 NR Description: unknown [Arabidopsis thaliana]
  misc_feature (1)..(207): NCBI GI NO: 15238248 NR Description: putative protein; protein id: At5g10750
  misc_feature (1)..(207): NCBI GI NO: 22655107 NR Description: putative protein [Arabidopsis thaliana]
  misc_feature (1)..(224): NCBI GI NO: 15238672 NR Description: putative protein; protein id: At5g24990
  misc_feature (1)..(211): NCBI GI NO: 15238674 NR Description: putative protein; protein id: At5g25010.1
  misc_feature (1)..(207): NCBI GI NO: 22327599 NR Description: putative protein; protein id: At5g45560
  misc_feature (68)..(207): NCBI GI NO: 34897970 NR Description: hypothetical protein~similar to Arabidopsisthaliana chromosome 5
MVRGPEYLTNKVKIPGGEYLLKPLGFDWIKGPAKICEILKDSNHRVRKAIDEEVSRGNRPFVWAFNLQLPKDNFSAIFYFVSLEAIPEGSLMDQFLKGDDAFRNSRLKLIANIVKGPWIVRTAVGEQAICILGRALSCKYVQGSNFIEVDVDIGSSIVANAIVHLAFGYITTLTVDLAFLIESQTESELPERLLGAVRFSELNPGSAGLFERRSEEHQESTQSRPVGFWQGFSQLLNNQGNTREPSPNLQNTNGTLRKEEANEDAK

SEQ ID NO: 23927 - protein, 175 aa, Zea mays subsp. mays
  peptide (1)..(175): Ceres Seq. ID no. 12366879
  misc_feature (1)..(169): NCBI GI NO: 18390605 NR Description: expressed protein; protein id: At1g06050
  misc_feature (1)..(169): NCBI GI NO: 25406892 NR Description: hypothetical protein
  misc_feature (1)..(169): NCBI GI NO: 21618178 NR Description: unknown [Arabidopsis thaliana]
  misc_feature (1)..(116): NCBI GI NO: 21592409 NR Description: unknown [Arabidopsis thaliana]
  misc_feature (1)..(116): NCBI GI NO: 15238248 NR Description: putative protein; protein id: At5g10750
  misc_feature (1)..(116): NCBI GI NO: 22655107 NR Description: putative protein [Arabidopsis thaliana]
  misc_feature (1)..(133): NCBI GI NO: 15238672 NR Description: putative protein; protein id: At5g24990
  misc_feature (1)..(120): NCBI GI NO: 15238674 NR Description: putative protein; protein id: At5g25010.1
  misc_feature (1)..(116): NCBI GI NO: 22327599 NR Description: putative protein; protein id: At5g45560
  misc_feature (1)..(116): NCBI GI NO: 34897970 NR Description: hypothetical protein~similar to Arabidopsisthaliana chromosome 5
MDQFLKGDDAFRNSRLKLIANIVKGPWIVRTAVGEQAICILGRALSCKYVQGSNFIEVDVDIGSSIVANAIVHLAFGYITTLTVDLAFLIESQTESELPERLLGAVRFSELNPGSAGLFERRSEEHQESTQSRPVGFWQGFSQLLNNQGNTREPSPNLQNTNGTLRKEEANEDAK

SEQ ID NO: 23928 - DNA, 1226 bp, Zea mays subsp. mays
  misc_feature (1)..(1226): Ceres Seq. ID no. 12352008
aatttccctcgccatcctacgcctcgcgccgccgccacagcaacccttgcagccccaatcccccacggcgaccatggccggcgcgcaggagtccctctccctggtgggcacgatgcgcggccataacggcgaggtgacggcgatcgcgaccccgatcgacaactcgcctttcatcgtctcctcctcccgggacaagtccgtgctggtgtgggacctgaccaacccggtccactccaccccggaatccggcgtcaccgccgactacggcgtccccttccgccgcctcaccggccactcccacttcgtccaggacgtcgtccttagttccgacggccagttcgcactctctggctcctgggacggcgagctccgcctttgggacctctccaccggcctcaccacccgccgcttcgtcggccacgagaaggacgtcatctccgtcgccttctccgtcgacaaccgccagatcgtctccgcgtcccgcgacaagaccatcaagctctggaacactctcggcgagtgcaagtacaccatcggcggcgacctcggcggcggcgagggccacaacgggtgggtctcctgcgttaggttctccccaaacaccttccagcccaccattgtctccggatcctgggaccgcaccgtcaaggtctggaaccttaccaactgcaagctgcgctgcactctggatgggcacggtggctatgttaacgccgtcgctgtgagccccgacgggtcgctgtgcgcctccggcgggaaggacggtgttactctgctgtgggatttggctgaggggaagaggctgtactcgctggacgcgggctccatcatccactctctctgcttctcacccaaccgctactggctctgcgctgcgacgcaggactctgtcaagatctgggacctcgagtcgaagcacgttgtgcaggacctcaagcccgacatccaggtctccaagaaccagatcctgtactgtacaagcttgagctggagtgcggacggaagcaccctctacactggctacaccgatgggtctatcagggtttggaagatctccgggtacggctacgcaggctagatgttgaaatcagcttggtctaggcagtctttcgggggaaaacattgtaatgtttgtcaagtttttgatgtcgtgagctatattgtctcttcgctactttccggtcgcccaaccattttaatcttactatggaagaatcttgttttgc

SEQ ID NO: 23929 - protein, 358 aa, Zea mays subsp. mays
  peptide (1)..(358): Ceres Seq. ID no. 12352009
  misc_feature (25)..(358): NCBI GI NO: 34911282 NR Description: guanine nucleotide-binding protein beta subujit-like protein
  misc_feature (28)..(354): NCBI GI NO: 4589836 NR Description: LeArcA2 protein [Lycopersicon esculentum]
  misc_feature (28)..(354): NCBI GI NO: 7446126 NR Description: GTP-binding protein beta chain homolog
  misc_feature (28)..(354): NCBI GI NO: 4589834 NR Description: LeArcA1 protein [Lycopersicon esculentum]
  misc_feature (28)..(354): NCBI GI NO: 1346110 NR Description: GUANINE NUCLEOTIDE-BINDING PROTEIN BETA SUBUNIT-LIKE PROTEIN
  misc_feature (30)..(354): NCBI GI NO: 3023847 NR Description: GUANINE NUCLEOTIDE-BINDING PROTEIN BETA SUBUNIT-LIKE PROTEIN
  misc_feature (30)..(354): NCBI GI NO: 3023858 NR Description: GUANINE NUCLEOTIDE-BINDING PROTEIN BETA SUBUNIT-LIKE PROTEIN
  misc_feature (28)..(354): NCBI GI NO: 3023851 NR Description: Guanine nucleotide-binding protein beta subunit-like protein
  misc_feature (30)..(354): NCBI GI NO: 15220941 NR Description: G-protein beta family; protein id: At1g18080
  misc_feature (30)..(354): NCBI GI NO: 2289095 NR Description: WD-40 repeat protein [Arabidopsis thaliana]
ISLAILRLAPPPQQPLQPQSPTATMAGAQESLSLVGTMRGHNGEVTAIATPIDNSPFIVSSSRDKSVLVWDLTNPVHSTPESGVTADYGVPFRRLTGHSHFVQDVVLSSDGQFALSGSWDGELRLWDLSTGLTTRRFVGHEKDVISVAFSVDNRQIVSASRDKTIKLWNTLGECKYTIGGDLGGGEGHNGWVSCVRFSPNTFQPTIVSGSWDRTVKVWNLTNCKLRCTLDGHGGYVNAVAVSPDGSLCASGGKDGVTLLWDLAEGKRLYSLDAGSIIHSLCFSPNRYWLCAATQDSVKIWDLESKHVVQDLKPDIQVSKNQILYCTSLSWSADGSTLYTGYTDGSIRVWKISGYGYAG

SEQ ID NO: 23930 - protein, 334 aa, Zea mays subsp. mays
  peptide (1)..(334): Ceres Seq. ID no. 12352010
  misc_feature (1)..(334): NCBI GI NO: 34911282 NR Description: guanine nucleotide-binding protein beta subujit-like protein
  misc_feature (4)..(330): NCBI GI NO: 4589836 NR Description: LeArcA2 protein [Lycopersicon esculentum]
  misc_feature (4)..(330): NCBI GI NO: 7446126 NR Description: GTP-binding protein beta chain homolog
  misc_feature (4)..(330): NCBI GI NO: 4589834 NR Description: LeArcA1 protein [Lycopersicon esculentum]
  misc_feature (4)..(330): NCBI GI NO: 1346110 NR Description: GUANINE NUCLEOTIDE-BINDING PROTEIN BETA SUBUNIT-LIKE PROTEIN
  misc_feature (6)..(330): NCBI GI NO: 3023847 NR Description: GUANINE NUCLEOTIDE-BINDING PROTEIN BETA SUBUNIT-LIKE PROTEIN
  misc_feature (6)..(330): NCBI GI NO: 3023858 NR Description: GUANINE NUCLEOTIDE-BINDING PROTEIN BETA SUBUNIT-LIKE PROTEIN
  misc_feature (4)..(330): NCBI GI NO: 3023851 NR Description: Guanine nucleotide-binding protein beta subunit-like protein
  misc_feature (6)..(330): NCBI GI NO: 15220941 NR Description: G-protein beta family; protein id: At1g18080
  misc_feature (6)..(330): NCBI GI NO: 2289095 NR Description: WD-40 repeat protein [Arabidopsis thaliana]
MAGAQESLSLVGTMRGHNGEVTAIATPIDNSPFIVSSSRDKSVLVWDLTNPVHSTPESGVTADYGVPFRRLTGHSHFVQDVVLSSDGQFALSGSWDGELRLWDLSTGLTTRRFVGHEKDVISVAFSVDNRQIVSASRDKTIKLWNTLGECKYTIGGDLGGGEGHNGWVSCVRFSPNTFQPTIVSGSWDRTVKVWNLTNCKLRCTLDGHGGYVNAVAVSPDGSLCASGGKDGVTLLWDLAEGKRLYSLDAGSIIHSLCFSPNRYWLCAATQDSVKIWDLESKHVVQDLKPDIQVSKNQILYCTSLSWSADGSTLYTGYTDGSIRVWKISGYGYAG

SEQ ID NO: 23931 - protein, 321 aa, Zea mays subsp. mays
  peptide (1)..(321): Ceres Seq. ID no. 12352011
  misc_feature (1)..(321): NCBI GI NO: 34911282 NR Description: guanine nucleotide-binding protein beta subujit-like protein
  misc_feature (1)..(317): NCBI GI NO: 4589836 NR Description: LeArcA2 protein [Lycopersicon esculentum]
  misc_feature (1)..(317): NCBI GI NO: 7446126 NR Description: GTP-binding protein beta chain homolog
  misc_feature (1)..(317): NCBI GI NO: 4589834 NR Description: LeArcA1 protein [Lycopersicon esculentum]
  misc_feature (1)..(317): NCBI GI NO: 1346110 NR Description: GUANINE NUCLEOTIDE-BINDING PROTEIN BETA SUBUNIT-LIKE PROTEIN
  misc_feature (1)..(317): NCBI GI NO: 3023847 NR Description: GUANINE NUCLEOTIDE-BINDING PROTEIN BETA SUBUNIT-LIKE PROTEIN
  misc_feature (1)..(317): NCBI GI NO: 3023858 NR Description: GUANINE NUCLEOTIDE-BINDING PROTEIN BETA SUBUNIT-LIKE PROTEIN
  misc_feature (1)..(317): NCBI GI NO: 3023851 NR Description: Guanine nucleotide-binding protein beta subunit-like protein
  misc_feature (1)..(317): NCBI GI NO: 15220941 NR Description: G-protein beta family; protein id: At1g18080
  misc_feature (1)..(317): NCBI GI NO: 2289095 NR Description: WD-40 repeat protein [Arabidopsis thaliana]
MRGHNGEVTAIATPIDNSPFIVSSSRDKSVLVWDLTNPVHSTPESGVTADYGVPFRRLTGHSHFVQDVVLSSDGQFALSGSWDGELRLWDLSTGLTTRRFVGHEKDVISVAFSVDNRQIVSASRDKTIKLWNTLGECKYTIGGDLGGGEGHNGWVSCVRFSPNTFQPTIVSGSWDRTVKVWNLTNCKLRCTLDGHGGYVNAVAVSPDGSLCASGGKDGVTLLWDLAEGKRLYSLDAGSIIHSLCFSPNRYWLCAATQDSVKIWDLESKHVVQDLKPDIQVSKNQILYCTSLSWSADGSTLYTGYTDGSIRVWKISGYGYAG

SEQ ID NO: 23932 - DNA, 1338 bp, Zea mays subsp. mays
  misc_feature (1)..(1338): Ceres Seq. ID no. 12352016
tcaagcttaataaaaggttgctccgctcagctgccctctgcgcctcataaccgaaaaaacccaaagtcacgtttcctcctcaacaaaaaccctcgcaaaaatctgggatctatctagaagcaccactcaacaaaccctaggttgcctgatcggctgatcgctccatggcgatcatctccgacttcaaggacgacgaggcaccggagcagcagctggcggcccggcccacggcgtcgaggaggccctcgtggcggcgttggagaggagcggcggcgcgctccccttcctacaggcggctatcgatgtcgcccaccgcaggtccggcctgttccgcgacccttcggcggtgagcaaggtcaccgcgatggcggcggcagccagggcgcagatcgaagccgaggagagggtgaccagagaggcggaggccaagaggaaggcggaggaggacgagaggaaggcggaagccgaggcgcagagggctgccaaggaggcggtaatggcgacggcagaggagaagccagagagcacggtggagaaggacatcatggaggtggataagaaggaggaagccaacgtgagacaaccaaatgctggcaatggtcttgacttggagaagtactcgtggactcaacagttgccagaggttaacatcaccattcctgttcctcaaggaacaaaatcaagatttgtggtatttgatttaaagaagaaccatctgaaggttggtctgaagggccagccacctatcattgatggtgagctctataagccagttaaggttgatgactgcttctggagcatagaggatgggagaaccctgtccatattgcttacaaagcatgaccaaatggaatggtggaagtctgttataaagggtgatcctgaagttgatacccaaaaggtggaacctgagaacagtaaactctctgatttggatcctgagactagacaaactgtggaaaagatgatgtttgaccagcgctagaagcagatgggccttccaacaagtgatgaaatgcaaaagcaagaaattctcaagaagttcatgtctgagcacccggagatggacttctctagagcgaaattagattgaggatgtgtttgaccatttgtctgaatgcgttattagtatgaaacattttttgatcagtttgcatgtaatgcgtcagaaatatctggagatagacttctctagagcgaaaatagcttgaggatgtgttcggccagttatttctaccagtgtgcattaggttgtctgagtgcgttattagtatgaaacaaaaattttgatcagttcacgtgtaatcgtcagaaatatccggagatggacttctctag

SEQ ID NO: 23933 - protein, 206 aa, Zea mays subsp. mays
  peptide (1)..(206): Ceres Seq. ID no. 12352017
  misc_feature (75)..(206): Pfam Name: Pfam Description:  Nuclear movement protein
  misc_feature (1)..(206): NCBI GI NO: 30524691 NR Description: salt tolerance protein 5 [Beta vulgaris]
  misc_feature (1)..(206): NCBI GI NO: 21593329 NR Description: unknown [Arabidopsis thaliana]
  misc_feature (1)..(206): NCBI GI NO: 15238732 NR Description: putative protein; protein id: At5g53400
  misc_feature (1)..(206): NCBI GI NO: 15234308 NR Description: putative protein; protein id: At4g27890.1
  misc_feature (1)..(206): NCBI GI NO: 6754910 NR Description: nuclear distribution gene C homolog (Aspergillus)
  misc_feature (1)..(206): NCBI GI NO: 8101760 NR Description: putative nuclear movement protein PNUDC
  misc_feature (1)..(206): NCBI GI NO: 8394272 NR Description: nuclear distribution gene C homolog
  misc_feature (1)..(206): NCBI GI NO: 5729953 NR Description: nuclear distribution gene C homolog (A
  misc_feature (1)..(206): NCBI GI NO: 12052969 NR Description: hypothetical protein [Homo sapiens]
  misc_feature (1)..(206): NCBI GI NO: 28279157 NR Description: Similar to nuclear distribution gene C homolog
MAAAARAQIEAEERVTREAEAKRKAEEDERKAEAEAQRAAKEAVMATAEEKPESTVEKDIMEVDKKEEANVRQPNAGNGLDLEKYSWTQQLPEVNITIPVPQGTKSRFVVFDLKKNHLKVGLKGQPPIIDGELYKPVKVDDCFWSIEDGRTLSILLTKHDQMEWWKSVIKGDPEVDTQKVEPENSKLSDLDPETRQTVEKMMFDQR

SEQ ID NO: 23934 - protein, 162 aa, Zea mays subsp. mays
  peptide (1)..(162): Ceres Seq. ID no. 12352018
  misc_feature (31)..(162): Pfam Name: Pfam Description:  Nuclear movement protein
  misc_feature (1)..(162): NCBI GI NO: 30524691 NR Description: salt tolerance protein 5 [Beta vulgaris]
  misc_feature (1)..(162): NCBI GI NO: 21593329 NR Description: unknown [Arabidopsis thaliana]
  misc_feature (1)..(162): NCBI GI NO: 15238732 NR Description: putative protein; protein id: At5g53400
  misc_feature (1)..(162): NCBI GI NO: 15234308 NR Description: putative protein; protein id: At4g27890.1
  misc_feature (1)..(162): NCBI GI NO: 6754910 NR Description: nuclear distribution gene C homolog (Aspergillus)
  misc_feature (1)..(162): NCBI GI NO: 8101760 NR Description: putative nuclear movement protein PNUDC
  misc_feature (1)..(162): NCBI GI NO: 8394272 NR Description: nuclear distribution gene C homolog
  misc_feature (1)..(162): NCBI GI NO: 5729953 NR Description: nuclear distribution gene C homolog (A
  misc_feature (1)..(162): NCBI GI NO: 12052969 NR Description: hypothetical protein [Homo sapiens]
  misc_feature (1)..(162): NCBI GI NO: 28279157 NR Description: Similar to nuclear distribution gene C homolog
MATAEEKPESTVEKDIMEVDKKEEANVRQPNAGNGLDLEKYSWTQQLPEVNITIPVPQGTKSRFVVFDLKKNHLKVGLKGQPPIIDGELYKPVKVDDCFWSIEDGRTLSILLTKHDQMEWWKSVIKGDPEVDTQKVEPENSKLSDLDPETRQTVEKMMFDQR

SEQ ID NO: 23935 - protein, 146 aa, Zea mays subsp. mays
  peptide (1)..(146): Ceres Seq. ID no. 12352019
  misc_feature (15)..(146): Pfam Name: Pfam Description:  Nuclear movement protein
  misc_feature (1)..(146): NCBI GI NO: 30524691 NR Description: salt tolerance protein 5 [Beta vulgaris]
  misc_feature (1)..(146): NCBI GI NO: 21593329 NR Description: unknown [Arabidopsis thaliana]
  misc_feature (1)..(146): NCBI GI NO: 15238732 NR Description: putative protein; protein id: At5g53400
  misc_feature (1)..(146): NCBI GI NO: 15234308 NR Description: putative protein; protein id: At4g27890.1
  misc_feature (1)..(146): NCBI GI NO: 6754910 NR Description: nuclear distribution gene C homolog (Aspergillus)
  misc_feature (1)..(146): NCBI GI NO: 8101760 NR Description: putative nuclear movement protein PNUDC
  misc_feature (1)..(146): NCBI GI NO: 8394272 NR Description: nuclear distribution gene C homolog
  misc_feature (1)..(146): NCBI GI NO: 5729953 NR Description: nuclear distribution gene C homolog (A
  misc_feature (1)..(146): NCBI GI NO: 12052969 NR Description: hypothetical protein [Homo sapiens]
  misc_feature (1)..(146): NCBI GI NO: 28279157 NR Description: Similar to nuclear distribution gene C homolog
MEVDKKEEANVRQPNAGNGLDLEKYSWTQQLPEVNITIPVPQGTKSRFVVFDLKKNHLKVGLKGQPPIIDGELYKPVKVDDCFWSIEDGRTLSILLTKHDQMEWWKSVIKGDPEVDTQKVEPENSKLSDLDPETRQTVEKMMFDQR

SEQ ID NO: 23936 - DNA, 1421 bp, Zea mays subsp. mays
  misc_feature (1)..(1421): Ceres Seq. ID no. 12410851
atcgctgcgatttcttgtggcccggcggctccagccccacggctgccgagcggataacgaacgactggcggcggctcgcgtcggccttcctcctctccttctctctcctcgcatcgcagtcgcagcaggcaacaaaccaaatcgcttaccgcccccgaagcgtctcggttcgcatagcagagctgctcttgcaacaagccaaacaacccagtggctgctagccgagacaggggatagattgagagaggcgcgcagatggcgacgccgtcgtcgtcgctttgctccagcttcgcctccctgcggaccgcctccatcggccacccccgtggcatcgcctcctccacgcccaggaaggcattccatgtgagggcatcagctcgggttgacaagttctcaaagagtgacatcatcgtgtccccttcgattctgtctgcaaactttgcgaagcttggtgatcaggtaaaagctgtggaggtggcaggatgcgactggattcatgttgatgtcatggatgggcgctttgtgccaaacatcacaattggacccttggttgttgatgctctgcgtccagtgactgatcttccgttggatgtacatctgatgattgtggaacctgagcagcgagtccctgattttatcaaggcaggtgctgatattgttagtgtccactgtgaacagacatcgaccatccatttgcaccgaacagtcaatcagattaaaagtctaggagcaaaggcaggagttgttttgaatccagcgactccactcactgcaattgattacgttcttgatttgttgacctggtgctgattatgtctgtgaatcctgggtttggtggccagagctttatcgagagtcaagtaaagaaaattgcagaactgagaaggttatgtgcagagaagggagtgaacccctggattgaggttgatggtggtgttggtccgaaaaatgcctacaaggttattgaagctggcgcaaatgccattgtcgcaggttctgcagtttttggggctccagactacgctgaagctatcaaaggaataaagaccagccaaagacctctagctgtagccgcataaagagctggacgtgtaatcatttactctgtgcaagtttaccagtgatgcgatctgtatagatgtgtgtcttgtccagctatacgtataccggagatgaaaggagacggaggcagtgaagaaatatccttttttttcttctcatttttcacgaggatgccgtgcactgctcccagaatgctgtgtccaatttacaaacgcacaggtggcacatgaactagcagagtagctttctcttgaaaggaaactgtatttggggtcgatgaaccctctggtgttattcttcagactggtaaacgatgtaacatgtttgataatcaataaagtgcgtcgtatggctttcct

SEQ ID NO: 23937 - protein, 184 aa, Zea mays subsp. mays
  peptide (1)..(184): Ceres Seq. ID no. 12410852
  misc_feature (52)..(181): Pfam Name: Pfam Description:  Ribulose-phosphate 3 epimerase family
  misc_feature (1)..(181): NCBI GI NO: 19071636 NR Description: ribulose-5-phosphate-3-epimerase
  misc_feature (1)..(181): NCBI GI NO: 6647761 NR Description: Ribulose-phosphate 3-epimerase
  misc_feature (1)..(181): NCBI GI NO: 20339362 NR Description: ribulose-5-phosphate-3-epimerase [Pisum sativum]
  misc_feature (15)..(179): NCBI GI NO: 2499728 NR Description: Ribulose-phosphate 3-epimerase
  misc_feature (1)..(181): NCBI GI NO: 15240250 NR Description: ribulose-5-phosphate-3-epimerase
  misc_feature (41)..(179): NCBI GI NO: 4930130 NR Description: Chain A
  misc_feature (19)..(181): NCBI GI NO: 2833386 NR Description: Ribulose-phosphate 3-epimerase
  misc_feature (19)..(181): NCBI GI NO: 3264790 NR Description: ribulose-phosphate 3-epimerase transit form
  misc_feature (39)..(181): NCBI GI NO: 3264792 NR Description: ribulose-phosphate 3-epimerase mature form
  misc_feature (47)..(180): NCBI GI NO: 17228277 NR Description: ribulose-phosphate 3-epimerase
MATPSSSLCSSFASLRTASIGHPRGIASSTPRKAFHVRASARVDKFSKSDIIVSPSILSANFAKLGDQVKAVEVAGCDWIHVDVMDGRFVPNITIGPLVVDALRPVTDLPLDVHLMIVEPEQRVPDFIKAGADIVSVHCEQTSTIHLHRTVNQIKSLGAKAGVVLNPATPLTAIDYVLDLLTWC

SEQ ID NO: 23938 - protein, 121 aa, Zea mays subsp. mays
  peptide (1)..(121): Ceres Seq. ID no. 12410853
SLRFLVARRLQPHGCRADNERLAAARVGLPPLLLSPRIAVAAGNKPNRLPPPKRLGSHSRAALATSQTTQWLLAETGDRLREARRWRRRRRRFAPASPPCGPPPSATPVASPPPRPGRHSM

SEQ ID NO: 23939 - protein, 100 aa, Zea mays subsp. mays
  peptide (1)..(100): Ceres Seq. ID no. 12410854
  misc_feature (1)..(97): Pfam Name: Pfam Description:  Ribulose-phosphate 3 epimerase family
  misc_feature (1)..(97): NCBI GI NO: 19071636 NR Description: ribulose-5-phosphate-3-epimerase
  misc_feature (1)..(97): NCBI GI NO: 6647761 NR Description: Ribulose-phosphate 3-epimerase
  misc_feature (1)..(97): NCBI GI NO: 20339362 NR Description: ribulose-5-phosphate-3-epimerase [Pisum sativum]
  misc_feature (1)..(95): NCBI GI NO: 2499728 NR Description: Ribulose-phosphate 3-epimerase
  misc_feature (1)..(97): NCBI GI NO: 15240250 NR Description: ribulose-5-phosphate-3-epimerase
  misc_feature (1)..(95): NCBI GI NO: 4930130 NR Description: Chain A
  misc_feature (1)..(97): NCBI GI NO: 2833386 NR Description: Ribulose-phosphate 3-epimerase
  misc_feature (1)..(97): NCBI GI NO: 3264790 NR Description: ribulose-phosphate 3-epimerase transit form
  misc_feature (1)..(97): NCBI GI NO: 3264792 NR Description: ribulose-phosphate 3-epimerase mature form
  misc_feature (1)..(96): NCBI GI NO: 17228277 NR Description: ribulose-phosphate 3-epimerase
MDGRFVPNITIGPLVVDALRPVTDLPLDVHLMIVEPEQRVPDFIKAGADIVSVHCEQTSTIHLHRTVNQIKSLGAKAGVVLNPATPLTAIDYVLDLLTWC

SEQ ID NO: 23940 - DNA, 1520 bp, Zea mays subsp. mays
  misc_feature (1)..(1520): Ceres Seq. ID no. 12405811
actccactctccagtctccaccttttgctgtcgccttcctccccttgccttccctgtgccctcccctccctcgcgccgcaaaaaacgccgcagggaggaagagagagagagagggccaggctgagcttactggcggcgagctggagaagaaggaaggagcatggccatgccggcggcgctgcttctcttcctcctagtcctctccgccttcgaggccggggagcttccacgctgctcggctgctgctgcaggtaaaccggcagtcctcgtccatgatgacttgagtccggttcaagacaccagccccatcgcaacagtcccctccacgaacccgtcgcccgccatcatcaccgtgccttccacgaatcccaccatcaccatcccttccttgaaccctctgcctacacccatcacagccccctcaacaaacatcccttctccttccaccatgctgccgccggttccggtcatatatccgctgccaacgccgtctatgtcctccccaccagctgtgccggtcaccaatcctgctgtcaccacgccttccacgtcccctccgtcgacaccaacaccattcaacaacccaccattgttgaacccaacgccgacccctgctcctacagtcacggccccagctgcttctggccggcaggtctggtgtgtggccaaggctgctggctcaagtgaagccgcgctccagaacgcgttggactatgcgtgcggcattggaggagtagattgttcggcgattcagccgtcagggagctgctactatccaaataccatccaagcccatgcatcctacgcgttcaacacttattaccagagaaaccctgtttcttccagctgcgactttggggggacggcaatgctcgtcactgctaatccaagctctgggagctgtgtctttgcatcatcattgccatcgtcgtcaagctctactgttggatatgatcccgcgtccacggctactccattgtcaccgtcgtctggttccgactcgggagcacccgtgctgaatgccagtggggcaggttcttctgaatcatcagattttggctttgacatcccaggagctgtcaatttcggcagcggttggaggtcagtctcaccacccaactggccctgggcagccctggtctggattctagtagcattgtgtgtgcacaaagaagggatggtctgaacctgtgagagcatctgcagtattttggagacagattgcaaagtagccaggtggtgtagagaccagtagagagctacaaagctagagaatcgggccttagcatggctaagtttgtcgatgtatgtgtgaagtatggtgctccagttcgtagtaggaactgatgtagtcctgatggatggacttggactcaccctgatcagtcactcaggtactctgaagtgtagatgtaggcatgtagctgctgctagtagtagtagtaatgcaagtactgctttgcctcgtatgggtgagtgagttgaacaactaatggaatgcaaatgtgctgttttgtttt

SEQ ID NO: 23941 - protein, 341 aa, Zea mays subsp. mays
  peptide (1)..(341): Ceres Seq. ID no. 12405812
  misc_feature (26)..(312): Pfam Name: BLLF1 Pfam Description: Herpes virus major outer envelope glycoprotein
  misc_feature (1)..(318): NCBI GI NO: 40714691 NR Description: putative glucanase
  misc_feature (57)..(285): NCBI GI NO: 22329437 NR Description: unknown protein; protein id: At1g09460.1
  misc_feature (57)..(244): NCBI GI NO: 25402549 NR Description: hypothetical protein
  misc_feature (107)..(321): NCBI GI NO: 34912962 NR Description: beta-1,3 glucanase-like protein
  misc_feature (40)..(244): NCBI GI NO: 15219387 NR Description: hypothetical protein; protein id: At1g79480.1
  misc_feature (57)..(253): NCBI GI NO: 15240743 NR Description: glycosyl hydrolase family 17; protein id:At5g67460
  misc_feature (65)..(249): NCBI GI NO: 37533178 NR Description: hypothetical protein
  misc_feature (166)..(260): NCBI GI NO: 34393393 NR Description: putative glycosyl hydrolase
  misc_feature (161)..(298): NCBI GI NO: 22328593 NR Description: glycosyl hydrolase family 17; protein id:At4g13600
  misc_feature (147)..(252): NCBI GI NO: 29465664 NR Description: allergen Ole e 10 [Olea europaea]
MAMPAALLLFLLVLSAFEAGELPRCSAAAAGKPAVLVHDDLSPVQDTSPIATVPSTNPSPAIITVPSTNPTITIPSLNPLPTPITAPSTNIPSPSTMLPPVPVIYPLPTPSMSSPPAVPVTNPAVTTPSTSPPSTPTPFNNPPLLNPTPTPAPTVTAPAASGRQVWCVAKAAGSSEAALQNALDYACGIGGVDCSAIQPSGSCYYPNTIQAHASYAFNTYYQRNPVSSSCDFGGTAMLVTANPSSGSCVFASSLPSSSSSTVGYDPASTATPLSPSSGSDSGAPVLNASGAGSSESSDFGFDIPGAVNFGSGWRSVSPPNWPWAALVWILVALCVHKEGMV

SEQ ID NO: 23942 - protein, 339 aa, Zea mays subsp. mays
  peptide (1)..(339): Ceres Seq. ID no. 12405813
  misc_feature (24)..(310): Pfam Name: BLLF1 Pfam Description: Herpes virus major outer envelope glycoprotein
  misc_feature (1)..(316): NCBI GI NO: 40714691 NR Description: putative glucanase
  misc_feature (55)..(283): NCBI GI NO: 22329437 NR Description: unknown protein; protein id: At1g09460.1
  misc_feature (55)..(242): NCBI GI NO: 25402549 NR Description: hypothetical protein
  misc_feature (105)..(319): NCBI GI NO: 34912962 NR Description: beta-1,3 glucanase-like protein
  misc_feature (38)..(242): NCBI GI NO: 15219387 NR Description: hypothetical protein; protein id: At1g79480.1
  misc_feature (55)..(251): NCBI GI NO: 15240743 NR Description: glycosyl hydrolase family 17; protein id:At5g67460
  misc_feature (63)..(247): NCBI GI NO: 37533178 NR Description: hypothetical protein
  misc_feature (164)..(258): NCBI GI NO: 34393393 NR Description: putative glycosyl hydrolase
  misc_feature (159)..(296): NCBI GI NO: 22328593 NR Description: glycosyl hydrolase family 17; protein id:At4g13600
  misc_feature (145)..(250): NCBI GI NO: 29465664 NR Description: allergen Ole e 10 [Olea europaea]
MPAALLLFLLVLSAFEAGELPRCSAAAAGKPAVLVHDDLSPVQDTSPIATVPSTNPSPAIITVPSTNPTITIPSLNPLPTPITAPSTNIPSPSTMLPPVPVIYPLPTPSMSSPPAVPVTNPAVTTPSTSPPSTPTPFNNPPLLNPTPTPAPTVTAPAASGRQVWCVAKAAGSSEAALQNALDYACGIGGVDCSAIQPSGSCYYPNTIQAHASYAFNTYYQRNPVSSSCDFGGTAMLVTANPSSGSCVFASSLPSSSSSTVGYDPASTATPLSPSSGSDSGAPVLNASGAGSSESSDFGFDIPGAVNFGSGWRSVSPPNWPWAALVWILVALCVHKEGMV

SEQ ID NO: 23943 - protein, 245 aa, Zea mays subsp. mays
  peptide (1)..(245): Ceres Seq. ID no. 12405814
  misc_feature (1)..(216): Pfam Name: BLLF1 Pfam Description: Herpes virus major outer envelope glycoprotein
  misc_feature (1)..(222): NCBI GI NO: 40714691 NR Description: putative glucanase
  misc_feature (1)..(189): NCBI GI NO: 22329437 NR Description: unknown protein; protein id: At1g09460.1
  misc_feature (1)..(148): NCBI GI NO: 25402549 NR Description: hypothetical protein
  misc_feature (11)..(225): NCBI GI NO: 34912962 NR Description: beta-1,3 glucanase-like protein
  misc_feature (1)..(148): NCBI GI NO: 15219387 NR Description: hypothetical protein; protein id: At1g79480.1
  misc_feature (1)..(157): NCBI GI NO: 15240743 NR Description: glycosyl hydrolase family 17; protein id:At5g67460
  misc_feature (1)..(153): NCBI GI NO: 37533178 NR Description: hypothetical protein
  misc_feature (70)..(164): NCBI GI NO: 34393393 NR Description: putative glycosyl hydrolase
  misc_feature (65)..(202): NCBI GI NO: 22328593 NR Description: glycosyl hydrolase family 17; protein id:At4g13600
  misc_feature (51)..(156): NCBI GI NO: 29465664 NR Description: allergen Ole e 10 [Olea europaea]
MLPPVPVIYPLPTPSMSSPPAVPVTNPAVTTPSTSPPSTPTPFNNPPLLNPTPTPAPTVTAPAASGRQVWCVAKAAGSSEAALQNALDYACGIGGVDCSAIQPSGSCYYPNTIQAHASYAFNTYYQRNPVSSSCDFGGTAMLVTANPSSGSCVFASSLPSSSSSTVGYDPASTATPLSPSSGSDSGAPVLNASGAGSSESSDFGFDIPGAVNFGSGWRSVSPPNWPWAALVWILVALCVHKEGMV

SEQ ID NO: 23944 - DNA, 1343 bp, Zea mays subsp. mays
  misc_feature (1)..(1343): Ceres Seq. ID no. 12413475
aaacccaaacctgattaatgcctcgcctccattccgtactctcctgctgaagcttttttctctgaaactagtatatcccccatctgtttggtcccgacgattttccgctttgggagcaccaccaagctcttccagcttgcagggctggagtctttgccagggacagcaatggtgccgacgcatggcgatacagccggaccgagctccagccaggatgacccggcagccagcgtgaagaagcgcaacagcaacaggcctcagtatcatccgtttactcagcaacagcttccagcttgcaagcctatacttgcgcctcagacggtcatccctgtactcctgtttgtgggcgtagtttttatcgtgattggccttggctgcattgcagcctcaaacagggtggttgaagtggtctatgagtatgagacttcatgcataccaagacacatgcttggcaacaaagtcgcctatatccaaaacccatctatagataagacatgcacatggattctcaaggttcctagggatatgaagcacccaatctacgtatattaccagcttgacaagttctaccagaaccacaggaggtacgtgaagagccgcagcgacaagcagctgagagatcccaaggaggccaacagcacgcagcagtactgcaagcccgaagctaccaccgagcacgggagcgccgtcgtcccctgcgggctcgtggcctggagcctgttcaacgacacctacagcttcgcccggggcaacaacagggcgctgagggtccacaagcgaggcatctcgtggaggagcgagagggaacacatcttcgggaagcaggtgttcccgaggaatttccagaaaggagctctgatcggaggaggcacgcttgatccaagaatacctctgagtgagcaagaagacctgatcgtgtggatgcggaccgcggctctgccgacgttccggaagctgtacggcaggatcgaggcggacctccgcgccggcgagctggtcacggtgacgacgcagaataactacaacacctacagcttcggcgggaagaaggcgctggtgctgtccacggccggcgtgctgggaggcaggaacggcttcctcggccgcgggtacgccgtcgtcggcctggcctgcctgctgctggcgctgctcctcaccatgctctgcctcgtcttcccactgaaagaggaacaccttgcgctgcagtaccctttgctccggcctgccacggtgaccatgcatgcctagctagatcagtagacggtgtacagattgaaacagtttcttctttttcatttttgatgtatactcagattgaaacagtttgttctttttcttcttgg

SEQ ID NO: 23945 - protein, 359 aa, Zea mays subsp. mays
  peptide (1)..(359): Ceres Seq. ID no. 12413476
  misc_feature (70)..(337): Pfam Name: ligand-effect modulator 3 Pfam Description: LEM3
  misc_feature (4)..(337): NCBI GI NO: 18404877 NR Description: membrane protein common family
  misc_feature (8)..(337): NCBI GI NO: 18412377 NR Description: membrane protein common family
  misc_feature (4)..(337): NCBI GI NO: 18399730 NR Description: membrane protein common family
  misc_feature (35)..(337): NCBI GI NO: 25347301 NR Description: T8K14.13 [imported] - Arabidopsis thaliana
  misc_feature (35)..(337): NCBI GI NO: 25347303 NR Description: protein F3O9.16 [imported] - Arabidopsis thaliana
  misc_feature (7)..(337): NCBI GI NO: 9757735 NR Description: gb|AAD25612
  misc_feature (7)..(337): NCBI GI NO: 18422638 NR Description: membrane protein common family
  misc_feature (52)..(337): NCBI GI NO: 15219220 NR Description: membrane protein common family
  misc_feature (17)..(337): NCBI GI NO: 21554054 NR Description: unknown [Arabidopsis thaliana]
  misc_feature (21)..(347): NCBI GI NO: 19570056 NR Description: similar to membrane protein common family
MVPTHGDTAGPSSSQDDPAASVKKRNSNRPQYHPFTQQQLPACKPILAPQTVIPVLLFVGVVFIVIGLGCIAASNRVVEVVYEYETSCIPRHMLGNKVAYIQNPSIDKTCTWILKVPRDMKHPIYVYYQLDKFYQNHRRYVKSRSDKQLRDPKEANSTQQYCKPEATTEHGSAVVPCGLVAWSLFNDTYSFARGNNRALRVHKRGISWRSEREHIFGKQVFPRNFQKGALIGGGTLDPRIPLSEQEDLIVWMRTAALPTFRKLYGRIEADLRAGELVTVTTQNNYNTYSFGGKKALVLSTAGVLGGRNGFLGRGYAVVGLACLLLALLLTMLCLVFPLKEEHLALQYPLLRPATVTMHA

SEQ ID NO: 23946 - protein, 267 aa, Zea mays subsp. mays
  peptide (1)..(267): Ceres Seq. ID no. 12413477
  misc_feature (1)..(245): Pfam Name: ligand-effect modulator 3 Pfam Description: LEM3
  misc_feature (1)..(245): NCBI GI NO: 18404877 NR Description: membrane protein common family
  misc_feature (1)..(245): NCBI GI NO: 18412377 NR Description: membrane protein common family
  misc_feature (1)..(245): NCBI GI NO: 18399730 NR Description: membrane protein common family
  misc_feature (1)..(245): NCBI GI NO: 25347301 NR Description: T8K14.13 [imported] - Arabidopsis thaliana
  misc_feature (1)..(245): NCBI GI NO: 25347303 NR Description: protein F3O9.16 [imported] - Arabidopsis thaliana
  misc_feature (1)..(245): NCBI GI NO: 9757735 NR Description: gb|AAD25612
  misc_feature (1)..(245): NCBI GI NO: 18422638 NR Description: membrane protein common family
  misc_feature (1)..(245): NCBI GI NO: 15219220 NR Description: membrane protein common family
  misc_feature (1)..(245): NCBI GI NO: 21554054 NR Description: unknown [Arabidopsis thaliana]
  misc_feature (1)..(255): NCBI GI NO: 19570056 NR Description: similar to membrane protein common family
MLGNKVAYIQNPSIDKTCTWILKVPRDMKHPIYVYYQLDKFYQNHRRYVKSRSDKQLRDPKEANSTQQYCKPEATTEHGSAVVPCGLVAWSLFNDTYSFARGNNRALRVHKRGISWRSEREHIFGKQVFPRNFQKGALIGGGTLDPRIPLSEQEDLIVWMRTAALPTFRKLYGRIEADLRAGELVTVTTQNNYNTYSFGGKKALVLSTAGVLGGRNGFLGRGYAVVGLACLLLALLLTMLCLVFPLKEEHLALQYPLLRPATVTMHA

SEQ ID NO: 23947 - protein, 240 aa, Zea mays subsp. mays
  peptide (1)..(240): Ceres Seq. ID no. 12413478
  misc_feature (1)..(218): Pfam Name: ligand-effect modulator 3 Pfam Description: LEM3
  misc_feature (1)..(218): NCBI GI NO: 18404877 NR Description: membrane protein common family
  misc_feature (1)..(218): NCBI GI NO: 18412377 NR Description: membrane protein common family
  misc_feature (1)..(218): NCBI GI NO: 18399730 NR Description: membrane protein common family
  misc_feature (1)..(218): NCBI GI NO: 25347301 NR Description: T8K14.13 [imported] - Arabidopsis thaliana
  misc_feature (1)..(218): NCBI GI NO: 25347303 NR Description: protein F3O9.16 [imported] - Arabidopsis thaliana
  misc_feature (1)..(218): NCBI GI NO: 9757735 NR Description: gb|AAD25612
  misc_feature (1)..(218): NCBI GI NO: 18422638 NR Description: membrane protein common family
  misc_feature (1)..(218): NCBI GI NO: 15219220 NR Description: membrane protein common family
  misc_feature (1)..(218): NCBI GI NO: 21554054 NR Description: unknown [Arabidopsis thaliana]
  misc_feature (1)..(228): NCBI GI NO: 19570056 NR Description: similar to membrane protein common family
MKHPIYVYYQLDKFYQNHRRYVKSRSDKQLRDPKEANSTQQYCKPEATTEHGSAVVPCGLVAWSLFNDTYSFARGNNRALRVHKRGISWRSEREHIFGKQVFPRNFQKGALIGGGTLDPRIPLSEQEDLIVWMRTAALPTFRKLYGRIEADLRAGELVTVTTQNNYNTYSFGGKKALVLSTAGVLGGRNGFLGRGYAVVGLACLLLALLLTMLCLVFPLKEEHLALQYPLLRPATVTMHA

SEQ ID NO: 23948 - DNA, 1027 bp, Zea mays subsp. mays
  misc_feature (1)..(1027): Ceres Seq. ID no. 12407402
aatgcaggccttctccggcctcggcaccttcttcaagctctccgccgcgtccgccgtcatgctgtgcctcgagacatggtactaccagatcatcgtgctcatcgccggcctgctcaagaacccggagatctcgctcgactccctctccatatgcatgaccgtgaacgcatgggtgtttatgatctccgtgggcttcaacgccgcggcgagcgtgcgggtcgggaacgagctcggcgcgggcaacccgagggcggcgtcgttctcggtgctggtggtgacgtcgctgtcgttcgccgtgtcggcggtgtgcgccgtcgccgtgctctgcctccgcgaccagctgagctacctgttcacgggcggcgaggccgtggctcgcgccgtgtccgacctctgcccgctcctcgccctcacgctcgtcctcaacggcgtgcagccagtgctctcaggcgtcgccgtgggctgcgggtggcaggccttcgtggcgtacgtgaacgtcggctgctactacgtcgtcggcgtgccgctcggcgtcttcctcggcttctacctcgacctcggcgccaagggcatttggagcggcatggtcatcgggggaaccatgatgcagacgctcatcctgctctgggtcaccttcagaacagactggaccaaggaggtggagaacgccagggcgaggctggacaagtgggacgacaagaagcagcccctcctagcctagaagaagactgattgaaggtcactgtagcgcgcgctgatgcacctttttttggcgatgattgagagaccacaccaggcgcgcgtcggaggggatgcaacgcaacgcaacgcaatcatttgggttttgaagctatttaatattatcgcattatagagtgtgcgcgtgcagtttcgagtgattaaagttttgttacgctttcttcggtgtcagctccaacttagggcgactagatgcgaccatcacaccagggtttggaccgtggtgggtggattctattcgtttttttttaagcacaaatatgtctag

SEQ ID NO: 23949 - protein, 243 aa, Zea mays subsp. mays
  peptide (1)..(243): Ceres Seq. ID no. 12407403
NAGLLRPRHLLQALRRVRRHAVPRDMVLPDHRAHRRPAQEPGDLARLPLHMHDRERMGVYDLRGLQRRGERAGRERARRGQPEGGVVLGAGGDVAVVRRVGGVRRRRALPPRPAELPVHGRRGRGSRRVRPLPAPRPHARPQRRAASALRRRRGLRVAGLRGVRERRLLLRRRRAARRLPRLLPRPRRQGHLERHGHRGNHDADAHPALGHLQNRLDQGGGERQGEAGQVGRQEAAPPSLEED

SEQ ID NO: 23950 - protein, 239 aa, Zea mays subsp. mays
  peptide (1)..(239): Ceres Seq. ID no. 12407404
  misc_feature (1)..(238): NCBI GI NO: 15233127 NR Description: integral membrane protein, putative
  misc_feature (1)..(238): NCBI GI NO: 20466556 NR Description: integral membrane protein, putative
  misc_feature (2)..(238): NCBI GI NO: 18407368 NR Description: expressed protein; protein id: At1g61890
  misc_feature (2)..(238): NCBI GI NO: 15081773 NR Description: At1g61890/F8K4_9 [Arabidopsis thaliana]
  misc_feature (2)..(237): NCBI GI NO: 18415793 NR Description: putative protein; protein id: At4g21910.1
  misc_feature (2)..(237): NCBI GI NO: 21553843 NR Description: unknown [Arabidopsis thaliana]
  misc_feature (2)..(238): NCBI GI NO: 15221073 NR Description: unknown protein; protein id: At1g11670.1
  misc_feature (2)..(238): NCBI GI NO: 22655139 NR Description: unknown protein [Arabidopsis thaliana]
  misc_feature (2)..(229): NCBI GI NO: 15234633 NR Description: putative protein; protein id: At4g21900.1
  misc_feature (3)..(189): NCBI GI NO: 34901880 NR Description: putative Multidrug resistance protein norM
MQAFSGLGTFFKLSAASAVMLCLETWYYQIIVLIAGLLKNPEISLDSLSICMTVNAWVFMISVGFNAAASVRVGNELGAGNPRAASFSVLVVTSLSFAVSAVCAVAVLCLRDQLSYLFTGGEAVARAVSDLCPLLALTLVLNGVQPVLSGVAVGCGWQAFVAYVNVGCYYVVGVPLGVFLGFYLDLGAKGIWSGMVIGGTMMQTLILLWVTFRTDWTKEVENARARLDKWDDKKQPLLA

SEQ ID NO: 23951 - protein, 220 aa, Zea mays subsp. mays
  peptide (1)..(220): Ceres Seq. ID no. 12407405
  misc_feature (1)..(219): NCBI GI NO: 15233127 NR Description: integral membrane protein, putative
  misc_feature (1)..(219): NCBI GI NO: 20466556 NR Description: integral membrane protein, putative
  misc_feature (1)..(219): NCBI GI NO: 18407368 NR Description: expressed protein; protein id: At1g61890
  misc_feature (1)..(219): NCBI GI NO: 15081773 NR Description: At1g61890/F8K4_9 [Arabidopsis thaliana]
  misc_feature (1)..(218): NCBI GI NO: 18415793 NR Description: putative protein; protein id: At4g21910.1
  misc_feature (1)..(218): NCBI GI NO: 21553843 NR Description: unknown [Arabidopsis thaliana]
  misc_feature (1)..(219): NCBI GI NO: 15221073 NR Description: unknown protein; protein id: At1g11670.1
  misc_feature (1)..(219): NCBI GI NO: 22655139 NR Description: unknown protein [Arabidopsis thaliana]
  misc_feature (1)..(210): NCBI GI NO: 15234633 NR Description: putative protein; protein id: At4g21900.1
  misc_feature (1)..(170): NCBI GI NO: 34901880 NR Description: putative Multidrug resistance protein norM
MLCLETWYYQIIVLIAGLLKNPEISLDSLSICMTVNAWVFMISVGFNAAASVRVGNELGAGNPRAASFSVLVVTSLSFAVSAVCAVAVLCLRDQLSYLFTGGEAVARAVSDLCPLLALTLVLNGVQPVLSGVAVGCGWQAFVAYVNVGCYYVVGVPLGVFLGFYLDLGAKGIWSGMVIGGTMMQTLILLWVTFRTDWTKEVENARARLDKWDDKKQPLLA

SEQ ID NO: 23952 - DNA, 1763 bp, Zea mays subsp. mays
  misc_feature (1)..(1763): Ceres Seq. ID no. 12410839
ctgcctgcccacgcgctccgctcctcgccccctcctcttcccacgccgccgccgtacccacgggcagggggcacggctggtggctcatcgctcggcccgctccccctccgtcgcaaccggaacataccagcaccggcgctgcggtattattcagctccgtccgccggccggcgcggacggacgccaggcttccttcctgtctgcataacaaagccgccgccattatgatctccacatatgatgcttagcatttgtcgctcgcagctgtattgctcctctagctgcatccttgtactagagcatggcgaagctcgcatctattgctcgcagtatgcttagattcccaaacggaagcatgaggcttgttatggtaacggttattggagcagtccttggctttttcattgggatttcattcccttcggtcagcataacaaagcttcactttccagatagctttatttcgtacattgaagacaaagacgctggactcacgacccaagctatactcaatcatgcttggacttctgccagaaacgcaaggggaaatggtaccgaaccgacttcaaacagtaccttaaagatttatgtcccaacgaaccccaagggtgcagaggggctagcaccaggtatcgttgtatcagagtctgacttccatttgcgcaggttatggggagacccaagtgaggacctgcctttcaaaccaaagtaccttgttacctttactgttggagttgagcagaaagcaaatataaacagagctgtgaagaagttttctgacaattttgctattctgttattccactatgatggccgggtgagtgagtgggatgaatttgagtggtcccagcgagctatccatattagtgtcaggaaacaaactaaatggtggtatgccaagagattcctgcatcctgatattgtggcagcttatgagtacatattcatttgggatgaggaccttggggttgaacattttaatgcagaggagtacatcaaacttgttaagaagcataacttggacatctctcaacctggattagagcctgatcgggggttaacatggcagatgaccaaaagaagaggtgacagtgaggttcacaaggacacagaggagaggcctggctggtgctctgaccctcatcttccaccgtgtgctgcttttgttgaaataatggctccagtcttctcaagagatgcatggagatgtgtgtggcatatgattcagaacgacttggttcatggttggggcttggattttgcgctcaggaaatgtgtggagcctgctcatgaaaagattggagttgtcgattcgcagtggatcgttcaccaagtggttccttctctggggaaccaggggcagtcagaaaacggaagggcgccatgggaaggggtgagggcgcggtgcaggaaggaatggggcatgttccagaccaggatggcggaggcggagaaggcgtattacaagatgatgggcatcacccctccaaactccacgcgtgtctagccgcgcctctcttcttggttttccatccccgccaccctgacctttgtggtggcgggtgagctgatgatactatactatagcactacttgattatagggagttagagatggtgggtgtagctgcttttgatggagaggtccttctgtaagtaaatgcgaggcgaaactgtgatgagaaaacatgtacacgaggatgattacctgatgatgatgatgatgatctatctattataaaaaacatatataccgttaccgag

SEQ ID NO: 23953 - protein, 401 aa, Zea mays subsp. mays
  peptide (1)..(401): Ceres Seq. ID no. 12410840
  misc_feature (94)..(387): Pfam Name: DUF707 Pfam Description: Protein of unknown function
  misc_feature (1)..(401): NCBI GI NO: 14719314 NR Description: putative protein [Oryza sativa]
  misc_feature (45)..(401): NCBI GI NO: 34905994 NR Description: P0518C01.8
  misc_feature (1)..(397): NCBI GI NO: 34906848 NR Description: P0470A12.1
  misc_feature (10)..(399): NCBI GI NO: 18408876 NR Description: F12A21
  misc_feature (13)..(387): NCBI GI NO: 18390845 NR Description: storage protein, putative; protein id: At1g08040
  misc_feature (12)..(389): NCBI GI NO: 22331371 NR Description: unknown protein; protein id: At3g27470
  misc_feature (93)..(387): NCBI GI NO: 25407018 NR Description: protein T6D22.12 [imported] - Arabidopsis thaliana
  misc_feature (1)..(48): NCBI GI NO: 25407018 NR Description: protein T6D22.12 [imported] - Arabidopsis thaliana
  misc_feature (15)..(389): NCBI GI NO: 22329525 NR Description: unknown protein; protein id: At1g13000
  misc_feature (85)..(292): NCBI GI NO: 7939519 NR Description: gb|AAD31054
MAKLASIARSMLRFPNGSMRLVMVTVIGAVLGFFIGISFPSVSITKLHFPDSFISYIEDKDAGLTTQAILNHAWTSARNARGNGTEPTSNSTLKIYVPTNPKGAEGLAPGIVVSESDFHLRRLWGDPSEDLPFKPKYLVTFTVGVEQKANINRAVKKFSDNFAILLFHYDGRVSEWDEFEWSQRAIHISVRKQTKWWYAKRFLHPDIVAAYEYIFIWDEDLGVEHFNAEEYIKLVKKHNLDISQPGLEPDRGLTWQMTKRRGDSEVHKDTEERPGWCSDPHLPPCAAFVEIMAPVFSRDAWRCVWHMIQNDLVHGWGLDFALRKCVEPAHEKIGVVDSQWIVHQVVPSLGNQGQSENGRAPWEGVRARCRKEWGMFQTRMAEAEKAYYKMMGITPPNSTRV

SEQ ID NO: 23954 - protein, 391 aa, Zea mays subsp. mays
  peptide (1)..(391): Ceres Seq. ID no. 12410841
  misc_feature (84)..(377): Pfam Name: DUF707 Pfam Description: Protein of unknown function
  misc_feature (1)..(391): NCBI GI NO: 14719314 NR Description: putative protein [Oryza sativa]
  misc_feature (35)..(391): NCBI GI NO: 34905994 NR Description: P0518C01.8
  misc_feature (1)..(387): NCBI GI NO: 34906848 NR Description: P0470A12.1
  misc_feature (1)..(389): NCBI GI NO: 18408876 NR Description: F12A21
  misc_feature (3)..(377): NCBI GI NO: 18390845 NR Description: storage protein, putative; protein id: At1g08040
  misc_feature (2)..(379): NCBI GI NO: 22331371 NR Description: unknown protein; protein id: At3g27470
  misc_feature (83)..(377): NCBI GI NO: 25407018 NR Description: protein T6D22.12 [imported] - Arabidopsis thaliana
  misc_feature (1)..(38): NCBI GI NO: 25407018 NR Description: protein T6D22.12 [imported] - Arabidopsis thaliana
  misc_feature (5)..(379): NCBI GI NO: 22329525 NR Description: unknown protein; protein id: At1g13000
  misc_feature (75)..(282): NCBI GI NO: 7939519 NR Description: gb|AAD31054
MLRFPNGSMRLVMVTVIGAVLGFFIGISFPSVSITKLHFPDSFISYIEDKDAGLTTQAILNHAWTSARNARGNGTEPTSNSTLKIYVPTNPKGAEGLAPGIVVSESDFHLRRLWGDPSEDLPFKPKYLVTFTVGVEQKANINRAVKKFSDNFAILLFHYDGRVSEWDEFEWSQRAIHISVRKQTKWWYAKRFLHPDIVAAYEYIFIWDEDLGVEHFNAEEYIKLVKKHNLDISQPGLEPDRGLTWQMTKRRGDSEVHKDTEERPGWCSDPHLPPCAAFVEIMAPVFSRDAWRCVWHMIQNDLVHGWGLDFALRKCVEPAHEKIGVVDSQWIVHQVVPSLGNQGQSENGRAPWEGVRARCRKEWGMFQTRMAEAEKAYYKMMGITPPNSTRV

SEQ ID NO: 23955 - protein, 383 aa, Zea mays subsp. mays
  peptide (1)..(383): Ceres Seq. ID no. 12410842
  misc_feature (76)..(369): Pfam Name: DUF707 Pfam Description: Protein of unknown function
  misc_feature (1)..(383): NCBI GI NO: 14719314 NR Description: putative protein [Oryza sativa]
  misc_feature (27)..(383): NCBI GI NO: 34905994 NR Description: P0518C01.8
  misc_feature (1)..(379): NCBI GI NO: 34906848 NR Description: P0470A12.1
  misc_feature (1)..(381): NCBI GI NO: 18408876 NR Description: F12A21
  misc_feature (1)..(369): NCBI GI NO: 18390845 NR Description: storage protein, putative; protein id: At1g08040
  misc_feature (1)..(371): NCBI GI NO: 22331371 NR Description: unknown protein; protein id: At3g27470
  misc_feature (75)..(369): NCBI GI NO: 25407018 NR Description: protein T6D22.12 [imported] - Arabidopsis thaliana
  misc_feature (1)..(30): NCBI GI NO: 25407018 NR Description: protein T6D22.12 [imported] - Arabidopsis thaliana
  misc_feature (1)..(371): NCBI GI NO: 22329525 NR Description: unknown protein; protein id: At1g13000
  misc_feature (67)..(274): NCBI GI NO: 7939519 NR Description: gb|AAD31054
MRLVMVTVIGAVLGFFIGISFPSVSITKLHFPDSFISYIEDKDAGLTTQAILNHAWTSARNARGNGTEPTSNSTLKIYVPTNPKGAEGLAPGIVVSESDFHLRRLWGDPSEDLPFKPKYLVTFTVGVEQKANINRAVKKFSDNFAILLFHYDGRVSEWDEFEWSQRAIHISVRKQTKWWYAKRFLHPDIVAAYEYIFIWDEDLGVEHFNAEEYIKLVKKHNLDISQPGLEPDRGLTWQMTKRRGDSEVHKDTEERPGWCSDPHLPPCAAFVEIMAPVFSRDAWRCVWHMIQNDLVHGWGLDFALRKCVEPAHEKIGVVDSQWIVHQVVPSLGNQGQSENGRAPWEGVRARCRKEWGMFQTRMAEAEKAYYKMMGITPPNSTRV

SEQ ID NO: 23956 - DNA, 1361 bp, Zea mays subsp. mays
  misc_feature (1)..(1361): Ceres Seq. ID no. 12407837
gaaaaaaccgccgccatcgtgtgatggccgccacgcccgacgagcggaagcaggagaggccgatgaggcccgcgacgtcgccggcgagcgtggtggcggacttcgccatgggaggcgcggccgccgtggtggcaaagacgggggccgcgccggtcgagcgcgtcaagctgctgctccagaaccaggccgagatgctgcgccgcggcaccctcacgcgcccctacaggggcatcgccgacgccttcacccgcatcctccgcgaggagggccccgccgcgctttggcgtggcaaccaggccaacgtcatccgctacttccccacccaggcttttaactttgcattcaggggctatttcaaaagcttttttggctatgacagggagaaagacggaaagtggaagtggttagctggaaatgtagcctctggcagtgctgccggagctacaacatcattgctgctataccatctagattatgcaagaacaaggctagctactgatgcaattgaatcacggggaaccaagcgccagttcagggggttgctggatgtttacaagaagacacttacaaccgatggcatgtctggactataccgaggtttcagtgtgtctattacgggaatctccttataccggggtttatattttggtatctatgatagcatgaagcctctagttctagtaggcccattggaggggaatttcttcgccagttttgtgttgggctggacaataactacgttctctggggcttgtgcctatccattcgacacggtccgtcgtagaatgatgttaacttcaggagaaccatttaaatacaagaacggtttccatgcagtaaaactgatagtttcaaccgaagggttcttcacattattcagaggtgttggtgcaaatattctctcagggctggcaggggctggagttctttctgggtatgatcaactccaacggttggcaagccggcatgatcaaaattttgagcacaatatgaaaggggcattgaaatgatgtgcatatgatatgaatagattcagatccttggttgaagtccagatcattcaaatgggatgctcaagcaagaactcctgagcctgaagaacttcgcaaaaaatattgggggaagaaaaaggaaaagttttcctggagatgaatttcacaaggagatggaatcattgcaacaaaagataactcttgtaaacagagagtgctgaatatatattttaatgtgtagatctaatccttcaagtatgagcacatgtacatgttggtgtttcttcgattgttagaggccaatagtatcctatcaatgtgaaatgtaaatccaaatccttcagtaggtcatgaccaagctatttttct

SEQ ID NO: 23957 - protein, 335 aa, Zea mays subsp. mays
  peptide (1)..(335): Ceres Seq. ID no. 12407838
  misc_feature (32)..(322): NCBI GI NO: 18418286 NR Description: ADP/ATP translocase-like protein
  misc_feature (36)..(322): NCBI GI NO: 21593088 NR Description: ADP/ATP translocase-like protein
  misc_feature (33)..(316): NCBI GI NO: 15240640 NR Description: adenosine nucleotide translocator
  misc_feature (33)..(318): NCBI GI NO: 399015 NR Description: ADP,ATP carrier protein, mitochondrial precursor
  misc_feature (33)..(316): NCBI GI NO: 444790 NR Description: nucleotide translocator
  misc_feature (33)..(316): NCBI GI NO: 478810 NR Description: ADP,ATP carrier protein - Arabidopsis thaliana
  misc_feature (33)..(318): NCBI GI NO: 113460 NR Description: ADP,ATP carrier protein 2, mitochondrial precursor
  misc_feature (33)..(318): NCBI GI NO: 113456 NR Description: ADP,ATP carrier protein 1, mitochondrial precursor
  misc_feature (33)..(318): NCBI GI NO: 485517 NR Description: ADP,ATP carrier protein - rice
  misc_feature (33)..(318): NCBI GI NO: 22166 NR Description: adenine nucleotide translocator [Zea mays]
KNRRHRVMAATPDERKQERPMRPATSPASVVADFAMGGAAAVVAKTGAAPVERVKLLLQNQAEMLRRGTLTRPYRGIADAFTRILREEGPAALWRGNQANVIRYFPTQAFNFAFRGYFKSFFGYDREKDGKWKWLAGNVASGSAAGATTSLLLYHLDYARTRLATDAIESRGTKRQFRGLLDVYKKTLTTDGMSGLYRGFSVSITGISLYRGLYFGIYDSMKPLVLVGPLEGNFFASFVLGWTITTFSGACAYPFDTVRRRMMLTSGEPFKYKNGFHAVKLIVSTEGFFTLFRGVGANILSGLAGAGVLSGYDQLQRLASRHDQNFEHNMKGALK

SEQ ID NO: 23958 - protein, 328 aa, Zea mays subsp. mays
  peptide (1)..(328): Ceres Seq. ID no. 12407839
  misc_feature (25)..(315): NCBI GI NO: 18418286 NR Description: ADP/ATP translocase-like protein
  misc_feature (29)..(315): NCBI GI NO: 21593088 NR Description: ADP/ATP translocase-like protein
  misc_feature (26)..(309): NCBI GI NO: 15240640 NR Description: adenosine nucleotide translocator
  misc_feature (26)..(311): NCBI GI NO: 399015 NR Description: ADP,ATP carrier protein, mitochondrial precursor
  misc_feature (26)..(309): NCBI GI NO: 478810 NR Description: ADP,ATP carrier protein - Arabidopsis thaliana
  misc_feature (26)..(309): NCBI GI NO: 444790 NR Description: nucleotide translocator
  misc_feature (26)..(311): NCBI GI NO: 113460 NR Description: ADP,ATP carrier protein 2, mitochondrial precursor
  misc_feature (26)..(311): NCBI GI NO: 113456 NR Description: ADP,ATP carrier protein 1, mitochondrial precursor
  misc_feature (26)..(311): NCBI GI NO: 485517 NR Description: ADP,ATP carrier protein - rice
  misc_feature (26)..(311): NCBI GI NO: 22166 NR Description: adenine nucleotide translocator [Zea mays]
MAATPDERKQERPMRPATSPASVVADFAMGGAAAVVAKTGAAPVERVKLLLQNQAEMLRRGTLTRPYRGIADAFTRILREEGPAALWRGNQANVIRYFPTQAFNFAFRGYFKSFFGYDREKDGKWKWLAGNVASGSAAGATTSLLLYHLDYARTRLATDAIESRGTKRQFRGLLDVYKKTLTTDGMSGLYRGFSVSITGISLYRGLYFGIYDSMKPLVLVGPLEGNFFASFVLGWTITTFSGACAYPFDTVRRRMMLTSGEPFKYKNGFHAVKLIVSTEGFFTLFRGVGANILSGLAGAGVLSGYDQLQRLASRHDQNFEHNMKGALK

SEQ ID NO: 23959 - protein, 315 aa, Zea mays subsp. mays
  peptide (1)..(315): Ceres Seq. ID no. 12407840
  misc_feature (12)..(302): NCBI GI NO: 18418286 NR Description: ADP/ATP translocase-like protein
  misc_feature (16)..(302): NCBI GI NO: 21593088 NR Description: ADP/ATP translocase-like protein
  misc_feature (13)..(296): NCBI GI NO: 15240640 NR Description: adenosine nucleotide translocator
  misc_feature (13)..(298): NCBI GI NO: 399015 NR Description: ADP,ATP carrier protein, mitochondrial precursor
  misc_feature (13)..(296): NCBI GI NO: 444790 NR Description: nucleotide translocator
  misc_feature (13)..(296): NCBI GI NO: 478810 NR Description: ADP,ATP carrier protein - Arabidopsis thaliana
  misc_feature (13)..(298): NCBI GI NO: 113460 NR Description: ADP,ATP carrier protein 2, mitochondrial precursor
  misc_feature (13)..(298): NCBI GI NO: 113456 NR Description: ADP,ATP carrier protein 1, mitochondrial precursor
  misc_feature (13)..(298): NCBI GI NO: 485517 NR Description: ADP,ATP carrier protein - rice
  misc_feature (13)..(298): NCBI GI NO: 22166 NR Description: adenine nucleotide translocator [Zea mays]
MRPATSPASVVADFAMGGAAAVVAKTGAAPVERVKLLLQNQAEMLRRGTLTRPYRGIADAFTRILREEGPAALWRGNQANVIRYFPTQAFNFAFRGYFKSFFGYDREKDGKWKWLAGNVASGSAAGATTSLLLYHLDYARTRLATDAIESRGTKRQFRGLLDVYKKTLTTDGMSGLYRGFSVSITGISLYRGLYFGIYDSMKPLVLVGPLEGNFFASFVLGWTITTFSGACAYPFDTVRRRMMLTSGEPFKYKNGFHAVKLIVSTEGFFTLFRGVGANILSGLAGAGVLSGYDQLQRLASRHDQNFEHNMKGALK

SEQ ID NO: 23960 - DNA, 1336 bp, Zea mays subsp. mays
  misc_feature (1)..(1336): Ceres Seq. ID no. 12407834
atctcgatcgtgctccattccatccacgtatgtagctagagctgccaatcggagatacgtacatggcccgtgtcgcgtcgctgctgctcaccgtcatcgtggctgcggcggcgtcgctgctgctgctgcttgcgccgtcggcggcggagctgacgcgggtggagcacccgcccaagaacgagggctcgctcgccatccttgcagttggcgactgggggcgccgggggcagttcaaccagaccctcgtggcccagcagatgggagtggtgggggagaagttggacatcgacttcgtcatctccacgggcgacaacatctacgacgacggcatcgccaacaccagcgaccccctcttcaaggagtgcttcaccaacatctacaccgcgcagagcctccagacgccttggtacatcgtcctcggcaaccatgactacacgggcaacgcgctggcgcagcaagaccccgccatccgcgaagtcgacagccggtacctcaacctcgccaagtccttcatcgtcaactcaggaatcgcggatttcttcctcctggacacgtcgccgttctacctcaagtactggaacagcagcaagtacgactggagagacgtcgctcctcgcgacacctacatccaaaacctcctcgatgatttggacgacgccctggtccaatccgaggcgccctggaagattgtcgtcggccaccaccccatcagcagcggctgcgagcatgggaacaccactgagctccaggagctcctcagaccaatcctcgaggcgcgcggggtcgacatgtacgtgaacggccacgaccactgcttgcagcacatcagcagcagaaacagcccggttcagttcatgacgagcggcggcgggtccaaggcatgggcgggcaagttcaagaccacgtccgacaagatagagttcatctacgacggccagggattcatgtccatgcaactgagcagcacggaggcgcacctcgtcttctacgacgtcgccggcaatgtcctgcacagctatgacagcaccaaaaacgaagaagaggacgatggctggccagctggacaacaagcagctgtgaggggatcaattgatcgaggcaacttataatatgtgtgtgggccggaagcaattcgtttgtgtatcttatgatgtgtgtatgtgctatgtttaaaatgtgcattattgtgtgcacaagagaggattattgttgtatcttctagctagttgggtcacttgaggggctcagggctagaaaccaatttaaaatcacaatcattggatagtagctggactctcataatataaactatacatataatatatagttactagcc

SEQ ID NO: 23961 - protein, 348 aa, Zea mays subsp. mays
  peptide (1)..(348): Ceres Seq. ID no. 12407835
  misc_feature (43)..(252): Pfam Name: Pfam Description:  Calcineurin-like phosphoesterase
  misc_feature (12)..(323): NCBI GI NO: 37530584 NR Description: putative purple acid phosphatase
  misc_feature (6)..(332): NCBI GI NO: 22329781 NR Description: hypothetical protein; protein id: At1g25230
  misc_feature (26)..(325): NCBI GI NO: 30683951 NR Description: calcineurin-like phosphoesterase family
  misc_feature (26)..(325): NCBI GI NO: 30911094 NR Description: putative purple acid phosphatase
  misc_feature (19)..(324): NCBI GI NO: 22325419 NR Description: putative purple acid phosphatase
  misc_feature (26)..(325): NCBI GI NO: 25752249 NR Description: probable acid phosphatase (EC 3
  misc_feature (6)..(332): NCBI GI NO: 25752248 NR Description: probable acid phosphatase (EC 3
  misc_feature (12)..(328): NCBI GI NO: 7331195 NR Description: putative purple acid phosphatase precursor
  misc_feature (10)..(324): NCBI GI NO: 39918795 NR Description: putative acid phosphatase [Lupinus luteus]
  misc_feature (19)..(193): NCBI GI NO: 25752251 NR Description: probable acid phosphatase (EC 3
MARVASLLLTVIVAAAASLLLLLAPSAAELTRVEHPPKNEGSLAILAVGDWGRRGQFNQTLVAQQMGVVGEKLDIDFVISTGDNIYDDGIANTSDPLFKECFTNIYTAQSLQTPWYIVLGNHDYTGNALAQQDPAIREVDSRYLNLAKSFIVNSGIADFFLLDTSPFYLKYWNSSKYDWRDVAPRDTYIQNLLDDLDDALVQSEAPWKIVVGHHPISSGCEHGNTTELQELLRPILEARGVDMYVNGHDHCLQHISSRNSPVQFMTSGGGSKAWAGKFKTTSDKIEFIYDGQGFMSMQLSSTEAHLVFYDVAGNVLHSYDSTKNEEEDDGWPAGQQAAVRGSIDRGNL

SEQ ID NO: 23962 - protein, 283 aa, Zea mays subsp. mays
  peptide (1)..(283): Ceres Seq. ID no. 12407836
  misc_feature (1)..(187): Pfam Name: Pfam Description:  Calcineurin-like phosphoesterase
  misc_feature (1)..(258): NCBI GI NO: 37530584 NR Description: putative purple acid phosphatase
  misc_feature (1)..(267): NCBI GI NO: 22329781 NR Description: hypothetical protein; protein id: At1g25230
  misc_feature (1)..(260): NCBI GI NO: 30683951 NR Description: calcineurin-like phosphoesterase family
  misc_feature (1)..(260): NCBI GI NO: 30911094 NR Description: putative purple acid phosphatase
  misc_feature (1)..(259): NCBI GI NO: 22325419 NR Description: putative purple acid phosphatase
  misc_feature (1)..(260): NCBI GI NO: 25752249 NR Description: probable acid phosphatase (EC 3
  misc_feature (1)..(267): NCBI GI NO: 25752248 NR Description: probable acid phosphatase (EC 3
  misc_feature (1)..(263): NCBI GI NO: 7331195 NR Description: putative purple acid phosphatase precursor
  misc_feature (1)..(259): NCBI GI NO: 39918795 NR Description: putative acid phosphatase [Lupinus luteus]
  misc_feature (1)..(128): NCBI GI NO: 25752251 NR Description: probable acid phosphatase (EC 3
MGVVGEKLDIDFVISTGDNIYDDGIANTSDPLFKECFTNIYTAQSLQTPWYIVLGNHDYTGNALAQQDPAIREVDSRYLNLAKSFIVNSGIADFFLLDTSPFYLKYWNSSKYDWRDVAPRDTYIQNLLDDLDDALVQSEAPWKIVVGHHPISSGCEHGNTTELQELLRPILEARGVDMYVNGHDHCLQHISSRNSPVQFMTSGGGSKAWAGKFKTTSDKIEFIYDGQGFMSMQLSSTEAHLVFYDVAGNVLHSYDSTKNEEEDDGWPAGQQAAVRGSIDRGNL

SEQ ID NO: 23963 - DNA, 1514 bp, Zea mays subsp. mays
  misc_feature (1)..(1514): Ceres Seq. ID no. 12408075
aattttcctcgcgccgctgtcccttcgtttccccagacagtgcagaccgaaccgaacaggcgaacagacattggttttccccgccgcgcagcgcgcacacgcctgcctgccatttctaaatccggggccggtcatcctctcttgtttccgtggcaaccgcgcctctcctccttccttgcagcgtgcccctgcggggggctgcgcgtggatctgatctcgtcaattgtcgtgctatgtttttctccagcggcacgaagtgaagaacacgtttttgtgacgccatggctgtggaaagagatatatttggaatttctgggccaacgtatctgaaatcaatcgattggaactgtgagcataatcggagatctgtggctgcaagcttagttcaggctgtatatgtgttggagagagaccggcaactgaatcatcaatcttttgaagccttggcacctgcttggtgggaattcctccattttgagctgattcgcaagctgattgatgatgctgatatgtccatatttggtgcaatatttgaattcaaccctccaaaggaggaagcttctggtgcaaatgctccaagatttgtcatcgcattcagaggcaccataacagagaaggatactatctctagggacctttccctggacctgcaccttgttcaaaatggtctccacaggacctcgagatttaatatagcaatgcaagctgttcaaaacgtagcctcggttttccctggatccacgatttggctagcagggcattcactaggcgctggcctggccatccttacgggaagaaacatggttaagaagggtgtgcttttagaaagctttctcttcaacccaccgttcgttgctgctccagttgaaaggatcagggacgaaagggtaaagcacggatttcgtattgcaagaagcgtgattactgctggattgactattgccatgaaagctaaaactgagggtagcagtcagagatccgtcgctgaagaatctttcagcattttgtcatcatggacgccgtacctgttcgttaatccaggagaccacatttactcagagtacattgggtacttccagcaccggaagaacatggaggatcttggtgccggatttatcgagaagcttgcgacacagaattccatcggagacctgttcttcaaggcactagggtgggagtcagaaccgctgcaccttcttccgtctgccgatctaatcgtcaacgtgagcccttcgtctgatttcaagtacgctcacggcatcagccagtggtggcaacctgagctgaatttgcagtgcagtaaatataggtactcatagttgtacgtcgctagaaatgatgtctcagaaacttagttatcctctctatcccttcagtttattcatgtggttcattctgtttgttgtagtgttggtttcccagctgtggtagactatttcagacatattgactgcattttcctgacctgcaaaatctgttgattgtgtggagtaaagttgtgacatccatcgttc

SEQ ID NO: 23964 - protein, 345 aa, Zea mays subsp. mays
  peptide (1)..(345): Ceres Seq. ID no. 12408076
  misc_feature (1)..(344): NCBI GI NO: 18413406 NR Description: unknown protein; protein id: At4g10955.1
  misc_feature (1)..(344): NCBI GI NO: 18396010 NR Description: expressed protein; protein id: At2g05260
  misc_feature (1)..(308): NCBI GI NO: 7486138 NR Description: hypothetical protein F25I24
  misc_feature (1)..(336): NCBI GI NO: 30689345 NR Description: expressed protein [Arabidopsis thaliana]
  misc_feature (24)..(308): NCBI GI NO: 7486718 NR Description: hypothetical protein F8M12
  misc_feature (32)..(344): NCBI GI NO: 34910674 NR Description: P0690B02.1
  misc_feature (4)..(338): NCBI GI NO: 15237909 NR Description: putative protein; protein id: At5g24180.1
  misc_feature (4)..(332): NCBI GI NO: 15237918 NR Description: putative protein; protein id: At5g24220.1
  misc_feature (1)..(335): NCBI GI NO: 15237913 NR Description: putative protein; protein id: At5g24200.1
  misc_feature (1)..(231): NCBI GI NO: 10177082 NR Description: gene_id:MOP9
MAVERDIFGISGPTYLKSIDWNCEHNRRSVAASLVQAVYVLERDRQLNHQSFEALAPAWWEFLHFELIRKLIDDADMSIFGAIFEFNPPKEEASGANAPRFVIAFRGTITEKDTISRDLSLDLHLVQNGLHRTSRFNIAMQAVQNVASVFPGSTIWLAGHSLGAGLAILTGRNMVKKGVLLESFLFNPPFVAAPVERIRDERVKHGFRIARSVITAGLTIAMKAKTEGSSQRSVAEESFSILSSWTPYLFVNPGDHIYSEYIGYFQHRKNMEDLGAGFIEKLATQNSIGDLFFKALGWESEPLHLLPSADLIVNVSPSSDFKYAHGISQWWQPELNLQCSKYRYS

SEQ ID NO: 23965 - protein, 269 aa, Zea mays subsp. mays
  peptide (1)..(269): Ceres Seq. ID no. 12408077
  misc_feature (1)..(268): NCBI GI NO: 18413406 NR Description: unknown protein; protein id: At4g10955.1
  misc_feature (1)..(268): NCBI GI NO: 18396010 NR Description: expressed protein; protein id: At2g05260
  misc_feature (1)..(232): NCBI GI NO: 7486138 NR Description: hypothetical protein F25I24
  misc_feature (1)..(260): NCBI GI NO: 30689345 NR Description: expressed protein [Arabidopsis thaliana]
  misc_feature (1)..(232): NCBI GI NO: 7486718 NR Description: hypothetical protein F8M12
  misc_feature (1)..(268): NCBI GI NO: 34910674 NR Description: P0690B02.1
  misc_feature (1)..(262): NCBI GI NO: 15237909 NR Description: putative protein; protein id: At5g24180.1
  misc_feature (1)..(256): NCBI GI NO: 15237918 NR Description: putative protein; protein id: At5g24220.1
  misc_feature (1)..(259): NCBI GI NO: 15237913 NR Description: putative protein; protein id: At5g24200.1
  misc_feature (1)..(155): NCBI GI NO: 10177082 NR Description: gene_id:MOP9
MSIFGAIFEFNPPKEEASGANAPRFVIAFRGTITEKDTISRDLSLDLHLVQNGLHRTSRFNIAMQAVQNVASVFPGSTIWLAGHSLGAGLAILTGRNMVKKGVLLESFLFNPPFVAAPVERIRDERVKHGFRIARSVITAGLTIAMKAKTEGSSQRSVAEESFSILSSWTPYLFVNPGDHIYSEYIGYFQHRKNMEDLGAGFIEKLATQNSIGDLFFKALGWESEPLHLLPSADLIVNVSPSSDFKYAHGISQWWQPELNLQCSKYRYS

SEQ ID NO: 23966 - protein, 206 aa, Zea mays subsp. mays
  peptide (1)..(206): Ceres Seq. ID no. 12408078
  misc_feature (1)..(205): NCBI GI NO: 18413406 NR Description: unknown protein; protein id: At4g10955.1
  misc_feature (1)..(205): NCBI GI NO: 18396010 NR Description: expressed protein; protein id: At2g05260
  misc_feature (1)..(169): NCBI GI NO: 7486138 NR Description: hypothetical protein F25I24
  misc_feature (1)..(197): NCBI GI NO: 30689345 NR Description: expressed protein [Arabidopsis thaliana]
  misc_feature (1)..(169): NCBI GI NO: 7486718 NR Description: hypothetical protein F8M12
  misc_feature (1)..(205): NCBI GI NO: 34910674 NR Description: P0690B02.1
  misc_feature (1)..(199): NCBI GI NO: 15237909 NR Description: putative protein; protein id: At5g24180.1
  misc_feature (1)..(193): NCBI GI NO: 15237918 NR Description: putative protein; protein id: At5g24220.1
  misc_feature (1)..(196): NCBI GI NO: 15237913 NR Description: putative protein; protein id: At5g24200.1
  misc_feature (1)..(92): NCBI GI NO: 10177082 NR Description: gene_id:MOP9
MQAVQNVASVFPGSTIWLAGHSLGAGLAILTGRNMVKKGVLLESFLFNPPFVAAPVERIRDERVKHGFRIARSVITAGLTIAMKAKTEGSSQRSVAEESFSILSSWTPYLFVNPGDHIYSEYIGYFQHRKNMEDLGAGFIEKLATQNSIGDLFFKALGWESEPLHLLPSADLIVNVSPSSDFKYAHGISQWWQPELNLQCSKYRYS

SEQ ID NO: 23967 - DNA, 1015 bp, Zea mays subsp. mays
  misc_feature (1)..(1015): Ceres Seq. ID no. 12345896
aaacctcctgccctagtctcctctctgtctcacagcacagcccctgctttccccccaccgtcccacggccgccacgccgccacgcttcttcttccctttcccgtccaacctccaaccctgccggctgccgcggcggcggattaacacaataccttggcgagagacgtaatagtttctgaactcaccgcgctacgcccgatgtcggagacggcggcgccgatcggcctgtcatgggctcccaagcttccttcctttgcaacgaccagcggcggcagcaagatcgaccacgcgccggatccgagcaccgcgcagggctcgctctggaagcgcacgagcgagctcgtggacgggctgttcgtgcccccgagggaccctaggcagctgaataagctggctaggaagaacgtcaaggacaccgccggcaagggctggttcgacatgcccgcgccgaccatcactcccgagttgaagaaggatctcgagattttgcagctgaggcatgtaattgacccaaaaaggcacttcaagcgggcaggaaagtccaaggcccttcccaagtacttccaagttggtacggttgttgagcctgcatctgagttctactcaagtaggctgaaaaatagggaacgcaaggcaacattggtggacgagctgctatcagatcaatctcttaagagctacaggatgcgcaaggtacgggaaattcaggagatccgtacaccaggaggcaaccaaaagtggaagaacaagggcaagaaaacactgaagagggcgaaggataggagaaaatgagactggtgcgcccagctttgtgctccagttgtgagggaaccaaggaacgccttcaagtcgctctagtgcttttctctcaactttgcagtatagattctggttccagtgtagtgttgtggacttcatgatgaattgatttgtatttctataaattttataatattgctgtaacagcggaattcagaaatatgagttggtagactctttcaagttagctagcttc

SEQ ID NO: 23968 - protein, 197 aa, Zea mays subsp. mays
  peptide (1)..(197): Ceres Seq. ID no. 12345897
  misc_feature (1)..(196): NCBI GI NO: 30692242 NR Description: expressed protein [Arabidopsis thaliana]
  misc_feature (1)..(196): NCBI GI NO: 15221891 NR Description: hypothetical protein; protein id: At1g54770.1
  misc_feature (1)..(173): NCBI GI NO: 25405768 NR Description: T22H22.18 [imported] - Arabidopsis thaliana
  misc_feature (67)..(182): NCBI GI NO: 19114999 NR Description: hypothetical protein [Schizosaccharomyces pombe]
  misc_feature (54)..(187): NCBI GI NO: 34859943 NR Description: similar to expressed sequence AA408582
  misc_feature (54)..(186): NCBI GI NO: 8218113 NR Description: dJ561L24.2 (acidic 82 kDa protein) [Homo sapiens]
  misc_feature (54)..(186): NCBI GI NO: 24418931 NR Description: hypothetical protein MGC27716 [Mus musculus]
  misc_feature (64)..(197): NCBI GI NO: 17537287 NR Description: Acidic protein mRNA (29.6 kD)
  misc_feature (63)..(197): NCBI GI NO: 39580393 NR Description: Hypothetical protein CBG17763
  misc_feature (60)..(195): NCBI GI NO: 31237250 NR Description: ENSANGP00000016794 [Anopheles gambiae]
MSETAAPIGLSWAPKLPSFATTSGGSKIDHAPDPSTAQGSLWKRTSELVDGLFVPPRDPRQLNKLARKNVKDTAGKGWFDMPAPTITPELKKDLEILQLRHVIDPKRHFKRAGKSKALPKYFQVGTVVEPASEFYSSRLKNRERKATLVDELLSDQSLKSYRMRKVREIQEIRTPGGNQKWKNKGKKTLKRAKDRRK

SEQ ID NO: 23969 - protein, 117 aa, Zea mays subsp. mays
  peptide (1)..(117): Ceres Seq. ID no. 12345898
  misc_feature (1)..(116): NCBI GI NO: 30692242 NR Description: expressed protein [Arabidopsis thaliana]
  misc_feature (1)..(116): NCBI GI NO: 15221891 NR Description: hypothetical protein; protein id: At1g54770.1
  misc_feature (1)..(93): NCBI GI NO: 25405768 NR Description: T22H22.18 [imported] - Arabidopsis thaliana
  misc_feature (1)..(102): NCBI GI NO: 19114999 NR Description: hypothetical protein [Schizosaccharomyces pombe]
  misc_feature (1)..(107): NCBI GI NO: 34859943 NR Description: similar to expressed sequence AA408582
  misc_feature (1)..(106): NCBI GI NO: 8218113 NR Description: dJ561L24.2 (acidic 82 kDa protein) [Homo sapiens]
  misc_feature (1)..(106): NCBI GI NO: 24418931 NR Description: hypothetical protein MGC27716 [Mus musculus]
  misc_feature (1)..(117): NCBI GI NO: 17537287 NR Description: Acidic protein mRNA (29.6 kD)
  misc_feature (1)..(117): NCBI GI NO: 39580393 NR Description: Hypothetical protein CBG17763
  misc_feature (1)..(115): NCBI GI NO: 31237250 NR Description: ENSANGP00000016794 [Anopheles gambiae]
MPAPTITPELKKDLEILQLRHVIDPKRHFKRAGKSKALPKYFQVGTVVEPASEFYSSRLKNRERKATLVDELLSDQSLKSYRMRKVREIQEIRTPGGNQKWKNKGKKTLKRAKDRRK

SEQ ID NO: 23970 - DNA, 1304 bp, Zea mays subsp. mays
  misc_feature (1)..(1304): Ceres Seq. ID no. 12347730
cctaatcaaaaaaaaatccgcgccatggtcccccatcccgtccctcccctagtcccctccgacctcttctaaaaatcctggtggctggctctcgttgtcctcaagcagtcaagctcctcctcctcctccccccagtccctcccaggctcccaccccgccttgctcgcagcctccccaaaaccctagccctagccctagccctagccctagctctcccacacccgcactgggagatggacggcggcggcacgcaccgcacgccggaagacgtgttccgggatttccgcgcgcggcgggctggtatgatcaaagcgctcaccaccgacgtggagaagttctaccagcagtgtgacccagagaaagagaatctgtgtttgtatggtcttcccaatgaaacatgggaagtgaacctgcctgcagaggaggttcctcctgaacttccagagccagctctgggaattaattttgctcgtgacgggatggatgaaaaagattggctgtcactagtcgcggtgcacagtgatgcttggttgctggctgtggccttttacttcggtgcaagatttggttttgacaaagaatccaggaagcgcctttttgtcatgattaataacctccctacaatatatgaagttgtcacgggaactgccaagaagcaaaccaaggagaaaactcccaaaagcagcagcaagagcaataaagctggcccaaaaccgccacgccagccagaacccaactcaaggggttcgaagatgccacctccgaaggatgaggatgacagcggaggcgaggaagaggaggaagaggaagatcacgaaaacacgctgtgtggttcttgtggtgacaactacggacaggatgagttctggatatgctgtgatgcgtgcgagacttggttccatggcaagtgtgtcaagatcactcctgccaaggccgaacacatcaagcactacaagtgtccgaactgcagcggtagtggcaagagagcccgagcatgatgatgctggctggatatatccatctctcatgcctgacttgatgtaaaacgcccacatggggaccgaatgcccgatggctgttgctttcagtgtaggaccagctgtgtaggttcttgatgtgctgtttgctgtagtatgtcaaagacgttctagatctattgttagtaactagcaactaattgtagtagcctgtatttcttcaatcttctcccagggcgcctgtgctgaactcaaaactgttttagatctaagttgtgcattatgtatcactcatgttagtttgttaaaaagtgtgttagcattcgc

SEQ ID NO: 23971 - protein, 254 aa, Zea mays subsp. mays
  peptide (1)..(254): Ceres Seq. ID no. 12347731
  misc_feature (198)..(248): Pfam Name: Pfam Description:  PHD-finger
  misc_feature (3)..(254): NCBI GI NO: 34907474 NR Description: nucleic acid binding protein
  misc_feature (3)..(254): NCBI GI NO: 4091080 NR Description: nucleic acid binding protein [Oryza sativa]
  misc_feature (3)..(254): NCBI GI NO: 11281498 NR Description: nucleic acid binding protein [imported] - rice
  misc_feature (8)..(250): NCBI GI NO: 15223786 NR Description: nucleic acid binding protein
  misc_feature (4)..(253): NCBI GI NO: 15226967 NR Description: putative PHD-type zinc finger protein
  misc_feature (4)..(253): NCBI GI NO: 21593407 NR Description: putative PHD-type zinc finger protein
  misc_feature (32)..(250): NCBI GI NO: 25346630 NR Description: F14L17.29 protein - Arabidopsis thaliana
  misc_feature (8)..(30): NCBI GI NO: 25346630 NR Description: F14L17.29 protein - Arabidopsis thaliana
  misc_feature (1)..(254): NCBI GI NO: 15239624 NR Description: nucleic acid binding protein - like
  misc_feature (1)..(253): NCBI GI NO: 30687843 NR Description: zinc finger protein - like [Arabidopsis thaliana]
MDGGGTHRTPEDVFRDFRARRAGMIKALTTDVEKFYQQCDPEKENLCLYGLPNETWEVNLPAEEVPPELPEPALGINFARDGMDEKDWLSLVAVHSDAWLLAVAFYFGARFGFDKESRKRLFVMINNLPTIYEVVTGTAKKQTKEKTPKSSSKSNKAGPKPPRQPEPNSRGSKMPPPKDEDDSGGEEEEEEEDHENTLCGSCGDNYGQDEFWICCDACETWFHGKCVKITPAKAEHIKHYKCPNCSGSGKRARA

SEQ ID NO: 23972 - protein, 231 aa, Zea mays subsp. mays
  peptide (1)..(231): Ceres Seq. ID no. 12347732
  misc_feature (175)..(225): Pfam Name: Pfam Description:  PHD-finger
  misc_feature (1)..(231): NCBI GI NO: 34907474 NR Description: nucleic acid binding protein
  misc_feature (1)..(231): NCBI GI NO: 4091080 NR Description: nucleic acid binding protein [Oryza sativa]
  misc_feature (1)..(231): NCBI GI NO: 11281498 NR Description: nucleic acid binding protein [imported] - rice
  misc_feature (1)..(227): NCBI GI NO: 15223786 NR Description: nucleic acid binding protein
  misc_feature (1)..(230): NCBI GI NO: 15226967 NR Description: putative PHD-type zinc finger protein
  misc_feature (1)..(230): NCBI GI NO: 21593407 NR Description: putative PHD-type zinc finger protein
  misc_feature (9)..(227): NCBI GI NO: 25346630 NR Description: F14L17.29 protein - Arabidopsis thaliana
  misc_feature (1)..(231): NCBI GI NO: 15239624 NR Description: nucleic acid binding protein - like
  misc_feature (1)..(230): NCBI GI NO: 30687843 NR Description: zinc finger protein - like [Arabidopsis thaliana]
  misc_feature (1)..(223): NCBI GI NO: 7488751 NR Description: probable zinc finger protein - alfalfa (fragment)
MIKALTTDVEKFYQQCDPEKENLCLYGLPNETWEVNLPAEEVPPELPEPALGINFARDGMDEKDWLSLVAVHSDAWLLAVAFYFGARFGFDKESRKRLFVMINNLPTIYEVVTGTAKKQTKEKTPKSSSKSNKAGPKPPRQPEPNSRGSKMPPPKDEDDSGGEEEEEEEDHENTLCGSCGDNYGQDEFWICCDACETWFHGKCVKITPAKAEHIKHYKCPNCSGSGKRARA

SEQ ID NO: 23973 - protein, 172 aa, Zea mays subsp. mays
  peptide (1)..(172): Ceres Seq. ID no. 12347733
  misc_feature (116)..(166): Pfam Name: Pfam Description:  PHD-finger
  misc_feature (1)..(172): NCBI GI NO: 34907474 NR Description: nucleic acid binding protein
  misc_feature (1)..(172): NCBI GI NO: 4091080 NR Description: nucleic acid binding protein [Oryza sativa]
  misc_feature (1)..(172): NCBI GI NO: 11281498 NR Description: nucleic acid binding protein [imported] - rice
  misc_feature (1)..(168): NCBI GI NO: 15223786 NR Description: nucleic acid binding protein
  misc_feature (1)..(171): NCBI GI NO: 15226967 NR Description: putative PHD-type zinc finger protein
  misc_feature (1)..(171): NCBI GI NO: 21593407 NR Description: putative PHD-type zinc finger protein
  misc_feature (1)..(168): NCBI GI NO: 25346630 NR Description: F14L17.29 protein - Arabidopsis thaliana
  misc_feature (1)..(172): NCBI GI NO: 15239624 NR Description: nucleic acid binding protein - like
  misc_feature (1)..(171): NCBI GI NO: 30687843 NR Description: zinc finger protein - like [Arabidopsis thaliana]
  misc_feature (1)..(164): NCBI GI NO: 7488751 NR Description: probable zinc finger protein - alfalfa (fragment)
MDEKDWLSLVAVHSDAWLLAVAFYFGARFGFDKESRKRLFVMINNLPTIYEVVTGTAKKQTKEKTPKSSSKSNKAGPKPPRQPEPNSRGSKMPPPKDEDDSGGEEEEEEEDHENTLCGSCGDNYGQDEFWICCDACETWFHGKCVKITPAKAEHIKHYKCPNCSGSGKRARA

SEQ ID NO: 23974 - DNA, 1020 bp, Zea mays subsp. mays
  misc_feature (1)..(1020): Ceres Seq. ID no. 12355909
cccgcactctctctcaactcattggcagcagcaaccgcagccgcgagggccaagcaggggggacaaggaaaagggccgacgaagaggaaaaaggaagaacgcgtcgcggagccatggggcttggccttggcgtgcgggcggcgcccttcacgtacgcggcgcacgcactggccgtcgcggcggcggccatggttctcgtctggtccatccagttccgcggcgggctcgccatcgagtccaccaacaagaacctcatcttcaacgttcaccctgttcttatgcttatcggttatgttattatcggcggtgaagctataatggtgtacagggtacttccaacatcgaatcatgacacaactaagctgatccatctaattctccacgggattgcacttgtccttggtgcggttggaatatactttgctttcaaaaatcacaatgagagtgggattgccaatctttacagcctgcactcttggattgggataggaacaattactttgtatggtattcagtggataattggattcgtcacgttcttcttccctggtgctgcgccaaacgtgaagaagggtgttcttccttggcacgtactctttgggctctttgtctacatcttagcactggctaatgcagaactcggctttcttgagaagctcactttcctcgagagctcaggtctcgacaaatatggcacagaggcattcttagtgaacttcacagcattggttgtcgtgttatttggtgcctctgttgtggtggctgctatagctccagttcgccttgaagaaccacagggttatgatccaattccagaaaactagtgcaaatgaaatgtacagcgtatgcagttgccaagattggctgttaccacatggagataagatattcatgtctctttattgacggagaagaaggtgatggaattatcacaataaagatgtagacataaatgtgtgtgtatatacattctgtgacacttcaaaatttcagtatatgcaaaactgaatatcctgcttc

SEQ ID NO: 23975 - protein, 273 aa, Zea mays subsp. mays
  peptide (1)..(273): Ceres Seq. ID no. 12355910
  misc_feature (38)..(273): NCBI GI NO: 38346996 NR Description: OSJNBb0039L24.15
  misc_feature (46)..(270): NCBI GI NO: 37535830 NR Description: putative cytochrome b-561
  misc_feature (23)..(257): NCBI GI NO: 7486819 NR Description: hypothetical protein M7J2
  misc_feature (40)..(257): NCBI GI NO: 18416576 NR Description: putative protein; protein id: At4g25570
  misc_feature (40)..(257): NCBI GI NO: 21553731 NR Description: cytochrome b561 [Arabidopsis thaliana]
  misc_feature (23)..(257): NCBI GI NO: 25407597 NR Description: hypothetical protein AT4g25570
  misc_feature (40)..(257): NCBI GI NO: 12597245 NR Description: cytochrome b561 [Arabidopsis thaliana]
  misc_feature (38)..(227): NCBI GI NO: 6822123 NR Description: putative cytochrome B 561
  misc_feature (53)..(254): NCBI GI NO: 38637027 NR Description: putative cytochrome b561
  misc_feature (48)..(259): NCBI GI NO: 15240965 NR Description: cytochrome b-561 (gb|AAD45585
RTLSQLIGSSNRSREGQAGGTRKRADEEEKGRTRRGAMGLGLGVRAAPFTYAAHALAVAAAAMVLVWSIQFRGGLAIESTNKNLIFNVHPVLMLIGYVIIGGEAIMVYRVLPTSNHDTTKLIHLILHGIALVLGAVGIYFAFKNHNESGIANLYSLHSWIGIGTITLYGIQWIIGFVTFFFPGAAPNVKKGVLPWHVLFGLFVYILALANAELGFLEKLTFLESSGLDKYGTEAFLVNFTALVVVLFGASVVVAAIAPVRLEEPQGYDPIPEN

SEQ ID NO: 23976 - protein, 236 aa, Zea mays subsp. mays
  peptide (1)..(236): Ceres Seq. ID no. 12355911
  misc_feature (1)..(236): NCBI GI NO: 38346996 NR Description: OSJNBb0039L24.15
  misc_feature (9)..(233): NCBI GI NO: 37535830 NR Description: putative cytochrome b-561
  misc_feature (1)..(220): NCBI GI NO: 7486819 NR Description: hypothetical protein M7J2
  misc_feature (3)..(220): NCBI GI NO: 18416576 NR Description: putative protein; protein id: At4g25570
  misc_feature (3)..(220): NCBI GI NO: 21553731 NR Description: cytochrome b561 [Arabidopsis thaliana]
  misc_feature (1)..(220): NCBI GI NO: 25407597 NR Description: hypothetical protein AT4g25570
  misc_feature (3)..(220): NCBI GI NO: 12597245 NR Description: cytochrome b561 [Arabidopsis thaliana]
  misc_feature (1)..(190): NCBI GI NO: 6822123 NR Description: putative cytochrome B 561
  misc_feature (16)..(217): NCBI GI NO: 38637027 NR Description: putative cytochrome b561
  misc_feature (11)..(222): NCBI GI NO: 15240965 NR Description: cytochrome b-561 (gb|AAD45585
MGLGLGVRAAPFTYAAHALAVAAAAMVLVWSIQFRGGLAIESTNKNLIFNVHPVLMLIGYVIIGGEAIMVYRVLPTSNHDTTKLIHLILHGIALVLGAVGIYFAFKNHNESGIANLYSLHSWIGIGTITLYGIQWIIGFVTFFFPGAAPNVKKGVLPWHVLFGLFVYILALANAELGFLEKLTFLESSGLDKYGTEAFLVNFTALVVVLFGASVVVAAIAPVRLEEPQGYDPIPEN

SEQ ID NO: 23977 - protein, 211 aa, Zea mays subsp. mays
  peptide (1)..(211): Ceres Seq. ID no. 12355912
  misc_feature (1)..(211): NCBI GI NO: 38346996 NR Description: OSJNBb0039L24.15
  misc_feature (1)..(208): NCBI GI NO: 37535830 NR Description: putative cytochrome b-561
  misc_feature (1)..(195): NCBI GI NO: 7486819 NR Description: hypothetical protein M7J2
  misc_feature (1)..(195): NCBI GI NO: 18416576 NR Description: putative protein; protein id: At4g25570
  misc_feature (1)..(195): NCBI GI NO: 21553731 NR Description: cytochrome b561 [Arabidopsis thaliana]
  misc_feature (1)..(195): NCBI GI NO: 25407597 NR Description: hypothetical protein AT4g25570
  misc_feature (1)..(195): NCBI GI NO: 12597245 NR Description: cytochrome b561 [Arabidopsis thaliana]
  misc_feature (1)..(165): NCBI GI NO: 6822123 NR Description: putative cytochrome B 561
  misc_feature (1)..(192): NCBI GI NO: 38637027 NR Description: putative cytochrome b561
  misc_feature (1)..(197): NCBI GI NO: 15240965 NR Description: cytochrome b-561 (gb|AAD45585
MVLVWSIQFRGGLAIESTNKNLIFNVHPVLMLIGYVIIGGEAIMVYRVLPTSNHDTTKLIHLILHGIALVLGAVGIYFAFKNHNESGIANLYSLHSWIGIGTITLYGIQWIIGFVTFFFPGAAPNVKKGVLPWHVLFGLFVYILALANAELGFLEKLTFLESSGLDKYGTEAFLVNFTALVVVLFGASVVVAAIAPVRLEEPQGYDPIPEN

SEQ ID NO: 23978 - DNA, 1155 bp, Zea mays subsp. mays
  misc_feature (1)..(1155): Ceres Seq. ID no. 12353616
cacgggcgcctgcctctacgaggtggcctacggcgacggctcctacaccgtgggcgacttcgccaccgagacgctcacgctgggggactccaccccggtcggcaacgtcgccatcgggtgcggccacgacaacgagggcctcttcgtcggcgccgcggggctgctggcgctgggcggcgggccgctctccttcccgtcccagatctccgcgtccaccttctcctactgcctcgtggaccgcgactccccggccgcgtccacgctccagttcggcgacggcgccgccgaggcgggcaccgtgacggcgcctctcgtgcgcagcccgcgcacgagcaccttctactacgtggcgctgtcgggcatctcggtgggcgggcagccgctgtccatcccggcatccgccttcgccatggacgccacgtcgggctcgggcggcgtcatcgtggactccggcaccgccgtgacgcggctccagtccgccgcctacgcggcgctccgcgacgccttcgtccagggcgcgccgtcgcttccccggacctccggggtgtcgctgttcgacacgtgctacgacctgtcggaccggacgagcgtggaggtgcccgcggtgtcgctgcggttcgagggcggcggcgcgctgcggctgccggcgaagaactacctgatccccgtggacggagccggcacctactgcctggccttcgcgccgacgaacgcggccgtgtccatcatcgggaacgtgcagcagcagggcacccgcgtcagcttcgacaccgccaggggcgccgtcggcttcacccccaacaagtgctagcctagcctagcctaagcctgccttctggccctgttagccacggttgtcagtagtaatgacaagccggtgtttaattagcgggagaatgattagatggggggtaattaagcggtgggccctgccgggtctggggaggagcgaaaggcaaaggcgaggacagatgatgccattgccatgccagcctgtgtccggccgatgggtccagctccagcagtgtttctctctttctctcgagtatgcgtgcgtggagccttgtcatgacgaattagatcgtgggggctcccaagttaagagtatttatttttattttatttgctatgtcaagaaaatggaagtttccatcc

SEQ ID NO: 23979 - protein, 271 aa, Zea mays subsp. mays
  peptide (1)..(271): Ceres Seq. ID no. 12353617
  misc_feature (2)..(193): Pfam Name: Pfam Description:  Amidohydrolase family
HGRLPLRGGLRRRLLHRGRLRHRDAHAGGLHPGRQRRHRVRPRQRGPLRRRRGAAGAGRRAALLPVPDLRVHLLLLPRGPRLPGRVHAPVRRRRRRGGHRDGASRAQPAHEHLLLRGAVGHLGGRAAAVHPGIRLRHGRHVGLGRRHRGLRHRRDAAPVRRLRGAPRRLRPGRAVASPDLRGVAVRHVLRPVGPDERGGARGVAAVRGRRRAAAAGEELPDPRGRSRHLLPGLRADERGRVHHRERAAAGHPRQLRHRQGRRRLHPQQVLA

SEQ ID NO: 23980 - protein, 269 aa, Zea mays subsp. mays
  peptide (1)..(269): Ceres Seq. ID no. 12353618
  misc_feature (1)..(267): Pfam Name: Pfam Description:  Eukaryotic aspartyl protease
  misc_feature (1)..(269): NCBI GI NO: 34895664 NR Description: nucleoid DNA-binding protein cnd41-like protein
  misc_feature (4)..(269): NCBI GI NO: 15222611 NR Description: hypothetical protein; protein id: At1g25510
  misc_feature (4)..(269): NCBI GI NO: 15229656 NR Description: putative chloroplast nucleoid DNA-binding protein
  misc_feature (4)..(269): NCBI GI NO: 19424106 NR Description: putative chloroplast nucleoid DNA-binding protein
  misc_feature (3)..(269): NCBI GI NO: 15290061 NR Description: nucleoid DNA-binding protein cnd41-like protein
  misc_feature (1)..(269): NCBI GI NO: 15231010 NR Description: hypothetical protein, 5' partial
  misc_feature (1)..(269): NCBI GI NO: 28392860 NR Description: unknown protein [Arabidopsis thaliana]
  misc_feature (4)..(269): NCBI GI NO: 15228618 NR Description: putative protein; protein id: At3g61820
  misc_feature (4)..(269): NCBI GI NO: 15223368 NR Description: chloroplast nucleoid DNA binding protein, putative
  misc_feature (4)..(269): NCBI GI NO: 21594980 NR Description: chloroplast nucleoid DNA binding protein, putative
TGACLYEVAYGDGSYTVGDFATETLTLGDSTPVGNVAIGCGHDNEGLFVGAAGLLALGGGPLSFPSQISASTFSYCLVDRDSPAASTLQFGDGAAEAGTVTAPLVRSPRTSTFYYVALSGISVGGQPLSIPASAFAMDATSGSGGVIVDSGTAVTRLQSAAYAALRDAFVQGAPSLPRTSGVSLFDTCYDLSDRTSVEVPAVSLRFEGGGALRLPAKNYLIPVDGAGTYCLAFAPTNAAVSIIGNVQQQGTRVSFDTARGAVGFTPNKC

SEQ ID NO: 23981 - DNA, 1821 bp, Zea mays subsp. mays
  misc_feature (1)..(1821): Ceres Seq. ID no. 12443245
gcacgagaccattacctagaacatcctaatcgaaaacttttaatttcatttcctctcttttgacgacggaaacgaggcacgatcacacgctgaacgcttccgccccgccgccaccttccccgctctcctccctccgctcgcctccgcttccgttccgcgccctgcccccggaaggcaagcaaagccctcgctacttgcggagcgtcgttggtcaaaccctagcacacgtacgagcaggccagccccgcccgctcccattcccaggccctcatccatggcggcgctctccgtgcccctccacgccgccgccggatcccgcgccgccgcggccgaccccgtcaaggttccgtgcgtgaggagcactggttcagcccatttcggccgcgccttcccctccgtcgcggtctcctctttggctgcgaggcacatcgagccgatgagagcgatagctacacaggcgccccctgccgtgccacaatatttgagtggcgagaagacaaagatcggcatcaacggctttgggcggattggcaggttggtcctgcgaattgcaactagcagagacgatattgaagttgtggctgtgaatgaccctttcgttgatgctaagtacatggcctatatgttcaagtatgactctactcatggcccgtttaaaggttctatttgtgttgtggatgattcaaccctggagatcaatgggaagaaggtcacaattacaagcaaaagagatcctgcagagattccatggggtaactttggggctgaatatgttgttgaatcttctggtgtctttacaacgactgataaagcatcagcacacttaaagggtggtgctaagaaagtggtgatatctgcaccatcagcagatgctcccatgtttgtagttggagttaatgagaatagctatgattcgaagatgaatgttgtttctaatgcaagttgcaccaccaactgccttgctccacttgccaaggttgtacatgaggaatttggcatcgtggagggccttatgacaactgttcatgccacaacagccacccagaagaccgttgatggtccttcaatgaaggattggagaggaggacgtggtgctggccaaaacataattcctagctccactggtgcagcaaaggctgttggaaaagttctgcctgagctgaatggaaagctcactggcatggccttccgagttccaacaccaaatgtctctgttgtggacttgacatgccggattgagaaaaacgcctcctatgatgatgtgaaagcagccatcaaggcggcatcagagggtgcactcaaaggtattcttggctacacagacgaggacgttgtttccaatgattttgttggtgattctaggtcaagcatctttgatgccaaggctggtatcggactgagctcttctttcatgaagcttgtgtcttggtatgacaacgagtggggctacagcaaccgggttctggatctgatcgcccacatggctctcgtcagtgccgccgccaagctctgatgtccgtactcgtttctccagtagtagcttagaaaaaaagactgcaattttgacggccattttctgttagctgttgtttggaataagatcaaatgctggaacacttcgaactcgcgcgagactggactcagatccatggcctgtattttagttgtagaagtgggcaaatttgcaccgtagtaccctggcatggttatatgcggaattgttgattgatgagtcgttgtacggtttgtcgacttgatgatatgttgatgtgggagcccctgaatgaggcggtattaatggaaatataggatggcaatggc

SEQ ID NO: 23982 - protein, 412 aa, Zea mays subsp. mays
  peptide (1)..(412): Ceres Seq. ID no. 12443246
  misc_feature (225)..(386): Pfam Name: Pfam Description:  Glyceraldehyde 3-phosphate dehydrogenase
  misc_feature (5)..(408): NCBI GI NO: 2129471 NR Description: glyceraldehyde-3-phosphate dehydrogenase
  misc_feature (5)..(408): NCBI GI NO: 2129472 NR Description: glyceraldehyde-3-phosphate dehydrogenase
  misc_feature (32)..(410): NCBI GI NO: 18072805 NR Description: glyceraldehyde-3-phosphate dehydrogenase
  misc_feature (29)..(409): NCBI GI NO: 27754473 NR Description: putative glyceraldehyde-3-phosphate dehydrogenase
  misc_feature (29)..(409): NCBI GI NO: 15219206 NR Description: putative glyceraldehyde-3-phosphate dehydrogenase
  misc_feature (29)..(409): NCBI GI NO: 21618027 NR Description: putative glyceraldehyde-3-phosphate dehydrogenase
  misc_feature (48)..(408): NCBI GI NO: 3059140 NR Description: NAD-dependent glyceraldehyde-3-phosphatedehydrogenase
  misc_feature (39)..(409): NCBI GI NO: 15219406 NR Description: glyceraldehyde-3-phosphate dehydrogenase, putative
  misc_feature (29)..(409): NCBI GI NO: 25284351 NR Description: hypothetical protein F3O9
  misc_feature (48)..(411): NCBI GI NO: 3059122 NR Description: glyeraldehyde-3-phosphate dehydrogenase
MAALSVPLHAAAGSRAAAADPVKVPCVRSTGSAHFGRAFPSVAVSSLAARHIEPMRAIATQAPPAVPQYLSGEKTKIGINGFGRIGRLVLRIATSRDDIEVVAVNDPFVDAKYMAYMFKYDSTHGPFKGSICVVDDSTLEINGKKVTITSKRDPAEIPWGNFGAEYVVESSGVFTTTDKASAHLKGGAKKVVISAPSADAPMFVVGVNENSYDSKMNVVSNASCTTNCLAPLAKVVHEEFGIVEGLMTTVHATTATQKTVDGPSMKDWRGGRGAGQNIIPSSTGAAKAVGKVLPELNGKLTGMAFRVPTPNVSVVDLTCRIEKNASYDDVKAAIKAASEGALKGILGYTDEDVVSNDFVGDSRSSIFDAKAGIGLSSSFMKLVSWYDNEWGYSNRVLDLIAHMALVSAAAKL

SEQ ID NO: 23983 - protein, 358 aa, Zea mays subsp. mays
  peptide (1)..(358): Ceres Seq. ID no. 12443247
  misc_feature (171)..(332): Pfam Name: Pfam Description:  Glyceraldehyde 3-phosphate dehydrogenase
  misc_feature (1)..(354): NCBI GI NO: 2129471 NR Description: glyceraldehyde-3-phosphate dehydrogenase
  misc_feature (1)..(354): NCBI GI NO: 2129472 NR Description: glyceraldehyde-3-phosphate dehydrogenase
  misc_feature (1)..(356): NCBI GI NO: 18072805 NR Description: glyceraldehyde-3-phosphate dehydrogenase
  misc_feature (1)..(355): NCBI GI NO: 27754473 NR Description: putative glyceraldehyde-3-phosphate dehydrogenase
  misc_feature (1)..(355): NCBI GI NO: 15219206 NR Description: putative glyceraldehyde-3-phosphate dehydrogenase
  misc_feature (1)..(355): NCBI GI NO: 21618027 NR Description: putative glyceraldehyde-3-phosphate dehydrogenase
  misc_feature (1)..(354): NCBI GI NO: 3059140 NR Description: NAD-dependent glyceraldehyde-3-phosphatedehydrogenase
  misc_feature (1)..(355): NCBI GI NO: 15219406 NR Description: glyceraldehyde-3-phosphate dehydrogenase, putative
  misc_feature (1)..(355): NCBI GI NO: 25284351 NR Description: hypothetical protein F3O9
  misc_feature (1)..(357): NCBI GI NO: 3059122 NR Description: glyeraldehyde-3-phosphate dehydrogenase
MRAIATQAPPAVPQYLSGEKTKIGINGFGRIGRLVLRIATSRDDIEVVAVNDPFVDAKYMAYMFKYDSTHGPFKGSICVVDDSTLEINGKKVTITSKRDPAEIPWGNFGAEYVVESSGVFTTTDKASAHLKGGAKKVVISAPSADAPMFVVGVNENSYDSKMNVVSNASCTTNCLAPLAKVVHEEFGIVEGLMTTVHATTATQKTVDGPSMKDWRGGRGAGQNIIPSSTGAAKAVGKVLPELNGKLTGMAFRVPTPNVSVVDLTCRIEKNASYDDVKAAIKAASEGALKGILGYTDEDVVSNDFVGDSRSSIFDAKAGIGLSSSFMKLVSWYDNEWGYSNRVLDLIAHMALVSAAAKL

SEQ ID NO: 23984 - protein, 299 aa, Zea mays subsp. mays
  peptide (1)..(299): Ceres Seq. ID no. 12443248
  misc_feature (112)..(273): Pfam Name: Pfam Description:  Glyceraldehyde 3-phosphate dehydrogenase
  misc_feature (1)..(295): NCBI GI NO: 2129471 NR Description: glyceraldehyde-3-phosphate dehydrogenase
  misc_feature (1)..(295): NCBI GI NO: 2129472 NR Description: glyceraldehyde-3-phosphate dehydrogenase
  misc_feature (1)..(297): NCBI GI NO: 18072805 NR Description: glyceraldehyde-3-phosphate dehydrogenase
  misc_feature (1)..(296): NCBI GI NO: 27754473 NR Description: putative glyceraldehyde-3-phosphate dehydrogenase
  misc_feature (1)..(296): NCBI GI NO: 15219206 NR Description: putative glyceraldehyde-3-phosphate dehydrogenase
  misc_feature (1)..(296): NCBI GI NO: 21618027 NR Description: putative glyceraldehyde-3-phosphate dehydrogenase
  misc_feature (1)..(295): NCBI GI NO: 3059140 NR Description: NAD-dependent glyceraldehyde-3-phosphatedehydrogenase
  misc_feature (1)..(296): NCBI GI NO: 15219406 NR Description: glyceraldehyde-3-phosphate dehydrogenase, putative
  misc_feature (1)..(296): NCBI GI NO: 25284351 NR Description: hypothetical protein F3O9
  misc_feature (1)..(298): NCBI GI NO: 3059122 NR Description: glyeraldehyde-3-phosphate dehydrogenase
MAYMFKYDSTHGPFKGSICVVDDSTLEINGKKVTITSKRDPAEIPWGNFGAEYVVESSGVFTTTDKASAHLKGGAKKVVISAPSADAPMFVVGVNENSYDSKMNVVSNASCTTNCLAPLAKVVHEEFGIVEGLMTTVHATTATQKTVDGPSMKDWRGGRGAGQNIIPSSTGAAKAVGKVLPELNGKLTGMAFRVPTPNVSVVDLTCRIEKNASYDDVKAAIKAASEGALKGILGYTDEDVVSNDFVGDSRSSIFDAKAGIGLSSSFMKLVSWYDNEWGYSNRVLDLIAHMALVSAAAKL

SEQ ID NO: 23985 - DNA, 1476 bp, Zea mays subsp. mays
  misc_feature (1)..(1476): Ceres Seq. ID no. 12410810
atctcttctcctcacaaggcttcctcccaccacctccagtcctccaccggaccaccacctccaccactccctctctcacgacacgcgcaaaccgcttgaaccctagctggcggcgggaggcggaggtggctccgggatgacgcggcggtgctcgcactgcagccacaacgggcacaactcgcggacgtgccccaaccgcggggtcaagatcttcggggtgcacctcaccgatggctcggccatccgcaagagcgcgagcatggggaacctctccctcctctccgcgggatccaccagcggcggcgcttcccccgccgacgggcccgacctcgccgacggcggcgggggctacgcctccgacgacttcgtccaggggtcgtcctccgccagccgcgatcgcaagaaaggtgttccttggactgaagaagaacaccggaggtttttgctgggattacaaaagctcgggaaaggggattggcgaggaatttctcgtaattttgtggtctcaagaacacctactcaagtagcaagtcatgctcaaaagtattttatacgccaatcaaatatgagcagaaggaagagaaggtctagccttttcgacatggttcctgatgagtccatggaccttccaccccttcctggaagtcaagaaccagagatctcacagttaaatcaaccgccactgccgcctcctgtggaggaggaggtggaatcgatggagtcagatacttctgctgtcgcagagagttctggagcttctgctctcatgcccgagagtttacagcctacctatccgatgattgttccagcttatttctcgccgttcttgcaattctcagttcctttctggccaaatcaggaagatggaggcgatcttccccaagaaacacacgagattgtcaagcctgttgcagttcattcccagaatccaattaatgttgatgaactcgtgggcatgtcaaagctaagcatatgggagcatggtcaggagacagtgtctacttctctgtcgctaaatctgctagggggtcaaaataggcagtcggctttccatgcaaaccctcaaacaagagctcaagcctgatcatcccctaccagcacagaaactgtattttagatggaatcctgggcaaaataagctttgctctttttttcttcttctaaatttaagatcaccgagtcacaaggtcactggttggaagtagcttctccgtatttgcggggaaagcctgccctggtttctctccatcatcagagccttcaatattgtcttttttatatatttaagattgaccgtgctctgtagcttgtatcatgtgctgtaagttatgctatgtatgaatgtacctgtagtttgtatggcacgcatggtatgacactcttatgttagcaaagtcattaatgttagtgctgatctttatggttgtaatgttataaacttctaaaaaaaagtataagccagttcttttcaactgc

SEQ ID NO: 23986 - protein, 315 aa, Zea mays subsp. mays
  peptide (1)..(315): Ceres Seq. ID no. 12410811
  misc_feature (91)..(138): Pfam Name: Pfam Description:  Myb-like DNA-binding domain
  misc_feature (1)..(315): NCBI GI NO: 28848628 NR Description: ZmMybst1 [Zea mays]
  misc_feature (1)..(315): NCBI GI NO: 37536856 NR Description: putative Myb-related protein
  misc_feature (1)..(315): NCBI GI NO: 24850307 NR Description: transcription factor MYBS3
  misc_feature (1)..(311): NCBI GI NO: 7705206 NR Description: MybSt1 [Solanum tuberosum]
  misc_feature (1)..(311): NCBI GI NO: 1076660 NR Description: D13F(MYBST1) protein - potato
  misc_feature (108)..(315): NCBI GI NO: 18873832 NR Description: putative DNA binding protein, 5'-partial
  misc_feature (1)..(205): NCBI GI NO: 15238083 NR Description: Myb-related transcription activator-like
  misc_feature (196)..(311): NCBI GI NO: 15238083 NR Description: Myb-related transcription activator-like
  misc_feature (1)..(309): NCBI GI NO: 34906364 NR Description: unnamed protein product
  misc_feature (71)..(308): NCBI GI NO: 2062176 NR Description: Myb-related transcription activator
MTRRCSHCSHNGHNSRTCPNRGVKIFGVHLTDGSAIRKSASMGNLSLLSAGSTSGGASPADGPDLADGGGGYASDDFVQGSSSASRDRKKGVPWTEEEHRRFLLGLQKLGKGDWRGISRNFVVSRTPTQVASHAQKYFIRQSNMSRRKRRSSLFDMVPDESMDLPPLPGSQEPEISQLNQPPLPPPVEEEVESMESDTSAVAESSGASALMPESLQPTYPMIVPAYFSPFLQFSVPFWPNQEDGGDLPQETHEIVKPVAVHSQNPINVDELVGMSKLSIWEHGQETVSTSLSLNLLGGQNRQSAFHANPQTRAQA

SEQ ID NO: 23987 - protein, 274 aa, Zea mays subsp. mays
  peptide (1)..(274): Ceres Seq. ID no. 12410812
  misc_feature (50)..(97): Pfam Name: Pfam Description:  Myb-like DNA-binding domain
  misc_feature (1)..(274): NCBI GI NO: 28848628 NR Description: ZmMybst1 [Zea mays]
  misc_feature (1)..(274): NCBI GI NO: 37536856 NR Description: putative Myb-related protein
  misc_feature (1)..(274): NCBI GI NO: 24850307 NR Description: transcription factor MYBS3
  misc_feature (1)..(270): NCBI GI NO: 7705206 NR Description: MybSt1 [Solanum tuberosum]
  misc_feature (1)..(270): NCBI GI NO: 1076660 NR Description: D13F(MYBST1) protein - potato
  misc_feature (67)..(274): NCBI GI NO: 18873832 NR Description: putative DNA binding protein, 5'-partial
  misc_feature (1)..(164): NCBI GI NO: 15238083 NR Description: Myb-related transcription activator-like
  misc_feature (155)..(270): NCBI GI NO: 15238083 NR Description: Myb-related transcription activator-like
  misc_feature (1)..(268): NCBI GI NO: 34906364 NR Description: unnamed protein product
  misc_feature (30)..(267): NCBI GI NO: 2062176 NR Description: Myb-related transcription activator
MGNLSLLSAGSTSGGASPADGPDLADGGGGYASDDFVQGSSSASRDRKKGVPWTEEEHRRFLLGLQKLGKGDWRGISRNFVVSRTPTQVASHAQKYFIRQSNMSRRKRRSSLFDMVPDESMDLPPLPGSQEPEISQLNQPPLPPPVEEEVESMESDTSAVAESSGASALMPESLQPTYPMIVPAYFSPFLQFSVPFWPNQEDGGDLPQETHEIVKPVAVHSQNPINVDELVGMSKLSIWEHGQETVSTSLSLNLLGGQNRQSAFHANPQTRAQA

SEQ ID NO: 23988 - protein, 172 aa, Zea mays subsp. mays
  peptide (1)..(172): Ceres Seq. ID no. 12410813
  misc_feature (1)..(172): NCBI GI NO: 28848628 NR Description: ZmMybst1 [Zea mays]
  misc_feature (1)..(172): NCBI GI NO: 37536856 NR Description: putative Myb-related protein
  misc_feature (1)..(172): NCBI GI NO: 24850307 NR Description: transcription factor MYBS3
  misc_feature (1)..(168): NCBI GI NO: 7705206 NR Description: MybSt1 [Solanum tuberosum]
  misc_feature (1)..(168): NCBI GI NO: 1076660 NR Description: D13F(MYBST1) protein - potato
  misc_feature (1)..(172): NCBI GI NO: 18873832 NR Description: putative DNA binding protein, 5'-partial
  misc_feature (1)..(62): NCBI GI NO: 15238083 NR Description: Myb-related transcription activator-like
  misc_feature (53)..(168): NCBI GI NO: 15238083 NR Description: Myb-related transcription activator-like
  misc_feature (1)..(166): NCBI GI NO: 34906364 NR Description: unnamed protein product
  misc_feature (1)..(165): NCBI GI NO: 2062176 NR Description: Myb-related transcription activator
MSRRKRRSSLFDMVPDESMDLPPLPGSQEPEISQLNQPPLPPPVEEEVESMESDTSAVAESSGASALMPESLQPTYPMIVPAYFSPFLQFSVPFWPNQEDGGDLPQETHEIVKPVAVHSQNPINVDELVGMSKLSIWEHGQETVSTSLSLNLLGGQNRQSAFHANPQTRAQA

SEQ ID NO: 23989 - DNA, 1445 bp, Zea mays subsp. mays
  misc_feature (1)..(1445): Ceres Seq. ID no. 12373364
atacatcccttgcctctttctcctcccccgcatctgcttctttctctccacgccaacccgacaccgcgcggtcggctcggctcggccatccccgccagctcccgctcgagatcccagcgccatgacgatcggcgtcgctctcttgctcgacctcacctcccgcctgccccgcgccggggcatccgccgcctccgcagccgtccgctcccaccccggtctctctaccaccgccttcgccgcgactgccgcggccgcgttgtcgtcctccggggtgccgctctccgcgcgccacctcttcggttttcatgggtttactgttgctcattgtgatgctggcacacctgcctggatggaatgatggttctgatgatcttgttaatgagattaataccaagattattgattccttgcaatatgcaagaaaagactacttccagaacacaacaaaggaatacccttcagagctgaagccactcttttctgcctttgggttgaaaaattttactatcacaaccctaaggtctttcctattatattatttgccactcatacaacctaaacctcacactggttctgatgatgaggatgatgatctgcttcatgacactcaagagaaaaccatggatctggttactcccttctacaattcagtaaagcaaatcgtgcgggagacttctattgtaacgaccagacgagtatttgaaaggattgtagttcgtcatgtttcacaaagaacagcatggaaacttctcaaagatgcttcaaaatcatcaaaaaggaaagctgcaagggggatgccaactccacagtacacatactgtgttgccagaacaactttccgagcacatgcactgggaataaccgctgcttgggtagtgcaatccataattgaagtatacagatgtttcatccgtaagcctagtgaggactgtgaagcactatcaagcgacggcaatgcacagtttgacgatatgaataaattcagattgtttgggaggaagatttatgggattaccatcaaaagttgtttctctttggttttggcctcagctggagcaggcattggtgccctcgtgcatccagtgcatggacaatggttgggttgtgccttgggagatattgcaggtccaattatcgctataattgtttttgagaagatgcagctaccactatgagaaactggatttttggcgaccactggttttgggtcccttgtgcaagtcatggccttcagtcttctgtgtggttggagatccctgatctaacttgaaagttcacagttgatgaataacagctttcacctcagtgctcgtagttttgtagctccctttacagatgccttcgggtcttgtgggacatgagcatgtacttttgcagttttgctaaattttgtactctcagatttgaagaatccaaacaagaaatttaattttactagatttgag

SEQ ID NO: 23990 - protein, 289 aa, Zea mays subsp. mays
  peptide (1)..(289): Ceres Seq. ID no. 12373365
  misc_feature (21)..(284): NCBI GI NO: 15240548 NR Description: unknown protein; protein id: At5g55610.1
MGLLLLIVMLAHLPGWNDGSDDLVNEINTKIIDSLQYARKDYFQNTTKEYPSELKPLFSAFGLKNFTITTLRSFLLYYLPLIQPKPHTGSDDEDDDLLHDTQEKTMDLVTPFYNSVKQIVRETSIVTTRRVFERIVVRHVSQRTAWKLLKDASKSSKRKAARGMPTPQYTYCVARTTFRAHALGITAAWVVQSIIEVYRCFIRKPSEDCEALSSDGNAQFDDMNKFRLFGRKIYGITIKSCFSLVLASAGAGIGALVHPVHGQWLGCALGDIAGPIIAIIVFEKMQLPL

SEQ ID NO: 23991 - protein, 281 aa, Zea mays subsp. mays
  peptide (1)..(281): Ceres Seq. ID no. 12373366
  misc_feature (13)..(276): NCBI GI NO: 15240548 NR Description: unknown protein; protein id: At5g55610.1
MLAHLPGWNDGSDDLVNEINTKIIDSLQYARKDYFQNTTKEYPSELKPLFSAFGLKNFTITTLRSFLLYYLPLIQPKPHTGSDDEDDDLLHDTQEKTMDLVTPFYNSVKQIVRETSIVTTRRVFERIVVRHVSQRTAWKLLKDASKSSKRKAARGMPTPQYTYCVARTTFRAHALGITAAWVVQSIIEVYRCFIRKPSEDCEALSSDGNAQFDDMNKFRLFGRKIYGITIKSCFSLVLASAGAGIGALVHPVHGQWLGCALGDIAGPIIAIIVFEKMQLPL

SEQ ID NO: 23992 - protein, 184 aa, Zea mays subsp. mays
  peptide (1)..(184): Ceres Seq. ID no. 12373367
  misc_feature (1)..(179): NCBI GI NO: 15240548 NR Description: unknown protein; protein id: At5g55610.1
MDLVTPFYNSVKQIVRETSIVTTRRVFERIVVRHVSQRTAWKLLKDASKSSKRKAARGMPTPQYTYCVARTTFRAHALGITAAWVVQSIIEVYRCFIRKPSEDCEALSSDGNAQFDDMNKFRLFGRKIYGITIKSCFSLVLASAGAGIGALVHPVHGQWLGCALGDIAGPIIAIIVFEKMQLPL

SEQ ID NO: 23993 - DNA, 1149 bp, Zea mays subsp. mays
  misc_feature (1)..(1149): Ceres Seq. ID no. 12341590
cccgttcccatcagatcggatcgatcactcgacgagacatctcgcctcctcggccaatcggcatggcggcgctgctgctccgtagactcgccggaacccaccgcggccgcgtcccgctgggggccgccgccgccgccgcctgcggtggagcgacgctcttctacgcgtcgtcttcccccaccgttgcgcacttggaggagacgggcaaagccgctgagcaagttgcacttaaccctgataagtggctagagttcaagctccaagagaaggcaacagtcagtcacaactcacagttattcaggttttcatttgatccatcaactaaactgggacttgatgttgcctcgtgcctcatcacaagggcacctataggcgaggaagctgagggaagaaggaaatatgtgattcgcccgtacacacctatctctgatccagactctaaagggtattttgacctattgatcaaggtttatcctgatggaaaaatgagtcagtattttgcaagtttgaagccaggagatgttgttgaagtcaaagggcccattgaaaagctcagatacaacccgaacatgaaaaaacaaattgggatgatcgctggtggttctggtataacaccaatgctgcaggttgtcagggctatcctcaaaaaccctaatgacaacactcaggtctccttaatttacgccaatgtgtcaccagatgatatcttgctcaaaagagaactggatagacttgccagtagctatcctaacttcaaggtattttatacagttgataaaccgtcaactgactggaggggtggtgttggttttgtatcaaaggacatggttttgaaaggtttgccaggcccagcggaggactctctgattcttgtttgtggtccaccaggaatgatgaatcacatatctggagacaaggccaaggatagatcacagggcgagctctctggcgttctgaaagacttaggatacaccgcagagatggtatacaaattctgagaagacagtagtagactctgctgacgcacacacattcttgctgccctgcagtcaataaaccacacctgaactttttgttgttgttgcagcatctggctctgaactggaaacagttttgacttgtttccctatgtaataataatgctcatcc

SEQ ID NO: 23994 - protein, 331 aa, Zea mays subsp. mays
  peptide (1)..(331): Ceres Seq. ID no. 12341591
  misc_feature (191)..(293): Pfam Name: Pfam Description:  Oxidoreductase NAD-binding domain
  misc_feature (30)..(331): NCBI GI NO: 18420117 NR Description: cytochrome-b5 reductase - like protein
  misc_feature (21)..(293): NCBI GI NO: 34910260 NR Description: putative cytochrome b5 reductase
  misc_feature (314)..(331): NCBI GI NO: 34910260 NR Description: putative cytochrome b5 reductase
  misc_feature (36)..(331): NCBI GI NO: 14582160 NR Description: cytochrome b5 reductase PP36 [Cucurbita maxima]
  misc_feature (156)..(326): NCBI GI NO: 40716487 NR Description: cytochrome b5 reductase [Musa acuminata]
  misc_feature (31)..(331): NCBI GI NO: 32420209 NR Description: hypothetical protein [Neurospora crassa]
  misc_feature (17)..(331): NCBI GI NO: 40747375 NR Description: hypothetical protein AN0432.2
  misc_feature (68)..(299): NCBI GI NO: 40739560 NR Description: hypothetical protein AN6366.2
  misc_feature (76)..(331): NCBI GI NO: 4336205 NR Description: cytochrome b5 reductase [Zea mays]
  misc_feature (25)..(331): NCBI GI NO: 6322699 NR Description: NADH-cytochrome b5 reductase; Mcr1p
RSHQIGSITRRDISPPRPIGMAALLLRRLAGTHRGRVPLGAAAAAACGGATLFYASSSPTVAHLEETGKAAEQVALNPDKWLEFKLQEKATVSHNSQLFRFSFDPSTKLGLDVASCLITRAPIGEEAEGRRKYVIRPYTPISDPDSKGYFDLLIKVYPDGKMSQYFASLKPGDVVEVKGPIEKLRYNPNMKKQIGMIAGGSGITPMLQVVRAILKNPNDNTQVSLIYANVSPDDILLKRELDRLASSYPNFKVFYTVDKPSTDWRGGVGFVSKDMVLKGLPGPAEDSLILVCGPPGMMNHISGDKAKDRSQGELSGVLKDLGYTAEMVYKF

SEQ ID NO: 23995 - protein, 311 aa, Zea mays subsp. mays
  peptide (1)..(311): Ceres Seq. ID no. 12341592
  misc_feature (171)..(273): Pfam Name: Pfam Description:  Oxidoreductase NAD-binding domain
  misc_feature (10)..(311): NCBI GI NO: 18420117 NR Description: cytochrome-b5 reductase - like protein
  misc_feature (1)..(273): NCBI GI NO: 34910260 NR Description: putative cytochrome b5 reductase
  misc_feature (294)..(311): NCBI GI NO: 34910260 NR Description: putative cytochrome b5 reductase
  misc_feature (16)..(311): NCBI GI NO: 14582160 NR Description: cytochrome b5 reductase PP36 [Cucurbita maxima]
  misc_feature (136)..(306): NCBI GI NO: 40716487 NR Description: cytochrome b5 reductase [Musa acuminata]
  misc_feature (11)..(311): NCBI GI NO: 32420209 NR Description: hypothetical protein [Neurospora crassa]
  misc_feature (1)..(311): NCBI GI NO: 40747375 NR Description: hypothetical protein AN0432.2
  misc_feature (48)..(279): NCBI GI NO: 40739560 NR Description: hypothetical protein AN6366.2
  misc_feature (56)..(311): NCBI GI NO: 4336205 NR Description: cytochrome b5 reductase [Zea mays]
  misc_feature (5)..(311): NCBI GI NO: 6322699 NR Description: NADH-cytochrome b5 reductase; Mcr1p
MAALLLRRLAGTHRGRVPLGAAAAAACGGATLFYASSSPTVAHLEETGKAAEQVALNPDKWLEFKLQEKATVSHNSQLFRFSFDPSTKLGLDVASCLITRAPIGEEAEGRRKYVIRPYTPISDPDSKGYFDLLIKVYPDGKMSQYFASLKPGDVVEVKGPIEKLRYNPNMKKQIGMIAGGSGITPMLQVVRAILKNPNDNTQVSLIYANVSPDDILLKRELDRLASSYPNFKVFYTVDKPSTDWRGGVGFVSKDMVLKGLPGPAEDSLILVCGPPGMMNHISGDKAKDRSQGELSGVLKDLGYTAEMVYKF

SEQ ID NO: 23996 - protein, 170 aa, Zea mays subsp. mays
  peptide (1)..(170): Ceres Seq. ID no. 12341593
  misc_feature (30)..(132): Pfam Name: Pfam Description:  Oxidoreductase NAD-binding domain
  misc_feature (1)..(170): NCBI GI NO: 18420117 NR Description: cytochrome-b5 reductase - like protein
  misc_feature (1)..(132): NCBI GI NO: 34910260 NR Description: putative cytochrome b5 reductase
  misc_feature (153)..(170): NCBI GI NO: 34910260 NR Description: putative cytochrome b5 reductase
  misc_feature (1)..(170): NCBI GI NO: 14582160 NR Description: cytochrome b5 reductase PP36 [Cucurbita maxima]
  misc_feature (1)..(165): NCBI GI NO: 40716487 NR Description: cytochrome b5 reductase [Musa acuminata]
  misc_feature (1)..(170): NCBI GI NO: 32420209 NR Description: hypothetical protein [Neurospora crassa]
  misc_feature (1)..(170): NCBI GI NO: 40747375 NR Description: hypothetical protein AN0432.2
  misc_feature (1)..(138): NCBI GI NO: 40739560 NR Description: hypothetical protein AN6366.2
  misc_feature (1)..(170): NCBI GI NO: 4336205 NR Description: cytochrome b5 reductase [Zea mays]
  misc_feature (1)..(170): NCBI GI NO: 6322699 NR Description: NADH-cytochrome b5 reductase; Mcr1p
MSQYFASLKPGDVVEVKGPIEKLRYNPNMKKQIGMIAGGSGITPMLQVVRAILKNPNDNTQVSLIYANVSPDDILLKRELDRLASSYPNFKVFYTVDKPSTDWRGGVGFVSKDMVLKGLPGPAEDSLILVCGPPGMMNHISGDKAKDRSQGELSGVLKDLGYTAEMVYKF

SEQ ID NO: 23997 - DNA, 1323 bp, Zea mays subsp. mays
  misc_feature (1)..(1323): Ceres Seq. ID no. 12410806
  misc_feature (218)..(218): n is a, c, t, g, unknown, or other
gcctctcttgtcatcatcggcctgccgcctgcccgcctgctcctcctgccccattaacgccgccggctgccgtgccgccgcgtcctgctccccgccaccgcgttcctcgcccgaagcaccgccgcggcctcgcgccaccgcccagaaaccatctccgggcctcgttcgaccgaagcgccttgtgtcatatctccgcgacctagccgccgcccgccgcngacgctgccgtcgtcgtcatcctcgctggcggtgctgtacctgcgtgccagcgcagatccatccgagctcggattgatttcttcctttgctgtactgtcataaccgaactaaaacagtttcagaggaagcatcgcgattgccatggaagctgggagaatggatcagccatttatggctgctatcaatagccagcctttcgtggaggatattgagccagtgaagaaagccagtggggacatgcctgcgacaacaggaagcggatgcttcgaatgcaacatctgccttgattttgcatcagaaccagtggttactttctgtggtcatctctactgctggccttgtatctacgagtggctgcgccctggggtggagtcagctgccagcgacaacagcagttcggcaaggcggcaatgtcctgtatgcaaggcaacactctcaacggacacccttgtgccactatacggccgtggaggcaactcaaagaagtcacttgatggcatggccatcccgcgccgccccatggtacaccgggagactgttgaggagcaacagaatgcacagagcaatgtcaatgaccagcactaccaccagagcatggaagacaactctcagcgccagccattgctgcaagcgcaccaccatcccattcccactgggtttgacttcatctaccctccagcaccagtagggcgtggcttgatccactcaactgccggaggggtgctcggagggatggcagagattgtgcttcccttggcgctccgtggccagatgccagcgagcttgtactacacgaatccataccatgctgcgacgcagaacgtgaaccccaggctgaggcggcatcagatggaaatcgagaggtccctgcaccagatctggttcttcctctgtgtgtttgtggtgctgtgcctgctcttgttctgagacaagactattctatacacctctttgtagatattgaaagtgggagggggatactaatggatgatgcgtatagtaaacagggtaatggtctgtgtcgacaggcatgtgcttaagcatgctgatgtagagttgtaatatgatgagacacggaggtgaaatgcatatttcattcttccc

SEQ ID NO: 23998 - protein, 261 aa, Zea mays subsp. mays
  peptide (1)..(261): Ceres Seq. ID no. 12410807
  misc_feature (44)..(94): Pfam Name: RING finger Pfam Description: Zinc finger, C3HC4 type
  misc_feature (6)..(261): NCBI GI NO: 38346627 NR Description: OSJNBa0074L08.21
  misc_feature (19)..(261): NCBI GI NO: 22795037 NR Description: putative RING protein [Populus x canescens]
  misc_feature (37)..(261): NCBI GI NO: 15236326 NR Description: E3 ubiquitin ligase, RMA1; protein id: At4g03510
  misc_feature (26)..(126): NCBI GI NO: 15235242 NR Description: putative protein; protein id: At4g28270.1
  misc_feature (194)..(261): NCBI GI NO: 15235242 NR Description: putative protein; protein id: At4g28270.1
  misc_feature (29)..(261): NCBI GI NO: 18394721 NR Description: expressed protein; protein id: At1g19310
  misc_feature (39)..(258): NCBI GI NO: 30687607 NR Description: zinc finger
  misc_feature (39)..(173): NCBI GI NO: 7488309 NR Description: RING zinc finger protein F27G19
  misc_feature (40)..(142): NCBI GI NO: 15224062 NR Description: putative RING zinc finger protein
  misc_feature (40)..(142): NCBI GI NO: 21553849 NR Description: putative RING zinc finger protein
MEAGRMDQPFMAAINSQPFVEDIEPVKKASGDMPATTGSGCFECNICLDFASEPVVTFCGHLYCWPCIYEWLRPGVESAASDNSSSARRQCPVCKATLSTDTLVPLYGRGGNSKKSLDGMAIPRRPMVHRETVEEQQNAQSNVNDQHYHQSMEDNSQRQPLLQAHHHPIPTGFDFIYPPAPVGRGLIHSTAGGVLGGMAEIVLPLALRGQMPASLYYTNPYHAATQNVNPRLRRHQMEIERSLHQIWFFLCVFVVLCLLLF

SEQ ID NO: 23999 - protein, 256 aa, Zea mays subsp. mays
  peptide (1)..(256): Ceres Seq. ID no. 12410808
  misc_feature (39)..(89): Pfam Name: RING finger Pfam Description: Zinc finger, C3HC4 type
  misc_feature (1)..(256): NCBI GI NO: 38346627 NR Description: OSJNBa0074L08.21
  misc_feature (14)..(256): NCBI GI NO: 22795037 NR Description: putative RING protein [Populus x canescens]
  misc_feature (32)..(256): NCBI GI NO: 15236326 NR Description: E3 ubiquitin ligase, RMA1; protein id: At4g03510
  misc_feature (21)..(121): NCBI GI NO: 15235242 NR Description: putative protein; protein id: At4g28270.1
  misc_feature (189)..(256): NCBI GI NO: 15235242 NR Description: putative protein; protein id: At4g28270.1
  misc_feature (24)..(256): NCBI GI NO: 18394721 NR Description: expressed protein; protein id: At1g19310
  misc_feature (34)..(253): NCBI GI NO: 30687607 NR Description: zinc finger
  misc_feature (34)..(168): NCBI GI NO: 7488309 NR Description: RING zinc finger protein F27G19
  misc_feature (35)..(137): NCBI GI NO: 15224062 NR Description: putative RING zinc finger protein
  misc_feature (35)..(137): NCBI GI NO: 21553849 NR Description: putative RING zinc finger protein
MDQPFMAAINSQPFVEDIEPVKKASGDMPATTGSGCFECNICLDFASEPVVTFCGHLYCWPCIYEWLRPGVESAASDNSSSARRQCPVCKATLSTDTLVPLYGRGGNSKKSLDGMAIPRRPMVHRETVEEQQNAQSNVNDQHYHQSMEDNSQRQPLLQAHHHPIPTGFDFIYPPAPVGRGLIHSTAGGVLGGMAEIVLPLALRGQMPASLYYTNPYHAATQNVNPRLRRHQMEIERSLHQIWFFLCVFVVLCLLLF

SEQ ID NO: 24000 - protein, 251 aa, Zea mays subsp. mays
  peptide (1)..(251): Ceres Seq. ID no. 12410809
  misc_feature (34)..(84): Pfam Name: RING finger Pfam Description: Zinc finger, C3HC4 type
  misc_feature (1)..(251): NCBI GI NO: 38346627 NR Description: OSJNBa0074L08.21
  misc_feature (9)..(251): NCBI GI NO: 22795037 NR Description: putative RING protein [Populus x canescens]
  misc_feature (27)..(251): NCBI GI NO: 15236326 NR Description: E3 ubiquitin ligase, RMA1; protein id: At4g03510
  misc_feature (16)..(116): NCBI GI NO: 15235242 NR Description: putative protein; protein id: At4g28270.1
  misc_feature (184)..(251): NCBI GI NO: 15235242 NR Description: putative protein; protein id: At4g28270.1
  misc_feature (19)..(251): NCBI GI NO: 18394721 NR Description: expressed protein; protein id: At1g19310
  misc_feature (29)..(248): NCBI GI NO: 30687607 NR Description: zinc finger
  misc_feature (29)..(163): NCBI GI NO: 7488309 NR Description: RING zinc finger protein F27G19
  misc_feature (30)..(132): NCBI GI NO: 15224062 NR Description: putative RING zinc finger protein
  misc_feature (30)..(132): NCBI GI NO: 21553849 NR Description: putative RING zinc finger protein
MAAINSQPFVEDIEPVKKASGDMPATTGSGCFECNICLDFASEPVVTFCGHLYCWPCIYEWLRPGVESAASDNSSSARRQCPVCKATLSTDTLVPLYGRGGNSKKSLDGMAIPRRPMVHRETVEEQQNAQSNVNDQHYHQSMEDNSQRQPLLQAHHHPIPTGFDFIYPPAPVGRGLIHSTAGGVLGGMAEIVLPLALRGQMPASLYYTNPYHAATQNVNPRLRRHQMEIERSLHQIWFFLCVFVVLCLLLF

SEQ ID NO: 24001 - DNA, 1361 bp, Zea mays subsp. mays
  misc_feature (1)..(1361): Ceres Seq. ID no. 13636326
attcgcaccaccgccgcgccgcccaaatcacagccaccgccgccatggccgcctccagccgccctctcgtctccgtgaaagccctggagggcgacatggtcacggacgcccccggcatcgccttaccgcccgtcttcggggcaccgatccgcccggacgtggtccgcttcacccacaagctgctgtcctgcaacaagcgccagccttacgcagtctcccgccgcgctggccaccagacgtcggccgagtcctggggtacgggccgcgctgtgtcccgtatcccccgtgtccccggcggcggcacccaccgcgccggccagggagcattcggcaacatgtgccgcggcggacgcatgttcgcgcccaccaagatctggcgcaagtggcaccgccgcgtcaacgtcaacctccgccgcgtcgccgtcgcctcggcgctcgccgccaccgccgtcccggccctcgtccaggcgcgcggccaccgcatcgagaccgttcccgagatgcccctggttatctccgactcggcagagtccatcgagaagacctcccaggcgctcaagatcctgaagcaggtcggcgcctacgccgacgccgagaaggccaaggactccgtcggcatccgccccggcaagggtaagatgcgcaaccgccgctacattaaccgcaagggcccgctcgtcgtctacggcacagaaggctccaaggtcgtcaaggccttccgcaacctccccggcgtggacgtcgccaacgtcgagcgcctcaacctgctcgacctcgcccccggtggccacctcgggcgctttgtgatctggaccgagagcgcgttcaagaagctcgaggaggtgtatgggagcttcgacgcgccgtcgcagaagaagaagggctttgttctgccgaggcccaagatggccaacgctgacctgggcaggattatcaactctaacgaggtgcagtctgtggttaagccactcaacaaggaggtgaagcgcagggagaagaggaagaacccgctcaagaacatggctgctgtgctcaagctgaacccctacctcggcactgcccggaagatggccacccttgctgaggctgcccgagtcaaggcccggaaggagaagcttgattccaagaggaccaagcttacctcggaggagactgccaaggtcaaggctgccggcaaggcgtggtacaagaccatgatctcggacagtgactacaccgagtttgagaacttcaccaagtggctcggagtgacgcagtgaagcggcctttgagacctagttaagttttgattagttgtgtcgctgaactttgtattgagacgaaatagtattttatcaatctgtcttatcctgcatcttcrc

SEQ ID NO: 24002 - protein, 418 aa, Zea mays subsp. mays
  peptide (1)..(418): Ceres Seq. ID no. 15219393
  misc_feature (39)..(281): Pfam Name: Pfam Description:  Ribosomal protein L4/L1 family
  misc_feature (15)..(418): NCBI GI NO: 34393487 NR Description: putative 60S ribosomal protein L4/L1
  misc_feature (15)..(418): NCBI GI NO: 34897236 NR Description: putative 60S ribosomal protein L1
  misc_feature (16)..(418): NCBI GI NO: 15232723 NR Description: 60S ribosomal protein L4/L1 (RPL4A)
  misc_feature (16)..(418): NCBI GI NO: 21593543 NR Description: 60S ribosomal protein L4-B (L1)
  misc_feature (16)..(418): NCBI GI NO: 15242558 NR Description: 60S ribosomal protein L4/L1 (RPL4D)
  misc_feature (13)..(418): NCBI GI NO: 17367847 NR Description: 60S ribosomal protein L4 (L1)
  misc_feature (16)..(418): NCBI GI NO: 26450328 NR Description: putative 60S ribosomal protein
  misc_feature (112)..(418): NCBI GI NO: 13605831 NR Description: AT5g02870/F9G14_180 [Arabidopsis thaliana]
  misc_feature (64)..(418): NCBI GI NO: 6441068 NR Description: 60S ribosomal protein L4 [Chlamydomonas sp. HS-5]
  misc_feature (13)..(388): NCBI GI NO: 32822849 NR Description: Ribosomal protein [Xenopus laevis]
SHHRRAAQITATAAMAASSRPLVSVKALEGDMVTDAPGIALPPVFGAPIRPDVVRFTHKLLSCNKRQPYAVSRRAGHQTSAESWGTGRAVSRIPRVPGGGTHRAGQGAFGNMCRGGRMFAPTKIWRKWHRRVNVNLRRVAVASALAATAVPALVQARGHRIETVPEMPLVISDSAESIEKTSQALKILKQVGAYADAEKAKDSVGIRPGKGKMRNRRYINRKGPLVVYGTEGSKVVKAFRNLPGVDVANVERLNLLDLAPGGHLGRFVIWTESAFKKLEEVYGSFDAPSQKKKGFVLPRPKMANADLGRIINSNEVQSVVKPLNKEVKRREKRKNPLKNMAAVLKLNPYLGTARKMATLAEAARVKARKEKLDSKRTKLTSEETAKVKAAGKAWYKTMISDSDYTEFENFTKWLGVTQ

SEQ ID NO: 24003 - protein, 404 aa, Zea mays subsp. mays
  peptide (1)..(404): Ceres Seq. ID no. 15219394
  misc_feature (25)..(267): Pfam Name: Pfam Description:  Ribosomal protein L4/L1 family
  misc_feature (1)..(404): NCBI GI NO: 34393487 NR Description: putative 60S ribosomal protein L4/L1
  misc_feature (1)..(404): NCBI GI NO: 34897236 NR Description: putative 60S ribosomal protein L1
  misc_feature (2)..(404): NCBI GI NO: 15232723 NR Description: 60S ribosomal protein L4/L1 (RPL4A)
  misc_feature (2)..(404): NCBI GI NO: 21593543 NR Description: 60S ribosomal protein L4-B (L1)
  misc_feature (2)..(404): NCBI GI NO: 15242558 NR Description: 60S ribosomal protein L4/L1 (RPL4D)
  misc_feature (1)..(404): NCBI GI NO: 17367847 NR Description: 60S ribosomal protein L4 (L1)
  misc_feature (2)..(404): NCBI GI NO: 26450328 NR Description: putative 60S ribosomal protein
  misc_feature (98)..(404): NCBI GI NO: 13605831 NR Description: AT5g02870/F9G14_180 [Arabidopsis thaliana]
  misc_feature (50)..(404): NCBI GI NO: 6441068 NR Description: 60S ribosomal protein L4 [Chlamydomonas sp. HS-5]
  misc_feature (1)..(374): NCBI GI NO: 32822849 NR Description: Ribosomal protein [Xenopus laevis]
MAASSRPLVSVKALEGDMVTDAPGIALPPVFGAPIRPDVVRFTHKLLSCNKRQPYAVSRRAGHQTSAESWGTGRAVSRIPRVPGGGTHRAGQGAFGNMCRGGRMFAPTKIWRKWHRRVNVNLRRVAVASALAATAVPALVQARGHRIETVPEMPLVISDSAESIEKTSQALKILKQVGAYADAEKAKDSVGIRPGKGKMRNRRYINRKGPLVVYGTEGSKVVKAFRNLPGVDVANVERLNLLDLAPGGHLGRFVIWTESAFKKLEEVYGSFDAPSQKKKGFVLPRPKMANADLGRIINSNEVQSVVKPLNKEVKRREKRKNPLKNMAAVLKLNPYLGTARKMATLAEAARVKARKEKLDSKRTKLTSEETAKVKAAGKAWYKTMISDSDYTEFENFTKWLGVTQ

SEQ ID NO: 24004 - protein, 387 aa, Zea mays subsp. mays
  peptide (1)..(387): Ceres Seq. ID no. 15219395
  misc_feature (8)..(250): Pfam Name: Pfam Description:  Ribosomal protein L4/L1 family
  misc_feature (1)..(387): NCBI GI NO: 34393487 NR Description: putative 60S ribosomal protein L4/L1
  misc_feature (1)..(387): NCBI GI NO: 34897236 NR Description: putative 60S ribosomal protein L1
  misc_feature (1)..(387): NCBI GI NO: 15232723 NR Description: 60S ribosomal protein L4/L1 (RPL4A)
  misc_feature (1)..(387): NCBI GI NO: 21593543 NR Description: 60S ribosomal protein L4-B (L1)
  misc_feature (1)..(387): NCBI GI NO: 15242558 NR Description: 60S ribosomal protein L4/L1 (RPL4D)
  misc_feature (1)..(387): NCBI GI NO: 17367847 NR Description: 60S ribosomal protein L4 (L1)
  misc_feature (1)..(387): NCBI GI NO: 26450328 NR Description: putative 60S ribosomal protein
  misc_feature (81)..(387): NCBI GI NO: 13605831 NR Description: AT5g02870/F9G14_180 [Arabidopsis thaliana]
  misc_feature (33)..(387): NCBI GI NO: 6441068 NR Description: 60S ribosomal protein L4 [Chlamydomonas sp. HS-5]
  misc_feature (1)..(357): NCBI GI NO: 32822849 NR Description: Ribosomal protein [Xenopus laevis]
MVTDAPGIALPPVFGAPIRPDVVRFTHKLLSCNKRQPYAVSRRAGHQTSAESWGTGRAVSRIPRVPGGGTHRAGQGAFGNMCRGGRMFAPTKIWRKWHRRVNVNLRRVAVASALAATAVPALVQARGHRIETVPEMPLVISDSAESIEKTSQALKILKQVGAYADAEKAKDSVGIRPGKGKMRNRRYINRKGPLVVYGTEGSKVVKAFRNLPGVDVANVERLNLLDLAPGGHLGRFVIWTESAFKKLEEVYGSFDAPSQKKKGFVLPRPKMANADLGRIINSNEVQSVVKPLNKEVKRREKRKNPLKNMAAVLKLNPYLGTARKMATLAEAARVKARKEKLDSKRTKLTSEETAKVKAAGKAWYKTMISDSDYTEFENFTKWLGVTQ

SEQ ID NO: 24005 - DNA, 1618 bp, Zea mays subsp. mays
  misc_feature (1)..(1618): Ceres Seq. ID no. 12410796
ctcatcgctgacgctgatggcggagcccagtcctcacccgaccgtggtgctgcacgcttgcctcggcgtgggccacctgatccccatggtggagctcgccaagctcctcctccgccgcgacctggctgtcataatcgccgtcccgaccccgccgtcgtccactgccgacttcttcgcctcctccgcatccgccgtcgccacgctcgaggccgccaaccccgccgtatccttccaccacctcccgccgccggactaccctgtcccggacccggaccccttcctccggatgctggacgcgctccgcctcacagtcccctccctcaccgccttcctccgctcccttccctccgtcgccggggctcgtgctcgacctcttctgcggcgacgcgctcgacgcggccgcatccgccggcatcccggcctacttctactacacctcctgcgctggcgacctcgccgcgttcctccaccttccccactacttcgccacgacggagggcgggcccagcttcaaagacatgggcaaggcgctcctccacttccccggcgtcccgccgatcccggcttcggacatgcctcacaccgtgctcgaccgcgcggcccggacctgcgcctcgcggatcgtgcactacggccgcgtgccccgaggctcggggcttgctgatcaacacctacgagtggctggaggcgcgggccgtcagggcactcagggacggcgtctgcgtccctggtcgccccacgccgccggtttaccccatcggcccgattatcgtcaggggccaggaggcggcggagaaaggggagcggcacgcgtgcctgtcgtggctggacgcacagccggaacggagcgtggtgttcctctgcttcggcagcctgggcgccgtctccgcggcgcaggtgaaggagatcgctcgcgggctggagagctccgggcatcggttcctgtgggtcgtgcggagcccgccggaggacccgaccaagttcttcctcgcgcgtcctgagccggacctggactcgctgctcccggaggggtttctggagcgcacgagtgacagggggatggtggtgaagatgtgggcgccgcaggtggaggtgctgcggcacgcagccacgggcgcgttcatgacccactgcgggtggaactcggtgctggaggcggcgtcggccggcgtccccatgctgtgctggccgatgtacgccgagcagagggtgaacaaggtgttcgtagtggacgagatcaaggccggggtggtgatggacggctacgacgaggagctggtgagcgcggcggaggtggagaagaaggtgaggctggtgatggagtctgaggaaggggagaagctcagggagaggctggcgttggcaaaggagaaggcggcagaggcgctggctgatggcgggccgtcgcggatggcgtttgaggagttcttgaaggatatcatgctcgccaaatgatcatgcactaaagtgagcatcatggctgatcctgttacctgatctgttctaatgttagcttggactatgatctatgtgagatatttccgggtttgttcggttgatttctcccaaagagattcgagggagcatgagtttgacaaataaatatatgctgggtgat

SEQ ID NO: 24006 - protein, 484 aa, Zea mays subsp. mays
  peptide (1)..(484): Ceres Seq. ID no. 12410797
  misc_feature (212)..(484): Pfam Name: Pfam Description:  UDP-glucoronosyl and UDP-glucosyl transferase
  misc_feature (212)..(484): NCBI GI NO: 34910228 NR Description: putative flavonol glucosyltransferase
  misc_feature (216)..(483): NCBI GI NO: 34910218 NR Description: putative flavonol glucosyltransferase
  misc_feature (209)..(480): NCBI GI NO: 34910222 NR Description: putative flavonol glucosyltransferase
  misc_feature (215)..(482): NCBI GI NO: 34910204 NR Description: putative flavonol glucosyltransferase
  misc_feature (218)..(478): NCBI GI NO: 22535568 NR Description: putative glucosyltransferase
  misc_feature (216)..(480): NCBI GI NO: 34910206 NR Description: putative flavonol glucosyltransferase
  misc_feature (217)..(472): NCBI GI NO: 34910208 NR Description: putative flavonol glucosyltransferase
  misc_feature (216)..(478): NCBI GI NO: 18401158 NR Description: putative glucosyltransferase
  misc_feature (215)..(478): NCBI GI NO: 21593785 NR Description: putative glucosyltransferase
  misc_feature (216)..(465): NCBI GI NO: 18401155 NR Description: putative glucosyltransferase; protein id:At3g16520
LIADADGGAQSSPDRGAARLPRRGPPDPHGGARQAPPPPRPGCHNRRPDPAVVHCRLLRLLRIRRRHARGRQPRRILPPPPAAGLPCPGPGPLPPDAGRAPPHSPLPHRLPPLPSLRRRGSCSTSSAATRSTRPHPPASRPTSTTPPALATSPRSSTFPTTSPRRRAGPASKTWARRSSTSPASRRSRLRTCLTPCSTARPGPAPRGSCTTAACPEARGLLINTYEWLEARAVRALRDGVCVPGRPTPPVYPIGPIIVRGQEAAEKGERHACLSWLDAQPERSVVFLCFGSLGAVSAAQVKEIARGLESSGHRFLWVVRSPPEDPTKFFLARPEPDLDSLLPEGFLERTSDRGMVVKMWAPQVEVLRHAATGAFMTHCGWNSVLEAASAGVPMLCWPMYAEQRVNKVFVVDEIKAGVVMDGYDEELVSAAEVEKKVRLVMESEEGEKLRERLALAKEKAAEALADGGPSRMAFEEFLKDIMLAK

SEQ ID NO: 24007 - DNA, 1582 bp, Zea mays subsp. mays
  misc_feature (1)..(1582): Ceres Seq. ID no. 12367584
ctttttctctctccccgtctgcctccccctccacaccaggccacgccacacacaggatagcgagcgggagcgacggcggcggcggaggagctagggttttgatccggcctcgccggctaggctgcgccgccccgacgccgaagccatggacagggagcttctagagacgtttgacgcggccaagaaggcggccgacgcggcggcaggggacggcaactcgccggaggctggccgctgcctcgacgcgctgcggcggctgcgcgacattcgcgtcaacaccgacatcctcgtctcgacgcaggttggcaaacgccttcgaccccttactaagcatcctcactcaggcattcaagcagttgctgccgacctttttgggtactggaaaaaggttgtccttgaagagtcaggaaagaaaaatggcggctcagagaatgaaagatcaagtgactcttcaggaaaggttgagaaggcgaggtccgtgaagattgaaaagaactctgcatcagcaagcatgaagcttgagaaaagagatgtggatgttaggggtcagaagcctaacaatgccaaagttgagaagactactagtaatggttccaaagctcaatctgtgaaggtggaaagggtatccaaagaagtcataaggactcctgacgcgaagaggccagcatccgtccccaatggccacccaaagcttacatctcttgtcaaatgcaatgatcctacccgagataaaatccgggaactacttgcctgaagcctttgtaagggtttccagagagactagtgatgatgacagagacgaagtgagaaacatcttggatgaagtcgaggcacgcgacccatacagggttgccgtgacagtagagctctgcactattcgagaggcttggaccttcccactgggactcacagggcgaaatacaggtcaatcatgttcaacctgagggctgaaagcaataccgatttccggaggagggtcctcatcggtctagtggcgccggagaggcttccagacgtatcccccgatgagatggctagcgacgcaaggaagcaagagaacatgcagatcaaggagaaggctctgttcgactgcgagcgtggagcggcaccaaaggcgacgacggaccagttcaagtgtgccagatgtgggcagcggaagacgacctactaccagctgcagactcggagtgctgatgaaccgatgacgacgttcgtcacatgcgtgaactgcaacaatcactggaagttctgctgagtggcagccttggtaaagtgtttacttagttgtgctgagcacactatcctgctgtgatgtgtgtgctctgttagttgtgactggaagttcgacagggcaggctgaacaactcaccttttttccccttttttaccccccgtaaactaggagcagttatcctcttcctctgtcaggcagcctcctgattcattcagattgtactagtcgaacgcgtgaatgttgttgacttgatcgcatcgtcaccagctgtgaattttcttgggtggagttagaatagaatggtgccaagctcagacgatgctgatggattagtggtgctgtgtgctc

SEQ ID NO: 24008 - protein, 202 aa, Zea mays subsp. mays
  peptide (1)..(202): Ceres Seq. ID no. 12367585
  misc_feature (1)..(202): NCBI GI NO: 28876018 NR Description: putative transcription elongation factor
  misc_feature (1)..(202): NCBI GI NO: 15224901 NR Description: putative elongation factor; protein id: At2g38560
  misc_feature (1)..(202): NCBI GI NO: 18377737 NR Description: putative elongation factor [Arabidopsis thaliana]
  misc_feature (38)..(162): NCBI GI NO: 23485845 NR Description: transcription elongation factor TFIIS.h, putative
  misc_feature (35)..(199): NCBI GI NO: 23612520 NR Description: transcription elongation factor s-ii, putative
  misc_feature (3)..(116): NCBI GI NO: 15227992 NR Description: hypothetical protein; protein id: At2g42730.1
MDRELLETFDAAKKAADAAAGDGNSPEAGRCLDALRRLRDIRVNTDILVSTQVGKRLRPLTKHPHSGIQAVAADLFGYWKKVVLEESGKKNGGSENERSSDSSGKVEKARSVKIEKNSASASMKLEKRDVDVRGQKPNNAKVEKTTSNGSKAQSVKVERVSKEVIRTPDAKRPASVPNGHPKLTSLVKCNDPTRDKIRELLA

SEQ ID NO: 24009 - protein, 107 aa, Zea mays subsp. mays
  peptide (1)..(107): Ceres Seq. ID no. 12367586
  misc_feature (67)..(105): Pfam Name: TFIIS Pfam Description: Transcription factor S-II
  misc_feature (1)..(107): NCBI GI NO: 28876018 NR Description: putative transcription elongation factor
  misc_feature (1)..(107): NCBI GI NO: 15224901 NR Description: putative elongation factor; protein id: At2g38560
  misc_feature (1)..(107): NCBI GI NO: 18377737 NR Description: putative elongation factor [Arabidopsis thaliana]
  misc_feature (1)..(107): NCBI GI NO: 23617251 NR Description: putative transcription elongation factor
  misc_feature (1)..(106): NCBI GI NO: 23485845 NR Description: transcription elongation factor TFIIS.h, putative
  misc_feature (1)..(106): NCBI GI NO: 19114535 NR Description: transcription elongation factor s-ii
  misc_feature (1)..(107): NCBI GI NO: 19074096 NR Description: TRANSCRIPTION ELONGATION FACTOR SII
  misc_feature (1)..(106): NCBI GI NO: 23612520 NR Description: transcription elongation factor s-ii, putative
  misc_feature (1)..(107): NCBI GI NO: 17536493 NR Description: Transcription factor II [Caenorhabditis elegans]
  misc_feature (1)..(107): NCBI GI NO: 1373400 NR Description: transcription elongation factor
MFNLRAESNTDFRRRVLIGLVAPERLPDVSPDEMASDARKQENMQIKEKALFDCERGAAPKATTDQFKCARCGQRKTTYYQLQTRSADEPMTTFVTCVNCNNHWKFC

SEQ ID NO: 24010 - DNA, 1816 bp, Zea mays subsp. mays
  misc_feature (1)..(1816): Ceres Seq. ID no. 12352030
  misc_feature (841)..(841): n is a, c, t, g, unknown, or other
aaaatcaccaattctagcaaggcagctcagcagcttttgtagcgagcttcttggagccttgaaatgagtagtagtggtagcctagccaccacgagtagcaagtaggcactataggcactaggaagtagctaaagcagtcataaccatgggttcgctgccgccggtgtacgggcagagacgccccccacacgttgtgatgatcccgtacccggcgcagggccacatcacgccgatgctgcagtttgccaagctcctccatactcgcggcttccacgtcaccttcgtcaacaacgagttcaatcatcgacgccacctgcgtgcgcgagggcccaacgcgctcgacggcacggatgggtttcgcttcgccgccatcgacgacggtctcccgctctttgaagcggacgccacccaggacatccccgcgctctgccactccaccttgaccacctgcctgccccggtttaaggatctcatcgccaggattaacgccgaggctgaggccgagggacaacccaccgtgacatgcgtcgtcggcgacagcaccatgaccttcgcgctccgcgccgcgcgagagctcggcctccgctgcgctacactctggaccgccagcgcctgcggcttcatcggctacttccactaccgccacctcgtcgagcgtggtatggtccccctcaagaacgaggagcagctcacggacgggtacctagacaccatcgtcgactggatcccgggcgcgcccaaggacctgcggctccgggacttcccgagcttcgtgcgcaccacggatccgaacgacgtcatgctcaacttcttcatccacgagacggagggcatgtcgcangcgtcggcggtggtcatcaacaccttcgacgagctcgacgcgacgctgctcgctgccatggcgaagctcctgccgcccatctacaccgtgggcccgctccagctgacggtgcggaacaacgtgcaggcgaacagtcctgtcgctgctattgggtccaacctgtggaaggagcaggaggcgccgctccggtggctcaacggccgtgcgccgcgctccgttgtgtatgtcaacttcgggagcatcacggtgatgtccaacgagcagctggtcgagttcgcgtgggggctggccaacaccggctactacttcctatggaacgtacgcccggacctcgtcaagagtggcgactccgccgggctgccgccagagttctcagctgcgacagagggacgaagcatgctgtctacgtggtgcccgcaggcagctgtgctggagcatgatgccgtgggggtgttcctgacgcactccgggtggaactccacgctggagagtattgcggcggcgttcccatgctgtgctggcccttcttcgccgagcagcagaccaactgccgatacaagtgcaccgagtggggcatcggaaaagagatcggtgacgatgtacagcggggcgaggtagagtcgctcatacgggaggccatggagggggagaaagggcaaggagatgctccggcgcgtgactgaactcagggacagcgccgtggccgctgcagggcctgacggacggtctatgcgcaacgtagacaggctcatcgaagaggtgctcctagcctagattgagcactggtgagcatcctagcagtcatgtgtcttcgcgtctggcactccaatcgattcaaatcctttgtgttttgatgtcaagcgtttaccttcggtacccataaaagtattttctcgtacaaggtggtgattacacgcaaagcacattgttataagttcagtttgtaagatctatgggtaaaaccaagcgttttgt

SEQ ID NO: 24011 - protein, 437 aa, Zea mays subsp. mays
  peptide (1)..(437): Ceres Seq. ID no. 12352031
  misc_feature (15)..(437): Pfam Name: Pfam Description:  UDP-glucoronosyl and UDP-glucosyl transferase
  misc_feature (11)..(437): NCBI GI NO: 38344776 NR Description: OSJNBb0026L04.7
  misc_feature (11)..(437): NCBI GI NO: 38569140 NR Description: OSJNBb0033P05.8
  misc_feature (11)..(437): NCBI GI NO: 38569139 NR Description: OSJNBb0033P05.7
  misc_feature (14)..(307): NCBI GI NO: 38347664 NR Description: OSJNBa0041M06.6
  misc_feature (18)..(437): NCBI GI NO: 38344775 NR Description: OSJNBb0026L04.6
  misc_feature (1)..(437): NCBI GI NO: 38569188 NR Description: OSJNBa0086B14.13
  misc_feature (12)..(437): NCBI GI NO: 38347667 NR Description: OSJNBa0054D14.2
  misc_feature (14)..(402): NCBI GI NO: 15220950 NR Description: UDP-glucose glucosyltransferase, putative
  misc_feature (15)..(437): NCBI GI NO: 17065006 NR Description: UDP-glucose glucosyltransferase
  misc_feature (15)..(437): NCBI GI NO: 15219870 NR Description: UDP-glucose glucosyltransferase
  misc_feature (232)..(232): Xaa is any aa, unknown or other
MGSLPPVYGQRRPPHVVMIPYPAQGHITPMLQFAKLLHTRGFHVTFVNNEFNHRRHLRARGPNALDGTDGFRFAAIDDGLPLFEADATQDIPALCHSTLTTCLPRFKDLIARINAEAEAEGQPTVTCVVGDSTMTFALRAARELGLRCATLWTASACGFIGYFHYRHLVERGMVPLKNEEQLTDGYLDTIVDWIPGAPKDLRLRDFPSFVRTTDPNDVMLNFFIHETEGMSXASAVVINTFDELDATLLAAMAKLLPPIYTVGPLQLTVRNNVQANSPVAAIGSNLWKEQEAPLRWLNGRAPRSVVYVNFGSITVMSNEQLVEFAWGLANTGYYFLWNVRPDLVKSGDSAGLPPEFSAATEGRSMLSTWCPQAAVLEHDAVGVFLTHSGWNSTLESIAAAFPCCAGPSSPSSRPTADTSAPSGASEKRSVTMYSGAR

SEQ ID NO: 24012 - protein, 420 aa, Zea mays subsp. mays
  peptide (1)..(420): Ceres Seq. ID no. 12352032
  misc_feature (1)..(420): Pfam Name: Pfam Description:  UDP-glucoronosyl and UDP-glucosyl transferase
  misc_feature (1)..(420): NCBI GI NO: 38344776 NR Description: OSJNBb0026L04.7
  misc_feature (1)..(420): NCBI GI NO: 38569140 NR Description: OSJNBb0033P05.8
  misc_feature (1)..(420): NCBI GI NO: 38569139 NR Description: OSJNBb0033P05.7
  misc_feature (1)..(290): NCBI GI NO: 38347664 NR Description: OSJNBa0041M06.6
  misc_feature (1)..(420): NCBI GI NO: 38344775 NR Description: OSJNBb0026L04.6
  misc_feature (1)..(420): NCBI GI NO: 38569188 NR Description: OSJNBa0086B14.13
  misc_feature (1)..(420): NCBI GI NO: 38347667 NR Description: OSJNBa0054D14.2
  misc_feature (1)..(385): NCBI GI NO: 15220950 NR Description: UDP-glucose glucosyltransferase, putative
  misc_feature (1)..(420): NCBI GI NO: 17065006 NR Description: UDP-glucose glucosyltransferase
  misc_feature (1)..(420): NCBI GI NO: 15219870 NR Description: UDP-glucose glucosyltransferase
  misc_feature (215)..(215): Xaa is any aa, unknown or other
MIPYPAQGHITPMLQFAKLLHTRGFHVTFVNNEFNHRRHLRARGPNALDGTDGFRFAAIDDGLPLFEADATQDIPALCHSTLTTCLPRFKDLIARINAEAEAEGQPTVTCVVGDSTMTFALRAARELGLRCATLWTASACGFIGYFHYRHLVERGMVPLKNEEQLTDGYLDTIVDWIPGAPKDLRLRDFPSFVRTTDPNDVMLNFFIHETEGMSXASAVVINTFDELDATLLAAMAKLLPPIYTVGPLQLTVRNNVQANSPVAAIGSNLWKEQEAPLRWLNGRAPRSVVYVNFGSITVMSNEQLVEFAWGLANTGYYFLWNVRPDLVKSGDSAGLPPEFSAATEGRSMLSTWCPQAAVLEHDAVGVFLTHSGWNSTLESIAAAFPCCAGPSSPSSRPTADTSAPSGASEKRSVTMYSGAR

SEQ ID NO: 24013 - protein, 408 aa, Zea mays subsp. mays
  peptide (1)..(408): Ceres Seq. ID no. 12352033
  misc_feature (1)..(408): Pfam Name: Pfam Description:  UDP-glucoronosyl and UDP-glucosyl transferase
  misc_feature (1)..(408): NCBI GI NO: 38344776 NR Description: OSJNBb0026L04.7
  misc_feature (1)..(408): NCBI GI NO: 38569140 NR Description: OSJNBb0033P05.8
  misc_feature (1)..(408): NCBI GI NO: 38569139 NR Description: OSJNBb0033P05.7
  misc_feature (1)..(278): NCBI GI NO: 38347664 NR Description: OSJNBa0041M06.6
  misc_feature (1)..(408): NCBI GI NO: 38344775 NR Description: OSJNBb0026L04.6
  misc_feature (1)..(408): NCBI GI NO: 38569188 NR Description: OSJNBa0086B14.13
  misc_feature (1)..(408): NCBI GI NO: 38347667 NR Description: OSJNBa0054D14.2
  misc_feature (1)..(373): NCBI GI NO: 15220950 NR Description: UDP-glucose glucosyltransferase, putative
  misc_feature (1)..(408): NCBI GI NO: 17065006 NR Description: UDP-glucose glucosyltransferase
  misc_feature (1)..(408): NCBI GI NO: 15219870 NR Description: UDP-glucose glucosyltransferase
  misc_feature (203)..(203): Xaa is any aa, unknown or other
MLQFAKLLHTRGFHVTFVNNEFNHRRHLRARGPNALDGTDGFRFAAIDDGLPLFEADATQDIPALCHSTLTTCLPRFKDLIARINAEAEAEGQPTVTCVVGDSTMTFALRAARELGLRCATLWTASACGFIGYFHYRHLVERGMVPLKNEEQLTDGYLDTIVDWIPGAPKDLRLRDFPSFVRTTDPNDVMLNFFIHETEGMSXASAVVINTFDELDATLLAAMAKLLPPIYTVGPLQLTVRNNVQANSPVAAIGSNLWKEQEAPLRWLNGRAPRSVVYVNFGSITVMSNEQLVEFAWGLANTGYYFLWNVRPDLVKSGDSAGLPPEFSAATEGRSMLSTWCPQAAVLEHDAVGVFLTHSGWNSTLESIAAAFPCCAGPSSPSSRPTADTSAPSGASEKRSVTMYSGAR

SEQ ID NO: 24014 - DNA, 1425 bp, Zea mays subsp. mays
  misc_feature (1)..(1425): Ceres Seq. ID no. 12410794
attagcacagactgaagcgcaactagaggatacagccatccattggtagtacacagggtcccacccacaagagaggcatggcggccacatcgtccctgaagagcagccttctcctcccgtctaccatctccgacttcagtggcgcacgcaggccgtctccatctcaacgcagcgccaccatggaatttgatttggcagaagaggagatcacggggggcgagggtgcaggtctcagcggctgcggactccaagaacattctggtcatgggggggactaggttcatcggggtcttcctgtccaggctccttgtcaaggagggccaccaggtcacattgttcaccaggggaaaggcacccataactcagcagctgccaggggagtccgacgcggagtacgcagacttctcctccaaggttctgcacttgaaaggtgacaggcaggacttcgaattcgtgaagacaagcttggctgccaatggatacgatgtggtttacgacatcaatggacgtgaggctgtgcaagttgagcccataattgaggccttgcctaacctgcaacagtacatctattgctcatcggcaggagtgtacctgaaatctgacattcttccgcactgtgaggttgacgcggtggaccccaagagccgtcacaagggcaagctggagacggagagcctgctgacctcgcgcggcgtgaaactggacgtccatcaggcccgtgtacatctacggccccgctcaactacaaccccgtcgaggagtggtttttccaccgcctcaaggccggccgccccatccccatccccggcgccggcaaccagatcacgcagctcggccatgtcaaggatctggcaagagccttcaacctggtgctcgggaacccccaggcgagcaagcagatcttcaacatctccggggccaagtatgtcaccttcgacggccttgcgcgggcatgcgcaaaggctggagggttccctgagccggagctcgtccactacaatcccaaggaattcgacttcggcaagaagaaggccttcccattcagagaccagcacttctttgcgtctgtggagaaggcgacgagcgaactcgggtggacgccggagtttgacctcgtccaggggctcaccaactcgtacaacctcgacttcggccgcggcacgttccggaaggaggcggacttcaccacagacgacatgatcctcgacaagaagcttggccaccgtttgatgcatgtctcgggctagctgtacgtacgtacgattagagaagagataaatgatagcaaatcaaaatttgttgttaagtaaagtgagctcttagcttctatcagggacgattattaaggatacccgaattattcctcccaagaacacactcagagaagtaaggtacctcttaggccgaggcttctcctcgagagtc

SEQ ID NO: 24015 - protein, 311 aa, Zea mays subsp. mays
  peptide (1)..(311): Ceres Seq. ID no. 12410795
  misc_feature (1)..(116): Pfam Name: Pfam Description:  NAD dependent epimerase/dehydratase family
  misc_feature (1)..(144): NCBI GI NO: 15217485 NR Description: putative RNA-binding protein; protein id:At1g09340
  misc_feature (1)..(144): NCBI GI NO: 25456171 NR Description: probable RNA binding protein
  misc_feature (1)..(144): NCBI GI NO: 21593201 NR Description: putative RNA-binding protein
  misc_feature (1)..(144): NCBI GI NO: 17064988 NR Description: g5bf protein [Arabidopsis thaliana]
  misc_feature (1)..(144): NCBI GI NO: 25454619 NR Description: hypothetical protein g5bf
  misc_feature (1)..(181): NCBI GI NO: 34398360 NR Description: 38 kDa ribosome-associated protein precursor
  misc_feature (1)..(144): NCBI GI NO: 17232323 NR Description: mRNA-binding protein [Nostoc sp. PCC 7120]
  misc_feature (1)..(144): NCBI GI NO: 23128166 NR Description: hypothetical protein [Nostoc punctiforme]
  misc_feature (1)..(144): NCBI GI NO: 23040971 NR Description: hypothetical protein
  misc_feature (1)..(144): NCBI GI NO: 16330056 NR Description: hypothetical protein [Synechocystis sp. PCC 6803]
MGGTRFIGVFLSRLLVKEGHQVTLFTRGKAPITQQLPGESDAEYADFSSKVLHLKGDRQDFEFVKTSLAANGYDVVYDINGREAVQVEPIIEALPNLQQYIYCSSAGVYLKSDILPHCEVDAVDPKSRHKGKLETESLLTSRGVKLDVHQARVHLRPRSTTTPSRSGFSTASRPAAPSPSPAPATRSRSSAMSRIWQEPSTWCSGTPRRASRSSTSPGPSMSPSTALRGHAQRLEGSLSRSSSTTIPRNSTSARRRPSHSETSTSLRLWRRRRANSGGRRSLTSSRGSPTRTTSTSAAARSGRRRTSPQTT

SEQ ID NO: 24016 - DNA, 1026 bp, Zea mays subsp. mays
  misc_feature (1)..(1026): Ceres Seq. ID no. 12414280
gactcagactcactcccgtcccccctgcctgcctgcgcgcgctctctgcctcgtggcggcgacgacgccctcctccaggtggccaggccatcgtcggatcgtattcctcggccccttctccggtgatgagcacccagaataaaaggctcaaggatgtggaggtcagtttcccaatcgtctacggaaccatttccttctggctcggcaaaaaggccagcgagtataactctcacaagtggactgtatatgtccgctcggcaaacaatgaggatctgagtgtcatagtcaagcgcgcggtgtttcagcttcacccgagtttccagaacccgacgagagtcgtcggagcagccgcctttcgagctgtccgagtcggggtggggagagtttgagatagccataaccctttatttccacagcgatgtctgtgacaagcgcttggatctgttccatcagcttaagctgtatccagaagaggaagctggacctcaatcgaccaaaaagcctgttgtcgtggaaacgtacgatgagattgtcttccccgagcctacagaggcctttttcctacgcgtgcaaaatcatccagcagctaacgtgcccaggcttcctcctggtataaccttgcctcctccaggccctatggaaattgttccgtatgaaaagaagcgaggtgacactaaggatcatcctttgagtcagtggttctcgaatttctctgaggctgacgagcttttgaaactagctgcagctcggcaacaggttcaggttcacatagccaagctgagaaggcagttaaccatgatagaaggaatgccccagcaatcgaaagccttttctgtccctggacagcagtttaggcacatctaatgtagtgcacctggtttgtaaggaagatgttggaatggaacctttcagcaactgcttgacagattgggttctgtgtattcgcattgaagtcgctgccttgggcttgcaaatgacctgtatattctatgaagtgtagtaccgttaggctcataagagaacact

SEQ ID NO: 24017 - protein, 128 aa, Zea mays subsp. mays
  peptide (1)..(128): Ceres Seq. ID no. 12414281
  misc_feature (55)..(126): Pfam Name: Pfam Description:  YEATS family
  misc_feature (45)..(126): NCBI GI NO: 15242448 NR Description: putative protein; protein id: At5g45600
  misc_feature (47)..(126): NCBI GI NO: 15227942 NR Description: unknown protein; protein id: At2g18000.1
  misc_feature (44)..(126): NCBI GI NO: 6324222 NR Description: Yeast homolog of the human leukemogenic proteinAF9
  misc_feature (48)..(126): NCBI GI NO: 5729838 NR Description: glioma-amplified sequence-41
  misc_feature (48)..(126): NCBI GI NO: 13386064 NR Description: glioma-amplified sequence-41 [Mus musculus]
  misc_feature (48)..(126): NCBI GI NO: 9755857 NR Description: NuBI-1 protein [Homo sapiens]
  misc_feature (48)..(126): NCBI GI NO: 34864887 NR Description: similar to glioma-amplified sequence-41
  misc_feature (48)..(126): NCBI GI NO: 18419436 NR Description: GAS41 [Gallus gallus]
  misc_feature (48)..(126): NCBI GI NO: 19920856 NR Description: CG9207-PA [Drosophila melanogaster]
  misc_feature (47)..(126): NCBI GI NO: 39593812 NR Description: Hypothetical protein CBG06140
LRLTPVPPACLRALSASWRRRRPPPGGQAIVGSYSSAPSPVMSTQNKRLKDVEVSFPIVYGTISFWLGKKASEYNSHKWTVYVRSANNEDLSVIVKRAVFQLHPSFQNPTRVVGAAAFRAVRVGVGRV

SEQ ID NO: 24018 - protein, 87 aa, Zea mays subsp. mays
  peptide (1)..(87): Ceres Seq. ID no. 12414282
  misc_feature (14)..(85): Pfam Name: Pfam Description:  YEATS family
  misc_feature (4)..(85): NCBI GI NO: 15242448 NR Description: putative protein; protein id: At5g45600
  misc_feature (6)..(85): NCBI GI NO: 15227942 NR Description: unknown protein; protein id: At2g18000.1
  misc_feature (3)..(85): NCBI GI NO: 6324222 NR Description: Yeast homolog of the human leukemogenic proteinAF9
  misc_feature (7)..(85): NCBI GI NO: 5729838 NR Description: glioma-amplified sequence-41
  misc_feature (7)..(85): NCBI GI NO: 9755857 NR Description: NuBI-1 protein [Homo sapiens]
  misc_feature (7)..(85): NCBI GI NO: 13386064 NR Description: glioma-amplified sequence-41 [Mus musculus]
  misc_feature (7)..(85): NCBI GI NO: 34864887 NR Description: similar to glioma-amplified sequence-41
  misc_feature (7)..(85): NCBI GI NO: 18419436 NR Description: GAS41 [Gallus gallus]
  misc_feature (7)..(85): NCBI GI NO: 19920856 NR Description: CG9207-PA [Drosophila melanogaster]
  misc_feature (6)..(85): NCBI GI NO: 39593812 NR Description: Hypothetical protein CBG06140
MSTQNKRLKDVEVSFPIVYGTISFWLGKKASEYNSHKWTVYVRSANNEDLSVIVKRAVFQLHPSFQNPTRVVGAAAFRAVRVGVGRV

SEQ ID NO: 24019 - protein, 75 aa, Zea mays subsp. mays
  peptide (1)..(75): Ceres Seq. ID no. 12414283
  misc_feature (1)..(66): NCBI GI NO: 15242448 NR Description: putative protein; protein id: At5g45600
  misc_feature (1)..(73): NCBI GI NO: 40745868 NR Description: hypothetical protein AN1859.2
MEIVPYEKKRGDTKDHPLSQWFSNFSEADELLKLAAARQQVQVHIAKLRRQLTMIEGMPQQSKAFSVPGQQFRHI

SEQ ID NO: 24020 - DNA, 1864 bp, Zea mays subsp. mays
  misc_feature (1)..(1864): Ceres Seq. ID no. 12363824
gcacgagaccattacctagaacatcctaatcgaaaaactgtcttgcctgttgcctctgcggctttgcctgcgctcacggacggtcactggctcacgctcccctcgcctgcgtcgcctcgcctagacaagagacaagacgcctagtcgcctccgatcgaaatcgaatcgagtcgggtgggctcgggcccggtcttgttgtcttgtctcccagctaggaatagcgcaacgagatccctcgcgcgcgcggaccccggagaggccgagggagggtgacagggcgtgtcctcgaccgcgaggggaatgggatcggagggacgggcctggaacggcgcgggcatggccgccggcagcggctatggcggcggggtagaggcgaaagcgaccaccacggctgtgtcggccgcggcccccgcggaggttcccacgtcggcggcctccgtcgacatctcgctgccgctcctgaagatgtcgcctcgcatcatagctctctgcaaggaattggtcgaagggtggtcgtcgattgacagctcgctcttctccatcgagaccgtgtccgggggcatcacgaatctattgctgaaggtttctgtcaaagaagacaacggcaatgagtcttctgttactgttcggttgtatggaccaaatacggacttggtgattgataggaaaagggaattgcaggcgataccatatctctcagctgcagggttcggggctcggctacttggaatatttgagaatggagtagttcagtcattcatctatgctcgaacactgtcaccagcagacatgaaagaacctaaaatagcagctgaaattgccaaggagctacgcaaattccatcaagtagacataccagggtctaaataaccacaattgtggaatgatatattcaagtttttgaagaaagctgcagcattgaagtttgaggataacatgaagcagaagagatatgaaaagatctcatttagagaaatacaagatgaagttcaagaacttaaggatctcttggacattctgcgcgcgcctgtggtttatgcacacaatgacttgctttcaggaaatctgatgctcaatgatttggaagggaagctatattttattgattttgagtatgggtcatacagctaccgtggctatgacattgcaaatcatttcaatgagtatgcaggatttgattgtgactataatttgtacccagataaagatgcccagtatcacttcttcaggaattatctacacactgatagacctagtgaggtggatgcacaagatatggaagtactttatgtggaaacaaacactttcagactagcatcgcacatttactgggcattatgggcccttattcaggcaaaggtatccccaattgactttgactatcttggatacttcttcttgcggtatggtgagtacaagaaacaaagggagtcctgcttctccttggcacaaagctttctctccgagctaaaaaatggctagagcctgagaatctgttcacgagtttatactggtgtacgcatgctcggagcgggtacgcgttgtgatcatcgactgctacccagaaactctattatagcggttgtagcagcccctcattgttgtatctgatgttaggttcatcattgtctaaggactagtttggatactctagtatcgagctcaattcatgtgtatgagatggattcgggtgtaacttaaactaatttacacactaatccaactcaacacatgtggattggggtcaatactaaattacccaaacaaagcctaacagggaagtcaccagtggcaaattatgtacttatatttataataataaacacaatcctgatgggttgtgccctgttgaatttgttcttcg

SEQ ID NO: 24021 - protein, 189 aa, Zea mays subsp. mays
  peptide (1)..(189): Ceres Seq. ID no. 12363825
  misc_feature (104)..(189): Pfam Name: Pfam Description:  Choline/ethanolamine kinase
  misc_feature (27)..(189): NCBI GI NO: 15225800 NR Description: putative choline kinase; protein id: At2g26830
  misc_feature (27)..(189): NCBI GI NO: 21593269 NR Description: putative choline kinase [Arabidopsis thaliana]
  misc_feature (72)..(189): NCBI GI NO: 28829950 NR Description: similar to Arabidopsis thaliana (Mouse-ear cress)
  misc_feature (61)..(189): NCBI GI NO: 26328955 NR Description: unnamed protein product [Mus musculus]
  misc_feature (61)..(189): NCBI GI NO: 26340554 NR Description: unnamed protein product [Mus musculus]
  misc_feature (61)..(189): NCBI GI NO: 10092615 NR Description: ethanolamine kinase [Homo sapiens]
  misc_feature (61)..(189): NCBI GI NO: 14194720 NR Description: ETHANOLAMINE KINASE (EKI)
  misc_feature (22)..(189): NCBI GI NO: 14603244 NR Description: Similar to hypothetical protein FLJ10761
  misc_feature (23)..(189): NCBI GI NO: 34880218 NR Description: similar to Ethanolamine kinase-like protein EKI2
  misc_feature (87)..(189): NCBI GI NO: 37786753 NR Description: putative ethanolamine kinase [Mus musculus]
MGSEGRAWNGAGMAAGSGYGGGVEAKATTTAVSAAAPAEVPTSAASVDISLPLLKMSPRIIALCKELVEGWSSIDSSLFSIETVSGGITNLLLKVSVKEDNGNESSVTVRLYGPNTDLVIDRKRELQAIPYLSAAGFGARLLGIFENGVVQSFIYARTLSPADMKEPKIAAEIAKELRKFHQVDIPGSK

SEQ ID NO: 24022 - protein, 181 aa, Zea mays subsp. mays
  peptide (1)..(181): Ceres Seq. ID no. 12363826
  misc_feature (1)..(162): Pfam Name: Pfam Description:  Choline/ethanolamine kinase
  misc_feature (1)..(176): NCBI GI NO: 15225800 NR Description: putative choline kinase; protein id: At2g26830
  misc_feature (1)..(176): NCBI GI NO: 21593269 NR Description: putative choline kinase [Arabidopsis thaliana]
  misc_feature (1)..(170): NCBI GI NO: 28829950 NR Description: similar to Arabidopsis thaliana (Mouse-ear cress)
  misc_feature (1)..(170): NCBI GI NO: 26328955 NR Description: unnamed protein product [Mus musculus]
  misc_feature (1)..(170): NCBI GI NO: 26340554 NR Description: unnamed protein product [Mus musculus]
  misc_feature (1)..(170): NCBI GI NO: 10092615 NR Description: ethanolamine kinase [Homo sapiens]
  misc_feature (1)..(170): NCBI GI NO: 14194720 NR Description: ETHANOLAMINE KINASE (EKI)
  misc_feature (1)..(170): NCBI GI NO: 14603244 NR Description: Similar to hypothetical protein FLJ10761
  misc_feature (1)..(167): NCBI GI NO: 34880218 NR Description: similar to Ethanolamine kinase-like protein EKI2
  misc_feature (1)..(170): NCBI GI NO: 37786753 NR Description: putative ethanolamine kinase [Mus musculus]
MKQKRYEKISFREIQDEVQELKDLLDILRAPVVYAHNDLLSGNLMLNDLEGKLYFIDFEYGSYSYRGYDIANHFNEYAGFDCDYNLYPDKDAQYHFFRNYLHTDRPSEVDAQDMEVLYVETNTFRLASHIYWALWALIQAKVSPIDFDYLGYFFLRYGEYKKQRESCFSLAQSFLSELKNG

SEQ ID NO: 24023 - protein, 177 aa, Zea mays subsp. mays
  peptide (1)..(177): Ceres Seq. ID no. 12363827
  misc_feature (92)..(177): Pfam Name: Pfam Description:  Choline/ethanolamine kinase
  misc_feature (15)..(177): NCBI GI NO: 15225800 NR Description: putative choline kinase; protein id: At2g26830
  misc_feature (15)..(177): NCBI GI NO: 21593269 NR Description: putative choline kinase [Arabidopsis thaliana]
  misc_feature (60)..(177): NCBI GI NO: 28829950 NR Description: similar to Arabidopsis thaliana (Mouse-ear cress)
  misc_feature (49)..(177): NCBI GI NO: 26328955 NR Description: unnamed protein product [Mus musculus]
  misc_feature (49)..(177): NCBI GI NO: 26340554 NR Description: unnamed protein product [Mus musculus]
  misc_feature (49)..(177): NCBI GI NO: 10092615 NR Description: ethanolamine kinase [Homo sapiens]
  misc_feature (49)..(177): NCBI GI NO: 14194720 NR Description: ETHANOLAMINE KINASE (EKI)
  misc_feature (10)..(177): NCBI GI NO: 14603244 NR Description: Similar to hypothetical protein FLJ10761
  misc_feature (11)..(177): NCBI GI NO: 34880218 NR Description: similar to Ethanolamine kinase-like protein EKI2
  misc_feature (75)..(177): NCBI GI NO: 37786753 NR Description: putative ethanolamine kinase [Mus musculus]
MAAGSGYGGGVEAKATTTAVSAAAPAEVPTSAASVDISLPLLKMSPRIIALCKELVEGWSSIDSSLFSIETVSGGITNLLLKVSVKEDNGNESSVTVRLYGPNTDLVIDRKRELQAIPYLSAAGFGARLLGIFENGVVQSFIYARTLSPADMKEPKIAAEIAKELRKFHQVDIPGSK

SEQ ID NO: 24024 - DNA, 1445 bp, Zea mays subsp. mays
  misc_feature (1)..(1445): Ceres Seq. ID no. 12355917
accttcttcccagatcaataggggcgaggcgacaccagcgaggagacgaaatcgtttaaaggcgccagcttgtcttctgttccatttgtggtttcatttcctctgcaaacgatttccattttttctgcacgccgtcagctgatccttttcgccgtagtatccccgagcaaaagagaaaacccttttttttgtgcgctgtgctgtttcgccatctctgttcgtcccaccgaggcaccgactcaatccccattcttggcatctggcttcacaaaacaagaccggttcccgttccctagatctctgcgtagaggcggcggcgaggcacctgaatccggcaaaaaagggttcgcggtttggttgggaggagcgcaggagcccggcgccaaaacccaatcttggcgcccgggctgccgtgcgccatcgtcttctccctgtggtgtttagggagaggagaaggccggtggagatggtgccgtgggaagggtacgtcagcgacgagacgatgggcaccttctcgcccatcgtgctctactggctgtacgccggcggctaccagctgatccttcaccgccggccgcttgagcggtacaggctccacacgcgggacgaggaggaggagaagaacctcgtcagcctctccaccgtcgtccgtggcgtactcctgcagcagctcgtgcaggccatcgtcgcgatgattttgttcatggtgacttctgatagctcaataactgttgttcagccacctatcgtcgtccagatcttccagtttctagttgcaatgttagtgatggactcatggcagtactttgtgcaccgctacatgcaccaaaacaagttcctgtatcggcacatccactcgcagcaccatcggctgattgtcccttacgctatcggggctctgtacaaccacccactggagggcctgcttctggacaccttaggaggcgccatctccttcttggtctccggcatgacgccgaggaccgccgtgttcttcttctgcttcgcagtcctcaagacggtcgacgatcactgcgggctttggctaccgtataacatcttccagcacctgttccagaacaacaccgcctatcacgacatccaccaccagctgcaaggaaccaaatacaactactcccagccattcttctcgatctgggacagaatgctaggaacccacatgccgtacgacttagtgagcaggaaagaaggtggatttgaagcaaggccgtcgcgagactagcttgaagtcatggaagtgtacaggctccggtgaatgagtcagacagaatatggttttttagctgtcatggactcatggttcattttttaaaaaaaaattgtgcagggctgccatttacattgctgtgcagatagtgcatttgaaaatccacacttctgtatgtacccagttatttgtgtaattgattgaacctctcgtcgtg

SEQ ID NO: 24025 - protein, 258 aa, Zea mays subsp. mays
  peptide (1)..(258): Ceres Seq. ID no. 12355918
  misc_feature (13)..(258): NCBI GI NO: 34913184 NR Description: similar to acid phosphatase
  misc_feature (8)..(258): NCBI GI NO: 22330531 NR Description: acid phosphatase, putative; protein id:At1g69640
  misc_feature (8)..(258): NCBI GI NO: 25404823 NR Description: probable sterol desaturase T6C23.16
  misc_feature (8)..(255): NCBI GI NO: 18394095 NR Description: acid phosphatase, putative; protein id:At1g14290
  misc_feature (8)..(255): NCBI GI NO: 25511716 NR Description: F14L17.5 protein - Arabidopsis thaliana
  misc_feature (100)..(255): NCBI GI NO: 34911990 NR Description: P0694A04.28
  misc_feature (6)..(84): NCBI GI NO: 34911990 NR Description: P0694A04.28
  misc_feature (39)..(203): NCBI GI NO: 5360721 NR Description: acid phosphatase [Lupinus albus]
  misc_feature (95)..(240): NCBI GI NO: 19113281 NR Description: hypothetical integral membrane protein
  misc_feature (12)..(80): NCBI GI NO: 19113281 NR Description: hypothetical integral membrane protein
MVPWEGYVSDETMGTFSPIVLYWLYAGGYQLILHRRPLERYRLHTRDEEEEKNLVSLSTVVRGVLLQQLVQAIVAMILFMVTSDSSITVVQPPIVVQIFQFLVAMLVMDSWQYFVHRYMHQNKFLYRHIHSQHHRLIVPYAIGALYNHPLEGLLLDTLGGAISFLVSGMTPRTAVFFFCFAVLKTVDDHCGLWLPYNIFQHLFQNNTAYHDIHHQLQGTKYNYSQPFFSIWDRMLGTHMPYDLVSRKEGGFEARPSRD

SEQ ID NO: 24026 - protein, 246 aa, Zea mays subsp. mays
  peptide (1)..(246): Ceres Seq. ID no. 12355919
  misc_feature (1)..(246): NCBI GI NO: 34913184 NR Description: similar to acid phosphatase
  misc_feature (1)..(246): NCBI GI NO: 22330531 NR Description: acid phosphatase, putative; protein id:At1g69640
  misc_feature (1)..(246): NCBI GI NO: 25404823 NR Description: probable sterol desaturase T6C23.16
  misc_feature (1)..(243): NCBI GI NO: 18394095 NR Description: acid phosphatase, putative; protein id:At1g14290
  misc_feature (1)..(243): NCBI GI NO: 25511716 NR Description: F14L17.5 protein - Arabidopsis thaliana
  misc_feature (88)..(243): NCBI GI NO: 34911990 NR Description: P0694A04.28
  misc_feature (1)..(72): NCBI GI NO: 34911990 NR Description: P0694A04.28
  misc_feature (27)..(191): NCBI GI NO: 5360721 NR Description: acid phosphatase [Lupinus albus]
  misc_feature (83)..(228): NCBI GI NO: 19113281 NR Description: hypothetical integral membrane protein
  misc_feature (1)..(68): NCBI GI NO: 19113281 NR Description: hypothetical integral membrane protein
MGTFSPIVLYWLYAGGYQLILHRRPLERYRLHTRDEEEEKNLVSLSTVVRGVLLQQLVQAIVAMILFMVTSDSSITVVQPPIVVQIFQFLVAMLVMDSWQYFVHRYMHQNKFLYRHIHSQHHRLIVPYAIGALYNHPLEGLLLDTLGGAISFLVSGMTPRTAVFFFCFAVLKTVDDHCGLWLPYNIFQHLFQNNTAYHDIHHQLQGTKYNYSQPFFSIWDRMLGTHMPYDLVSRKEGGFEARPSRD

SEQ ID NO: 24027 - protein, 183 aa, Zea mays subsp. mays
  peptide (1)..(183): Ceres Seq. ID no. 12355920
  misc_feature (1)..(183): NCBI GI NO: 34913184 NR Description: similar to acid phosphatase
  misc_feature (1)..(183): NCBI GI NO: 22330531 NR Description: acid phosphatase, putative; protein id:At1g69640
  misc_feature (1)..(183): NCBI GI NO: 25404823 NR Description: probable sterol desaturase T6C23.16
  misc_feature (1)..(180): NCBI GI NO: 18394095 NR Description: acid phosphatase, putative; protein id:At1g14290
  misc_feature (1)..(180): NCBI GI NO: 25511716 NR Description: F14L17.5 protein - Arabidopsis thaliana
  misc_feature (25)..(180): NCBI GI NO: 34911990 NR Description: P0694A04.28
  misc_feature (1)..(128): NCBI GI NO: 5360721 NR Description: acid phosphatase [Lupinus albus]
  misc_feature (20)..(165): NCBI GI NO: 19113281 NR Description: hypothetical integral membrane protein
  misc_feature (21)..(178): NCBI GI NO: 40746027 NR Description: hypothetical protein AN0640.2
  misc_feature (19)..(162): NCBI GI NO: 32411679 NR Description: hypothetical protein [Neurospora crassa]
MILFMVTSDSSITVVQPPIVVQIFQFLVAMLVMDSWQYFVHRYMHQNKFLYRHIHSQHHRLIVPYAIGALYNHPLEGLLLDTLGGAISFLVSGMTPRTAVFFFCFAVLKTVDDHCGLWLPYNIFQHLFQNNTAYHDIHHQLQGTKYNYSQPFFSIWDRMLGTHMPYDLVSRKEGGFEARPSRD

SEQ ID NO: 24028 - DNA, 1286 bp, Zea mays subsp. mays
  misc_feature (1)..(1286): Ceres Seq. ID no. 12410790
gagagccccgcccccgggaggccgggagagaagagaacacgcgcgtcaggagcgcacaccgcacggcgcacacacacacgcctcccgcggcaagcagcgcaggacaccgacgacgaagcgaggagaggggaggaggcggagccgagcgcccgagcccaaccccgcaaccacgacccacttccccgtcgcgattcgcattgcccttccctcgggttctacccccagcctcgcgccgccgccgccgccgccgcccttgccagagagatcaccccccattcccacaatcccgtccctccctccgtccctcgacgagccgagccctccgcgcggccgtgggatggggcagtgaccggtgagtggcgtggggagccggtgggcggtggcgagggcatatcatggtgcagtgcctggacggggtgaggcagctgctcgcggtcctgctcaattgctgcgacgtcgagctcaagcagccgcgggggctccaagacccccaggtcctcgcgagggagaccgtcttcagcgtgagtgaggtcgaggcgctgtacgagctgtttaagaggatcagcagcgccgtcattgatgatgggctgattaacaaggaggaatttcagttggcgctatttaagaccaacaagaaggagagcctgttcgcggatcgcgtatttgatttatttgacacaaagcacagtggaattttgggatttgaagaatttgctcgtgctctctcagtatttcatcctaatgctccccttgatgagaaaattgatttttcattccggctgtatgatctcaagcagcaaggctatattgagagacaagaggttaagcagatggttgttgcaacacttgccgagtcaggaatgaatctttcggatgaaattgtagagagtataattgacaagacatttgaggaggcagacacaaagcatgatggaagaattgacaaggaagagtggcgcaatctagtcattcggcatccttctttgctgaagaacatgactcttcagtacctcaaggacatcaccactacatttccaagctttgtctttcactctcaggttgatgataactgaaattgatggggttactttgaaaagaaacattagaagatattctcatgggttctgatatggttttcatttttcaaaattgggttgttggattgaaagattgtagtgttgtgaagtacgtgcatgttggattcgaggactcgattttttttgtcaaccttgtttctttcatttgcatgtctggatgcgcatgaataagatatgaagtttatgtct

SEQ ID NO: 24029 - protein, 225 aa, Zea mays subsp. mays
  peptide (1)..(225): Ceres Seq. ID no. 12410791
  misc_feature (166)..(194): Pfam Name: Pfam Description:  EF hand
  misc_feature (1)..(224): NCBI GI NO: 16924116 NR Description: putative calcineurin B-like protein [Oryza sativa]
  misc_feature (1)..(224): NCBI GI NO: 22137326 NR Description: calcineurin B [Pisum sativum]
  misc_feature (1)..(224): NCBI GI NO: 15236778 NR Description: calcineurin B-like protein 3; protein id:At4g26570
  misc_feature (1)..(224): NCBI GI NO: 15241101 NR Description: calcineurin B-like protein 2 (gb|AAC26009
  misc_feature (1)..(224): NCBI GI NO: 30687272 NR Description: calcineurin B-like protein 3 (CBL3)
  misc_feature (1)..(224): NCBI GI NO: 21593228 NR Description: calcineurin B-like protein 2
  misc_feature (31)..(219): NCBI GI NO: 38493047 NR Description: Chain A
  misc_feature (1)..(224): NCBI GI NO: 18414640 NR Description: expressed protein; protein id: At4g16350
  misc_feature (1)..(224): NCBI GI NO: 13448027 NR Description: SOS3-like calcium binding protein
  misc_feature (24)..(224): NCBI GI NO: 18414931 NR Description: calcineurin B-like protein 1; protein id:At4g17615
MVQCLDGVRQLLAVLLNCCDVELKQPRGLQDPQVLARETVFSVSEVEALYELFKRISSAVIDDGLINKEEFQLALFKTNKKESLFADRVFDLFDTKHSGILGFEEFARALSVFHPNAPLDEKIDFSFRLYDLKQQGYIERQEVKQMVVATLAESGMNLSDEIVESIIDKTFEEADTKHDGRIDKEEWRNLVIRHPSLLKNMTLQYLKDITTTFPSFVFHSQVDDN

SEQ ID NO: 24030 - protein, 139 aa, Zea mays subsp. mays
  peptide (1)..(139): Ceres Seq. ID no. 12410792
ESPAPGRPGEKRTRASGAHTARRTHTRLPRQAAQDTDDEARRGEEAEPSARAQPRNHDPLPRRDSHCPSLGFYPQPRAAAAAAALAREITPHSHNPVPPSVPRRAEPSARPWDGAVTGEWRGEPVGGGEGISWCSAWTG

SEQ ID NO: 24031 - protein, 117 aa, Zea mays subsp. mays
  peptide (1)..(117): Ceres Seq. ID no. 12410793
EPRPREAGREENTRVRSAHRTAHTHTPPAASSAGHRRRSEERGGGGAERPSPTPQPRPTSPSRFALPFPRVLPPASRRRRRRRPCQRDHPPFPQSRPSLRPSTSRALRAAVGWGSDR

SEQ ID NO: 24032 - DNA, 1618 bp, Zea mays subsp. mays
  misc_feature (1)..(1618): Ceres Seq. ID no. 13493644
gaaaagaatataataaaataaaaacccagcagcatttctccgccgcccatacgacgacgacggccactcggcgcagtgatttgggcgccccgcaaagcggtggctccaccggccagcgcatcaaaggccctgtggaatatggcgccgcgccgcttgccggggccgggccctcctctttatatatggcgtggcgagcaaacccaaaaccctcgcaggcagaaggcaaacgcggctgcgagcgcggcgccccctcccactatccagccgccgccagcccgcacacccctccctcgcgcgctcagggtttcggaatggaggccgatgcggcggccaagaggacgcgggagagcggggaggacgccaccgcggcggggatctccgccgtcatcccgggatggttctccgagatcagccccatgtggcccggtgaggcgcactctttgaaggtggagaaggtgctgttccaagggaagtcagactaccaaaacgttatggtctttcagtcctctacgtacgggaaggtgctcgtccttgatggagttattcaggttacggagagggatgagtgtgcgtaccaagagatgatcactcacctgcccctttgctccatcaaagatcccaagaaggtgttggttattggagggggtgatggtggtgttctgcgtgaggtttcacggcattcctctgtggaacaaattgacatctgtgaaattgacaagatggtggtagatgtatccaaacaatttttccctcatttagctgttggatttgaagaccctcgtgtgtcattacacattggagatggggttgcctttttgaaaaatgctccagaaggtacttatgacgcagtaattgtggactcatctgatccgataggtcctgctcaagagctttttgagaagcctttcttccagttggtggccagagctttgcgtccaggtggagttgtatgcacccaagcagagagcatatggctacatatacacattattgaagatattgttgtcaattgtcgacaagttttcaaaggctcggttaactatgcttggacaacggtgcctacataccctagcggagttattgggttcatgctttgctccaccgaagggcctgctgttgatttccagcaccctgttttcaacatcgaggaggatgaacatcctatgaaatcaaaaggaccccttaagttctacaactcggagatccacacggcatcattctgtttgccttcttttgcaaagagggtaatcgagtcaaaagcgaactagacgtgaaggtatctccaagggctaagtaccttaggtgcgcaacacagaatttgttgtagtgtgaaaagcggatgcctccctcccttttctccccctttgatgaatagtataagcacaggagatgagatgcaacagttatcggagttatcagtctacatggtcctgaccagtcgtatgtctcggctgcctggtgcagctatgaaaacgttttgcaatagcttttttcggcagtcctcacatcatcacggttgtgtttccgcttccacatcagaatggaatatatatacgtatgaaataaaactgtgtaatggctgctgccatcggatcctttttaaaacaggttcagctct

SEQ ID NO: 24033 - protein, 421 aa, Zea mays subsp. mays
  peptide (1)..(421): Ceres Seq. ID no. 13493645
  misc_feature (131)..(376): Pfam Name: Pfam Description:  Spermine/spermidine synthase
  misc_feature (104)..(421): NCBI GI NO: 12229998 NR Description: Spermidine synthase 1
  misc_feature (115)..(420): NCBI GI NO: 6094330 NR Description: Spermidine synthase 2
  misc_feature (115)..(419): NCBI GI NO: 6094327 NR Description: Spermidine synthase 1
  misc_feature (106)..(421): NCBI GI NO: 6094335 NR Description: Spermidine synthase
  misc_feature (105)..(419): NCBI GI NO: 12230013 NR Description: Spermidine synthase
  misc_feature (116)..(419): NCBI GI NO: 6094328 NR Description: Spermidine synthase 1
  misc_feature (124)..(421): NCBI GI NO: 12229958 NR Description: Spermidine synthase 1
  misc_feature (125)..(419): NCBI GI NO: 6094336 NR Description: Spermidine synthase
  misc_feature (125)..(419): NCBI GI NO: 15150055 NR Description: spermidine synthase [Solanum tuberosum]
  misc_feature (88)..(420): NCBI GI NO: 23495354 NR Description: spermidine synthase [Malus x domestica]
KEYNKIKTQQHFSAAHTTTTATRRSDLGAPQSGGSTGQRIKGPVEYGAAPLAGAGPSSLYMAWRANPKPSQAEGKRGCERGAPSHYPAAASPHTPPSRAQGFGMEADAAAKRTRESGEDATAAGISAVIPGWFSEISPMWPGEAHSLKVEKVLFQGKSDYQNVMVFQSSTYGKVLVLDGVIQVTERDECAYQEMITHLPLCSIKDPKKVLVIGGGDGGVLREVSRHSSVEQIDICEIDKMVVDVSKQFFPHLAVGFEDPRVSLHIGDGVAFLKNAPEGTYDAVIVDSSDPIGPAQELFEKPFFQLVARALRPGGVVCTQAESIWLHIHIIEDIVVNCRQVFKGSVNYAWTTVPTYPSGVIGFMLCSTEGPAVDFQHPVFNIEEDEHPMKSKGPLKFYNSEIHTASFCLPSFAKRVIESKAN

SEQ ID NO: 24034 - protein, 361 aa, Zea mays subsp. mays
  peptide (1)..(361): Ceres Seq. ID no. 13493646
  misc_feature (71)..(316): Pfam Name: Pfam Description:  Spermine/spermidine synthase
  misc_feature (44)..(361): NCBI GI NO: 12229998 NR Description: Spermidine synthase 1
  misc_feature (55)..(360): NCBI GI NO: 6094330 NR Description: Spermidine synthase 2
  misc_feature (55)..(359): NCBI GI NO: 6094327 NR Description: Spermidine synthase 1
  misc_feature (46)..(361): NCBI GI NO: 6094335 NR Description: Spermidine synthase
  misc_feature (45)..(359): NCBI GI NO: 12230013 NR Description: Spermidine synthase
  misc_feature (56)..(359): NCBI GI NO: 6094328 NR Description: Spermidine synthase 1
  misc_feature (64)..(361): NCBI GI NO: 12229958 NR Description: Spermidine synthase 1
  misc_feature (65)..(359): NCBI GI NO: 6094336 NR Description: Spermidine synthase
  misc_feature (65)..(359): NCBI GI NO: 15150055 NR Description: spermidine synthase [Solanum tuberosum]
  misc_feature (28)..(360): NCBI GI NO: 23495354 NR Description: spermidine synthase [Malus x domestica]
MAWRANPKPSQAEGKRGCERGAPSHYPAAASPHTPPSRAQGFGMEADAAAKRTRESGEDATAAGISAVIPGWFSEISPMWPGEAHSLKVEKVLFQGKSDYQNVMVFQSSTYGKVLVLDGVIQVTERDECAYQEMITHLPLCSIKDPKKVLVIGGGDGGVLREVSRHSSVEQIDICEIDKMVVDVSKQFFPHLAVGFEDPRVSLHIGDGVAFLKNAPEGTYDAVIVDSSDPIGPAQELFEKPFFQLVARALRPGGVVCTQAESIWLHIHIIEDIVVNCRQVFKGSVNYAWTTVPTYPSGVIGFMLCSTEGPAVDFQHPVFNIEEDEHPMKSKGPLKFYNSEIHTASFCLPSFAKRVIESKAN

SEQ ID NO: 24035 - protein, 318 aa, Zea mays subsp. mays
  peptide (1)..(318): Ceres Seq. ID no. 13493647
  misc_feature (28)..(273): Pfam Name: Pfam Description:  Spermine/spermidine synthase
  misc_feature (1)..(318): NCBI GI NO: 12229998 NR Description: Spermidine synthase 1
  misc_feature (12)..(317): NCBI GI NO: 6094330 NR Description: Spermidine synthase 2
  misc_feature (12)..(316): NCBI GI NO: 6094327 NR Description: Spermidine synthase 1
  misc_feature (3)..(318): NCBI GI NO: 6094335 NR Description: Spermidine synthase
  misc_feature (2)..(316): NCBI GI NO: 12230013 NR Description: Spermidine synthase
  misc_feature (13)..(316): NCBI GI NO: 6094328 NR Description: Spermidine synthase 1
  misc_feature (21)..(318): NCBI GI NO: 12229958 NR Description: Spermidine synthase 1
  misc_feature (22)..(316): NCBI GI NO: 6094336 NR Description: Spermidine synthase
  misc_feature (22)..(316): NCBI GI NO: 15150055 NR Description: spermidine synthase [Solanum tuberosum]
  misc_feature (1)..(317): NCBI GI NO: 23495354 NR Description: spermidine synthase [Malus x domestica]
MEADAAAKRTRESGEDATAAGISAVIPGWFSEISPMWPGEAHSLKVEKVLFQGKSDYQNVMVFQSSTYGKVLVLDGVIQVTERDECAYQEMITHLPLCSIKDPKKVLVIGGGDGGVLREVSRHSSVEQIDICEIDKMVVDVSKQFFPHLAVGFEDPRVSLHIGDGVAFLKNAPEGTYDAVIVDSSDPIGPAQELFEKPFFQLVARALRPGGVVCTQAESIWLHIHIIEDIVVNCRQVFKGSVNYAWTTVPTYPSGVIGFMLCSTEGPAVDFQHPVFNIEEDEHPMKSKGPLKFYNSEIHTASFCLPSFAKRVIESKAN

SEQ ID NO: 24036 - DNA, 1462 bp, Zea mays subsp. mays
  misc_feature (1)..(1462): Ceres Seq. ID no. 12405153
aaccgagacgggacgagaccagcagccggccaccagcccatccgaaccctgctgctcccctctccgggttcgcgtgaggctgtgtgctgctgggaggagggggaagcggcggcggggcgccatggaggccgagaagaaggcgccggcggtgtcagacgtgggcgcgtgggcgatgaacgtcgtcagctccgtcagcctcatcatggccaacaagcagctcatgtcctcctccggctacgccttcgccttcgccaccacgctgaccgggttccacttcacggtcacggcgctcgtcgggtggatctccaacgccaccggctactccgtctccaagcacgtaccgctctgggagctcgtctggttctctctcgtcgccaacacctccatcaccgggatgaacctcagcctcatgctcaactccgtcggcttctaccagatctccaaactgagcatgattccggtggtctgcctcatggaatgggtgctgaacagcaagcactacaccaccaaggtcatctcggcagtggttgtcgtggccgccggtgtcgggatttgcacggtcacggatgtcgaggtcaatgccaaggggttcatctgcgcttgcgtggcagtgttctgcacgtcgcttcaacagattacaattggttcctttcaaaagaagtacaacattgggtcatttgagctgctgagcaaaactgcaccaatccaggcaatttcactcattatactgggcccctttgtggactactatctaaatggacggtcattgttgaactaccctttttcgggaggggcaactttcttcatcttgctttcctgctcccttgccgtcttctgcaacatgagccaatacctctgcatcggccggttctcagcgacctcgtttcaggtcctgggccacatgaagaccgtgtgcgtgctgatcctcggctggatcctgtttgactcggccctcaccgtgaagaacatcctcgggatgctgctcgccgtgatgggcatggtggtctacagctgggccgtggaagcggagaagaaggcggcagccccggtcccccggatcaagagcgaaatgctcgacggcgaggacgtacctctcaaggccagggtgagcggcgtgcccgcagtcgacctcgaggacggcgagatgaagagctagctgctgcggctgccgcagctgccgctgattcgttcattcttcttgttcttttgtaactgtgcgcgcgcgatcgctcgatccaaagttgcttgtccgtcagccctcagctatcgacactacactgttatttttggccccttgttggggagagtccagttcctacgtgacgacgaccacccccagttcggcgtagatgaaacacaaactagcagaatgcagattttaggatttttttttcaggcggcggggtggagccattcattgtcatggtgacaggactcataatagaaatacaggtaacatgtc

SEQ ID NO: 24037 - protein, 384 aa, Zea mays subsp. mays
  peptide (1)..(384): Ceres Seq. ID no. 12405154
  misc_feature (79)..(384): NCBI GI NO: 33146838 NR Description: transporter-related-like
  misc_feature (41)..(85): NCBI GI NO: 33146838 NR Description: transporter-related-like
  misc_feature (42)..(382): NCBI GI NO: 18394949 NR Description: expressed protein; protein id: At1g21070
  misc_feature (42)..(382): NCBI GI NO: 21536703 NR Description: unknown [Arabidopsis thaliana]
  misc_feature (42)..(382): NCBI GI NO: 18411172 NR Description: expressed protein; protein id: At1g76670
  misc_feature (40)..(383): NCBI GI NO: 15238957 NR Description: putative protein; protein id: At5g42420.1
  misc_feature (74)..(382): NCBI GI NO: 26450366 NR Description: unknown protein [Arabidopsis thaliana]
  misc_feature (40)..(336): NCBI GI NO: 30313364 NR Description: putative transmembrane protein [Oryza sativa]
  misc_feature (36)..(358): NCBI GI NO: 18420440 NR Description: putative protein; protein id: At4g39390
  misc_feature (42)..(336): NCBI GI NO: 15234794 NR Description: hypothetical protein; protein id: At4g09810.1
TETGRDQQPATSPSEPCCSPLRVRVRLCAAGRRGKRRRGAMEAEKKAPAVSDVGAWAMNVVSSVSLIMANKQLMSSSGYAFAFATTLTGFHFTVTALVGWISNATGYSVSKHVPLWELVWFSLVANTSITGMNLSLMLNSVGFYQISKLSMIPVVCLMEWVLNSKHYTTKVISAVVVVAAGVGICTVTDVEVNAKGFICACVAVFCTSLQQITIGSFQKKYNIGSFELLSKTAPIQAISLIILGPFVDYYLNGRSLLNYPFSGGATFFILLSCSLAVFCNMSQYLCIGRFSATSFQVLGHMKTVCVLILGWILFDSALTVKNILGMLLAVMGMVVYSWAVEAEKKAAAPVPRIKSEMLDGEDVPLKARVSGVPAVDLEDGEMKS

SEQ ID NO: 24038 - protein, 344 aa, Zea mays subsp. mays
  peptide (1)..(344): Ceres Seq. ID no. 12405155
  misc_feature (39)..(344): NCBI GI NO: 33146838 NR Description: transporter-related-like
  misc_feature (1)..(45): NCBI GI NO: 33146838 NR Description: transporter-related-like
  misc_feature (2)..(342): NCBI GI NO: 18394949 NR Description: expressed protein; protein id: At1g21070
  misc_feature (2)..(342): NCBI GI NO: 21536703 NR Description: unknown [Arabidopsis thaliana]
  misc_feature (2)..(342): NCBI GI NO: 18411172 NR Description: expressed protein; protein id: At1g76670
  misc_feature (1)..(343): NCBI GI NO: 15238957 NR Description: putative protein; protein id: At5g42420.1
  misc_feature (34)..(342): NCBI GI NO: 26450366 NR Description: unknown protein [Arabidopsis thaliana]
  misc_feature (1)..(296): NCBI GI NO: 30313364 NR Description: putative transmembrane protein [Oryza sativa]
  misc_feature (1)..(318): NCBI GI NO: 18420440 NR Description: putative protein; protein id: At4g39390
  misc_feature (2)..(296): NCBI GI NO: 15234794 NR Description: hypothetical protein; protein id: At4g09810.1
MEAEKKAPAVSDVGAWAMNVVSSVSLIMANKQLMSSSGYAFAFATTLTGFHFTVTALVGWISNATGYSVSKHVPLWELVWFSLVANTSITGMNLSLMLNSVGFYQISKLSMIPVVCLMEWVLNSKHYTTKVISAVVVVAAGVGICTVTDVEVNAKGFICACVAVFCTSLQQITIGSFQKKYNIGSFELLSKTAPIQAISLIILGPFVDYYLNGRSLLNYPFSGGATFFILLSCSLAVFCNMSQYLCIGRFSATSFQVLGHMKTVCVLILGWILFDSALTVKNILGMLLAVMGMVVYSWAVEAEKKAAAPVPRIKSEMLDGEDVPLKARVSGVPAVDLEDGEMKS

SEQ ID NO: 24039 - protein, 327 aa, Zea mays subsp. mays
  peptide (1)..(327): Ceres Seq. ID no. 12405156
  misc_feature (22)..(327): NCBI GI NO: 33146838 NR Description: transporter-related-like
  misc_feature (1)..(28): NCBI GI NO: 33146838 NR Description: transporter-related-like
  misc_feature (1)..(325): NCBI GI NO: 18394949 NR Description: expressed protein; protein id: At1g21070
  misc_feature (1)..(325): NCBI GI NO: 21536703 NR Description: unknown [Arabidopsis thaliana]
  misc_feature (1)..(325): NCBI GI NO: 18411172 NR Description: expressed protein; protein id: At1g76670
  misc_feature (1)..(326): NCBI GI NO: 15238957 NR Description: putative protein; protein id: At5g42420.1
  misc_feature (17)..(325): NCBI GI NO: 26450366 NR Description: unknown protein [Arabidopsis thaliana]
  misc_feature (1)..(279): NCBI GI NO: 30313364 NR Description: putative transmembrane protein [Oryza sativa]
  misc_feature (1)..(301): NCBI GI NO: 18420440 NR Description: putative protein; protein id: At4g39390
  misc_feature (1)..(279): NCBI GI NO: 15234794 NR Description: hypothetical protein; protein id: At4g09810.1
MNVVSSVSLIMANKQLMSSSGYAFAFATTLTGFHFTVTALVGWISNATGYSVSKHVPLWELVWFSLVANTSITGMNLSLMLNSVGFYQISKLSMIPVVCLMEWVLNSKHYTTKVISAVVVVAAGVGICTVTDVEVNAKGFICACVAVFCTSLQQITIGSFQKKYNIGSFELLSKTAPIQAISLIILGPFVDYYLNGRSLLNYPFSGGATFFILLSCSLAVFCNMSQYLCIGRFSATSFQVLGHMKTVCVLILGWILFDSALTVKNILGMLLAVMGMVVYSWAVEAEKKAAAPVPRIKSEMLDGEDVPLKARVSGVPAVDLEDGEMKS

SEQ ID NO: 24040 - DNA, 1444 bp, Zea mays subsp. mays
  misc_feature (1)..(1444): Ceres Seq. ID no. 12342601
ctactcttttctcctggcaacgatttccaaacgcacgcaaacgctgtcacagtttgtcacggcagcggcaacggcaagtcggcaacgttgccgcggcacgtctcctccctctcttttcctgttcgggtagtcgggtgtaccgccattcgtgatcgaaccagactcgagagggagaggaggagggagtccgaggggagagacccaattaactgcagggattggtcgggttcggctccgccttcggagagtcccaagagatgggtggcgcggcggcgggtaccaagtggatccaccacatccagcgcctcagcgcggccaaggtgtcggcggaggcggtggagcggggccagagccgcgtcatcgacgcctccctcaccctaattcgcgagcgcgcaaagctcaaggcagagttgctgcgtgctctgggtggcgtgaaagcttcagcgtcgctcttaggggtccctcttggtcacaactcatcctttttacaaggccctgcatttgctcctccacgcatacgggaggccatttggtgtggaagcacaaactctagcacagaggaaggcaaagaattgaatgatcctcgggtgctaactgatgttggagatgtccccattcacgagatccgtgactgtggtgtcgaagatgacagattaatgcatgtaattagtgagtctgtcaaaacagtgatggaggaggagcctcttcgaccgttggtgttatgaggcgatcattcaatatcttatccagtggttagagctgtgtctgaaaagcttggaggacctgttgacatacttcatcttgatgcacatccagatatctatgattgttttgaagggaacacttattcgcatgcctcgtcatttgccagaataatggaaggtggttatgccaggagactgctacaggttggattgagatcaatcaccaaagaagggcgtgaacaagggaagagatttggtgtggaacagtatgagatgcgaaccttctcaaaggaccgagagaagcttgagaatctgaaacttggggaaggcgtaaagggtgtgtatgtctcagttgatgtggactgccttgacccagcgtttgctcctggggtctctcacatcgaacctggaggcctctccttccgcaatgtcctcaacatccttcagaatttgcagggtgacgttgtcgccgctgatgtggtggagttcaacccacagcgtgacacggtggatgggatgacagccatggtcgccgcgaagctggtccgggagctcactgctaagatctccaagtgagacggtcaggatcgcaccactcttcttgaagcaaagcgaaagggtgggttttgatgtcccggtggttattggtcatggtttctatgtattgagcaccaaattgttcgacatgtgacaggtttatatgttaattaggttgcaataataccataatggtttatttc

SEQ ID NO: 24041 - protein, 155 aa, Zea mays subsp. mays
  peptide (1)..(155): Ceres Seq. ID no. 12342602
  misc_feature (60)..(155): Pfam Name: Pfam Description:  Arginase family
  misc_feature (1)..(155): NCBI GI NO: 32488415 NR Description: OSJNBb0085F13.5
  misc_feature (7)..(155): NCBI GI NO: 15236640 NR Description: arginase; protein id: At4g08900
  misc_feature (7)..(155): NCBI GI NO: 13182957 NR Description: arginase [Brassica napus]
  misc_feature (7)..(155): NCBI GI NO: 12802155 NR Description: arginase [Pinus taeda]
  misc_feature (7)..(155): NCBI GI NO: 15236635 NR Description: putative arginase; protein id: At4g08870
  misc_feature (7)..(155): NCBI GI NO: 21592908 NR Description: putative arginase [Arabidopsis thaliana]
  misc_feature (1)..(155): NCBI GI NO: 3334122 NR Description: Arginase
  misc_feature (61)..(155): NCBI GI NO: 23021440 NR Description: hypothetical protein
  misc_feature (63)..(155): NCBI GI NO: 37537722 NR Description: agmatine ureohydrolase (agmatinase); agmatinase
  misc_feature (58)..(155): NCBI GI NO: 21401567 NR Description: arginase, Arginase family
MGGAAAGTKWIHHIQRLSAAKVSAEAVERGQSRVIDASLTLIRERAKLKAELLRALGGVKASASLLGVPLGHNSSFLQGPAFAPPRIREAIWCGSTNSSTEEGKELNDPRVLTDVGDVPIHEIRDCGVEDDRLMHVISESVKTVMEEEPLRPLVL

SEQ ID NO: 24042 - protein, 134 aa, Zea mays subsp. mays
  peptide (1)..(134): Ceres Seq. ID no. 12342603
  misc_feature (1)..(133): Pfam Name: Pfam Description:  Arginase family
  misc_feature (1)..(134): NCBI GI NO: 32488415 NR Description: OSJNBb0085F13.5
  misc_feature (1)..(134): NCBI GI NO: 15236640 NR Description: arginase; protein id: At4g08900
  misc_feature (1)..(126): NCBI GI NO: 13182957 NR Description: arginase [Brassica napus]
  misc_feature (1)..(134): NCBI GI NO: 12802155 NR Description: arginase [Pinus taeda]
  misc_feature (1)..(134): NCBI GI NO: 15236635 NR Description: putative arginase; protein id: At4g08870
  misc_feature (1)..(134): NCBI GI NO: 21592908 NR Description: putative arginase [Arabidopsis thaliana]
  misc_feature (1)..(134): NCBI GI NO: 3334122 NR Description: Arginase
  misc_feature (1)..(128): NCBI GI NO: 23021440 NR Description: hypothetical protein
  misc_feature (1)..(131): NCBI GI NO: 14600625 NR Description: agmatinase [Aeropyrum pernix]
  misc_feature (1)..(134): NCBI GI NO: 37537722 NR Description: agmatine ureohydrolase (agmatinase); agmatinase
MEGGYARRLLQVGLRSITKEGREQGKRFGVEQYEMRTFSKDREKLENLKLGEGVKGVYVSVDVDCLDPAFAPGVSHIEPGGLSFRNVLNILQNLQGDVVAADVVEFNPQRDTVDGMTAMVAAKLVRELTAKISK

SEQ ID NO: 24043 - protein, 126 aa, Zea mays subsp. mays
  peptide (1)..(126): Ceres Seq. ID no. 12342604
LLFSPGNDFQTHANAVTVCHGSGNGKSATLPRHVSSLSFPVRVVGCTAIRDRTRLERERRRESEGRDPINCRDWSGSAPPSESPKRWVARRRVPSGSTTSSASARPRCRRRRWSGARAASSTPPSP

SEQ ID NO: 24044 - DNA, 811 bp, Zea mays subsp. mays
  misc_feature (1)..(811): Ceres Seq. ID no. 12414277
acaggcaagcatctggccacatgtgcactcacacgactcagggcgagaggacagcagggcacaataaccgttccactttggtccataggagcgcatagcacagcacaaggagaggccgagaagcgctttagccgtagccgtagcgataagagtgagctagctggtgcacaccggcatggcggccacggcgtactccgtggcgctcctcggcggcgcgcgcctccccgccgctccgcgctccgccctcctccctcggcgcagcgtctgccagcttcgcttccaagatgcaccgaggctctccctgctccgtgcgaaggccgcttccgaggacacatcggcctccggcgacgagttgatcgaggacctcaaagcgaagtgggacgccgttgaggacaagcccaccgtcctcttgtacggcggcggcgccgtcgtcgccctatggctgacgtccgtggtcgtgggcgccatcaacgccgtgccgctgctccccaagatcctggagctcgttgggctcggctacaccggctggttcgtgtaccgctaccttctctttaaggaaagcaggaaagagttggccgccgacattgagaccttgaagaaaaaaatagctggaacagaataaacgctcatggaaagttttagagcgtcctttcttctttggaaagagatctattcgatcggagaaccaatatgcaactacttgagtactattattgcccatgtattgtgtgctgtatatcttctgtatacaaaggaaggttcgtttgttatgtacgtagtagcattgtagtttaaatgtatcgtattacct

SEQ ID NO: 24045 - protein, 148 aa, Zea mays subsp. mays
  peptide (1)..(148): Ceres Seq. ID no. 12414278
  misc_feature (40)..(148): NCBI GI NO: 18411555 NR Description: expressed protein; protein id: At4g01150
  misc_feature (40)..(148): NCBI GI NO: 687677 NR Description: unknown
  misc_feature (1)..(148): NCBI GI NO: 38175474 NR Description: unknown protein
  misc_feature (50)..(148): NCBI GI NO: 7485852 NR Description: hypothetical protein F20D10
  misc_feature (50)..(148): NCBI GI NO: 18420175 NR Description: expressed protein; protein id: At4g38100
  misc_feature (15)..(147): NCBI GI NO: 34393236 NR Description: unknown protein
  misc_feature (26)..(146): NCBI GI NO: 37536446 NR Description: hypothetical protein
  misc_feature (2)..(147): NCBI GI NO: 18407178 NR Description: expressed protein; protein id: At2g46820
  misc_feature (2)..(147): NCBI GI NO: 21555057 NR Description: unknown [Arabidopsis thaliana]
  misc_feature (44)..(145): NCBI GI NO: 18403896 NR Description: expressed protein; protein id: At1g52220
MAATAYSVALLGGARLPAAPRSALLPRRSVCQLRFQDAPRLSLLRAKAASEDTSASGDELIEDLKAKWDAVEDKPTVLLYGGGAVVALWLTSVVVGAINAVPLLPKILELVGLGYTGWFVYRYLLFKESRKELAADIETLKKKIAGTE

SEQ ID NO: 24046 - protein, 129 aa, Zea mays subsp. mays
  peptide (1)..(129): Ceres Seq. ID no. 12414279
TGKHLATCALTRLRARGQQGTITVPLWSIGAHSTAQGEAEKRFSRSRSDKSELAGAHRHGGHGVLRGAPRRRAPPRRSALRPPPSAQRLPASLPRCTEALPAPCEGRFRGHIGLRRRVDRGPQSEVGRR

SEQ ID NO: 24047 - DNA, 1452 bp, Zea mays subsp. mays
  misc_feature (1)..(1452): Ceres Seq. ID no. 12349889
atgagtggagactggagaaagagccctactaccctagctaagcgcgcacagcggcggccggcgagacacgtgcgagcggcggcgtgaggaaaggcgggcggggtgagagatacctaaccactaagaggctgcggcagcgccgcagcataaccggcaccaggtcaaaaacgacgactgggcaggcaccgtatgcatatcctgaatttcagcaccgcatacactttctacagggcccttgccacaccagacaagcacagacaaacacgcaagcggcaggccatgtcatcaccggcagcaaggagcatcacctgctactccaaaattccagagttcttgttgggcactaatgggcagccaatgcccgcagtggggctcggcacagcatcacacccatttgtggcggaggatgtcaggacatccgtgctcactgcgctggagcttggctaccgccacatcgacactgcgggactctacgcctctgagtgggttgtcggcgaggccatggctgaggcagtgtcgcgtggccttgtggcgtccagggacgagctgtttgtgacatccaaggtgtggtgcacacaatgtcatcctgagcttgtgcttccgtccctcaaggagagcttgaagaaccttcaaatggaatatgttgatttgtacctgattcattggcccatggctgtaaagcctagcaagcctcacttcccaatgaaaagggaggacattgtgccgatggaccttagtggtgtatggcaggcaatggaggaatgccatcgacttggccttgctaaaatgattggtgttagcaatttcacaacaaagaaattgcaggagctgcttgccattgcaaaaattcccccagttgtaaatcaggttgaattgaatcccacttggcagcagaaaaaactaattgagttctgcaatgacaagggtattcatgtgacggcttattctcccctaggaggccaaagaatctctaaactgaatccagtacgacaatctgatatattggaagagattggaaaggctagagggaagtcagtggcccagatttcactgaggtggatatacgagcaaggagcaagcatggtggcaaagagcttgaaaagggagaggcttaaggagaacattgaaatcttcgattgggaattgagtgacgaagatcggtttaagattgatcatatagcacagcgcaagttggtcacagtacagaatctcctgtgtcctgaaggtatctccagtgtggatatcttggatgttgatgttattgaaatatagctgtggtctccatctatttgcaatgggcaaaagaattggtgtacaacatgttggatacatcagaagcagtctttcgcgtttctatgtaatgttcatcttgctaaattcacatgtgcacctttctattgtcaccaatacttttgtaccatttttctggattaatctactattaaaaatgct

SEQ ID NO: 24048 - protein, 360 aa, Zea mays subsp. mays
  peptide (1)..(360): Ceres Seq. ID no. 12349890
  misc_feature (31)..(360): NCBI GI NO: 38344822 NR Description: OSJNBa0064H22.3
  misc_feature (45)..(359): NCBI GI NO: 38344823 NR Description: OSJNBa0064H22.4
  misc_feature (45)..(359): NCBI GI NO: 38344824 NR Description: OSJNBa0064H22.5
  misc_feature (42)..(346): NCBI GI NO: 40781599 NR Description: reductase 1 [Hydrangea macrophylla]
  misc_feature (43)..(356): NCBI GI NO: 2792295 NR Description: unknown [Fragaria x ananassa]
  misc_feature (45)..(332): NCBI GI NO: 40781598 NR Description: reductase 2 [Hydrangea macrophylla]
  misc_feature (45)..(337): NCBI GI NO: 6478216 NR Description: putative NADPH-dependent oxidoreductase
  misc_feature (55)..(337): NCBI GI NO: 112837 NR Description: NAD(P)H dependent 6'-deoxychalcone synthase
  misc_feature (48)..(350): NCBI GI NO: 15218958 NR Description: aldo/keto reductase, putative
  misc_feature (48)..(350): NCBI GI NO: 25283477 NR Description: probable Aldo/keto reductase F23H11.26
MHILNFSTAYTFYRALATPDKHRQTRKRQAMSSPAARSITCYSKIPEFLLGTNGQPMPAVGLGTASHPFVAEDVRTSVLTALELGYRHIDTAGLYASEWVVGEAMAEAVSRGLVASRDELFVTSKVWCTQCHPELVLPSLKESLKNLQMEYVDLYLIHWPMAVKPSKPHFPMKREDIVPMDLSGVWQAMEECHRLGLAKMIGVSNFTTKKLQELLAIAKIPPVVNQVELNPTWQQKKLIEFCNDKGIHVTAYSPLGGQRISKLNPVRQSDILEEIGKARGKSVAQISLRWIYEQGASMVAKSLKRERLKENIEIFDWELSDEDRFKIDHIAQRKLVTVQNLLCPEGISSVDILDVDVIEI

SEQ ID NO: 24049 - protein, 330 aa, Zea mays subsp. mays
  peptide (1)..(330): Ceres Seq. ID no. 12349891
  misc_feature (1)..(330): NCBI GI NO: 38344822 NR Description: OSJNBa0064H22.3
  misc_feature (15)..(329): NCBI GI NO: 38344823 NR Description: OSJNBa0064H22.4
  misc_feature (15)..(329): NCBI GI NO: 38344824 NR Description: OSJNBa0064H22.5
  misc_feature (12)..(316): NCBI GI NO: 40781599 NR Description: reductase 1 [Hydrangea macrophylla]
  misc_feature (13)..(326): NCBI GI NO: 2792295 NR Description: unknown [Fragaria x ananassa]
  misc_feature (15)..(302): NCBI GI NO: 40781598 NR Description: reductase 2 [Hydrangea macrophylla]
  misc_feature (15)..(307): NCBI GI NO: 6478216 NR Description: putative NADPH-dependent oxidoreductase
  misc_feature (25)..(307): NCBI GI NO: 112837 NR Description: NAD(P)H dependent 6'-deoxychalcone synthase
  misc_feature (18)..(320): NCBI GI NO: 15218958 NR Description: aldo/keto reductase, putative
  misc_feature (18)..(320): NCBI GI NO: 25283477 NR Description: probable Aldo/keto reductase F23H11.26
MSSPAARSITCYSKIPEFLLGTNGQPMPAVGLGTASHPFVAEDVRTSVLTALELGYRHIDTAGLYASEWVVGEAMAEAVSRGLVASRDELFVTSKVWCTQCHPELVLPSLKESLKNLQMEYVDLYLIHWPMAVKPSKPHFPMKREDIVPMDLSGVWQAMEECHRLGLAKMIGVSNFTTKKLQELLAIAKIPPVVNQVELNPTWQQKKLIEFCNDKGIHVTAYSPLGGQRISKLNPVRQSDILEEIGKARGKSVAQISLRWIYEQGASMVAKSLKRERLKENIEIFDWELSDEDRFKIDHIAQRKLVTVQNLLCPEGISSVDILDVDVIEI

SEQ ID NO: 24050 - protein, 304 aa, Zea mays subsp. mays
  peptide (1)..(304): Ceres Seq. ID no. 12349892
  misc_feature (1)..(304): NCBI GI NO: 38344822 NR Description: OSJNBa0064H22.3
  misc_feature (1)..(303): NCBI GI NO: 38344823 NR Description: OSJNBa0064H22.4
  misc_feature (1)..(303): NCBI GI NO: 38344824 NR Description: OSJNBa0064H22.5
  misc_feature (1)..(290): NCBI GI NO: 40781599 NR Description: reductase 1 [Hydrangea macrophylla]
  misc_feature (1)..(300): NCBI GI NO: 2792295 NR Description: unknown [Fragaria x ananassa]
  misc_feature (1)..(276): NCBI GI NO: 40781598 NR Description: reductase 2 [Hydrangea macrophylla]
  misc_feature (1)..(281): NCBI GI NO: 6478216 NR Description: putative NADPH-dependent oxidoreductase
  misc_feature (1)..(281): NCBI GI NO: 112837 NR Description: NAD(P)H dependent 6'-deoxychalcone synthase
  misc_feature (1)..(294): NCBI GI NO: 15218958 NR Description: aldo/keto reductase, putative
  misc_feature (1)..(294): NCBI GI NO: 25283477 NR Description: probable Aldo/keto reductase F23H11.26
MPAVGLGTASHPFVAEDVRTSVLTALELGYRHIDTAGLYASEWVVGEAMAEAVSRGLVASRDELFVTSKVWCTQCHPELVLPSLKESLKNLQMEYVDLYLIHWPMAVKPSKPHFPMKREDIVPMDLSGVWQAMEECHRLGLAKMIGVSNFTTKKLQELLAIAKIPPVVNQVELNPTWQQKKLIEFCNDKGIHVTAYSPLGGQRISKLNPVRQSDILEEIGKARGKSVAQISLRWIYEQGASMVAKSLKRERLKENIEIFDWELSDEDRFKIDHIAQRKLVTVQNLLCPEGISSVDILDVDVIEI

SEQ ID NO: 24051 - DNA, 1359 bp, Zea mays subsp. mays
  misc_feature (1)..(1359): Ceres Seq. ID no. 12410786
aaaaaatgccgtgagcgcagcagatgtcgtgcggtgcagtgcagtgcaggtgcgggatctctgaatcgctgacgcccagcctcctctgtcatctccctcctcggacctcgccacctcacgcggaaggaggggaagaggaagcgcggagactggaaatcgggccccaaatccgcttcggtctctcgatcggcgaggcatgattcatacaaccggctaggatggcctcaaaagctataaaaagaaggcctatcagcgctgagactgatacaacaggggaaaaacaaatggatacagcactgtcagatcctgtaacagaacctcttctaggaaacactcctcaggaagaaaatccaagacatatgagcctattacacggtcaggtttctgggatgggacggcacaggagtgtcttcgttggacacatcttttagcagcttttgttgctcaatctgcaagaaacatagtaaatgttctttctgaatttggatatttgctagcaagactctttggttgctcttctgcttccaaaagttcacaaaatggacagacacttccagttaacctcagtccattacaggaagaaaggttaagattgttgagacaaaggatagatgtgccatatgactgctcctctgtcaagcatcaggatgccctgaaagaactttggaagttggcttaccctaacagacaacttcctcctctgaagtcagatctctggaaggagatgggctggcagaactccgatccatccacagattttagagcagctgggttcatgtccttggagaatctaatatattttgccagaaattacccagattcctttcacaggctactgcataaagcagatggtaagagagctgaatgggagtatccttttgcagtaggcggcgtaaacatatcctatatgttagttcaaatgctggatttacagtcaggaaaaatgagaacaaaagctggtgttcactttgttcaactactcgatgatgacggtgtggctttcgataaccttttctgtgtagcatttcaggtgcttgattctcaatggcttgcaaggcgagcgagttatatggaattcaatgaggttctgaagtctacacggggtcagttagagcaagagcttactatcggaggtatttctcgcattcaagacatgccatcattcagaatgctgagaaggtagcgctgtttgtacttcacaggaaaagagatacattttagattccaatatattgtttaaatttgttgtccgttctttcactggattttgaagacgtgacattgtgtatgttattgagtatattgtttgtaatgtcgcagcttaaagctacagatcataatatatgatatgatatcttg

SEQ ID NO: 24052 - protein, 152 aa, Zea mays subsp. mays
  peptide (1)..(152): Ceres Seq. ID no. 12410787
  misc_feature (1)..(132): Pfam Name: Pfam Description:  Protein of unknown function, DUF609
  misc_feature (1)..(150): NCBI GI NO: 18396599 NR Description: expressed protein; protein id: At3g03610
  misc_feature (1)..(150): NCBI GI NO: 21555509 NR Description: unknown [Arabidopsis thaliana]
  misc_feature (1)..(150): NCBI GI NO: 6091761 NR Description: hypothetical protein [Arabidopsis thaliana]
  misc_feature (1)..(152): NCBI GI NO: 14140119 NR Description: putative protein [Oryza sativa]
  misc_feature (1)..(150): NCBI GI NO: 18411543 NR Description: putative protein; protein id: At3g60260
  misc_feature (1)..(150): NCBI GI NO: 18408759 NR Description: hypothetical protein; protein id: At1g67400.1
  misc_feature (1)..(152): NCBI GI NO: 38345956 NR Description: OSJNBb0038F03.14
  misc_feature (1)..(152): NCBI GI NO: 18406626 NR Description: expressed protein; protein id: At2g44770
  misc_feature (1)..(150): NCBI GI NO: 15218859 NR Description: hypothetical protein; protein id: At1g03620.1
  misc_feature (1)..(152): NCBI GI NO: 15810014 NR Description: At2g44770/F16B22.26 [Arabidopsis thaliana]
MGWQNSDPSTDFRAAGFMSLENLIYFARNYPDSFHRLLHKADGKRAEWEYPFAVGGVNISYMLVQMLDLQSGKMRTKAGVHFVQLLDDDGVAFDNLFCVAFQVLDSQWLARRASYMEFNEVLKSTRGQLEQELTIGGISRIQDMPSFRMLRR

SEQ ID NO: 24053 - protein, 135 aa, Zea mays subsp. mays
  peptide (1)..(135): Ceres Seq. ID no. 12410788
  misc_feature (1)..(115): Pfam Name: Pfam Description:  Protein of unknown function, DUF609
  misc_feature (1)..(133): NCBI GI NO: 18396599 NR Description: expressed protein; protein id: At3g03610
  misc_feature (1)..(133): NCBI GI NO: 21555509 NR Description: unknown [Arabidopsis thaliana]
  misc_feature (1)..(133): NCBI GI NO: 6091761 NR Description: hypothetical protein [Arabidopsis thaliana]
  misc_feature (1)..(135): NCBI GI NO: 14140119 NR Description: putative protein [Oryza sativa]
  misc_feature (1)..(133): NCBI GI NO: 18411543 NR Description: putative protein; protein id: At3g60260
  misc_feature (1)..(133): NCBI GI NO: 18408759 NR Description: hypothetical protein; protein id: At1g67400.1
  misc_feature (1)..(135): NCBI GI NO: 38345956 NR Description: OSJNBb0038F03.14
  misc_feature (1)..(135): NCBI GI NO: 18406626 NR Description: expressed protein; protein id: At2g44770
  misc_feature (1)..(133): NCBI GI NO: 15218859 NR Description: hypothetical protein; protein id: At1g03620.1
  misc_feature (1)..(135): NCBI GI NO: 15810014 NR Description: At2g44770/F16B22.26 [Arabidopsis thaliana]
MSLENLIYFARNYPDSFHRLLHKADGKRAEWEYPFAVGGVNISYMLVQMLDLQSGKMRTKAGVHFVQLLDDDGVAFDNLFCVAFQVLDSQWLARRASYMEFNEVLKSTRGQLEQELTIGGISRIQDMPSFRMLRR

SEQ ID NO: 24054 - protein, 91 aa, Zea mays subsp. mays
  peptide (1)..(91): Ceres Seq. ID no. 12410789
  misc_feature (1)..(71): Pfam Name: Pfam Description:  Protein of unknown function, DUF609
  misc_feature (1)..(89): NCBI GI NO: 18396599 NR Description: expressed protein; protein id: At3g03610
  misc_feature (1)..(89): NCBI GI NO: 21555509 NR Description: unknown [Arabidopsis thaliana]
  misc_feature (1)..(89): NCBI GI NO: 6091761 NR Description: hypothetical protein [Arabidopsis thaliana]
  misc_feature (1)..(91): NCBI GI NO: 14140119 NR Description: putative protein [Oryza sativa]
  misc_feature (1)..(89): NCBI GI NO: 18411543 NR Description: putative protein; protein id: At3g60260
  misc_feature (1)..(89): NCBI GI NO: 18408759 NR Description: hypothetical protein; protein id: At1g67400.1
  misc_feature (1)..(91): NCBI GI NO: 38345956 NR Description: OSJNBb0038F03.14
  misc_feature (1)..(91): NCBI GI NO: 18406626 NR Description: expressed protein; protein id: At2g44770
  misc_feature (1)..(89): NCBI GI NO: 15218859 NR Description: hypothetical protein; protein id: At1g03620.1
  misc_feature (1)..(91): NCBI GI NO: 15810014 NR Description: At2g44770/F16B22.26 [Arabidopsis thaliana]
MLVQMLDLQSGKMRTKAGVHFVQLLDDDGVAFDNLFCVAFQVLDSQWLARRASYMEFNEVLKSTRGQLEQELTIGGISRIQDMPSFRMLRR

SEQ ID NO: 24055 - DNA, 1159 bp, Zea mays subsp. mays
  misc_feature (1)..(1159): Ceres Seq. ID no. 12410780
acgggtccacgacagtgccggatagaatcggtccaccactccccgtaccccgaactacctgacctgagagagagaccgtgcctccctcgccgccgccgccgcagcatccctagtcggagaagatggccgagaagccggcaggtcccaccccgaggacgaggatccgaggcggtctcgcggcctcagctccctcctccaggaggctgtcttccgtatctttcaccgcggccccgagcaagatcaagaaggttcctgaccctccaaaggccgtgaggccatcaagagccacacctgccaagaagcggccacaagtggatcaagctcagaagcggagagaagaggtcgctgctctgcaggagcagcttaatggcctgcaaagtaagttgcatgaaaaagatgaagctctaagatccgcagagaacttgatcggacgagttactgcggcgaatgaagcagttgatgggttgaggagccagctctccgagaaggaattgctgattgaatctactggttcagagctgcacggtgcaaagatcatgctagcagagaagcaggcggcactggagaagttagagtgggaggcaaatgtgtcgagtacaaaggtggaagagctccaagctgatgtagcttctatggatactgaagtttctgctctgatgaagctgttcaggaaaataacagagagtgacagagcccctccacccagggatagaaatgacgatttgtctttggaatgcgagccagttcaccttgatgacacggtagacgacattgaccttgagaagatggagaaggagatgtcagcctacgtttcggctttgtctgccgcgaaggagaaccctaccgacgagttcatgagagcagtcgcagatgcaagattaagacttcaagccgttgtactctgaccaagactagagcgttgcgttgtactgtgtaaccaacaggagcaagcaagtcgatagtacgtttgctaatcgctgtgttttgccggtggcccccctcagggccttttctgtgttctttctcctaccttgcatctgatcgggcggccgctagtgacagtgagctagcttgatgtaacctgtaacgctatgaaccgtggtgtacgtgactgaacctccgtaatagtagatggtatcgtgtacggtgtacctttttt

SEQ ID NO: 24056 - protein, 260 aa, Zea mays subsp. mays
  peptide (1)..(260): Ceres Seq. ID no. 12410781
  misc_feature (72)..(238): Pfam Name: Pfam Description:  Tropomyosin
  misc_feature (68)..(260): NCBI GI NO: 19716176 NR Description: TMV-MP30 binding protein 2C [Nicotiana tabacum]
  misc_feature (67)..(258): NCBI GI NO: 1732515 NR Description: myosin heavy chain-like protein
  misc_feature (67)..(258): NCBI GI NO: 15241531 NR Description: myosin heavy chain-like protein
MAEKPAGPTPRTRIRGGLAASAPSSRRLSSVSFTAAPSKIKKVPDPPKAVRPSRATPAKKRPQVDQAQKRREEVAALQEQLNGLQSKLHEKDEALRSAENLIGRVTAANEAVDGLRSQLSEKELLIESTGSELHGAKIMLAEKQAALEKLEWEANVSSTKVEELQADVASMDTEVSALMKLFRKITESDRAPPPRDRNDDLSLECEPVHLDDTVDDIDLEKMEKEMSAYVSALSAAKENPTDEFMRAVADARLRLQAVVL

SEQ ID NO: 24057 - DNA, 711 bp, Zea mays subsp. mays
  misc_feature (1)..(711): Ceres Seq. ID no. 12588472
acggccatagaaatcgaccgagcgaatccctcgcatcgcattcgcagcctttgctgcatcacaccaccgcgaaaccccagcagccgcatcgatggcgcctaaggcggagaagaagccggctgcgaagaagccagcggaggaggagcccgctgccgcgaaggccccggcggggaagaagcccaaggccgagaagcgcctcccggcggccaagtcgtccggcaaagaaggcggcgacaagaagggtaagaagaaggcgaagaagtcggtggagacctacaagatctacatcttcaaggtgctgaagcaggtccacccggacatcggcatctcttccaaggccatgtccatcatgaactccttcatcaacgacatcttcgagaagctcgccggcgaggctgccaagcttgcgcgctacaacaagaagcccaccatcacctctcgggagattcaaacctctgtccgccttgtccttcccggcgagctcgccaagcacgcggtctccgagggcaccaaggccgtcactaagttcacatcatcttagatttgaggtagtagctattgggtggcgttggtagctgtgtctcaatttgtctgctactaatagtggtaggagtatccatgtgtagttgggttgcggtaagaattgtgttaaactggcaatatgtttgaaattgctttttatggatgtggaatagttgtgttgcttgttct

SEQ ID NO: 24058 - protein, 149 aa, Zea mays subsp. mays
  peptide (1)..(149): Ceres Seq. ID no. 12588473
  misc_feature (21)..(149): Pfam Name: Pfam Description:  Core histone H2A/H2B/H3/H4
  misc_feature (1)..(149): NCBI GI NO: 122022 NR Description: Histone H2B
  misc_feature (1)..(149): NCBI GI NO: 399854 NR Description: Histone H2B.2
  misc_feature (1)..(149): NCBI GI NO: 1708107 NR Description: Histone H2B
  misc_feature (1)..(149): NCBI GI NO: 3913804 NR Description: Histone H2B.3
  misc_feature (1)..(149): NCBI GI NO: 399853 NR Description: Histone H2B.1
  misc_feature (1)..(149): NCBI GI NO: 34895838 NR Description: putative histone H2B
  misc_feature (1)..(149): NCBI GI NO: 122041 NR Description: Histone H2B-IV
  misc_feature (4)..(149): NCBI GI NO: 34876159 NR Description: similar to Histone H2B 291B [Rattus norvegicus]
  misc_feature (2)..(146): NCBI GI NO: 15223150 NR Description: histone H2B, putative; protein id: At1g08170.1
  misc_feature (1)..(145): NCBI GI NO: 18596433 NR Description: similar to dJ839M11.2 (Core histone H2A/H2B/H3/H4)
MAPKAEKKPAAKKPAEEEPAAAKAPAGKKPKAEKRLPAAKSSGKEGGDKKGKKKAKKSVETYKIYIFKVLKQVHPDIGISSKAMSIMNSFINDIFEKLAGEAAKLARYNKKPTITSREIQTSVRLVLPGELAKHAVSEGTKAVTKFTSS

SEQ ID NO: 24059 - protein, 99 aa, Zea mays subsp. mays
  peptide (1)..(99): Ceres Seq. ID no. 12588474
  misc_feature (31)..(91): Pfam Name: Pfam Description:  TT viral orf 1
  misc_feature (8)..(99): NCBI GI NO: 5032119 NR Description: Ser/Arg-related nuclear matrix protein
  misc_feature (3)..(99): NCBI GI NO: 9843651 NR Description: SRM102 [Arabidopsis thaliana]
  misc_feature (3)..(99): NCBI GI NO: 30684163 NR Description: proline-rich protein -related
  misc_feature (3)..(99): NCBI GI NO: 25408026 NR Description: probable proline-rich protein
  misc_feature (8)..(99): NCBI GI NO: 7949115 NR Description: Ser/Arg-related nuclear matrix protein
  misc_feature (3)..(99): NCBI GI NO: 28972153 NR Description: mKIAA0324 protein [Mus musculus]
  misc_feature (3)..(99): NCBI GI NO: 30424862 NR Description: RIKEN cDNA 5033413A03 [Mus musculus]
  misc_feature (8)..(99): NCBI GI NO: 23274133 NR Description: Similar to serine/arginine repetitive matrix 1
GHRNRPSESLASHSQPLLHHTTAKPQQPHRWRLRRRRSRLRRSQRRRSPLPRRPRRGRSPRPRSASRRPSRPAKKAATRRVRRRRRSRWRPTRSTSSRC

SEQ ID NO: 24060 - DNA, 1607 bp, Zea mays subsp. mays
  misc_feature (1)..(1607): Ceres Seq. ID no. 12387119
atttctcctctcctctcccctcgctagttcgtcgcgtcctcctcagatcaacaaaccgtgtcctgctgctgcctctggaaaccaccgggggatcgccccgcccttttcttcccgcaccccagatcctccgtcccaaaacggcagcttccggaggtctcccgtctccctgctccttccggcgcgacgggtggcccggctcgcggatccggcggtcttcggtcgacggcgaggcggcgctcgtcttggatcgggagtggttgctgaggcgcggagatggtggccgaggcggaagtcatgcatcagtcccccgttccggtgctggaggtgcagtaccaccggcgcgcgacgaccaagggggttgacgacgtcgtcgggatgtccgcgcccgcccccgcggaggttggggttggggttggggttgaggtcgaggtcgaggtcgaggtcgccgtggaggtgcctcgcatggggttggagcagcctgatgtcgcaccaagtttatccacggacatgatacagcagtttgtgcccaacatccgttctggtagcttcgccgacattgggcctcggaggtatatggaggacgagcacatccgaatagatgatctttccgcccatctcggctcgatgttggtctgccctctgcctagcgccttctacggggtctttgacggccatggcggcccggacgccgcagcctacatgaagaggcatgcgatgaggttcttgtttgaggaaagcgagttcccacaggcgtcgcaggtggatgaggtgtacctcgagtccgtggagagctgtgtccgcagagccttcctgcaggcggaccttgccctggctgatgatctggacatcagccggtcctctggaaccacggcgctcactgcattagtgtttggaaggcaactggtggtcgcgaacacgggggactgccgcgcggtgttgtgccggaaaggagtggcgatggagatgtcccgcgaccaccgcgcgaaccacgtggaggagcgcgagagggtggccgcgtcgggcgggtacatcgaggacgggtacctgaacggggtgctgtcggtgacgcgggcgctgggcgactgggacatgaaggcgcccggcgcgtcggcgtcggcggcgctgatcgcggagcccgagttccggcgggcgacgctgggtgaggacgacgagttcctcgtcatggggtgcgacgggatctgggacgtgatgacgagccagcacgcggtgagcctggtgcggcgcggcctgcggcagcacgacgaccccgcgcgctgcgcccgggagctggtgatggaggccaagcggctggagacggccgacaacctgacggtcgtcgtggtgtgcttcgcgccggagatggggtcgccgtttacaccgcagcaacagcaggaggaggagctgcccgcgaggcccaggagctgcaagaagggcctgtcgacggaggcgctgtgcagcctgaggagctggctggatacggaccaccggtagagggaggaagagctggggggtgtgtaaatactggagtattatgctgacagcaacactggttgattatgagcgctgggccatctgttgaggattttacgtaggctggttcagcagcc

SEQ ID NO: 24061 - protein, 405 aa, Zea mays subsp. mays
  peptide (1)..(405): Ceres Seq. ID no. 12387120
  misc_feature (87)..(352): Pfam Name: Pfam Description:  Protein phosphatase 2C
  misc_feature (52)..(401): NCBI GI NO: 34894410 NR Description: putative protein phosphatase
  misc_feature (55)..(401): NCBI GI NO: 25352221 NR Description: phosphoprotein phosphatase (EC 3.1.3.16) 2C
  misc_feature (1)..(401): NCBI GI NO: 30695577 NR Description: protein phosphatase 2C (PP2C), putative
  misc_feature (1)..(401): NCBI GI NO: 15228717 NR Description: protein phosphatase 2C
  misc_feature (45)..(373): NCBI GI NO: 15221047 NR Description: protein phosphatase-2C, putative
  misc_feature (50)..(373): NCBI GI NO: 30684431 NR Description: protein phosphatase 2C (PP2C) -related
  misc_feature (76)..(401): NCBI GI NO: 15226152 NR Description: protein phosphatase 2C
  misc_feature (77)..(403): NCBI GI NO: 10140768 NR Description: putative protein phosphatase-2C [Oryza sativa]
  misc_feature (77)..(403): NCBI GI NO: 37536524 NR Description: putative protein phosphatase-2C
  misc_feature (71)..(401): NCBI GI NO: 20146108 NR Description: protein phosphatase 2C
MVAEAEVMHQSPVPVLEVQYHRRATTKGVDDVVGMSAPAPAEVGVGVGVEVEVEVEVAVEVPRMGLEQPDVAPSLSTDMIQQFVPNIRSGSFADIGPRRYMEDEHIRIDDLSAHLGSMLVCPLPSAFYGVFDGHGGPDAAAYMKRHAMRFLFEESEFPQASQVDEVYLESVESCVRRAFLQADLALADDLDISRSSGTTALTALVFGRQLVVANTGDCRAVLCRKGVAMEMSRDHRANHVEERERVAASGGYIEDGYLNGVLSVTRALGDWDMKAPGASASAALIAEPEFRRATLGEDDEFLVMGCDGIWDVMTSQHAVSLVRRGLRQHDDPARCARELVMEAKRLETADNLTVVVVCFAPEMGSPFTPQQQQEEELPARPRSCKKGLSTEALCSLRSWLDTDHR
